United States Patent Application Publication US 2026/0068890 A1 - sequence listing, part 2

SEQ ID NO: 18 - DNA, 99767 bp, Priestia aryabhattai
  source 1..99767: mol_type = genomic DNA
ttatcagtcattaaatatttacactcgttgaagtttgtataaaacaacatgatttacagttcatgttttaaatgttatgaccgattatgatagaaggagtgaaggagtaaatggttacattatatacatcaccaagttgtacatcttgtcgtaaagcgaaagcttggttagaggaaaatgatattggatatacagagcgtaatatcttttcagagccgttatcaatcgacgagattaaagaaattttacgtatgacagaagatggaacagatgaaatcatttcaacacgttcgaaaactttccaaaaactagacgttcaggtagacgctatgcctttgcaagatttgtatgaattaattcagcaaaatcccggcttattgcgccgtccgattatcattgatgaaaaacgtctacaagttggttacaatgaagacgagatccgtcgtttcttaccacgtaaagtgcgtactttccaacttcgcgaagctcaaagacttgtgaatggttaatttttatatttgtctgtttaagatttaaataagaaaccaaccaagtaacgtttgcttgaagttggtatataaaaaataagcagcagggagccaaatggcctctgctgcttattttttgtcgaaatagcagggaaaatgaagtatatatgtaattagtaaagaaagagagtatctaaacatataaaagtggtggtgaacggattggagcttttacagctaaaatatttccaagtagttgctagactagaacatatcagtaaagcggccgaagagctatatgtatctcagcctgcgctcagcaaaacgatttcacagttagaaaaagagctaggcattcgtttgtttgatcgaaacggtaaatacattaaattaaatcggtatggtaaagcattctgtgccaaagtagaacttgctttaaaaacattggaagacgcaaagcacgagctaaaggatatgtcgaacgatccatgtgaagaaattcgccttgttgtattagctagttcacatttacttccagagctattaagcaggtttcgtgagcaatatcctcaggtgcgttttcgactgatgcagcacttgactaatagctattcacagcctgattttgatttatgtatttcagcttttccattagcaacccgtcagatcgaacatactactttgcttcgtgaatcgattttgcttgcagtgcctcttgatcatcctttagccaagaaatcacgtgtaaagttaaatgaacttaaaaatgagaaattcattgtgctaaagaaagggaaagagctaaggaaaataacggatgtaatttgtaaggaacagaattttgtacctcaaattacgtttgaaagcgatgatccagccacagtgagaggtttgattagagcgaagcaaggaataggttttattcctgaagtaacttggggaggttctacaggaaaagatgtaaaactgctgaaaattgaagaggaaacatttgaacgtactatctttttagcttggaacaatggaggctacgtgacggatttacaacaaatcttcaggcagtttgtgatcgattattttaaacatttaccctccggtatgtctcatgaatacatataaaaatcatgactaaatgtcatgatttttatttctttttcgaataaatctaaagtaaacagtagagaaaaactgcattatgtcatttttgatataagtatataactaaaaatgcataggttattcaacttttttcctttacactatttttaaactgtaaagcaaacgctttcaataacggagtggggaggaagtaatatgataatcttcggtgtagcgctgctatctatttgcatgttgataggggtaattgtaggggacgcattaggagggctgatgggagtagaagccaacgttgggggagtaggggtatccatgcttcttcttgtactagcggtggattatttaaagaagaaaaataagctccaagtaaaatccgaagaaggtattgctttttggggaggtatttatattcctatcgtggtagcaatgtctgcacagcaaaatgttgtagctgctcttgatggaggaggtatggcgcttcttgcaggggtggtagtagtcgtattaggctttttatccataccatttatcagcagaataggagagaaagcgaaggtgaaagaacaagaaatagagctttctattttacctaaggagcagataaaatgatgaatatgatcaaagaaggattagaaaataatgggctgattacggcatttgctattattgggattgtcatgtatattgcttattttttatcagataaattaacaaaaggaagagttcacggatctgctattgctattatgtttggactaatccttgcttatatcggtggagtgaacacaggaggagagaaaggaatttctgatatacagttattttcaggaattggtttaatgggcggagggatgctgcgagattttgccattattgctactgcgttcggcgcgaattttagcgaagtcaaaaaaacaggaatcagcgggattacggccttgttttttggggttttctattcctttgtaataggtgtaattattgctctttgttttggatatagagatcccgttgctttgaccacaatcggaggaggagccgtgacctatattgtggggccggtttctggaactgcgattggagcctcttctgatattatcgcgttaagtatagctgtaggattaattaaatccatttcagttatgattttgacaccgatatttgctaagaaaatcaaattaaacaaccctcgtacagcaatgatctatggaggagttatggggacgacgagcggtgtagcagctggtttagccgcgacagatgtaaaacttgtaccttacggagccatgacagctacattttatacaggtcttggttgcttactcgtaccatctattctttttttactcacagagattattttttaagtgtacaaagtgttttatgaataaaagactgctgtgctcattaaactaaagaaaaggccatactaaataaaaatgtttagtatggccttttctttatcatttagttgaacgaaagctattaacaaccatgccgcttatcagtacaacagcaattgttataaacggaataaatgttactagagatgtatggtctgcaaagaatgaatgtaagttcttttcatgtccaatcatatttccagcagtataagctaaaatagctgctcccccataaacgagcaggggaaatcgttccatcaaatacaaaatgagcttgcttccccaaacaataatggggacggatacgagtaatccagtgacaaccaagataatatttccatgagctgcgcctgctacagctattacattatctagtcccattacaatatcagcaaatacaatcgttcttacagcggcgcctaatgtcacacctgcacggattgaagatgcatcatcaccttctgatacaagaagcttaaaggcaatgatcactaataaaaaaccgccgatgagctgcaagtaaggaatagttagtaaataaacagctaaaatagtaagtacaatgcgaactatcacagctaagccagtccctaaaaaaatagctttacttcgctggtattcaggtaagttacggcttgctaaggcaataacaatagcgttgtctccacctaatacaatatcgataccgataataagaagaatggaggttattaattctaaatccaatagtcttccctcccaatatgtaaggataagtagctcatattgctttatctgtgttcatttttaacaaaaagcgttcatagggtaaagagattatgtatataacaaagtaaggggtaaggtggctatcagttgtcagagtattttttatttcctttcttacgcattttgtcataaaatagatatacaaggttcactcaaatagtgtatgcttgtatatcccaagttagaatgctttacaaagtgagaaagtacatgtaatattgctttaacacgggggtaaaatagtcccttcatcgtttaggggtaatgttcgaaatggccggattaccttcactgatttttccgaagggagagatgataatggaaatcgaacgcattaatgaaaacacagtaaaattctttgtcacttacgtagatattgaagaacgtggatttgatcgcaatgaaatttggtttagccgagagcgcagtgaagagctattctgggagatgatggacgaaattcatcaagaagaagagtttgtagcagaaggtcctctttggattcaagtacatgcgcttgagaaagggctagaggttattgtaacaagagcacaagtttcaaaagacggtcaaaagttcgaagtacctgttggtgaaaatgataaaatcgatatccctgtagatggaaaaattgaagcgttgcttgatcatcaagcgaatcaaaataaaaaagctgattttgaagaagaaattatagaagacgaagggctacagttcgtcgcacgctttcaagacttagaacatttaatttccttaagtcaccatttagagttagatgatatcatcaacagcatgtacgtgtttgaagggaaatattatttatacgttgagtttacagatgatgaagactttgtagctgaaattgataacattttaagtatcattttagaatatgcaaatgaatcaaatgtaacagttcatcgtttaatggaatatggaaaagaattaatcagtgaaaatgcacttgaacaagtaaagcagtattttcctttacgataatagcagccgatttcatgtatatgaaatcggtctttgttttgccctcttttttggaaatgccctccgctcatatcgaacaatataggtggaaaaagcaggcggctgcttcctacacgggaaagtgtagtgttaaaataacaagtttaagaataataacggtatagagacctgttattaatgatgaaagattggttttaggataggtgaaaacaagttgaaaaatagattacagctttcaatttttgttattggtattattgctttgctttattttacaaaagggtattgggacggtaaatttattggcgtgctaagtatcttaattacgattagtgttgttttcatcggtcttgttatttcattagaaaaccgtcatccaactcaaacgctaacgtggctcgtagtactaggcggtttcccggtaatagggttctttttttatttgttatttgggcgcaatacgcgaaaacggcgtttatttgctaaaaaagcaaagctggatgaacaggtgcttttaaagatggaaagagattcgggtatattagaaaatcactttgaacagttgggcaccagtagaaagcaaatgctgaagctagccgtcaggcttggcaagagtccaatttctttttcatcagatacgcgcgcattgacgaatggaaaagagacgtttcacgaaattatgaaatcattaaagcatgcaaggcatcatatccacttagagtattacatcgtacgacatgatcacttaggagaacaaattaaagatattttaattcagaaggtacaagaaggagtttatgtacgtttcttgtatgatgccgtgggcagttttcagctttcagcacattatattcacgagttaagaaacgcgggcgtagaaatgattccgttcttgccggtcagacttccatttctcaataataaaatcaacttccgtaatcatcgtaaaattgtagtcattgatggaacaattggatttgtaggaggtttgaacattggtgatgaatatctcggtaaaagtcggcattttggcttttggagagatacccatttgatggtgaagggtgaggcagtccgttcattgcagcttattttcctgcaagactggtattatatgacaggtcagacgatgcttactcaaacgtatctatcgccggatttaattgacattgatatggaaaagtgcggcggtgttcaaatgattgctggcggaccagaccgtgagtgggaaattatcaaacacttatttttttcgatgattacgtctgcgaaagagtccatttggattgcttctccttacttcatacctgatgaagatatttttacttccctcaaagtagctgctctaagcggtatagatgtaaggcttcttgtacctcagaagcccgataaaaaaattgtttttcatgcatcacgctcttattttccggagctgctagaagcaggtgtgaaaatttacgagtataaaaaaggatttatgcatagcaagattgtgattgttgatagagaaattgcctctattggaacagctaacatggacatgagaagctttcatttgaattttgaagtaaatgcttttttatatcgcacagctagtactcaaaagctcgtatatgaatatatgcaagatttagaagaaacgagtgagcttcactttaaagactttgaaaagcggccatttatacagcggctatttgaatcaacagcccgtttgctttcaccgctattataatcgctgtaaaccacattgcgtatgctgtaatgtggtttttttctgaaagaaaagggtttagtagaaaggtgtcgaatacaaggatatagcttgctactataggaaggagaaatgtacgattgttagttgcccaaacagaagaaggcctcatttcactagctcagcgcttttcgcttgaacagcttaagctgtggaaaaaagaaaagcagttctactgtccctcttgtcaatcccctgtacagttaaaggtaggtacaaaaaaaatccctcattttgctcacctgaaaaaaacgtgcgtcgctcagcatgaaggtgaaacagattatcatctcgacggaaaacgaaagctgtttcactggtttagttctcatcttgaagtcgagttagaaagttatcttcctgacatcatgcagcgtccagatcttcttgtagatacgccctcgcaaaaatatgcaatcgaatttcaatgtgcttccttatcttcctcagtgctaaccaaacgttctattcattatgagaaaggaaattatatgcccctttggattatgggggcaaaaagaatgaagcgcttatccacttatatgtatcaactttcttttcaagagtggcagtttcttactctttccgattatacgcccacacttctttatttttcaccttctactaatcaactgttgaaacttgaacatcttattcctttttcatctcagatttgttatgcacagcttgtcgtgctctctcctcacgagcatacctttcatgatcttttttctacacatacacaacctcaatttttctcttcatggataaagaaaaagaaggcatggagaacgcattatatcctctatcctaatcagaagcttcagccttttttacacgctctttatgaaaataatattcctccctcccatattccagcagaagcaggcatgccgctgccttctttatacatggttgaaacgtctgctactatatggcaaacgtggctgcttcttgatttaatgcagcagaagcaagtaggggatttagttacagaaaaagagttatgccggctatggctctacagaattcataaaaggcatattgtatttcggtctttgcccatggcccctgttgctgtggaacagcccctgtttgagtatatagaggtattatgccggctagggatgctaacgtatataacttctggggtatacaaaatcagaaggccctacacgattccaaagcaaacatctgatgcttttttagaagatggacaaatgatgaaaaggtggttaaatcaagcaaaagaagtgacataatcactgaaaatcagtacgcttaagaaagaatccttttttcaaaagcgtactgacttttgattaattcttttaaaacaacatacaataacgaaagaaataaaaaggattcgccttagaaaaagcgaaaagttatagacaagtagaaaaagatggagggatgaccatgagtgaacaatcaaaagtaaaaaagttaccaagtagaagcgagataaaagtagaagatacgtggaaactagaggatatttttgcttcagatgacgcatgggaaaaagaatttgaagaagtaaaagctcttattccgcaaatggaaaaattcaaagggaaacttggagagtccgctcaaactttatacgacgctcttcaagagcaagacgagctcacaatgcgcgttagtaaactttatacatatgctcatatgcgctacgatcaagataccactaactctttttatcaagggttaaatgatcgtatcaaaacactttatacccaaattgcaagtgcattatcgtatgtaacaccagaaattttgtctattgaagaatcaaaaattaaacaatacatggcggaacataaagagctaaagttatatgctcatgcattagatgaaattactcgcgagcgtccgcacattttatcagaaagcgaagaagcgcttcttgctcaggcttctgaagtgctaggatcttcaagcaacacgtttggaatgttaaacaatgcagatttagaatttccttccattaaagatgaaaatggagaagaagtagaaattacgcacggccgctatattcgtttcctagaaagcagcgatcgtcgcgtacgagaagaagcgtttaaagcggtgtacgaaacgtacggtaaatttaaaaatacgtttgcaagtacgttaagcggcacggtgaagaaagataattttagcgcccgcgttcgtcactataattcagctcgtcactcagctcttagcacaaataacattccagaagaagtatacgataacttagttaaaacagtgaacgataatttgcatttattgcatcgatatattgatttacgtaagaaagtattgggaattgaagagcttcatatgtatgatctctatacgcctttagtaaaagatgtaaaaatggaagtaacctacgaagaagcaaaagattatattttaaaaggcctgaaaccactaggtgaagactaccttaacgtgttaaaagaaggatttgaaaaccgttgggtagacgttcatgagaacaaaggcaagcgaagcggtgcttattcttcaggaacgtacggcaccaatccttatatcttaatgaactggcaggataatgtaaataacttgtttacactagcccatgaatttggccattctgtacacagttattacacaagaaaaacgcagccatatccttacggagattattcaatctttgtggcagaagtagcttcaacgtgtaatgaagcgcttctaaacgattatttactaaaaacgattgatgatgaaaagcagcgcttgtacttacttaaccattatctggaaggattccgcggtacggtattccgtcaaacgatgtttgctgaatttgagcacgatgtgcacgtgcgtgctcaaaacggagagccgcttacacctgaattattaacaaaattatattacgacttaaataaaaagtattttggagacaacttagtaattgacgaagagattggattagaatgggctcgtattccgcatttctactacaattactacgtttatcaatatgctacagggttcagtgcagcagcggcattaagcaagcaaatccttgaagaaggagatgcagctgttgagcgatatgtaggtttcttaaagtcaggaagctctgattatccaattgaagtgttgaaaaaagcaggagtagacatgacaacatctcagcctattgaagaagcgctagccgtatttgaagagaaattaacggaaatggaacgtttattaaatcaataaaattaaaatgaagcaggagctgtatcctgcttcattttttaaatcctcgaaatttgttgtgattgttaagcaatgtaaaaataataaggatagctaaaaataagagagggcctgcgataatgagaggaacaagctgcataagagataaaatatagaataaaaaagaaaccaaaagaataacaacccctagagtaattccagcaattttcatagttaacacctctattaaaagcataattggttgtactatatgagtgaatctggctgtttatgaagtttttttataaaaaagtgaataaaattgaaaaaaggggttgccaaaagtcgacataatttgctatagtattaatcgtgaagtttatcacaaaacaaacatatacccctttgtttgaccgtgaaaaatttctcccatccccttgttgtcttaagacaaacgaaaagacttggcgaaagccaagtcttttttgtttagttgatgcttaagataagcatcaacatttaatgattaacagctcttttcagtacttctccaaaaggtgccgtatttgacaggaactctctcaaccacttgctgaagctgaagttttttcaattctttttcagcctcttctaatgataaaccatacacaactgcaacttcttttgaagcaacaaattgaaaatagcttaaaaatgaacgaagaggcggaagacaagctggatctgggtcaatttctaacatctctttaatgatgtgtacatatgtttcgtacgaatagtatcctgatatcttaatgccttcttcttcaactttttcgttgaagaacacaagagttggaatctcatcgacatccatttccgacgtgatttttaaatcacattgaaaggccttcgcagcgtaatctgaatgcaaatcttttacaaattcattaacatctagccccacatgttttgcacattgtattaagacagattcttccgtaacattttgtttttctaaaaatactacttcttgaagtcttctcaaaaagcgaatgccctgtttctttccttgcagaccggccgctttaattgcaattgatgcagcgtaaggagtatcgattgggttttcaagccacagattgccgtcacatgacataccggagcggcttccagttttctcccacgattttgcaatatgttcaaatttctgctgtgctccaatatttaattgctgtaagtttccgccaagcacatgcttgagggataacagctgaccatattctatttgtaacttctttagaataggctcgagtgcccagcattccgggcaaagagggtcaacaaatacatagatttcaagcggttttttatttgaaccttgacaaagctgatgcaaggatgggtattggctatttagattactcaatgtgaaaatcctttctcatctgtctgttccggtgaattaatcatgtgttgggcagttaaaataagacgatgataaagttcatctctctcagggccttctaaattaatttcgtccattgcttcatgcatacacgtcagccaggctttggctcttgacggtgtaatttcaaaaggaagatgcctagctctcagcatagggtgaccatgctcttcagtgtataacgaaggccctcctaaatattgtgtcagaaattgcttttgctttcgtgctgtttctgttaaatcatcaggaaaaattggcgcgagctcaggatgttgtccaacgcgtgtataaaaagcatcaacaagttttgaaatcgtatgttcaccgcctaataattcgtaaggggagtggattttttctctcatgttgataactcctttgttataagaaatatacgtcttaactctttggtgttttttactttccttaattttagcagtgtcatttcgttaactcaaactatccgcttacttcttctactggaaaagagataaagtggaattctacataagaaaagtctatgatgctgtggcgaatcactaattatgagaaacaaaggaatactttcacaaacatttccttctatattatatagtgtaacctcgacaaactacagccattccatgttcgagtggcgaatgattttgttcatttacacaagataagaagacataattttatttacatatttttgcgtttcttgaaaagggggtactccgccgtatttatcgacattacctggtccagcattataggccgccaacgctaatttcacatttccgttgtatttatctaacatttgtcgaagatatttggctcctccaaatacattttgcttggagtcgtacggatcttctacaccaagagctttagcggttgctggcattagctgcataagcccagccgctcctacagaacttttggcagatggattaaagtttgattcttgtttaataacagaacgaataagtttagaatccagctggtagcgtgcagctgcttctgtaattatcgtttgtacatcctgagaactggtctttgccgtttcatttttttgtgcaggtaaggcagcatttgaagccgctgccttacttgaggaagaaacagatggctcggactgcatttgaaccgccgtaaatggaaacatctgcgctgccttcaagtaaagattggtactcatttgaggctcttgattgacgtagtcttgaaaaagctgagcaaatacagagagtaaagttgtaccaagcatcacgttagctgttggcatctggttgttaactgaaaatggctgagttccaggaaattgaacggaagacatgtaattgttaatattcatgctcatgaatttattctccatccattaacgtatactttcgcttgtaaaaccgtcgaattttgttttccgttggtttctttttaatatcaagctccgtaagcaattgctcaaaatattttgctccttcattggcatcggttacttcgtattcaagttcataatcctcagcacctagataaaagctatgatcgagtacaagtaacccgtttttatatggaatttctgctcgacttgtacgcaaagtgccaaaataagttagcgcatggctatcgacttgtaaatcagtaataagctgttgaattgttgacggaatcttggcgctgccatctcgcaattctttagcttgttcatttgttaatgcttcatgtgtttctaaaagaccctcttgatgaggctgtttgagcgtgagaacggaattatcttttttgcttcgaattcgcagggcagccccgcagtcttttaatgagaaagcaggtgtatcaaaatagtggttttcttgagaaacaaactgatcttcagttagttgaaagtgtgagcggagacgatcaaactcttctttcgttactatatttttaaattcaatttcaatttcttgtttcaatgaaatcatccttttaatttaggtcttttggtaaggcactttccatcttaatttatcacactttttgagacagtcaaactacatttcctaacaggaatatccatatggggaacttggaaaatgaagaaatacggattgtttaggttttacctttattaaacgttcctggaatgtgttaaaatagtaacgaattgtatagttggaaggagtttatttatgcacaatcgaattgacatcactacctgtgtgatgaaatcaaatgaattacatttaaaagcagaccctattgagacggaaattgaacaattggaagatacaaaacaaatgcttgttgactcagataacatgtcatttgtatatgttgtagatattaatgatcaatttatgtatgttggccttagtgataatatttgggcaaatttaaagcacgtcttacataaagatatgaaagtatttttagaaattaataagaaagtaattgagctatcagccgttaaagaagagctatcttatctcatcagtaacatcgaaggaaatgtgaattatggagacgagatggtagcacgagtagaggaagtttttttagataaagaaaataagtaatagagagaaaaaaggggggtgttattaatgatcaggcattgggatttatttttagcaccgtataaacaagccgttgaagaacttaaggtgaaattaaaaggaattcgttcacagtatgatatgaagtctacgcattcacctattgaattcgtgacgggacgagtaaagcctatcgccagtattttggataaagcgactcgaaaaggaatttctctcgatcgcttagaggaagagatgcaggacattgcgggactccgtatgatgtgccaatttacggacgatattaaagcggtcgtagagctcctacgtcagcgaacagactttgaattgattgaagaaagagattatattcttcataaaaaagaaagcggctatcgttcatatcatgtggtcgtatgttatcctgttcaaacaattaaaggtgaaaagaaaattttagtggaaattcaaattcgtacactggctatgaatttttgggctacaattgagcattctttaaattataagtacagcgggaaatttcctgagaatatcaaaaagcgacttcagcgtgcttctgaagcggctactcagctcgatgaagaaatgtctcaaatacgaggtgagattcaagaagctcaggctattttctcacgaaaaaaagaatcggcggaagaatcttaggtatgactcagcaacagctttgtacattggatggatagggggagagaattaggtggagaaaataaaatttgctattacatcaaaaggcaaccaaatatcaaatacgcttatgcaaaaaatgaaaacgtatttattagattttcatttagaatatgatgaaaaccagcctgatattgtagtgtcagtaggaggggatggaacgcttctctacgcgtttcaccgctatcgaaaccgacttgacaagacggcttttattggggttcataccggccatttaggcttttacgcagattggacacctgatgagattgagaagctggtgattgctattgcaaagacaccctatcagactgtagagtatccactgctcgaagtaattattcgctacacaaacggtggacgtgaagctcgatacttagctctgaatgaatgtacggtaaaaagtgtagaaggttctttagtaatggatgtggaaattaaagggcagcgatttgagacattccgaggagacggcctttgcgtatccactccctcgggaagtacagcttacaacaaatcccttggaggcgcgattttacatccttcgcttcatgctattcaaattgctgaaatggcttctattaacaatcgagtgttccgtacgataggttctccattggttcttcctggacatcatacagcgctgttaaagcctgtcaacgacgcagactttcaaattaccattgatcatttaactcttttacataaagatgtaaagtcgattcaatttcgggtagcaagcgaaaaaattcgatttgctcgctttcgtgcgtttcctttctggcagcgtgtcagagactcttttgtatgtgatgattaaaggcagggaagagaatgaaacaagtttttacgttgagttggaccgtagataattctttcgagggtgtagcggttcgtgaatttttaaaagaacatgatatttccaaagcttctctgacggacattaagttcagaggaggagcaattgaagtaaatggaaagcatgcaacggttcgatatattctgcaaaaaggtgacgaaatcaaggtggcgtttccaccagaaaaagcaagtgaaagtcttcttcctaaagctatacctttggatattgtatacgaagatgagtatatattagttttgaataagcagccaaacatgccaagtataccttctcgagaacatctaacgtggtcactaagtaatgctgtgctctattattatgagaaaaataacattaactcgactgttcatcttgtaaataggttggatcgagacacatctgggctgcttattgtcgctaaacataggcacgttcattacttattctctaaagcacaaaaagaacatgaaattaaacgcgtgtaccgagcttttgttcatggtaagcttgttggcaaagaaacgatagaggcaccgattggccgaaaagagtcaagtatcatcgaacgggaagtaagagaagatgggcagtttgctattacacactatacggcgcttcgtcagtattcttcttttacagaagttgctctttcgcttgagacggggagaactcaccaaattcgtgttcatatggcttataaaggatatccactgcttggagataccttatatggcggaacgaatcatcttatttctcgtcaagctcttcacagctatgagctcactttttttcatccttttttacaaaaaactttgtcttttacagcacctttgccgccagatatgcagaaacttcaaatcgtaaaagaaagtcgctttttttaatgaaaagcgactttctttttacacgaagtgattaaatttttcctctacataaggcatagatgaaggcaccgatataatattcctttcaggatactgaaacgccgttaaagcccctccaaaaactgcgcctgtatcaatattaatggtattatggatttctctggcttttactacgggtgtatgcccatacacgataaaaggttttccgttataatgtttggcccaatctcgtcggacaggcatgccgtttagatgtttttcacccgtaatgtctccgtatagcacaaaggtttttacttttttatccgttctgccgatgtattcagctttaagaccggcgtgagcaataattaattggttttgatcaagctgcacatatagaggtgattgttcataaagctcaatgaacttttttttaatgaatttctgttctcttgaaggtaaagcttcgtactcggcaacggtcgtttctaacccatgagtaatttgcactttgttaccgcaaaagaagcgatatagcttattgcagtgattgcctggacagtagtaagcttgctgatgctttattacaagtgaccatacgagctcaatcacttttagtgaatgaggtcctcggtctgttaaatcacctacaaatccaaggcgccgtccgtcagagtggacaggaatcccgtcttgccactcatacccaagtttttctgttaacgcttttaattcatcatagcacccatggatatcgcctattatatctattttcatcttttatccacatccttaaaaggtttttcctttgacgatataaaattacccttatatggagcaaactatgtgtagaacttatatattattgggaaaagagtaaagagctgtgagttgaaaaaaaacaaaattcatcataaagttaaatgagttttgtgcgatagggaggttgaagacatgacagattcaattgaaaaagaagaaaaggcatggttcgccgaacatttattatcacttttagaaaaaaatgaaatcgatgcatttcgtgaagaatttttacatatgcatacgtatgaccaagctcaattttttgaagaattagatgaaccttctagatttgcgctgtacgagatgttatctccggaagaaatggcggatatctttgaaaatgtagagatacgagaagaagattatcaagaaattctctcagagatgcatcccaattttgcagcagacatgctgtcggaaatgtcggcggatgatgccgttgacgtattaaatgaattggataaagaacaagtggcgagctatttaacaattatggatgaagaagcagccgatgaaattaaagagttgcttcattacgaggaatataccgctggaagtattatgacgactgaatttgtggccattcgtgaaaatcaaaccgtacattcagccatgcacattctacgcagggaggctccagaagcggaaacgatttattatgtatttgttattgatgaacaaaagcatctagcaggtgttatttctcttcgtgatttaattatagcagatgaagatacgatgataagcgaagttatgagtgaacgagtcgtatccgtgtcagtagcagaagaccaagaagaagttgcgcgtattatgcgcgattacaactttcttgcgcttccagttgttgattttcagcagcatcttctcgggattattacggttgatgatgtgatggatgttcttgatgaagaggcatcggatgactattctaaattagccggtattagtgatgtagatgatacgattgaccacaatcctttagtagcggccaaaaagaggctgccttggcttattattttgctgtttttaggaatgatgacagcgagtttaattggacgttttgaagatacgttgaatcaagtagctattttagctgtatttatacctttgattggcggtatggctggtaatacaggaacacaggcactagccgttgcggttcgcggactagcgacgggagagatcgaagaagaaagcaaatttaagctgttaatccgagaagcagctaccggaatgattacgggcgcatcatgtggacttttagttgtattaattgtttatatttggcaaggagatcttattttaggcgcgttggtaggcgtctctgtattttcaacattgattgtggctacattagcaggagcgtttatcccgcttctcatgcacaggttcaaaattgaccctgcagtcgcatcaggaccatttattacaacgatcaatgaccttatcagtattttaatttacttcggtctagcgacaacatttatgagttatttaaaataatgaaaggactttagaattcgacatgagtaatcatgtcggattttcattatcagttcatatagttgacagagaaccttcaagcttttatgattaacctttaattttgaatactaacgtcttcgttttataaatagcgaaggtaaaaggaggggaatctattggaacagcacgcgtcctttacatcacttgttatcgtcattagtttggcctttttaacgcctatactgttgcatcggtttaaactcaacattatacctgtagtcgtagctgaaattattatgggattaattatagggaaaagtggttttgaccttgtggagcaggatatgtggcttgaaacactttccactctaggctttatctttttgatgtttttaagtggtttagaaattgatttttctgcttttgctggaggaaattcaaaagacaaaaaggcatcaggagcgaaggtgccaaatgctttttccatttctatactagtgtttgcagctatctttgcggtttcactatttttgtcctatgtttttgtatggacaggttttattgataatgcctttttgatgacgcttattatttctaccatttcactaggagtagtagtgccgacattaaaagatgcacagattatgaaaaagccgattggacaaaccattttattgattgcggttattgcagacttagtcacgatgattttactagccgtatttgcttccgtctatgataaatcaggaaatagcaatacatggttgattttaattttatttggagtaggagtgattttatacttcatagggaagcagtttaaaaaccgatcgtttcttgagacaatgtctaaaggtacaattcaaatcgacacgcgcgccgtatttgcactcattatcattctagtgggcctttcggagtcaattggtgttgaaaacattttaggcgcttttttagcaggatcactcgtttctcttcttgcgcctaacaaaaacttagttcataaattagattcgtttggctatggatttttaattcctatcttttttgtgatggtaggagtgaagcttgatgtttggtcattgttcagtgataaaaaagtgctgattttaatgcctttattattcattgcattattaatatccaagctagtcccagcgttaatcttaagaaaatggtatgatatgaaaaccgttttggcatcgggttttcttttaacatcgactttatcactcgttattgcggcagcaacggttggtgaaaatattggtgttattgattcacaaatgtccggtgcgctgattttggtggcgattattacatgtattattacacctattatctttagaaagctgtttccaaagctagaaatcagtgacagaaagctgaaggttaatatgctcggtgcaaatcaatttacactcccggttattagagaaatggatcttgatttatatgatgttacgatttatcatcctactcaggacaaaattgaaaaccgtacgtcgaattccatttttaatatcgtcgacatcgatggatatagtaaggaaactttaatacgtatggggattttagatgcggatgtattagttgtaacaacaggggaagaagaaagaaatagcgacattgctctatttgcaaaagaatatggtacagaacgggttattgcccgcgtagaaagtcctgtattagatgaaaagatgaaagaaaataacattgaagttttttctgtgctgttatctacgactgcattgctaaaagctttaatcgaatcgccaaatattttaaatatcttaacgaatcaagaaacagcactttatcaaattaatatgcgtaaccctaaatacgagggggtagagcttcgtaagttcccatttacaggagatgtgatttttgttcgaatctttagaggcaaagattccattgtacctcatggcgatacggagcttgaatttgatgatcgtttgattgtaacgggatctcgttcgtatgtgaatgaattgcgtatgcttcttgagtataaaattagataaaggtatttaggtggatttagttttctaccttattgaatgagaggaagaggctgggacaaaagtattttagctgaagtgaaaaatgaaccattgatcaaaatttttgattagtggttcgtttttttttgttatggtgaacataggtttcatctgtttagttccttctaacagttgattggagggcaaggcgaagactcctgcgggaaaagcggaacagatgagaccccgcaggagcgcaagcgacgaggaggctcatcggctgcccgcggacagcgaagtcttgcacggaaatcagctacggtgtaacaagcgatccatacgagcccatgtatcctatttgtgcatctttagattgaattaatttagttgtatctcaacctcttttattgtgttttttcaaatgctgaagacaaaagtatagcgctgcttttgttgtcaaaaatgctgccgcaaaaaaataaacaagtttttccgtgtgcaagcatacatttttaaaagaacgataacaagcaattggaggtatgcttcatgactaactcaaaatctaagtcagaagaaaacgagccgctaatgtacattgtccagccaagcgctacgcaaaaccagcgttctatgcaatattatttcagttcaaaacagcaagacaataaagaaataaagaaagagtatgtgttaaaagaagagcccagcttttcttctattcaagaagttaacgagcctgaggtagaaaaagtagaagaaattaagcaggaaaaagatgtaggaattaagcaagaaattaagcgggaaaaagatgtaggaattaagcaagaagttaagcgggaaaaagatgtaggaattaggcaagaaattaagcaagaaaaagatgtagaaattaggcaagaaattaagcaggaaaaagttgtagaacattcaattattcctgtgaatataccgcaatcagagactaaaatgccaaataaaatgtttcagtctatgacgatcaaagaaaaaattgaatttctatgcagctttccggctcatatgtctcaacctatttgtgaaatcgtatgtcaaaaccaaaaatatataggaacaattttagaactcaaagaaggaagtttatacgtaagcatccctcctaataaagagaagaaagtattaacatttaatgatattcagaccatatccatcattaaaatttaagtaaccctaaaagctaacagtgaaaaagcatgttagcttttattttcataagcttgtgaatgtacggaggaatgaagatgacatggatttacctaacgttatttgtctttgcgacgtttcggctcactcgcctaatcgtttttgataaaattacgacttttattcgtaaaccgtttcacaaaattgtagaagatcaagatgaagaaggaaataggataacatacttagaaataaaaggaaaagggctgcaaagatggattggagagctgctcagctgttattggtgcacgggcatatggtgtgcggtagggatttattttagttatgtagcggtcccccacattgctattcctatcattacaatcttagctattgcaggatgtgctggaattgtagaatcttttatgaaataaatggacgagttaaaagacatattgaacatcaatatgtcttttagtcattaaggaaaatttagcacaactttatttaacaaaggaatgccttcttgccattcttcactatagaaaaagccttctaaaataaatgagggcatatcagaggaaagaggaacaactacttgaaaagagtcaaatagtaatttgtcttttggctttaatactgtctgcttaataggtttaatccaatactcaccctcatgttgaattttttcgttccattttggatgagcgtaacgccattgtaaagaagaagatggaatactagaagcttcaatgcttttttcatcaacgatcttcccgcttaatgtagacgaagcggcaggcttcatttttaagcaaagcacgggagagtgtaaagtactgctcgtttgattttgaataattacattgccgaatatcatcagctccctttcatgctgttctggcagcagtatagaatgttgaaagaaacagaggatatcactcttttcaaacctttccacgggtttttctacaattttttcgatcactttttccacaatcttttcttcaatagcgtgctgttttctcgatgctttctctcgaaatgcttcggcaataattttttgttcggaaagctcgtttctcagtaaatccagctctctttctaacccttcaatttctacttctttttcagatgtagaaagcgtctcagcgtgttttttcttccaaaatgatgtattttctttttctctctctaaagctcgttcatagctttttaattggttctgtatgtgccgaatttccgatttatagtgaatgagcttttgttttagttgagttaaatcatctttaggagaaggggagttacgactcatgtactagtctcctttcctgctgagctatgaaccagccttgtaaaacagagctgctcacagcagttttatttatatgtatgcacaaagcttgtaaacgatgaaaaaagaggagaaatattctcctctgaggttatccagttaatcaaagtcactttcaaagtcactttcgaagtcactttcatcagaatcacgataaggtcttccagggaagacagcttcacactgaggtggatattcaatcggtgagaaaccgcttgtagaaataacttcggggcgaggataacagaagcttccttctacttcaatcttaacatctttttcaatttgcacacttagacctaacacaagatcgaagcttagctgctgtaagtgaatgtctgataatctaatagaaccatcagttccttcaaaagaatcaaggtgtacaacaggttctgttccttcaggtgcgcaaagatagaatgtttgatgtattttccaaggaataacactagattcgacatcgctgtatttatgatgtccacctaaattaattaacctaattttataaaaaccgctaattgataattttacttcatgaagaataacaatttctccgtctggtaaaatgaccttcttaggtttgcgaccaccttgtggtacaagctcaattacatgatcgagcgcctcttcatctgaaacgtctacggggtgtcctttactatcagttaaaataacttctacttctacatcatggcctaaatcttcaagcgcctcttcatcaaatagtgaagcgtcatttgtaaagatttgtggcaaaaccacttgacgtctgacccaatcgtacactttaggtacgcggatacacaatgcttcaaaatgttctcccatttttaaacctcctaattgtaattgtccttcctttacgctgttcgttactaggtatcggactactatagtgtatgaatgacttgcttttatgttccttagtaaaagcggaatttatagcaataatttctggatgaagcgagcataaaaaatgaaggaaataataaactcaattacagcatattcatgttagtaaaaagtgttattcatctttaattgattttcagaggtttgtgcattgtttataatgaaggagtgagcagcatgagtgaggaaaaagtgaaacaaaatatctcttcattaaagtcagagctggctttttataaggaagaatatcaaaagttcaagcatcaagaatttgaatatgaagatatgaaagaagagttagctgaattaaaggaaaagcatgaacaagaaaaaagaaagctgcaagaaaaaatagattggcttaaggcatgtgtcaatgaacaaaaatcaaaaaatgaacagtcaattgtacagtatgatgatcatgcatcagaaacgattcaggagctacagagcaggctgggagaagtaacagagcaagaaagggtggaagcaccaagagcaaggaaacccaaaagcagcaccgatttatttttgtccatgcagcgtaaaatggacaaataagagagaacgtctttctttagtcctgaatataatgttatagataggatgctgtgaaaaggagggaaacatgatgtattatcattataatcctaatcaatatcctcagccactgccttatcatccacaacccattacaaaacaatcagtgaaggaaggtcagtctactcctaagccagtccagtacccttctccaaaacaaggtggttgcggctgtggttcaaagttaccaaagcgataagcaatagaagcattgttcctcggacaatgcttttttacatggagtaaagagaggtgtagatatgccggattttttcgatgaatttgaacgtttttttgaacaacatatgatgggagaacatcgaaaaagaatgaaagaagtagaaaaagcagaaaagcagatggaagagcaagagaagaaactgcagcaaaatgtaaaaagacttaataacaaagatgctgaagatccatttggacaatgaaatttaatgcacacagttgaaaagcccatacaaaatcatttgagtgaacatacagtatagagagtaaaacagaggggttgtaataatatgggctgcggatttggttacggtggttgtggttacggtggtggctacggcggtggttttgcgttaatcgttgtattattcattctattaattattgttggttgtgtttgtttttataattaatcccttctatgaataaggcaccgaaaagtgcgggtgaagtttcactcgcactttaatttttattagatgtaaagggcaccatctaggcacatagtgcatacgatgaagtataaataaaggaggtcatgcaaaatggataataatatgtttaaaaatatagaaaagaaaacaggcgttaatatgaaggatatttttgaacttgcgaattctgtacaaaatgctaattttaaagatgagcaaacggtgcgtaatattgtgaaacgagtagcgcaaattgcaaataagccaatttcaaaacaaaaagaagaacaaattgttaaagcgattgcaaacaataatcaatccattgattttgcaaccatcgctaaaatgctaaatgagaaaaaataatttgatatttttataaaaagccctgaaacgtcagggcttttttccatttatgcaatttcatttgtttgaaatgtgttagaatcgagatcaaatagctccggatgtgtgctaagtaattaatttctttaatatgatgagcgataggagggggagttgaggtagcttgattcaaccacataaaaaacctttttcttgattatcttcaatcatttcaacaacgtcagagtataaaacggcaaagtggcgtccaaagaaacgtgtagcaaatgcgtttaacaagccgcctgattgaacaatataaatatcaggcagctctaagtccagctctgaagataaattttttgcctgatgataagtgtgcgggaactgcttctctgacagtttaattccattattgcgaatttgagcaatagagaaaccgtggagtacatatgtaattaaaggactgattacaagttatataataatatatagaggaataaatggaaattaataggttgataaactgataaacgtacatagaataaaaaaatcttttcagtttcatgaataggctttgcgttcaataacggaaccccctaaaatatagtagtacagtacataacgtagtgtaacgcatctactcctgcgggtcgcacctattccgcttttcccgcagaagtcttcgctttgccctccaatcaccagctagaagcgcatacgtacatgaaacctacgttcaccttgaccataaaaaaatccgaacgagtcggatttttgattaaggatccaactcgttcggatcttccttcaactaacatacttttgtctcagcctcttttttctttatactttttttataaacgacttcaggaatcttgaaggataagcggttttacctcttctagtttgcggaacagataagtaaagtgaattctgtgcacgcgtcattgctacatataaaaggcggcgttcttcttgaagcggcacatcatctccgcctcgataagcttcgagtgcataatcatgaggcaatccgccatctacgctgctcagtacgtatacatgcttatattcaagaccctttgcccggtgaattgtggttagctgaatactttcattaaattgcttgcttaaagctttcatctctgtgttcatggcaatcatatgatccacatgctctaacagttcagggacggttttgaatttacgtgctacaacttttaaatcccgcacgtcgtccgaacctttttccatcatatttccttcatttccgcgttttttgacaaaatcatcgaatcccatatctttagaaatcgtctcaagtgccaaagaaggagacattgattttagcgacttgaataaaggaattactttcttgagccgtttttgctgaaacggttttaaatcttgaagatattcaagtgcatcaataaatgtaccatcatgaagaatacttgctgcttttaagtcattgacggctgttttctttaaaaagagtgcgtttactaaatcttgtagcgaacttgcgtcatttggattcacgctcaagcgtagaaatgaaagtaaacttcgaaccattcgtcttttataaaacgaatccgcatcttgttcgattgaaaatggcaggtttgactgcgataaacgttcaaagatggcgcgtgaagaagcgtgagttcggtacaagaccgcgaattcagttggagaagccccttgcttaatcttttctttcatatccgttacaatcattgttgcttcttcttcttcgtcgtatggaaagaagaatgtaggtcgcaactcattatcaaactgggcagccatttctttttgtcggcgcgctgtatttcgtgcaatgactttattagcagaagaaacgatggcgtgagctgaacgataattttggtttaacgtaataacagttgtattagaaaaatctttttcaaagtttaaaatgaacgaagggtcgcttccacggaaagcgtaaattgattgatcatcatctcctacgacacacaagtttttagagtcttcacttagcattttcataattttatattgaactttattgatatcttgaaattcgtcaattaaaaaatagcgaaaccttttttgataacgagttagtaagtcgggattttgttttagcatttcataacatccatacagcatgtcatcaaaatcgaatagctgtttttgctttttgacttcttcatagcgacgatataaaaagtgcacatcttgttcccatttgtcctttgggcgaacatctttcacaccaacaagcgtgtttttccaatagccgatttgctgaagtgcctgatcaaacggaaaatctttttcatccacgtcgagctctcttgctgcttctttcacaatctgttctttttgccaatcccattttagcaggcggtccatttgccacgcttgaggattatgatgaacaatcatacgtaagaaaatgctgtgaaaagttccaactagcatttgacgaagatgtaagccagacatctttgggtatgtagccaatcgttctttcatttctttagctgatttagccgtgaaagtcaccagcataatggattttggatcaatttgtttttcttgtatcatatatgcggtgcgagctgttaatacacgcgtttttccgctgcctgcaccggctagaataaggagcggtccttctgaatgtgtaacagctttccattggttcgaatctaattcaataccgctctctttaaattcatttaaataaggagagtcagagtgtttaggaacagctggttttaagtgaaaagcaggaacactcgaaaaaggtgcggaagacctccatgtcgctttctcttttacagttgaacttttctcaccaatagctcgtcctttaggaatacgaaatccattggtttctctgtattcagccggattttcttttatttgttgcacagctgttgtttctgatagtatgtctgaacactcttctctttcatggggaacttgagcatgataaaagtaaggagaatgctcaattcccagatataatttaactggttctccgcagtgagcacacgttatttctcctcggagactagcttcatataaatattgaaatcggtctctagccgttatagcaagattaagtatctgattttgataaagtgcacgttgcaaaaaacatggcctcctttttaaaacatgaataatcaatagtaaataagagggagttaacgcaagaagccgctctcgttctacatcgatatagatgtgtgtatacgcacagtttttgttttatagtcaaagtctatcatatcaaaatcaccttttttaaaaaagagcacggatatttttggagggataggatgtaaaaaagggtatatattgaataagacatcacatatgttcaaaaaaggcggtatagatacaaggtgtcatctgttttgaacaagtctaaagtagaggatctaagtgagctgtttcaatgttgatacttcttgagaaaaatactgaggtctgggagtagaaggtatcttgaaaaagaggagggttcatatgggatatatactgtccgtcacgccttatcaatctattcaatatgcaaatcgccttcaaaaaaatagtgcttctttttcaaatcgtatttggcctattgagaaaaaaagctttgacgaagagtttgaatcgcgttctcactcaatggaattgacgccaagttcagtacaaaagcgaaaaaagcttcaagcagcagagcgtgtatacagcaagttaacaaataagggcctagtgattaatacacgtgtctaatagaaaaaatcgtgagcgcagcagaatgaatgcgctcacgattttttaacaaagtaatgaacaagtaaaaaacatcttagtaagattcaataaaaagagtactaccctgctgccattcagcataaagcacctgtttataatcggtaaatccctgttttttcaactgtgtctttaaccagtcttcatcaaatcctgactgaatcaagtttttcaaaagcaaacgtccatcactgacgaagacgatagataaaacaggttcagaaggaggcagctgtagatcgcttcttgtcggcttagaataactagattttggcaatacgcttagtgatccatctgtttctaaaatcgcatattcaacttcacgaatggaaaatatgtcttttgaacgaagcatatgaagaagctgatcgatatctaatcgatttttgctaagttctttgtacgaaattttcccttttcgaataataatagatggccgtccttctaaaaacaaacgcaggcgaatatttttttgagtaataacttcggtgacataaataagcgatccccaaaagataacagcaaataaaattttgcctattcctacttctgagtcatatagcgcatttcctactaactctcctaatacaagagcagagataaaatcaaaagtggtaagctgagtgatcgtcgctctgcctaaaaatttagttaaaataaacaagcagataaatccgataaagagttctaacgcaattccgataagttcatccatattttcacctaattcacatgattaggtattagtataagcaaagcaaaggttcttatcctttaaaaaagcaaaaacaccaggttcaattcctagtgttttttacttagtttctttaccatctctacatgtggaattccagcatccataaattcacctgaaaccgttacgtagcctagctttttataaaatccttccgcatgtgtttgagcatgcagcttaatcttttcaatctcatgctttgatgcgagctcttctagcttatccatcaaaagctttcctacaccgtcttttcgataagaagaaagaacgcagattcgttcggctttgccatagtcctctaccatacggaagcgtcctgccccaattggtgcagttcctttgtatacaactaaatgcagggcttcggaatcgtattcatcgatttcttgctctacatcaacctgctgttcttctacaaatactttttgacgtacgaagtaagcatcagaatgatcttgtgtgttcgttagtactttgatgttcacgtatcttatccctttccaagacgaaatgtttcaaacacagtccatgtttcattttcaagctggtacattaaatgaaagcgatccactgtttcttcatgagcgacatccacaagtttcaactggctatacacatctaagtgctcatcatctgaaaggcgttgaccaattgtaatatgtggaataaatgaatagtcagttggctgttcaagattgccttcatgaagtttattgtaaagtgacgtcagttctggcttttgttccacttttaagtaaataacattattggctggtgaaaatgagcttactttcgttacatttaatgtaaatggatttgtttcttcggcaattttacgcaagttagccgcaatttcatcaatttggtcttctgtagcttcaaagacttcttttaatgtaagatgaggcggaattaatgaatagtgagaatcatagcgttttcgataagaattcgctacatcttgcagttttttagatggaaaaagtacaacgccaaatttcataaaaaatccctccaaagtaagatcataaaatatgtataaagcgagcttattataacaaattttcaaaaaatatgatatctttctacttcaacatatattgaagcgaccgctttacgtctttttgccagtatttccacgtatgatttccattaaattcttcgtagaaaacagaatatccatgcagcttcatttgttcatgcaacaggcggttaggctcaataaaattcaatataccatcttgtgttgttttgacagccgtttcttcagttccaataacatgatacaaatccagaagtgaaggagaagcaaatgagttgaccgtttgtaatacagcatcgttcacgaaaggagaatgcataattactttcccgaacgtgtgaggatacgcaatggccgtcagcagtgaaactgtagcagcaagcgaatcaccaattagaacacgtgattttcccatttgatatgtaggatatgttttatccaaaaatggcacaagttcatgtgctaaaaagcgaatgtaagcatctacttgatttccttctggatgatacttatcgcgtctgtcttccacgcttttatatggaattccaacaaaaatagtacgattgatttccgactcgttcattaaatcatcaattaaacgaggtgtccgtccgtacataacataatcttttccgtcttgggcaataagtaaggaatacttatagagcgtagaatagtttgacggcaaatagactagtaacgtgacatcttcttgcagtgcgtcactataaaaagaaatttcttctaacttccgcttactttctgacatgaataatcgactcctatgcatttgaatgaaagcgttacctttattgtaacacattttctaataaccgttctttattttattgtaacgaattttttagcgaatgacgagaaagaggcatgcgtcattaaaaaagtgcttcagaatcgactgaagcgcttttagttaatctaattttttcatttttttaaacatagctttttctgcttggctggctttttctagcggcttcttcgtatattcttcttctttttcatcaatcgaaactaattctgtgtcattttttacataacttcggatattgcgagccccgaaatagccgtttacatcttctaaaataggcttgttttctttttgatcataaagagtatatgaattctcttccttaacgatagcgtagtgattccctgctagaagagctacggcttctttttcgctttttccaaaagtagacatgagaaacagaacgattaagacgataaagaaaagggctgttgcgccaataaaaaataataataagcctctgctaaatttactttgtttttcttccacagtagacaaacctcctgattagataatttcattatagcaagtaaatgtaatgagcgcctaaagagatatgtgacgagtttatgaattcaggtgaatgaaacaaaaaaggtttttagcgcctctcatcgaatttaatataaagagagacaacaacttgaaaaggagagagagacatgacagcaaaaaaaaccccaacgagcaaagaagtagcaaaggcaacatttgatttgctagaagagcgtggcgtaacagttttagatattgctgaaatcgtgtatgatttacagcttccttatcatccaactctaaccattcaggaatgcgctgagagcgttgaaagagtactgcaaaagagagaaattcagcatgcgcttctagttggaatcgaacttgataagttagctgagcaaaataaattatcagaacctcttcaaagtattgtagaacaagacgaagggttgtttggtgttgacgaaacgattgctttaggtgccgttttaacctatggcagtatcgctgttacgacctttggttatttagataaagtaaaagtaggcattattgaaaagctggactgtaaaaaagaaaaaggagttaatacctttttagatgatttagtagcgagcgtagcttctagtgcggcaagtcgtttagctcaccgtcagcgtgatgaacaagaacagctgcaagaaggcaatccggctacgtaataaacttcttttagtattagtatgtatataagctgcgtaaattaacacgtcgaaatgatttagtctcttatttgaataacggagactaggcacgtatcacctacgtgtctagtctccgttaatggaacgatttatggctgtagtgaagtagtcataaggtagcttaagtttttcagcccaagactttcataaaaagcacgtgctttctcgttaaatgcccatacggtaagctggaggtcatttgctcctttttgtacagcccactgcttcgtagcagaaaaaagcctttttcctacgccataattttgaaagcctttcttaacgccaaaatattggatgtacgctgtgtaggaaagaggagctaatgtggtgggagggttatattttaattcaacaacagacaccccgataatttgatttcgatattgagctacaagaatatcaatagttgcataataaagagtagcttgatattgttccggagataaaacagccatctgattatcaaacatagaaggaagcgcatttgcgtggagttctagtgattcccctaatattttatttacttctgtataatcatctagttttgcagtgcgatagataatctccatacacacttcacctactttttaaaagttgtgctttatcatatgtagcaacttagaaaatgttaaatgagaattaaaacttgaaaattttaagcgaagaactgcactaaacagagcatatattctatgctctgtttgatgttatagttgaagaacatataagggcgaaacattaaattctagtttcagcaatggcatcgcgtactttttcaagcgagtgtttagaggcatctttattcgcaatcattacattaacgtacaaagcatcaatgaggcttagctgtccaatcctcgaagcaagagcttcagatcgatattctgtttcttctgaactcgtataaagagaaacatcgacattttggcttaatggagattttggaaaacccgtaataccgatcgttttggcaccgtttgcttttgctgtatttaaaatattcatcgtgtctttatttgttccagaatgagaaatcactaccgctacatcctgtttcgttaattgagaagcggacatgagctggaaatgggaatcaataaatgcaaacgttttaattcctgttcgaacaaatttatgaaaagcatccatagccactactgaagagccgcccgtgccataaaactgaactttatccgccttcataagaagtttgacggctttttcaatagcgttgctttctagtatttgtaatgtattttcgagcgttcgcacattggagcgaaagattttttcagcaattgttttttcattatccgtttcagcaatttcctcgtgaatctgctgaataggcgtcataatttcagcagccagcgctattttcatcgcttgatagcccttgaagccaattcgtttacaaaagcgaaagactgttgcatcagctacatttaaatcgtctgccacttcgttaatggtactgtgaataatttgttccggctgttctaaaatataatttgctatttttttctctttttcactgaatctagcatagtgagaacgaatttttcctaagcaattttgcgtcataactgatgttcctttccacgaatttagtagtaaaaagagtatagcacaaaaacacgagtgaaaaaaattttcttgtaaacgattgcaaaatgaaaaataattcgtataatggaggtaatgtgaaattttttttcaaagggagtttgtaaaatgaaaattggattaatcggtttaggaaaaatgggatataatttatcattaaatttaagggacaaccatcatgaagtagtagcttatgatgtaaataaagaaacggtagaaaaactttcaaacgaaggagcaactggtgcctttactgttgaagagttagttaatgaacttcctccttcacctaaagttgtatggattatggttccggctggagaagtaacggaaaatgttattacagaactaaaagaacttctgtcagaaggagatattataatagatggaggaaactctaattataaagaatctgttcgacgtgctcaggatcttcaggaaaaaggtatttacttctttgacgtagggacaagcggcggaatggaaggcgcaagaaacggagcgtgtacaatgatcggcggagatgcggaagtattccgtacaattgaaccggtttttaatgatatttgtgtagaaaatggatttatgtacgcaggtaaaagcggaagcggtcactttttaaaaatggttcacaatggtgtagaatatggaatgatgcaatccattgctgaaggatttgaagttctggaaaaaagtcagtttgatttcgactatgaagccgtagcgcgcgtttggaataacggatctgttgttcgttcttggttgatggaactaacggaaaatgcgttttcaaaagatcctaaactagatagtattaaaggagtgatgcagtcttctggcgaagggaaatggaccgtggagactgctcttgatcttcaaacggcaactcctgttattgctttatcgctaatgatgcgctatcgttcattagaggaagatacatttacaggaaaagttgtagcagcacttcgaaatgaattcggcggccacggtgttgtaaataagtaaagtagtaaagtagggggacagcagcatgagcaaaaaatatgcaataggtgtagatatcggaacaacgagtacaaagtctgtattgttttcagtagacggtacagtcattgcaaatcatgggattgagtatccattatactcgccgacgcccgcgatggctgagcaagatcctgaagaaattttccaagcagttgtacgtacaattcaaacggttgtaaaaacgagcgatgtaaaacctgaggatattttatgcgtttcattcagctcagctatgcacagtgttattgccgttgatcagcagggaaaaccactgacaaaatgtatcacgtgggcggataatagaagtgcagaatggacggaaaaaattaaaaatgaatacaatggtcatgagatttatttgcgtacgggtacgcctattcatccgatgtcgccgctttccaagctaacatggctttctaatgaacagcctgaattagtgaagggaacacataagtttatttcgattaaagaatatgtattcttcaagttgtttaacgaatatgttatcgactattcgattgcatcagcaacgggtttgtttaatctgaaaaatcttgcgtgggatgaagaagcacttaaagtagcaggtgttacaaccgatcagttatccactcctgtttcaacaatgcatcagttaaaagggttaaacccagcgcttgcagttgacatgcacttacttccagatacgccctttattgtaggtgcaagtgacggtgtattatcaaatttaggcgtaaatgcaattgaaccaggcgttgttgctgtgacaatcgggacaagcggagctattcgagcagtgactgacaagccagtagttgatcccaaaggtcgtattttctgttatgcgttgacagaagaccactgggtaattggcggccccgtaaataacggaggtatgatttttagatgggctcgcgatcagtttggagcgtcggaagtagaaacagctaaacgtcttggaaaagatccgtatgaagtattaacggatattgcggctttagtgaaaccgggagcagacggcttattgtttcacccatacctttcaggagagcgtgcgccgctttgggatgcaaatgctaaaggttcattctttggcctaggtttgcatcataaaaaagaacatatgattcgtgctgtattagaaggcgttatttttaacttgtatacggtattattggcacttgaagagttaattggagagcctacaaaaattcaggcaacaggcggatttgcacgttccgcactttggcgtcaaatgatggcagatatttttaaccaagaagtatccgtgccggaaagttttgaaagttcatgtctaggagcagttatccttggcttatatagccttggcgaagttgactcattaaacgttgtttctgatatggttggagcgactaatcatcattatccaatcaaagaaaacagtgaagtatataaagagttaacggctatctatattcgtttggctcgcttatttaaagaagaatacgaaagcgttacggctttccaaaaaaaatacgtacattaatatccaaaatcatcgcttgaagctttcaagcgatgattttttgtgtgttaggttatctaacaatcaaaagagttgacactacacaatatataaaagttccctcaaataatgttacaatttgtccagtgtatccccgtttcgcattaaatataataagggataacgttagtatttatcacatactagaaggaatcgtcacaaacgcctttatatttcagaaaattcaaacgaaatttgttttttggaatgaacttattttatgaaaaggggttttatggatgaaaacacaaattgagcaagatggaattgtgacgctcacggatgagacgcacaaccagctgagcggcagtgacctttggaatgaggatttacgtccgactacgatgaaagagcattcttggaaaggcgttaactttgccacgctttggattgggatgtgtctgtgtattccagcttacacgatggcgagcggaatgatgacgcttggaatgaactggtggcaagcaattggtacaatctttttaggcaatgttattgttcttattcctattttgcttaattctcacgctggaaccaagtttggcattccttatccagtatttgcccgcctgtggtttggagataaaggagcacatatcccagcactggctagggccattgtggctgctgggtggtttggaattaatacatggattggaacggaagcaattgatacactcctaagcgcttcgttttcgtcttggaatggtttagctggtcatacagccattgtatttgctcttttttggcttttaaacgtaggagtggcatataaaggaccgcaagcgattaaagtattaggagcgattgctgctccggttattggtatttcagctattattctttttatatgggcttatacaaactcgggagggtgggggcccattttatctacgccttctaaatttacatcaactggagaatttctagccgtattttttccagctttaacgggagttattgcattttgggcgacgctcgctttgaacattccggatttctgtcgatatgctagaagtcagaaatctcaaatggttgcgcaaaccttctctttgccgttgacgatgagtattttttcatttattggaattgctgttacctcagcaacaatcgttatatttggagaagctatttgggatccagtggcgttagtagctaaattccctccgttcatcattttcttaggaacaatcgttatcgtgctttcttctttaacgattaatgtgggagcaaatattgttgcgccagcccgtgcaattgagaatctgaatccaaagaaaatcacgtttgcgatgggggcgctagtgaccggtatttttgctattttacttcagccttggtacatcatgtctaatttcgggaactatattttcggctggcttggaacatacggagcgctgcttggccctatagacggcatcgccattgctgactactggcttgtaagaaggagacagatggcattaaaggatttatatgaggtaaacggtcgctacagttattcaacaggttttaataaaaacggtatttatgcattagtaattggcgtggccatacctgttttaggcttactgattcctggactgcgctttttatgggataatgcttggacatttggtctattcatttctatcatcgcttacacgtatctcatgagaggggataaaagtgtattagcgccgggagaatatgaagaaataacgtttaaaacaagcgaaaaaccgattatcgacagtcaaacggctgatccaaccatcactaaataaataagatgaatccaatcattaacatgattggatttttttatgtgttaaaactgtatggaagaaaattgataaaatttttttgagtttttttattgatttaagaatttttttttcatataatttaagtaataaaaaaatgaaatcgttttctaaattaattaatgtaaacgatttcgatagttggaacttatttttaaaaaaattcacaggtgtagagcttttttgctacatagagaaagcgtttacttaaagggaaggtggaaagcaagatggatgcatacttattagctattacagttgccgcaattgttattgttattgtaggtgtttcagtttttaaatggcatgcgtttattagtttgacggttgcgagtttgtttttggcaattgcttctgggttatcaatggataaaattgttggcgcttacgaaacgggagtgggcggtgttttaggccacttagtaggaattttagcgctgggaacaattttaggtaagctgatggccgattcaggtgccggcatgcaggtagcggattatttcgtaagaatattcggtgtgaaaagactgccatgggcgatgctagtagcaggtttcattattggtattcctgttttcttcgaagtaggaattttaattctactgcctttagttatttccattcataaaacaacaaaacaaaatatattattgattgctctgccggttattgcaggattatcaattgttcacggtctcgttcctccccatccaggagcaatggcagcgattagtatttacggagcaaatacggggaaagtacttttatatgcattaatgatttcaattccagctgcagttatcgctggaccagtttttgcaaaatgggttcacaaacgagtgattccagaaggagaacctgatctaattcgtattacgacaacatcaaaagatcttcctggtacaggcgtttcattctttgtcattttactgcccgtgctattaatggtcttagcagctatagcacctcttattaacggattgccaagcggtgtagtgaagtttgtagaattaataggaagccccttaattgcacttttaattgcttgttttgcagcgttttacctgcttggaaaacgtcaaggcatgaccaaagatgtgattaaaaagttaacggaagaatgtttgcttcctgtaggatccattgtcttaattattggcgcaggcggtggtttcaaacaagtattaatcgatagcggagtaggtacaacgattggtcaaatgtctgaacatctatctctatcgccacttgtacttgcatttttaattgctggattaattcgtattgctacaggttcagcaacagttgcattaacaacagcggctggtattgtctcaccaatcattgagcatatgtccggtgttaacttagaactgcttgttatcgttacgggtgcgggttcactaatgttctctcacgttaatgatgctggcttctggatggtgaaggagtatttaggattaacagtaaaagaaacgttcaaaacctggaccgttctggaaacgcttctatcctttattgcttttgcaggagcacttattctaaatgcattaatttaaaaataagactcttttactctatgtaaaagagtcttatttttttatgaaagaaaagaatttacaagaaaagtaatcaaaatattttatttattcgttaaattatggcaaaatagaaatagaagaataatagcttctaagaagggaatgacagagagtgagtaatcaactagtatttttcacaaacttttcagaaggaaaattagattcagacgtttcttggtattgtccaccagctcaatttcaaattgatacagacacgaatcgattagtgattaaaacagacgctaaaacggatttttggcagcgtactcattatggctttgaagcggacaatggacactttctttaccgtgaagtagaaggcgactttgaaatcatgacaaaggtgcatacatatccagttaatcgctacgatcaagcaggtctcatgattcgtgtatcaaaagatacgtggatcaaaacgtcagttgaatacaatcccgatggtcctaaccaattaggagcagtcgtaaccaaccaaggcttctcagattggtccagtcaaaattttactcaaaacaaatcagcgctttattttaaaattcagcgcaaaaacgatgattacgccgtttgttattcaagtgatggagattcttggactcagctccgactcgctcacttattgaactcaaccaaagaacctgttcaagttggtatttatgcttgtagtcctcaaggagaaggatatgaagcccaatttgattttataaaagtagaaaaaatgtaaataaaaaccacgatttagccacagctaaatcgtggtttttatttagaaagcgcattatctaaaggctgtgtggcagaagcggatgtcggttgattgtgtaaagcaattttttgcttgaagtagctgatgacaaaacctgtaatcgcaatggatataacagagaaaattccttttgaaagtccaattgaatacatgcttgacagcacgacaaggaaatcaaatgaaaaattcacttttccaggatcccagccgaattttcgctgcgcgaatagcgctagaatattagcaccgccgagagaagctccgttcataaataaaatggataagccaaggccggcaattagtccgccggtaacagcacccatcaggctaggaagtgtaaaagaaggaagcaagtgatcgagtgaagtgagaagcgatagcaaagacactgatcctatagttgtggcggtaaatttccatcccatttgaaagaaggaaaagagataaaaaggaatattaatgagaaaaaagatcaccgcaaacgataagggaagggcatatgacaagctaagagacagaccagctgttccccccgtcactacgtgagagtgccgaaagataagaacaccaatacttgcaatcgtacatccaagaataatccataaaacttttttcataaataaacccctttgtttgttttttcagaattttcattttcaatcatctactttaatgataggatattaaataaagaaaacacatgtataaatgaagggaataatacttgttctattatcaacttgaataaagattttatttattatattcattttgaaaggaaaggtttgtatggatcaaatcgatgcacaactattgtctattttgcaaagggacggacgtatgacgattagcgatttatcaaaaaagctggctcttagccgtccaagcgtatcagaaagacttcagcgtcttcaggaacgaggagtgatccagcgtttcagcgctacggtgtctccgaaagctttaggaagagatacacagctgtttattcaagtaagcgaattaaaaagaaaaccggaggaatttgaaggctttattgagcaaaatgaagacgtgcttgaatgtcatcgagtaactgggccggtttcttactttatcaaagcagccgtgtctggaatggatggacttagaatgctagtggatgaactgattccttatggaaatgtgaatacctcaattattttaaagtcgcctgtagaaaacaggatgattactcctgtacaaaaaccggccccataagaggccggtttttcgtgtaaggagatattaataaaatcctttaataatataaaaatgattttgtaaaatatcaggtatttcttcttctgaaacgttccttttcgtcttttttccgccatctgttacagttagcgtttcaccagagagggtaatgcgccctgtaggggttgcgatagtaacaagacgtttgtgtacaaacggagaatcggctgacgtttgattgaactcacacatgggagtaaagtcagtcagtttcttaggaagcgtagacacacggtacagcgttttccatacatcatcttcccatcgctgcaaatcatacatatgttcagcaacgtttgtcatacgataagagccgcttacatctcttactacttcgccatttagaggcattggtttgcgcacagaatctccaaatccaacgtctacgatgtaagactgattttcaaccgtcacaaggtttgtagcgtgacttccttcaatggtccacgtgccgtcgggttttttgacggtagctgaaacgtaagagacttcatatccgctttcttttaacagccagccaaatagaccgtttaattcgtagcaaaatcctccacgcaaatttacaattacttttcgaaaaattcgttctaaatcaattataataggggtttgagacagaacatctaagttctcaaaaggaacatgaagcatgtgtttgttctgtaaagcagctaagctttcatacgttgggctatctggtttcttagctaaaaaccgactaaaataataattaatattcatcaaatgcacctcttagtaaatcatttctctttgtctttagcagaatgttcatggaacagcgctttttcgattgtctctttggaagcgaatccttgaagtacacggctgccaatttttaaagttggtactttcgttacatgagcatcttcatacgcatgaactaagctatctttatgaacttgttcgaacgtccggtcttttaagatacgtgtaaatatttctttatctaaatgcaaagaatcagcgatttctgctaagacttcaatctggctaatatctttttcatcttcccaataagctttaaaaacagcatctacataggcaatttcttgaccatgttttttagcaaaatgaaagccttcatgtgctaaatgagtgcgcgggactggaggcatgtccggcatatttatttccacgtgcagctgttgtgctaagggagctatcaattgattccaaggtctctctaaaaaatcttctatttgctccatctgttcagctggctcaggacaaagttcaaaaggcttccattcaatctcagctttttgttctttaatgacttctcttaaagacttagtggctagaaaacatagtggacagacaaaatcaaaataaaattcaatatgcgctttcatcccgtcacgctcctttatggcatgtttttattttatcaaaagtaaagacgatccttccaacttgggaatcgtggaaaaatagttgacaaaattggataactctttctataatatagtcaatacatatcatgagcgattagttcagtgggagaatacatccttgacagggatggggtcgggggttcgaatccctcatcgctcataccaaagccgttttcttattaataagagagcggcttttctcttttgtttgacaaatcaatgctatattaattcttgagcgcgcatagaagaattaaagtataatgaaacatagtgcatcaggtcatgataaagataatcactaatttaaaataaatgagggtacaaaatgaatcaaagaagttttagtcaatatggtcttagcgacaaggtagctaaggcactttctagtctgcaatacaatcatcctacggaagtacagagcaaggtgcttcccattgcgctagaagaaagagatgttgtcgtgaagtctcaaacaggaagtggaaaaacggcctcctttggcattccactgtgtgaattagttaactgggaagaaaataagccccaggccttagtgttaacacctacacgagagctggccgcgcaggtaaaagaagatattacaaatatcggccgttttaagcgaattaaagcagcagctgtctacggaaaatcaccatttgccaagcaaaaagtagaattaaagcaaaaaacacatattgttgtaggtacgcctggacgagtgcttgatcatatagaaaaagaaacgcttgcattagagaaaattcgttatttggttattgatgaagcagatgaaatgctaaatatgggttttattgaccaagtagaagcaattattcaacgtcttcctagtgagcgtgtaacgatgcttttctccgctacgcttcctgaagatattgaagagctttctcgcaagtatatgaaaaagccggttgatgttgaaatcaaagcgaatggattaacgacaagtacgattgaccattctgttatatcagtagaaaacgaacgtaaatttgaactgctgaaagacgtaactacagtagaaaacccggacagctgcatcattttttgccgcacacaagagcaggtaaatacgctattagatgatttagatgatcttggatatccttgtgataaaattcacggggcaatggtgcaagaagaccgttttgaggttatgaatgatttcaaaaaaggtaaatttcgctatttagtagcgacagatgtagctgcgagaggaattgatattgataatatcacacacgttattaactacgatcttccgttagaaaaagaaagctacgttcaccgtacaggaagaacgggacgtgccggtaaaaaagggaaggctatcacatttgtaacgccttatgaagagagaatgctatcggaaattgaagaatatatcggcttttcaattccaacatctactcctccttctaaagaagaagtacagcaggcagcatcctcttttactgaaaaaattaatgagcgtccagaagttaaaaaagataaaagcgagtcattaaataaagacattatgaagctgtattttaacggaggaaagaaaaagaaaattcgagcggtcgattttgtaggaacaattgcgaaattagacggagtaaccgcggacgatattggaattattacaatccaagaaaatgtctcgtatgtggagattctgaatggaaaaggtaccaaagtgttacaagcaatgaagaacaaaacaattaaaggaaagaaattaaaagttcataaagcaattaaatagcagaaggaagtccatctttttaaagatgggctttatttatagagccaataaaggagttgagagtatgaagtacataaaagaagcgtgtgtagaagggtatgagcaggcaaaaaaagcagaaaagctaggagcagaccgcattgaattatgtgacaatctcagtcaaggaggcactacgccaagttacggcaccattcaatatgcaagggaacatattgaagcagatatcaacgtgattattcgcccaagaagcggtgattttgtatattccgaagcagaatttcaaattatgaaaaaagacgttaaagcatgtaaagaccttagagtaaacggggtagtattcggcattttaacagaagaagctgaaatcgattacggacgcactaaagagttaatagcagaagctcatcctttaagcgttacgtttcatatggcatttgatgagattaaagataaatacaaagccattgatatacttagcgaattgggagcagaccgtattttgaccaaaggagggaaaggatctgctttgcaaaatctgcatatgatccgagaattgatcacatatgctaacgaccgtattattattttgcctggcggaggaattcatgaaggcaacgcagcgcgggttatgaaagaaacaaaagcagctgaattacacggaacaaaaattgtaggagatttgtctccttaaataaaaagaggctgggacaaaagcattttagtacaagtgaaaaacgaaccattaatcaatatgtttgattcgtggttcgttttttgatggtgaatatagtttcatctgtttcgttccttctagcaagtgattggagggcaaggcgaagactcctgtgggaacagcggaatagatgagaccccgcaggagcataagcgacgaggaggctcagcggccgccctcggaaagcgaagccttgcacggaaatcaactgcggtgtaataagcagtcaagctcatctatctcatttgttcatctttaggttggattcatttagttatgtctcaacctcttttattttgatgtatttccttttgctgctaagccgctcgtcattttggtacgttgagagaaaaaagaacccacgacgagtacagaaattaaaagagttaagaagaactgagaacgtaatgaatcaataaatgccatggcaataaaaatactagtgatggcaaggattgtagcgtaagttaagtaaggaaataaccacattttaatttttaatgcttcgggattttctttttcatatttttttctcattttaatctgtgaaaatgcaataacaagatatacaagaagcgctacgccgcctgatgcattcactaaaaacaaaaagattttgtccggtgaaatgtagttaaagataacgctaatgtacgagataactgtacaggctaatatcgcgctaaccggcacgccttttttatttaattttgaaaagctttttggagcatcaccgttttgagacattgaaaacagcatgcgagaacttgtatacagaccagaattcagacaggaaagaacggctgttaaaataataaagttcataatttgagctgcagcaggtatattcactaattcaagaatagatacaaatgggcttttcattaggctcgacgaattccacggaagaaccgttactaaaataaaaatagagcctaaatagaaaaacaaaatgcgataaataacggtattggtcgcaatggtaatggctttttcaggctgtgaagattcacctgctgcggttgcgacaatttctgttcccataaaggagaacatgacaagggcgattcctaaaaatacggagctaattccattcggtaaaaagccgcctttgtgcaaaagattggaagtgccgggagaatcaattcctggaatgaatccacaaataatagctatacctaaaagtaaaaaaagaacgatactgacgactttaatgagggaaaaccaatattcaaattctccgaaagatttaacagagtacagattggtcattgttaataaaaaagtaagagctaggcttactccccaagacggcaaagacgggaaccagtattgaataatatttgcacctgcaatggcttcaacagcaataacgataacccagaaaaaccagtagagccagccaatcgtgtagccggcccaagggccgaatgcctcttttgcataagtagaaaaagaaccgctggaaggattggcagtagacatttcgccaagcattcgcatgactaaaataacgagcaaaccagcaaatgcgtacgaaaaaatagatcccggtccagcggtgttaatgagcgatccgcttccgataaacaatcctgccccgataattcctccaagagaaatcatggtgatgtgccgaatctttaactctttctttaactgtggctgtggatggctgttcaattgtaaaacctcctatataacctggatttttagttaatatggagaattatagtatgttgtaaggcggaaggacaggatgttgttagaagttctttcatgcaaaaagccggatatgaattatttacttcatatccggcttattctgacacagacattcattatgcgtataaattatctgattagcgtttttttcttttattatgataagcaatggagatgactttcttatgaacgttagctgaaaagcagctgaataatcgttttagataccttaatcgaaagaggtatacgtctaattaaaggatactatggaagaatttctaaactctttccgaagcgctaaatgcgggttttcctttctgaaaacgggtatatatagtagtaagaagtttattcttttgttaagtataaaagaaagatgtgcgatagaaacaggaggttataaataatgaaacatgttgaagtagtagaaaaaggagcaaacattaacgaagcagttaatcaatttgcagacaaaggttttgagaaagatgaagtatacgtgtttacgtatgacaaggaaaattctaaaaatttaacagaagtaacggatacaaatattattcgactgtctgaagaaggacctttacattcagcagcgagtttatttttaacaagagaagatgagcttcggacaaaaatggcttcactaggcttatcaaaagacgaaacaaaaaaatatgaagaggagttaaagaaaggcagtgcgattgtagtagctgctacaggagaaagaaaggacgtttaattttaatagaggctagggcaaaagtagtttagttaaaggaagatccgaacgcgttcggatttttttgtaggggcagtgtaacaagtgatctatacgaggtcctttatcccatttgttcgtctttagattcaattgattgcgttatgtctcacactttttttgttttttttcaatatatgattgataaaactaatggtattagttaagataaaaactaataccattagtttttattttgataataggggatgaggaaatgagaatagttcgtgagaaaatgttgtatcaactgacgtttttgcctcgcttttttccagtgaattgttatttagtcgaagagaaagacagtcttacattaattgatgcagctcttccttacagcgcgtcaggtattttgaaagctgcagatcaaattggcaaaccgattactcgaattgtttttacacatactcatgaagatcacatcggagcgattgataatttgaagacaagtttgccgaatgcttctgtttatatgtcgcaaagagattatcgattattttcaggagatttcacactcgactctgaagaacctcaaaatccaatccgtgggggaataccaaaactaggaaaggtttcaactaaaattgatcatttcatcgaagaagagtcttatataggctcacttgctcctatttttacacctggacatacacctgggtctatgtcttttttagaccagagaacgaacgcattaattgccggagattctttccaagtgcgagggggaattgcggtatcaggtcagttaaaaccgctgtttccgtttcctgcctttggaacgtggagcaaagagctagcccttaaaagtgcagaaaagctgcatgaactaaacccgtcacttcttgctgttggacacggaagaattctttctcagccgctaaaattgatgggaaaagcaatacaacaagcaaaagtaaaaatagaaaaaaggagatgaagggatgtcgccacgacaaggactagatttcaaaaaggtgattcaaacaggtggaaatttggccaatcgtgaaggattttatgctgttacaattgcttcattggccaaagaactaaatgttcgtccaccgtctttatataaccatataaaagggttagaagagctgcgcaaagaactggctttaagtggactgcagcagctatatcatcttttaaaaagtgctgttgagcacgcttctagagaggaagctgtttatcagctaagtaaagcatacgtttcatttgtaagggaatctccgggactatatgaagcaacggcaacggtagcaccaaggatgcaggacgaagaagtacaaaaagcatctgagaatattgtgattttagtattggatgtgttgaaaccgtatcatcttccggaaaaggaagctcttcatgctgttagaagtctgcgcagcattttacatggattttcttctttagagcagcaagggggatttgggattccgttaagtaccgatgagacgctagattttttaattcgtacgtttatattggggttacaacggtatgaacagaccatataaattctattaatgcaactaagcctaactctttagttgaaattgaaaaaaaagagaaagaatgatagattacaaataaagacatttattcctattgttttagggttgttactgatgaagcaggcaaaacctaagctgcaaggacagaaaaggtaatttctgtttgttgctgtttaggtattttttgtttttatttaaaataaccagcccctttaatttgttccctaaggggaaatcttctgagaacggagagaagcaaacatgcttaattcaagaatgatcgtcatattaagagaactaatgtccgtacagtctacactatcaaccgttacgagcgaatatttagcaatagtaaatcaagtatcttctcgcactattcgaacggatataaaacagctagatgacattttgtctcagtatggagccaaaattaaatcagctcgaggaacgggatatgaacttagcgttttagatgaaaaacagtttcatcagctattaaaagaactttcggctaatcaattatttgatgcaaattctattccaaccgttcctgatgaccgcgtgcattatttaattaaaagattgctgttggcagacggatatttgaaactcgaagatttagcagacgagttgtatattagcaagtcaacggttcaaaacgatttaagagatgttaaaaaacagctgtgtaagtataatattcttttagaaaaacgtcctaactatggcttgaaagctaaaggggacgaaatgaaaatgagattttgtatgtcagagtacatattcaaccgaaaagataaagaagtagatatggtgcacaatgaaatatctatcctgcctcaagaatcaatcttaaccattaaagcccacattttaaatcaaataaaacgatacaatattatggtttcagacattggattaaacaatttaatcattcatttagcaatagcttgtaagcgaatacaagaagagaattttatctctttatattcagaagacctgcttgaggttatggagcataaagaatatgaagtggcagctgaaattgtgcgggagattgaaaaggcatttaagattcggtttcctaagtcagaaacagcctatattgccattcatttgttaggtacaaaaatgctcaacaatagcagtcatgaagaaaaagaagtgaagcagtttattgacaaaaatatttataaattaacagcggctatattagaagcaattgaaaaagagcttcatttaggaattagtgaagactcagagctaatccttggcatgagcttacatttgaaaccggctatcaaccgctataaatatggaatgaatttgcgaaacccgatgcttgaaggaattaagagccattaccctctagcttttgaagcagggattatagctggaaaagtgctgaaaaattgccttgaaattgatatgcatgaaacggaaattggctatttagctttacatattggaggagccattgaacgtcggaaaattattaatcagcctaagcgctgtttaattgtatgcgcatcgggagtagggagcgccaagctattatcatataagctgcaggctacgtttggattaaacctgactattttaggaacaactcagtattataagcttcaccaaatgtcgctgcactctttagattttattgttagtactattccaattccagatcatcttcccgttcctgtagtagaagtaagtaccattctaggaaacagtgattttaaaaaaattgaatgtttaatgaagaacaaacagcggccttcgttagaatacacaaaaaaagaactagtatatttacagcaagaatttcaaacgagagaagaagtgcttcattttttaggaggaaagttaactcatttagggctagttccttctcaatttatagaatccgtttttgaaagagaagaggcatcaccaacaagttttggcaatctcgttgcgattcctcatccaatggttcctcaaacggatacgacgttttgggccatttgcacgttgaaaaaaccgattatgtgggaaggaaatcttgtacaatttatttgccttttaagtgtaaaagcgaataatcaaggcgatttacaaaaaatgtacagtttattagttcaagttgtagatgataagcaggtggtgcagcgcttagtaaagtgcaaggattacgaggaatttatagaggtgtttatgaaaaatatcagataagaagaagtccaagagagtgacttctttttttatctgaatgttcaaatataatttttccgttagtaacggaaaaaggttgtgtataaatgtaagcgcttttattttaagatgaaactatcaacaaaacagatagcaaaataaaaaaaaacgggggaatgtcaaatgaatattctattatgctgtgcagctggaatgtctacaagtttactagttacaaaaatggaaaaaagcgctcaggaacaaagtgcggagtataaaatttgggcggtccccggtgactctgttcgcaatcatattgatcaagcagatgtacttttattaggacctcaagtgcgctacttattgcctcagcttaaaaagctaggtgaagaaaaaggggtaccagttgacgttattaatcctgttcactacgggacatgcaatggagaacaagtgttaaattttgcagttcaactagtttcaaaataggagcgtgaactacatgagcaaatttaatagtatgcttgaaaacaaagtaatgcctattgctggaaaaatggcgggtcaacgccatttacaggcacttcgagatggtattgttctaacaatgccgctcattattatcggttcagtatttttaatactatcgaatttaccgataccaggttatagcgactttatggcagggatttttggaaaagaatgggcaacaaaaatggcctatccagttggagctacattcgatattatggcgctgcttgcttgtttcgggatagcctatcgattagctgaaaaatacggagtggacgctttgtctgcaggagctatttcacttgctgcctttttacttgctactccgtataaagtatcgtttctcccaagcggcgctaaagaagcaattttagtagacggcggaattccaaccgctttaatgggaagtaaagggctttttgtagcgatgattgttgcgattctctctaccgagatctacagatggtttattcaaaaagacattatcattaagatgcctgatggagttcctcctgctgttggaaaatcgtttgctgctcttattcctgggtttacggtaatagcatttatttggattttacgtttgttagtagaacaaacgcattttggaagtcttcacaatattgttggagaattgcttggaaagcctttaggtgtgctaggcggcagtttaggcggtacgctagttgccgagcttgttattatgctcatgtggtcatgtggacttcatggagcgaatattgtgggtggaattatggctccaatttggtatggagctatggatgaaaaccgaattgcttttgctaaccatgaagcattaccaaatatttttacacagcagttctttgatatttggattaatatcggaggcagtggagcaacgttagctctagttgtagctatgattttaaaagcgcgcagtcaacaaatgaagcagcttggtaaattaggaatagggccagctctttttaatatcaatgagccaatcatctttggacttccgatggtgatgaatccaatgatgcttattccgtttattattacccctcttgtgacggtagtagcaacctatattgccatgtcgacaggactagtagcaaaaccagcaggtattgcggttccttggactatgcctccgattatttctggctatctggcaacaggagggaaattatcgggtgcagttatgcaagctattaacattggaatctctgtttgcatctactatcctttctttagaatgtgggataaacaaaaattcactgaagaaaatggtatacagcctgcagctgaaggggtaccaagtgatacaaagaaagatattgtgtgaggagggataaaggatggaaagcattcaagaatatatttttaaattaatcttacacggtggaaacggcagaagttcagccatggaagcgatagcagctgccaaaagcggaaatttttcagaagcacgtgaaaagcttacacaagctgcagaagaattaaatgctgctcatcatatccaaacatcgttaattcaaggtgaaattagaggggaaagcacagaaatttctctgctcatgattcatgctcaagatcatttaatgaatgcgatgacggtaaaagaaatggctactgaatttgtagatttatatgaagcgatcaaaatttctggggggattacactatgaaaaaaggtattaagattgtaacgattggcggaggttcaagctatacgcctgaactaatagaaggatttattaaacgatacgatgaacttccagttcgagaactgtggctagtagacgttgaagaaggaaaagaaaagctagagattgttggtaatttagcgaagcgaatggtgaaaaaatcaggtttgccaattaatgttcatttaacgttagatcgaagagaagcactaaaagatgcggattttgtaacgactcaatttcgcgttggtttgttagatgcacgggcgaaagatgaaagaataccgcttaaatacggggtgcttggtcaagaaacaaatggaccgggcggattatttaaaggacttcgcacgattcccgttattttagatatctgccgtgacattgaagagttatgtccagaagcttggctgattaacttcacaaatcctgcaggcatggtaacagaagctgtgctccgctatagtaacattaaaaagattgtaggactttgtaatgtgccaattggaatggaaatggggattgctaagctgcttgatgtagatcactctcgcattcgaattgattttgctggtttaaatcacatggtctacggattagatgtatatgtagatggtgtaagcgttaaagatcaagttattgatttattgagtgatccaactaacagcagctttgtgaaaaatgtagcgggacttggatgggagccagaatttacaaaagccctaaatgcgttaacgtgtccatatcacatgtactattataaaacgcgtgaaatggtagaaaaagagcttgttaattatgaaaaaggtgaaacgagagcagaagtcgtaaaacagttggaaaaagagctgttcgaactgtataaagatcctaatctagacattaaaccgcctcaattagaacagcgcggcggagcctattatagtgatgcagccgttcgattgattacatccatttatacggataaaggtgatattcagcctgtgaatactatcaataatggtgccatagcaagcattcctgctgattccgccgtagaagtaagctgtattattacaaaagatggtccaaagccaatttcagtcggtgaccttcctgtacctgtccgcggtcttgttcaaacaattaagtcatttgagcggattgcagctgaagcagcagtgacaggagattatgacaaagctattttagcattaaccattaatcctcttgtggcttctgataaactagctaagcaaattgtcgatgagatgttagaagctcataaggattacttgcctcaattttttaaaactgttcaagcttaaagtcaagctattcgaatacagtacgtattcgaatagcttttttctatttgtaaagctagatttctgccaccatcaatgtaacaatataaaatagaaacggacaacaaagggtggctagaaatgattcatttattaattatgatggtagaacgagtcggagttattgtcatcttaggttttttgctggcacatacaaaagtttttcggcaatttctccgcaaacagcaaggttataaaggaaaagccgtacttatttttattttttctctttttagcattattagtaactacacgggaattgaaattcaaggaacaattattcgaaatgaagacttattattaaaagtagatccatcaagctcgattgcaaatacacgaattatgggtgtggaaatgggcggtctgcttggcggtccttttgttggtttaggagtaggactacttgctggcgttcatcgctttatattaggagggagtactgcgtttagctgtgcagtttcatccgttttagcaggggtgttaactggatatatcggctatgcctaccggaaaaaacatcgaacgattacaccgcgctttgctgcacttgtaggcatagcgatggaaacgctccagatgctgattattttattatttgctaaaccgtttgattcggcatggacgctagtgagtattattgctattccaatgattattgtaaatggcacgggaagctatattttcttatctattattcagtccattttacggcaagaggaacaaatgagagcgcttcagacacacaaagtattattaattgcggatcaaactcttccacattttcgtcagggtcttactagtgaatcatgtgaaaatgttgcaaatattattcatcgcttcacaggtacggatgctgtttcgttaactgatacgcacaaaattttagctcatgtaggggaaggaattgatcatcacgttccttcgcatagtttaattaccgggctgtctcacgaagtgctgaagacaggaaaaattatgaaagcaaaatcgagagaacaaattgattgtcagcataaagactgcccgcttcatgccgctattgtgatgccgcttacttctcacggtactaccattggaacactaaaaatgtactttaaagatgcgagcgggttaagccgggtggaggaagagctggcagaaggattggctaaacttttttcaactcagctagagctcggcgaagcagagcttcgaagtaaattgctaaaagatgcggagattaaagctttacaggcacaggtgaatcctcactttttatttaatgctattaatacgatatcggcgctgtgcagacaggacgtagaaaaagccagaaagctgcttttgcagttaagcatttattttcgttccaatttgcaaggtgcaaggcagctgttgattccgttatcaaaagagcttgatcatgtccacgcgtacttatcgcttgaacaagccaggttccctaataaatacgaaattgacatgtatattgaagaagagctagatgatgtcttgcttccgccgtttattcttcaagtgcttgtggaaaatgccattcggcacgcgtttccgcgtaaacaaaagcactgtcgcgtagaagtttatattgagacaaaagataaatatgtatacgtaaaggtaaaagacaatggacaaggtatagacacaaaacgattgcaaatgcttggtaatcagcccgttttttcagaaaaaggaacggggacggctctttacaatattaaacaacgtttgcatggattgtttggaaaagaaacaacactggagtttgacgtaacagaaggaacagcggtttcgtttgttataccaattgaattaaaaagcgagggtatgtaatatgctgcgagtactaatagtagatgatgaaatgttagcgcgagatgaattaaaatatttattacatcgaacgaaagaagtagatttcattgaagaagctgaaagtatcgaagaggcgttggataaaatgatggatgaaaagccggatttattatttttagatatacaattgtcggatgacagcggttttgatattgctaaaaggctcaaaaaaatgaaaaatcctccagctattatatttgcaaccgcgtacgatcagtacgctttacaagcctttgaggtagatgcaattgattacattttgaagccttttgatgaagaaagagtggtgcaggccattcataaatataaaaaaatgcgtgttcctcatctcgctttgaaagaagaagaatcgataggagagtcttcttctcaaactggaaagttagcgatttctgtagatgattcgattgtgttggtgaatataaaggacatcttgtttgtaggattaatagaaggagaagtcaccattcagaccataacagaatcctaccatactgctgatacgcttgctatgctagaaaaaaagctcccttctcagtcgtttagtcgtgtgcacagggggtatatcgtcaacgtaaatcatatttccgaagtacagccttggtttaattctacgtataatttagtaatgaaaaacgatgagcgagttcctgtcagccgtacatatgctaaagaattaaagaaacgtttaggaatttaaggaaaaagcagcttgcgtatgcattttggcaagctgtttttttgcatttcaaggctcgatttttgtaagtgagcacaaatatttgactctttaatttgaaaacgctttcttattgattttcattttatataatgaagtcaacaaacagagagaggtgaaagaaatgagtgctaaaaaagtgtatggctttttaacacaagcatttattttttccgtaattatgttgatttcagattttattgcagagcatttgccttttccaatgcctgcttcagtcattggacttgtgctgttatttcttgcactctgcttgaagattattaaactagagcaagttgaatcactgggaacggctttaacttctttgatcggatttttatttgtaccagcaggtatttctgttatgaattcattaggtgttatgcagcagtacggcattcaaatttgtttagttatcatcgtggcaacgattattttgctaggcgttacaggcttattttcacagcttatacttggcatgacaaaagataataaagcaaaagaagaaataaaagatgtagatatgggtgaaaaaacaaaaaaacaaggtattgcttaacatcaattataaagagacaaggtggttggaaagatgaatccgtattttggaatcgtggtttctttagctgcgtacggcattggaacgtatttatttaaaaagtcaaaaggttttttcttatttactcctttatttgtggcaatggtactcggaattgcttttttgaaaattggccatttttcttatgaggaatatagcagcggcgggaaaattatcagcttctttttagaaccggcaacaattgctttcgccatccctttatataagcaagccgataaattaaaaaagtactggtggcaaattctttcttctattgcggtagggtcagtttgttcggtagcgattatttttgcgattgctaaaggtattcatatggatgaagttgtgatgaaatcaatgcttccacaagcagctacaacagcgattgcgctgccattgtctcaagatattggagggattcctgctattacttcctttgctgttatttttaatgcagtcatcgtatatgcgctgggcgctttatttttaaaagtattcaaggtgaagaatccaatttcgaaaggattagctcttggaacttctgggcatgcgctaggagtagccgtagggattgaaatgggagaagtagaggcagccatggcaagtattgcagttgttattgtaggcgtcgtcacagttgccgttattccactttttgttcagctagtcatgtaacaaaagcctgaaggagtcagagattttctgactccttcaggcttttgtttgttaattaatacaccactccaaaatgtcgtgatgcgcagttttgacaggttgtatggtcaaaaagactctcaggaatgataaattcaaaacaaaattgacattgtttgaattgactttgtctataaaacattgtctctaagaaaatagctgtaatatgttccgttatgtgcttatgggaacgtcgttctaaagtggaccatggaatagactgatgctctatgtaaatcggacaggaagtatagggtgtatcccattgaatggcttgatatccaaacgtaaggccatgatgagctgctgatgtaaatatgattaggttttgatggaattctggcagaggtaattctagtttttgatctttaagcgatctcgttttggaatgaaggttatacaatttaatttgaaaatgaatccactgagtggcgtgaacggttattgacatgttttaaacctccaattcagactctttcttttatcataattgatttcaaaataaataaatagtaggcaaaaagaagataacaaaactttatatagattacttataaggcgtagggaaaggtgatataagcatagcatccttttttctacccctttttaaagtatattaatcttctatataaaagcttgctttcaacgaatggtactggcatattcatacgctttaaacagattttaatgttagaagttataacaaggttcattttttttagagaagtttatgaaataataaaagctgtatattttacggtctgaatctatgtgttggaggtttttatatgacaaaacaaaagctgatattaatcggaaatggaatggcaggaatgcgctgtattgaagaaattcttattcattctccaagttgttttgatattactgtttttggaagtgagcctcacgttaactataaccgaattttattatcaaccgttttacaaggcagtacaaagcttgaagatatcaatattcattctttggcatggtataaggaaaataatatcactttatttaaaggagaaagcgttacgcacatagacaccaagagaaaaataataaaaacagataaaaacagagagacgatgtacgacaagcttattcttgctactggctcgagcccgtatatgctccccgttaaagggtctgacaaagaaggtgtcctcggttttcgtaccatcgaagactgtcaggaaatgattaaaatttctaaacagtataaaaaagcagcggttattggaggaggtctgttagggctggaagctgctaggggactattaaatttgggaatggatgttcaagtcattcatcattcgagtttcttgatggagcgacagttagacagagcagcatctgctatgttaagagaagaattagaaaagcaaggcatgagttttctattaaacaaacatacggatgagattatagggggaaatcgagcagaaggcgttcgatttaatgatagcagtaaaattgcagctgatttagttgtaatggctacaggagtgaggccaaatgttaatctagctaaaaaaagcggaatagaaacaaatagagcaatcatcgtaaatgattatttagaaacgagcatcccggatatctatgcagtaggtgaatgcgcggaacatcgagggacgacatacggccttgttgctcctctttacgaacaaggaaaagtcttagcgcgacatctttgccaaataaaaaacgacggttatcgcaggtccgttatttccactcaattaaaaatatcaggaatagacgtttactcagtcggagaattcaaggaaaatcaaggtgcaaaagccattacgatttcgaatatgttagatggtatatacaaaaaagtagtttttcgcgaaggcaaaatagtgggagctgttctttttggagataccagtgaggctataaagctatcacaaatgattaatgaaaaaaaggatttgtcgcaagcggaaaaagtacaattatttccttctcaacatgaaaaagaaagtgcagtaacttctatgccacttacaaatatcgtatgcaactgtaacggtgtaacaaagggaaccattattgaagcagtacagaaaaatgatttaacgacagtagatgaaataaaaaattgcacgaaagcttctggttcatgcggaggatgcaaaccccttgtaacagatcttttaacatatattcaaagcgatgagtttgatgaaatcattgaacaaaaaaccttttgtacatgtacacatttatcagaagatgagctggtaagagaaatgcagcaatatcaatttgagacggttcagcaagtaaggaaaatattaaagtttaaagacatgaaaggctgttcgttatgtgaaggcggtcttcattactatttagatatgatgaatcctcattatgaaaacaatcgacattctttatttactacggagaatgaacaggccgttttgcttcacgatgggacatatgcagtggtaccgcaaattcacggtggtctgacaaatgtacaggaattaaggaacatagcaaatgtagctgaaaggtacaacatctctaatattcgtttaacaagtgatcagcgcattcaacttattggagtgaaaaaagaatatcttccgttgataagtgaggaaatagatagaggacttcagcagctatatgaacgtacagttaaaaatgtatctgtttatataggaaaaggaaagtgtatttgtcagtatgaacctgctcttgctttatcaaatgaattagataaacagcttgaatatgtaaagaccccatgtgatatcaaaatcagtattgcttcgtgttctcacattgcagagagtgtaacaacaagtgatataggattaagaagaatagacaggggatgggaaatatatgctggcggaagcagcgcagaagccagaagcggggagctgttttatgtggccgaaacgaacgaagaagcagtagaaatcagctgttctttgattcaatattaccgtgaaacggggaactatttagaaaccgtcgggagctggatcgagcgagtaggaattgttcatgtcagagaagttttgtttgagatagacaatcgagagtatttaatgaagcagctcagttcagagcgctctcgtgcaatcacatatttattataggaaagaagggtgacctacgatgactgagatgctattgaaatattttcgtgagcagcaaaagcaagttgaaaccgagcgtatctataatactcagtgtccttactgcagcatgcagtgcaaaatgcagttagttgaacaaacacatgtgaaaaggaaaacgtataaaacaattggaacagacaaccctacttctcaaggaaggttgtgtatcaaaggaatgaatgcgcatcagcatcctttgcataaagatcggattcaatatcctttattaaaagtaaacggggagtttgtaaagatttcttggaaagaagcttttcgctatattaaagaaaacgttacagagattcaagagaagaatggagcagatgcgctaggtgtttatggaagtgcctctattacaaatgaagaagcttatttattagggaaatttgctcgagttgcgttaaaaacaaagtatattgattacaatggacgcttatgtatgtcggctgctgcttctgctgctagtaaaacatttggcatggacagaggatttacgaatagcttgcaagagattccgtttactgaatgtattatgttagctggaacaaatattgcggaatgtcagccaacgattatgccttattttgagaaagcaaaagaaaacggagcttttattattgcaattgatccaagagaaacagctacaactaaaatagctgatttacacttgaaacttaagccggggagcgacgcggcattagccaatggaatcttgaaggtccttatcgaagaaaattatctagatgaacgatttctacaagaacgtgtcaatggatttgaagaagtaattcaatatgtggcgtctctagaatttaatatcattgaagaaataacgggagtgccacttgaagagatgtaccaagctgcccgtatgtttggccaaagaaaaacgggaatgatttttactgctagaggggtagagcagcaaacagacggaagtgctgcggtgcggaattttttgaatattctactttccgttgggaaaattggtaaacctcgctgcggatatggggccattaccggtcaaggaaatgggcaaggagcccgagagcatggtcaaaaagcggatcagcttccaggctaccgttcaatcgaaaaccgcgagcaccggatgtatatagcggatgtgtggaacatagaggagaaagatcttcctagaaaaggtgtttctgcatatgagatgattgaaaaaattcatgacggtgaaattaaagggttgtttttgatgtgttcaaatccaacagtttcaaatccaaacgctaattttgttaagaaggcttttgaaaagcttgaatttctagtagtagcagatatgtttgaatcagaaacagcaaaattagcaaacttgatcttaccagcatcttcctacttggaagatgaaggaaccatgacaaatatagagggaagagttacattacgcgaagctagctttccatgccgtggcgaaatcaaacacgactgggaaatactatgtgaaattgccaaagctttagggaaagaggaacatttttcgttttcatcagctgaagaaatatttaatgaactgcgaatagcaagtaaaggagggattgccgattactccggtattacgtacgaacgattacgagaggaaaaaggaattttatggccatgcagaagcttaacagataaaggaaccgagcgcctgtttgagacgcgttttgctcatagtgatgggaaagcgatgatggtccctgtctcgaatcaagctattgttcctaaagcaaaaataaccgaaaaatatcctctctatttaacaacggggagagtgatgtcgcactatttaacgggtgtacaaacgcgaaaaagtgcgtctttatctgctagaaatttcgaatcttttatggaaattcacccttcaacagcgaaaaaatatgaaatttcgaatcaagaattagtacaaattgaatcttcatatggaaggattgtggtaagaagcaaattttcagagggcattcggccagataccgtatttgttccatttcactgggcggattctcaaaatgttaataaccttgtctctgagaaattagatcctgcctgtaagatgccagggtttaaagtaagtgctgtgaatattagcccttctgtaaaaagaagtagctattaaaaatgctgatgcaaaaagcctcttgaaaaaagaggctttttacatggaatcaggcaaggtgctttttgttaatacgtacatcttgttttttgaatccagaataattcagtaagagacagaatagggcaaaaagcgctagtaaggaaaaaccgacaacgtaatctccgcttgtatcttttataaagcctagcacaatagggggaaagaacccgcctactcctccgaatgcgcctacgatcccggtaacagccccaatatttcctgttgaaacagatggaaccattttaaaaacagctccatttccgataccaagagtaatggctgcaagtaaacaacctacgctaaataaggagaaggcagtgatggtaaatgcaataaataaccctattagtagcattccggtaaagacgaaggtgagtactttttttgctccgaagacatccgataaatatcctccaagaggccgtacaaacgttgctagtacgacaaatccagctgttttcagcccactgtctacagttgaagcattaaattgatcatgcaaaatggtagggagatagatgctgaacgttacaaatccaccaaatgttaaaaaatagaaaatggataaaaaccacgtttctttaaattttaataccgagaaagattcctgcagcgttttgggggaagcagcagaagggtggtctgaagttcctacccataataaaagagccattaaggctaccgcaattgctaaactccaaaatacccaaggcaagccaaaagaagaaaagataagtggaatactaaagcttgctaccgctgatcctaagttgcccatcccggcaattcctaaaataaaaccttgcttttgagatgaataccatttagagacatatgtaatggaaatagcaaatgttgttccagccatgccgataaaaaatgcccaaaagagcagcatggaataagaatgagtaaagcctgcacaaatggtagggagtaaaagagccagcatagtcaaagaatagacttttcttcccccgaagcgatctgttaaaatccccatcggaattcgcatgagggaacctaataagacgggagtggcaattaagatacttttttcagcattggttaatgaatacatcacttgaatatctgcagcgataggcgcgaagaccgaccatactgaaaaagcaataatcatagataaagtcgagataagaagtacagataagggccgtttagaaaacattgcttaaaaacctccttttttatatgcagcgtaaagctgttgcaatatggtaattatgatactacgctttctttcttatgtatcattctatgttaggttttcttccgtgcttttgctgaggaacggatgcagataaaggtggagagataacttacactctatctaattgctgatgaagaaacggttaaaaagctttgaaagaacagtaagtagaaatattgccgaaagaatggaagaaaaattgaaattagaagaggttaatagagtaagcatctataaatttgtgctatcgaattatagcgaaataaaaaataattcatattttatatagaacacaaatttttgaaatagaaggtggaaaaagtgacagaaaagcatcctctttcaggttataaaaaggatgataacggagttctctggatatggagttacgttggacaggctagagtgaaaatggggtataaagtaaaaagtctgcttcactatgagcaatcttcctatcaacaaatcagtattgtggatacaaaatggtatgggaaaatgttggtgctagatggtactccacaaatttcaacaggagaagggtttatttataatgaaatgattagtcatgtgccaattataacgcattcaaatcccaaaaaagttgcgatgattggcggaggagactgcggtcctgcacgggaggccatgaagtatgacggaattcaacaaattgatgtagtcgaaatcgatccaaaagttacagaaatctgccgcacatggctaactccggcttcttgttatgatggtgaaaccaggctcaatatgatacatcgcgatggaatagattggattcaagaacaaaagggagtttatgatgttctcataattgaccggcctgaccctgttggaccgggaaaaaaactatttcaacctgatttttatcaatatgtctacaacagccttaaggatgatggcgtggttgtttttcaatcaggatctccttactacaatacttctacattacaaggcacaattaaaaatctaaaggagctatttccaattgtccgcacatatttagtgactatacctcttttcccttgcggcatttggagttttacgattgcttctaaaaaaatggatcctcttcaggccgatttgacgaagctacagcatacagatactcaatatattgatcctgaaattttccgtgcatcatttgttttacctaaatatataaaagaaatagtagacggaaaagattcctaaaaactaagtagcgacgaatgtttgttgaaagtcatcaataatctcggaaaatatatttgttatagtagttctgtgtttgctgcgcagggtccgagataattcaatttgaaatgtattaaaattatgactgtaacctagatagccgctattgtcaccttgtctgtgaaaggcaattgattcgtctccaacaaatttattatcaaatattacatggattttcgggaacgaatcttcaaattttttagtcagcgcctgttgaaaccaatctttaacttcctttgagcaagattgtccatataaagtccccacttcaattgcataaggtccgtaatgtgtattcttcattccatgaaaagataaatgcaaatagggcgttagaaggcgattattactatctactattttcaaatatttaacaatttcttggattgttcttctatattcatatatcccctcatggtttgtttcatttagatttctatttaaatctgctatggttctggaaaccgtactaacgattcctgcacatcctgttttcttgactaaattttctacaactttatccgtaaataaatcagcagcaggtggctctgcatgaagtgcatccacatgacagcttataaaaccagttcctttgttgtattttaagtagtttccatgaatgaattttaatgtcattgactatttctccttttatatcgtttgaaatctatcctttctataataaatgcagtaaaaataaaatcggtgaattattacacgtgttaaatacatacataaaaagtttttagagatggtggaaataaatagataaatgtacaggattattttgtatagttacatactatatgagtagctgattattgttatagggcattaaagtagcaaaatacgatagaaagttctaattaggaggctttaaaatggatccaatgagagaagagttagggatattatctgataaagaaatgacgttgcaaactcttaatctgaataatataccgtctgttgaattagttgaccccaaaacctgttcgtatccagtgatagggaggaaatatggtcaccatagcggaagagatattgttatcgtaaatacaaaggaccaagcaatatatgaaggatatgattattttacgaaaatatatgcaatagacaaagaatattgtctagaagtagaaggactgagcgtaaaaacagtacaagtagtaaccagtgaacatgttgtatttaatgaaatacccattcgaacgcaagccttcggctggaaattagaacaggtaaacggcatgaatgtaccggaaatgctgatgaacatagccattcgagcgctttacgtaacgggagctaaaagcggctttgtcaaaatgggagtattagaaaatggagagtatatcgtcacagatattaactcatcagaaagtgaatggatagaaaatccattaaagcctagtgttccttttagcatgggtgctgacgttgagtttatgttaagttgtgatggagagcttctaccagcttctacttttttttctgttgaaggtccggtaggctgtgatgaaagacaaatagagcaagatagcggtgagtatgcattagtagaagttaggcctgaaaaagcgaattcatcaacagaactatttgagaatatccaaaagttaatagaaaaagcatctgcacaggtaccatatgaaaatattcattttcgggcaggcagcatgccgttttcagggtatcaatgtggaggacatattcattttggtattccgctttctttatccttattaagagctcttgaccactaccttgctattccagtagcgctgatagaagaatctaagaccgctaaactcagacggaaaacgaaccatggaggtcttggacgctatcgtgagaaatcgtatggatttgagtatttaactttaagctcttggattatcgaccctagaattaccctctccactttagctcttgctcagctagttgctacccatcatcatgaattaaaaagcgaatttttatttcatccacttacgcagcgtgcctactatcaagggaataaaatctttcttaaacgaatgtggaaagatatcaaggccaatcttatgaaaacatccagctatccacactatcaaaatgaactatcttttctatttgaaatgatagaaaaagaagttccttgtgatgaatcaaatgatattcgccggaattggaatgtaaagatttctaaagaaatctatgaccgcggacatattatccaaatccccaaaaagctccgtttaaaatacggcctcaaagaggggcagtctacggttgttagtgcaggaaaggcaatatcaactgcaactgttcattcttatcctttttcatttcgccatccaaatatggttcaactctctaaatctctccgtgataaactatctctcccgaaaggttggtgccccaagctatcagcttcagaaggcatcataactttaggtcctatcattggcattcttgctaaccgtccttttgaaagacaaacaacctatttccatcatctatgtcgcttagcaaatgaaaagcgaatgcttgtatatgtgtttgaaccggaagatattgattgggagaaaaaattagttaaaggaacaaccattaacggtgaagggctttttccttttcctgctgttatttatgaccgttatttcatagatggtagaaaaaatattttaatagatgaagtaagggcaaaacttcaggcgatttataaaattccttttgttaattcttcaaatttgtttcagctcacgggagataagtgggcaacatatgaacttcttatgaaagaatatgaagaatttcttccagagtcacgtctcgtacaaaattctgctgacattgcagaaatgcttgatagctacggagaagtctatttaaaaccgcttggcggggccttaagtaaaggagtcatgcgtatcgttcgccgaccaacaggcatcttttggtttgatcttaataaaaaagagctgcatcaattcagtaatatggaagaattatttactttgctctctcctttgatgaaaaacaatccttatcttgttcaagaaggaattcgcagaaaacagcataaagataaaaatttagaaatacgggtttatatgcaaaaaaatgaaaagcaaatttggcttcgaacgggtatggttgcgcgtctcaccggtgaagatgtgctaacggaagattctgaaacgaatatgcgcctcagtaaaatattaaacagtttatatcctgatccaacagacagaaggctcattataaaccaattagctaaaatatctaaaaatattgttgcaacagtagaggagaaagtgggtccttttggggagctggcggtagatttatgtatagatcagtacggttccataaagttacttgaaataaatgcaaaaccagatagtctattctcacaaattagagcctacaagctgcgtactttggcggggattcgtctgctcaattatgcgtcttcactggctggttacgaagaagaaaaggaggatttaacatgaagcacttcacattaaatgaaatccttaaacaaacggggggagacctttgttatggatcaggaaatcctgttattaaacatgctataaactacgctaaaaaggatatagaggatcatacactcatctttcatttagatagagaaccgattagagggaattattggaaagaaaatcattcaattgtcgttataacagatcaccctgagctgtgcacgaacttagagggaaatattattcttgttaaaacagatcaattagaagaggcttattggaaatttatcgaatactaccgagggctttttgatcttcctgttattggtgttacaggaacttgtggaaaaacgaccacgaaagagatgatccgacaaatattaattgaagattataaagtgaaagctacgtggatgagtatgaattctatgtctgtaaatctacgttatttaacaggtattgatgatacaacagaagtagctgtttttgaaatgccggtcgcttatccgggatatttaaaagttgcgtgtcgctactttcagccacaaatacgaattctattaaatataggcgtgcaccatctcgctgattgtgaaacacctgaagaatatatgaaagcaaaagccgaaattgtagaaggcttagatccaaatagcggcattttggttttaaacgcagatgatgaaaatattaagagagtgcttgatgttagtcatcttcaaggtgttgtatatataggtaaaggtgatgattcccaatttcaagcaaaagatattaaatatgctaatggaggaatggcttttactttaaagtaccaaaacaaagagtacgatgcttttatccctggatatggtgaacataatgtgtataatgcactggctgccattgctgctgtattttatgttggcgttgatattcccgttgccatacaaagacttagcttatttgaacaagtagaagaacatttggaatttaaaagaggaatgaatgaatgtacggtaattaacgacacatggaactcttcacctttatcgatggctacagctctcggagttcttagtgatatgtcaaaagagaaacagtctatcgctttattaggttacatgcctcagctaggagaaggaccttatgcaattaaacaatatgaagatatgggaaaaaaagcagcggaatcaaagattgatattttagtggtagtaggagaagaagcaaaagctattgggacaggagctttaaaatgtggaatggattctaacaaagtgtatttttgtaacactggtgatgaagtatacaatgtgctagctccatatttaaatgaaaatacaataattttattaaaagtaacgcatcgcgttatgaaaaaacctacttttaaagaattaagaaataaacttattccagacaacgaagagtaaaaggaggatagacatgaagaagactaaacagctaagagagttgatagaaagtaaacagctagagtttattatggaggctcacagtgcgctatctgcaaagattgtagaagaagcagggttcaaagggatatgggccagtggcctgtctttatccgcggcactgggtgtaagagataataacgaggcttcatggacacaggtattagacatcttagagtttatgagtgacgcaacgtccgttccaattcttcttgatggtgatacaggctatgggaactttaataatgcaagaagattagttaagaaattggagcagcgagacattccaggcgtatgtattgaagataaattgtttccaaaaacaaactcatttattaaaggtgaagcacagccgcttgcagatattaatgaattttgcggcaaaattaaagcaatgaaagatagccaaaatgacgaagattttgtagtggtatcgcgtgtagaagcttttattgcagggtggggactggaggaagctttaaaacgtgcagaagcttatcgtcaagcgggaactgacgccgttttgattcatagtaaaaggtcagatatgacagagattgaagcttttatgaaagagtggggaaacaggcttccagttattattgttccaaccaaatattattcggttccaactgataaatttagtgatttaggaattagcttaagcatttgggccaaccataacttaagatcttctattacagctatgcagaaaacgtccgctcagatttattacgataaaagtttgattaacgtagaaaacaatgtctctccgcttgaggaagttttccgtcttcaaaaagctgaagagctcgatatggcagaaaagctttatttaagctctgccaatcatagcacgaacgctatgattctggtaaaagaatcagcaaatgacactttaataactgagcagataaatcagttaaaaaaagtcggcgtgacaaatagtataaaagtagattccaacaaagctatggaagacaaggcgtttcctaataaaggagaattatatcatctttatgctgcgagggataagctaggaccggctactttaataagtgatagtaacatcgtgtataaaacacatatttttgaggagttaattcatgaaagtggcgatatcactatcgtagcaggagctgattacgagttaaaagggaagcaagcatcttatgtaaccactaaactttcctattccaaacagctgtattccaaaacagtagacttgattcaaatgtcgtgcaatccaaactctaaaaacattcatggtgaattcattggtctttggaaagtttcaggaaaaggcactgaggttgtaaaaagagctttagaagaactggcacaaagaaaagattttgctcagctcacgttctctgatttctttaattatattaatctaattcatccggttgctgttaaatatacgatggggtcatggatagataccgaaacatatacaaagattcaaaaagatggtgtgaaaaatgattagtatgtccgtatttggaactcaattaaaaaaactaggttttcaattttatagcggagttccttgttcctatcttaaacatcttattaactacgctatcaacgaatgtgaatatgttgcagcagcaaacgaaggagaagcggtagcgattgctgctggggcatcaattgctggcaacaaagcggttgttttaatgcagaactccggattagcaaatgctgtttcccctttaacctctcttattcatccgtttaaaattcctgtccttggatttgtcagttttcgtggagaacctggatgtctagatgaaccgcagcatgaattaatgggagaaattacttctgccctgctaaatacgatgaaaataaaatgggaatatttatcttttgattttgccgaagttaaaaaacaattacagcgggctaatcaagctgttgaaaataatgaaagctacttctttattgtaaaaaaaggaacgtttgagccagtcaagcttttagaaaaatcaataaaaaacgttactcctaaaatgaaaagtgaacagataacaaccgacgaattaccttcaaggtatgaggcattacaagtagttaattcattaaaagacaacaatactattcaattggccgctacaggaaaaacaggaagagagctttacgaaatagaagacgcaagaaataatttttatatggttggatctatgggatgcgttagttccattggtttaggcttagctttgagcagaaatgaaaagaacatcattacaattgatggagacggagcgttgcttatgcgcatgggaaatctagcaaccaacggatactactgtccagcaaatttattacacattcttttagacaatcaaacccatgattctacaggggggcaacatacggtctctcataacattaattttgtagatattgcttcttcctgtgggtatcaaaattccattcatgttcataacttaaatgagttagagacgtatatcaaacagtggaaaagtgataaaaaattaacgtttttatatcttaaaatagcgaaaggatctaaaaagaacctggggcgtcctgaaatgaagccttatgaagtcagagaaagactgcaggtgtttttagatgattaaaacagctgttattctagctgcagggatggggagcaggattcgtaaaagagctggaaaccgccctaaaggttttttgatgattgatgaaaaatcaattattgaacattccatttcgaagttaatagaagcaggagttaagaaaatttttattggaacaggttatatgaaagaagaatatgaaaagctaatggttagatatcctcaaataaaatgtgtttataattctagatacgaaacaacgggaagtctgtttacgctgtatcaattaaaaaattatattaaagaagattttttactattggaatcagatgtaatttatgaaaagaatgcgttggaaacattagtaaaccattcgagatcaaatgtcatactagcgagtaaattgaacggtgctggcgatgaagtttatattgaagctgatgaaaataataaccttaagaatatgtcaaaacaaaaagaagagttgaatagtatctatgcagaactagttggtttaaccaaactctcttatgctacatttcagagactttgtgatgaagcaaatatgctgtttcagtttaatcaaacgatcgattatgaatatggcctcgttaaaatttccgaaaaagcaaatgtgtatgttcataaactgaataatttggcatggtgtgaagtggatgatgaagatcactgggcaagagcaactactattgtttatccgattattaaagctcgagaaggtatttcacatacagttaagagaaatatactcctaaaccccggaccggcaactacaacagataccgtcaaatacgctcaaatagtcgaggacatttgcccgagagaaaaagaatttggagagacaatggaatttatctctgctgaactaacaaaatttgttgggaatccagagaagtatactacggtattattcggcggatctggaacggcggcagtggaatcgattttaagttcagtaattgataacggtacggttgttattatcaataatggtccatacggtgaaagaatgtgtaaaatcgctgaaatttatggactgaattatttagaatataaaagctccgccgagcaggctattgatatgaacgacttagaaatttttataaaaaagatttcaacgaacgtttcttatctggcgcttgttcactgtgaaacttccacggggcttcttaatgatattgaacaaattggggaattttgtgcagtgaaaaatatcgaaatgattgtggatgcaatgagttcgtatgcagctgttccaattgacatgcaaaaaatgaatataagctatctggccgcaagtgcaaataagaaccttcaaggaatggcaggcgtgtcgtttgttatagcaaataaagaccggttagaaaaaacggagcaaataaagcctcgtaacctttatcttcatttatatgatcagtatcgatatttccaaatgaataaacaaatgcgttttactcctcctgttcagactatgtacgccttaaagcaggcaattatagaaactcagtgggaaggaattgagaaacgatatgaacgctactcaaaatcatggactactttaacggatggaattactcggcttgggttaacctatttggttcctgaaacacatcattctaaaattattacctctatcatcgagccttccgataaaaagtataattttgatattatgcatgattttttttataaacaaggattcaccatttatcctggtaaaattgataaattagaaacgtttcgaatagcaaatattggtgatatcacatatagagatatagaaagatttcttcaccttcttgaacaatatcttaaagctttaaaaggagagtgagaaaaagttgaatcaaaaattagctgtagcagttatggtggtaaatcaagatcatcacgtgcttctagtcaagaaccatagacggggatgggaatttccaggcggttttgttgaagcaggtgaatcaataaaagatgcggggatacgagaagttaaagaagaatctggaattgttattgaagtgaccaactttctaggagtagaacaagatgttaaacgatctactactgttattttattaaagggaaaagcgattagcggaaaaatttctgtctccaatgaaacgcaggatgtgggatattttacgttagaagaagcaaaaaatataattaaattagataactttaaggatcgaatggctagatgtctaaaagagactgaaataccatttttctatgttttaaaagacacgggctccttttacgtataggcggaaggtttctgtgttgggctagaaatgaagcctgaacgcgattaaataaaaatgctcatcgtcatgcgtgacgatgagcgtttttttatcagtaaaagtatggttgtttattcagccgtggcaatttcttcttctacatcatggtcttctaaattagcacttaaaaattcacttgtttccgataaattgagatttaatttcgtttttttgcagatttgaattgtaacattctgaacagagacatctaaaacatgtcccccttcttttttatattcatcaataaagtgtaggtggtagccgggaacaccgatgcctgaagaatattctggcgtgtaaaaacctgctagtgttccatttacatctgaagatgtaaatgtaggctgatcagcagccgcatctaccatagaaggatagggcttttcttgctttgcaaccgtgcgagtttttacttctttaaacttcccgtcaatgcgaactgcatagaataaattcgggctaggaataagctcgttcattaaggtttctagttgttcacgattcatttccttttctacatgataagagatatcttcataaaaggttgtcataatggcaaaaggtgtttttgcatcttcgctaataggcgcggctttcccatcagcaatatgataaaattctccgtcaaaggcaatcatttcaccatccaattgattaaacgtaccgataccgaaatcccctttcttagctaaatccttgtatgtgacaacaccgtcaaatactccgtctaataaagcgatcatagtggaagtttggtgaatcgttaatttttctttattgctcattctttactcagtcctttcagttaatttgatctggcagtagctgtgtatttaatttttcattatctttataatctacaggaacatcgatgataacggggccttgttcacgaaaagcgcttgctagagtgtccgaaaattcttctggtgagttaactctaaatcctttggcaccaaaactttcagcaagcgtaacaaagtctacactgccaaactctactgcagattttcgcccatatttaatctgctgttgaaagccaaccatatcgtaggtttgatcgttccagataatgtgaacaattggtaagtttaaccgaacggctgtctcgagctccatagctgaaaataaaaacccgccgtctccagacatggacagaacttttttatgggggtgaacgagtgcagctgaaatagcccaaggcaaagcaacacctagtgtctgcatgccgttgctgaatagtaaatgctgaggttcataggaacgaaaataacgagccatccatatgtaatgcgaaccaacgtcacatgtgatggtagtatcatcttcaacaaagttctgcagagcttcaattaattgtaggggatgaaggtgagtgtcattagaaaactcgtactgatcgtcaggttgttcaagtttgctttttagcgtttttaaaaaagaagcactttcttttgaacgtattaaatgtgggagtttgtctgctaatatgttaatggtacttggaatatcccctactaactcaatttccggctgataatggtggtcagcttgtgcttgtaaatcatctaaatgaataatgcttctttgactttctgagttccaaagagaaggagggtattcaactgggtcatatccgattgttaggacgacgtcagcatgcttcaataacacgtctccaggctgattgcgaaagagacctactcgcccaaaaaagtgagtttcaagctctcgtgaaacagctcccgcaccttggaacgtttccaccacaggaaggtcatgttctgctataagctgacggattgattccactgctttagatttacttgctctcatacctaaaagtaaaacaggtagttttgctgtgcgaatagtgtgtatagcttgggcaacagcgtctaaattggcagcgccaatcgtaggagtttttaaaacggatagagtggaagcagatgtttcgctatccattacatcctgcggcaagctgacaaaagatgctcctgaaggagaagaaacagcttcgcgaaaagcgtctgttatcacttctggaatgtttgcaacgtcttctacctcaacgctgaatttggcgatagatttaaatagtccttcattatccattgattgatgcgtcttttttaatcgatctgctcttggaacggctcctgctagggctaccactggatcaccttcagaagtagcagtgacaaggccagtggctaagttagcggcacctggacctgatgtgacaaggcaaacgcccggcgtacctgtcagtcttcccatagcagctgccataaacgcagcattttgttcatggcggcaaacaattacttctggtcctttttctttcaaaacatcaaatacgccatcaattttggctcctggaatgccaaaaatataaggcacattctgacttgccaaactttctactagtaagtcggcgcctttttttgtttcggtagtatcagcattactcatcatgcattctctcctttatgtttcttagataggttttaaggcctactgattgaatacccaacttgtatgacaactaaccaaaaaaaggagaaggttttaattttctaaataaaaaacttccctattaattagggaagcagagatgtacctattgcgaataaaacatatctgttttatttgtaggtttatggtacttgagggatagcaagtgaaagtcttacgcggctcttatttggtatggttaaaaagcttttggtaactaacaattttttgatctagcttttgacttaattttaaaatctcaccgtgagaatagctgcttgtttttttagctaattggtaaatatctgattgtaaggctcgaatttctttttctaactgaggttgcttcattgaaatcctctccaagtcagaatacttctatcttttatctaatagtatgaaattccttcatatttgtaaaatgttttttgttttgaaaaatatgacataagtgaagagctgctgacaagctttgtcgaacacttttttttacctgttttcaataagtatgatatactgaggctaggaaaaatgacaatctggagcgcacgttcagttattcttaacaagcgaatgaattcttagctttgacaagtttagcttgtaaggtgaagaaattcatcacataatcttattagatctgaaccttgttagcccggatgaggatttgtcgaaagcgattcactagaaaaaaccttcgagaccgccaactcggaggtttttttatttttgtgtatggaaattttaaaaaagacatagactaataaagaaaaaggtcccgcacccataatcagctgtagttgattacaccttgtccatttctgcaaggaagctgtctttttactatagggaagtgccgccaaacacgattccctaaagacaatcagcacacgagccttatggatgaagaaccttttagacgatacttatcggtgattacttattttactactggaaaaatagcaaaataagagcgactatggctcctaaaagctctacgtaagccgttaggagctgaacattctcagcatctaggaaaaatgacttgaggattcgtctcagactatccaccacctttttcttccttgcgtgaattcccaagggaaagaaaggggacgacagtgcttctttattttaacaaaagtaggaaatgataagtagacttatttgaagtgtaaattaaaaaagcatgtattctacatgcttttttaatttggataaatttcttttatgcgtccgacttgtccatctgttaaacggactttgatgccatgtgggtgaaagcttgaattggtcagaatgtctttgaccgttccgtgtgtaagttttccagaacgctgatccgcttttaaaacaatgtcgacttcaattccaggagttacgtcttttctattttgtccgttcattatacacctgttctctttcgctgattattcgttttttttgtttgttgactcgtcagctttttggttgcttgattggtgctgctattttgagctttacttgaagattgatttttcttattagcaagctgctgtttgatagcatcttgaagactaattttctttttaagttgttctgtcatatgggttcctcctgaatatatacatcatctgaaaaaacaaagaaagtaagggaatgaaaaagctgactatctagtcagctttttttaattagaaacagtgacttcttctacaggctgcataagtacagcttctttatcaggatacgttttttcaatatgatgttctccccaagagcataatgaatcaagaatgctttttaaagaccatccgtaatctgttaaagagtattctactcgaggcggcatttcattgtacatttttctaacaatgatgccgtctgcttcaagttcgcgaagctgctgcgttaatactttttgcgtaacgcgcggcataattctttttaattctcccgggcgctttgtccctttaattaagtggcaaagaataacgactttccacttgcctccaatgacttctagtgccgcttccactggaatattatattttttcacgttaacaactctccttgttctagagataacggtcaaatgcatgttttcgcattttttctgatgtttatcatatcactatagagcaaaattttctaggtgtaagcatttttttagaatacccaatagttcatgactttagtatttacgcttattgtaacctccaggtgcctatatcacttgaaagtgcgtactttttctttggttttacgtcgctcataataacaattgttgatggcgagttagcgaatatatgaaaggtacctaagctaattagccgtaagagaaggtattataaagaagttatcataacgaacaggaggcgttaagaagtgaacacactttcacaaacacaacaaagtaaaaaaagcggtgctttgccgctattagcgctagctattagcgcctttggaatcgggactacagagtttgttccagtaggtttattatcatcgcttgcagatgatttaaatatttccattacactagcagggttattaatttcaggatacgcaatgggagttgcatttggagctcccgtattaacagctttaacaagtaaaatgagcagaaaatcactgttgatgctattgatggttatttttatcgtaggaaactcagtagcagctttatcaacaagctttgggctgctgcttatagcacgaattattactgcattttcacacggaattttcttttccatcggtgcgactatcgctgctgatttagtgccggaagataagcgagcaagtgccattgctttaatgtttacaggtttaacagttgcaactgttacaggtgttccgcttggtacatttatcggacaagctttcggctggagagcaacattttggggagtagcattacttggggttattgccattattgcaagtgctcttttagtgcctaaaaacttaaaagaagcgccgccggcaaagtttagtgatcaattgaaaattttgaaaaacgggccgcttttactatcgtttgctattactgccttaggatatggcggaacgtttgtagcttatacgtatttagcacctattcttgaaaaactaacaggatatgcaccaagcgcggttagtatcttactactggtatacggtgtagcggtagccatcggaaatacaatcggaggaaaagctgcgaataaaaacccgttaaaagcattattttggatgtttctaattcaagcagttatcttagttattttatcgtttactgcatcgtttaaagtagcgggaacgattacgatttttgccatgggcttattggcatttatgaacgtacctggactgcaagtgctggtcgtgaacttagctgaaaagtatgttccttcagcagtgaacgtagcctctgcgcttaatattgctgcatttaacgttggaattgctattggttcttttgtaggcggcctgattgttgattcgattggtcttgttcatactccttggattgggggagttatggttttaggagcggtcttattaacagcatggagccgctcgatagaagcaaaagcaaaataaaacaagagatcatcgctttttgcgatgatctcttagctataaaaggagagcaagtaaatgactacatttcaacatcataaggcatatcgtcgtatgtacaaggagaatgagttaacgttaggtttgcatatgccgcttgaaaattatcaatatgccacgcctacgatggagaaacaagtagagctcacgcagcttgcagaacaatatggatttacaagcttatggttccgtgatgtccttcttcaagatccatcatttggcgatccagcaacgggtcaaatttatgatatgcttatttatttgacgtatctggcgagtcaaacaaaagaaattgctcttagtacatctgctattgtgctgcctttgcgccatccgcttcgcgtagctaaagaaatggcaaccattgatcagctttttcctgagcgtttgattatgggcgtatcttctggagaccgtcaagcagattttcgaggactaggtattcctcatgaagaaagaggaaagcgatttgcagaggcttttcattatttagaagaagcgttaaataaagaatttccatctatccagtctgctttgggatctattcaaggagcaaatgttgttcctaagccaacgaaacgtattccaacgatgatcacgggatacagtcagcaaaatatggagtggtttgcacagtatggagacggttggatgtattatcctcgtcatccccattttcaagcagaagctattaaacaatggaggaaactggttgacatctatcatccaggcgtttttaaaccttttacacaacctatgcatctagatttggcagaagatccaaatgaaatgccaacgccgattcgtttaggatttcgagcagggcgcaatgcattagttgggcttctttctatttataaagaaataggagttaatcacctgttttttgctctttttgatagtaagcgtccggctgaagaagtcatacatgagcttggtgaagaagtgcttccgcattttccgtctcatatgtagcaaaaagaggctgagacacaagcagtttagttaaaggaaaatccgaacgattcatcgttcggattttttcattgtgttggtgaacgtaggtttcacttgtttagatccttctagcggttgattggaggacaagacgaagactcctgggggctcaccggccgcccgcggaaagggaagtcttgcacggaaatcaaccgcgatggaacaagcgagccatatgagctcctttatccaattagttcgtctttagattccattgatttcgttatgtctcaatctctttttatatagatttcaagttataggatatataagaaatatgtattagagttattgatcctatgttctttataataaaattatccattatctccttggatgatataaagtcgaaaggagacacacgatgagtgttgcatttctatttccaggacaaggcgcacaatatgctggtatgcttcatgatataaaaaataaatggggattagcgcctacgtttgaagaagcaagtgaggttttaaatcaagacgtattattattagattcgtcagaaaaattgaaatataataaaaatgttcagatatgtctttttattgcaggagtggctacggctaggtcgtttaaaaacaaaggatactcgccagacgtggtaggagggcattcaataggggcgtttggagcagcagttacatctgaagtgttatcttttaaagaagctcttcttcttgtgaaaaaaagaggggaactgatggaaaatgcttatcctgatggttatggtatgggggttgtgatgggactgcgtgaacatcagcttctctctattgtacatgaactatcaactgatgcagctcctgtgtacgtagcgaatctaaattctcctgatcaaataacgatttctggcaccttaaaagcaattgagaaagttcttgaaaaagcatctaaaaaaggggctagaaaaactaaaatgcttcatgtaacggtgccttctcactgtcctcttatggaaggagtttcgagtgaattacgaaaaaccatagcggaagtgaaaggaaaggacccggccgttcctattataggtaattgtaaagctcggaaattatggaaagctgctgatattaaggaagatttggcagcgaatgttgccctgcccgtccgttggcatgatacgacggaagttatgtatgaaatgggcacaagattgtatattgaagtggctccaggaagagtgctaacggatttggctgctaagagcttccctgaagcaagggctatttcggcagccgaatctacgatgaaaactttgctaattttaatggaaaaagaaaaaatgtaagcgtattaatttagaagtgtcagaaaggagctagaacatgaatggcataaaaaaaacttcaaaatcatggacaactcgccgagatcaaaaagcagcgcgccttgcgaaaatagaccatcttcttaaaggaaagttattgggtaatgaacacattattgaagcgttagaattgcttatatcacccggagataaagtagtgcttgaaggagacaatcaaaagcaagcatcttttttatcaaaggcgctgaatgaagtaagcgctgataaaataaacggccttcatatgattatgtctagtatttcacgtccggaacatctcgacatatttgaaaaaggaattgctgaaaaaattgatttttcgtacgccggtgctcaaagccttcgcgtgtctcaaatgattgaagatgagacgttgaaaatgggagaaattcatacatatctagagctttacggacgccttttcattgatttaattccgaacattgccttagtggctgctgacaaagcggatacacaaggtaatttatatacaggagcaaatacggaagaaacaccaaccattatcgaagcaaccgcgtttaaggatggaattgttattgtgcaggtaaatgaacttgttgaagaacttccgcgagttgatattccggcttcttgggttgattgtatcgtcgtggcggatcagccttatcaattggaagctttatttacgcgagatcctcgtcatattacagaactccaaattttaatggctatgatgacgattcgaggtatctatgagcgccacagcgtacaatcattaaatcatggcattggctttaataccgctgcaattgagcttttgctgcctacttatggagaaaagttaggactgaaaggtaaaatatgcaagcactgggctctgaatccccaccctacgttaattccggctattgaaagcggatggattgagagcgtgcactgctttggcggagaagtaggaatggaacaatacacagcagcgcgtccagatgtgttttttacaggacgcgacggcagcctgcgctcaaaccgtgcgatgtgtcaagtggctggtcaatatgcggtagatgcttttgtaggatcaactttgcaaatagatggagaaggaaattcttctaccgtcacatctggacgtttgtcagggtttggcggagcgcctaatatggggcatgaccctagaggccgccgacattctacgcctgcttggttggatatgataaacgagcagcacgaactagcgagaggcagaaagctagttgttcaaatggttgaaacctttcaatcaggaaacgagcctgtttttgtggagtctttggatgcgataaaggtagcgaaacaagcaagcttagctactgctcctgtcatgatttacggagatgatgtgacgcatgttgtaacggaagaaggaattgcttatttatataaagcacaaagcttggacgaaagaaaagcagcgcttgaagcagtagcaggggtaacacctataggcctgcgacataaccaaaataaagtggaaaagatgcgcagagatggcctagtggcttttcccgaagatttacagattcgccgtacagaagcaaagcgttcattattggcagcaagaagtgtcgaagatttagtagaatggtcggatggcttgtataatccgcctgctaaatttaggagctggtaaggaatatgcgtattcagagtattcaagaagagccaagaccagctgtgttttactcatatttaatagctaaaatggcagttaccactctgattgatgaagcggtgcttacacctaagcctgggcttgtagatgcagcaacaactggatctcatcaagatatgaatattgagacgctgttaacttctgcttatgctttacaaccgacctttttacagattgcattatatagtcaaggaaagcagccaagtcagatgctaagggaagaaattgctcgaattggacgcgagggtgaacaaattatgtacgcggctacagatggtgttaatacacacaaaggagccatttgggcattaggtctacttgcgtctgcaacagcggtttgcggcattcaagcatcacctgcatccatcacagaagctgcaggacaaattgctcgttatgcagatcgtttttgtcctctgcattcatctaatggacgtcgtgtgaaaaaacagtatggcgcaaaaggagcggttggagaggcgaagcaaggatttcctcacgtaattcatataggcttgcctgctttacataaagctcgcaagctaggcatacatgaaacatcagcaaggattgatactttagtaacactaatagccaatcttgatgatacgtgtattttgcatcgtgctggtccggttgtgttagaggaggttaaaatggcggcatccaatgtgttagaagctggaggggtatctacatcaatgggaaaacagcggctagaagcgttagatcatatacttctatcatctaacgcttctccaggcggaagtgcagatttgctggctgctgtattatttttagatcgaatatctctttttaaagaatcgtaaacgtctgcagggaggagtggctaatggaaacgttagtgtttaaatacaaaaccgatcgaaagttaactcagcgcgcgcatgtaggcgttgttggttcaggggatttagaaattttaatggttccttctgatgaagaacatgctcacgtatcagtacgaacaggaagtgaaggatttagcgaaacctggaaagccgtattagaccggttctttagtgttcataccattcaagcgaaaattgtaattaatgatttcggtgctacgcctggtgtagtcgccttgcgtcttgcacaagctttggaggtgagtgaaaatgggagtgaataatcaaagctttattgagttaaatggaagagaacgagcgcaggcaatcttagatcaaggaacattctgtgagctgcttggcccttttgacggaatcgaatcgcctcatttacctaagcaaaatattgttcctcaaagcgatgatggtgtcattatagcaggtgggctgatagcaggagagccagccgttgtcatttcaatagaaggacgatttcaagggggaggcattggtgaagtatcgggagctaaaattgcaggagctttagaactagctcttaataatcacaaaaaaggtgttcctgttagacctgtttttctattcgatacaggaggggtaaggctccaagaagcgaattatggacttttgtcgatatctgaaattggctcagctgtggttgctttgcgtgagcatacacctgttgtcggagttatttcaggaaatgtaggctgctttggaggaatgtccatcactgcttcactctttagttatctcattatgacaaaagaagcaaggtttggccttaacggccctgaagtgatcgaacaagaagcaggggttgaagagtttgatgcaagagaccgaagcttaatctggaaaacgattggcggtattcaacgctatgaaaccgggtttgcagatgccttagcacaggatgatgtcactgctattcaacgagcggttcaagagacgtttcagaagaaaggaaaagtaactagtaaaacagaacaagtagatttttacagacatttgcttagtaaggttgatccttcagaaaaactggctcctgatcagtttcaagaattgtataaagcaacaaaaaatgaacctatcccttcaacagtctcttactcgttgaatgaagttccaggcaacatgcccaacagccgcggtcgcgtgtggatcaacgccttaataaatgatgaagaagcagattttgaaatcccttccgttctttataaagacgcattgctaggaagagaaaaggtccgatatatatcggttgtacctaatccttataatcgtttcttacgtgcacgaaaaggggaagtaggactagatgaaggatgggcaattgccaagcacgttcgtgaagtaataaaagaagatcgaaatcaatctccgcgccctataattgccattgtggacgtaccgagtcaagcgtatggctatcatgaagaacttctaggtattcactatgcttgcggtgctgcggctgatgcttatgcagcagcgcgcttagcaggtcatccggttattacgttaattgtcggaaaagcaatttcaggagcatttttggctcatggataccaatcaaatcgaattgtggctttaaaagacgaaggagtgaatgttcacgccatgtccaaacagtcggcagcgcgcattactaaaagaagtataaaagaacttgaagaagcttcaaagaaagtcccgtccttggcttatgatattgaatcatttgcctcacttggcgctttatatgagctggttagcggtattcaagcagagcagcccacagagcgcgacgttcaaacgattcaagatattttgactggagcagtagaagatgtacgccgtgaaggtgtgtacgatttaagcacccggctatacagtgagcaagcaaggaaggaagggcgaaaagcttctttagtagtaagaggtgagttggaaaaacaatggaatatatagctcatgatttgcttcagttaacagaggaagcaaagcttatcagttatacacctatccccgattgggtggagcattctttagcgaaggctccgtttgtagttgtaaggcgggctgtttaccgagatagcctgatacctgttggagtaagaggagaaagaagaaatcagcgttttggagcatttgtatctaagcaggccgttaaacaaagaattaggccggaagatctcgtttctatttttcaaaacggccactttagaaacatgccagccacaggtgctttaaaagaagtcgctattattttaaaagattttgcgtggggaccaactggcagtgtgggattcgaatttgcaagtggtgccgaagttgttacaacaactagtgatctggatatacttattcgactttcttcttatttgtcggtggaacaagcgcaactgatagttaatcagttaaaagagtgtccagtttctgtagatgtacaggtagaaacagaaaaaggagcattttctctggtggaatatgcaaggggagaaaagaccctgcttctgcgtactgtatatggaccttccttagtaaaactgaatcaattagtataaaagacggaagaggtatttgcaccttttccgtcttttcaattaataccagcttttttccttgcttaacaagcgctttgcttcaaaaaagaatatttgaatgaactttttagtgttaatgcgaatcggcaaaattttagaatctccctgcaattctttcatttttttacgaacggctgtaaagtcaaaaaacttagaagcataattttcaaactttggatttgaaaaatctgttaatccaatagaagcaaagtggtttagtgagtgagtaactgctcgtcttattcgctgttcacaagctttggtttcgcggttaatttcaatggaagacgcgtgagctcccaattttttctccgcaacattcacaaaaatattttttagagaagggaaatgtttttcgacactttctctttggtcataagtgtacagaaactgtaaaatatccagtaaatcttttgcaccattttctcctacaatacctaactcggctaataagaattttcctacatcgtatagatgggcttgtttcgttatcggctggcttgaagggggagcgtgatgagctgtcgctaaactattcaatgaggtcttaatatcatcgattgatttttcaagggagattcgttccattacttttcgaataaccgttaaaatttcaattcgattaattggttttgtaatatagtattcaattcctaatgaataggcctctcctatcaattctttggattctacctgtgaaatcataatcatttttccgttaaatgaatcttttaaatgacggatcgtctcgattccgtcccgtcctggcataagtaaatcgataaataaaatatcaatttgttttaaatttaacatagaagcatctaaaaagcttccgtcgacgacttcttctacaacttctcctaaatcctcatcttcaatcagctgactgagtgttgaacgaatagctgaatcgtcatctgtaatacaaaatcgcataaactcatcctttctgaattagattacgaagggggatttgaatgataaacgtcattcctctgtcttcttgtgtagctttaatcgtaccttcaagttcttgaacaatatcttttacataagaaagaccaatgccagtagaggggtttccaaattgatcgtattttgaggtgaaaccaggttcaaaaatagctttttcgtacttcaaaggcacgccaggaccgttgtcttgtacatgaaattctacatgttcagcttgtctatgtaccgataaaacaatccttccttcatctttaatcgcttccactgcgttggctaccaagttattaatgatcgataaaatggtgtaaacgtggtagctgaaatgttccccgtttacagaagaaaaaaaggtaatttgtttgtgaagagaatcggcatattttttgttgatgcgtacgatcagctcgattaattcctctgctttcatataattttggaaactttcatttgaaattgttttagataagcccgcaaaaatacgctggttgtctttttttacttcgtgaatatctcccgcaatccgaagcgcttttttactgagcgtttggtttagcacagaatgatctttttcctgctgatttaatacacggtataaatcgtacgaagcttttgtaatcgcttctgtattatgaagggtcttttttaaatgaacggtttcttcataaaggcttgtgatgagcattagcatgtgctcattttgtttgcgaatttgacgttctcgtgactgtgattcataaatcgtcatcatattaaaaaaactaagtacaatgaagctgtgagcaaaagcaataacggccatgtcagataatgaatcgacatggattgttgtgtgcaaaactatatactgcgcagttagttccactatatcagcagcaatttcaatgatgagtccaatcaatccaattacaatagcactatagttcatgcggcttaccttaaaaacaaaaaataaaagtgcatacgtaaagtagaagaaaaacgtagggtaatgcgtatgtgcagaagccgcaaatggaaaatgatcgagcatgatataatcgagcatgatgcgaaagagaacgacgcttaaagcggttaacaagcccccagctaaaacggttttccgttttaaaagcaacaggaaaaagaaaaatgtaggagctccaaatgtaattcgaaatgtttcatttaacggataaaattttaactctcccgccagcgggacagtaatgagcatgagcaataaaatgtacggatcttttcgaatgaaagatttaaaattcagataatttcacctcctgaagtgattcgtgaattagtatacattgtgacagcgtccagcacaatggagaagagtgccaaagataaaaatataattccaaaaagttttgtaggtttttgtatgctctcgtaggttgcattgtacattaaaaacgaaaatgaaatctcgctttatgaaagcgttttaaaataaaaagttaattaagtgatgaggtgattttaatgaaaagagaaattgaacaggaaatgtcttacttacaggtcactgcaaaagagcagttacatgagtgggtagagcaaataaaagaattttcttcagaaggaaaaacggctgattacattccagctctgaaagatatggactcgtctcaattaggtatttgtttgattggtgctgacggtactgttattcagtctggagattatgaatcggtatttactcttcaaagtatctctaaagtcattagctttatagcagcttgcttatgctgcggcattccttatgtgctagagagagtggatgtagagccaactggagatgcatttaattctattataagactggaaatgcataaaccaggaaagccgttcaatcctatgattaacgcaggtgctttaacagtttcatctcttttatctggggagacggcaaaagaaaaattaagctatttgtttgatgtgataacaatgcttaccgggaaaacaccactcattaatgaaacggtctttaaatcagaatggcaaacgtctcatcgaaatcgtgcgcttgcctactatttaaaagaaacgaactacttacaaggagaagtagaagaggttctagaggtttacttaaagcagtgctcaattgaagtaacgactgaagatattgcactgattggattaattctgtcattagacggatatcatccagtgtttcacaaacaagtaattccaaaagaagtagctaaattaacaaaagcgctcatgcttacatgcggtatgtataatgcttcaggaaagtttgcggcatttgttggtatgccagctaaaagcggtgtatcgggaggaatcatgtcattggtgccacctaatacgaaaaagcagtctccatttccagatggatgcggtatcggaatatacagtccagctattgatgagtacgggaatagcgtaaaaggcgttacgctgctaaaaaaaatcgcaaaagaatgggatttgagtattttttagtctatttacgtactcttcattcgcttcaataatataaacaccaagagaaaaaactttcatgttttgcatttgttctaccaaattttttaatgaggtgataggcatgcaacaagcagtcgaaagtgtgattagcgtcatcaatgattttttttggtcgaatttattaattattttacttgtatcaattggtatttattttacgattcgctctcgttttttgcagtttcgcatgttgaaagaaatggtacttgttttgaaagaaggacgagcggctaaaggtggaggagtctccccgtttcaagctttttgcataagcatggcagctcgagtaggaacgggaaatattacagggatagcgattgctattgcacttggtggcccgggtgctgtattttggatgtggattattgccattatcggttcagtatcaagttttgtagaaagtacactcgctcaaatttataaagtaaaaggatcaaacgggtttcgaggaggacccgcttattatatggaaaaagggttaaataaaaggtggatgggcgggctatttgctgtactcattacactatcatttggcctggtgtttaacgctgtgcagtctaatacgattacgctagcatttgagaactcttttggaacgagccgcttgttgattgggatcattatgacatttatatttgcgataattatttttggcggaatcaaacgcatcgccaagatatcggaatacatcgtggtcgtattagccgttttatacatcggaatggctctgttcattatctttaaaaatattgatcaaatgcctgcggttctatctctaattgtgaaaaatgcatttgggtttgaacaagcgcttgggggatcaattggtgcaacgttaatcaacggagtaaagcgcggactgttttccaatgaagcaggaatgggaagtgctcccaacgccgcggcaactgcagtgacgagtcatccagttaaacaaggtcttatccaagcatttggtgtcttgacggatacactcgtgatttgtacaagcacagcatttatcgttctcttatcccccgcctataagcagggactaagcggcattgaattaacgcaggcttctcttagtacccatataggctcttgggcatcagggtttttagctatcatggtatttctatttgcttttagtacgttaattgggaattattattatggagaaacgaatattgaatttttaaattcaaataaggtgtggctttggtcttatcgtgtaggtgttttagtgatggttatttttggatcggtcgctcagcttcagcttgtatggaatttggcagacttatttatggggatgatggtagtcgtgaacttgattgctatttttctattatcgaaagtggcattttctgccttgcatgactatactcagcagaaaaaggaagggaaaaatccagtcttttatagagatgcgctagaaaacaatcaaaatattgaatgttgggaaagagaatctactccatcctcatctgaaaaagagaatattatctaaaaaaagttcagccaattggctgaacttttttatgcgtttttctttaattcagattgcgcagtgtctttagaaaataatgtttctttcacaccgttagttgctgctttcgtttttgccgcgaagattggatttaaaataacaactacgagtaagttagataataatccccagaacccttcataaagaccaaatgaatttcctgtggcatgaacggtaaacgttacaaccagccctactactaatccagcaatcgtactttctttcgattgatttctccaaaacaggctgataacgatagccgggaagatttgtaccataccggatacccctagtaactgtagggaaacaagtgcttgagggaataataaaccgaataaaagtgccagtccaataacaacgaaaaccatagaacgagtaaccattgttaatgttttaccctgtacatttggattaattaaatctctgaatatattatttgcaaataagttagacgctccgatagccatgatagaacatggaattaatgaagcaagagcaatcgttgcataagctaacccttggccaatgccgccatatgaatattgaattaaggttaataatgctaatctaggatccgtcgtatcttgaggtaatacttgataagcaataaatcctaagaagatgactagaattaaaacaatattgtaaagcggtaagaaaatagcatttttacgaagcgaatctgcacttttagcagtgaaaacacctgtagcagcgtgggcccacatgaataaagctaaagcagatacgagtgatgctgtaataaaccatggaatgcctttaggtccttgtgttgggatcgttaatagctgaggtgcatcctttgcaacattgtcgatcatgttgccccagcttccaaaatgcataattggcagagaaacaaccataaataacataatcgcccatactaaaatatctttaataattgccgtatatgtgggacctttaattccgctgaaaaaggtataaagagccacaagaaagaatgaaagaataacgacagcttttacgttaatgtagccagttcctgcaacgcgaagagtatcttgaataccgctaagctgaagatcaatatatggaatgagcatcaatacacctactatagcaattaaagaggagagaaatttactgctaaaacgttctctggcataatcagcaagcgtagtaagtttgtgctttttagcaacagtccaaagctttggaagaaaaaaatatgaaattaaaaaggctaaaacagagtaaggaatggcaaaaaatgcgatgcttcctccctgataagctgtacttgtaagacctaggaatgtataagcagtatataaatctgctcctactaaaagccagacgagcaggcttccaaaacgtcttccacctacagcccactcttcaactgagcttctagatgatttgtcacgtcccgctataaagccaattgcgataacgacaagaacaattgctgatgtgattaaaagtgcggttaaatttccttgcattattcaatgtccccccaagatttttgtaaacgataaatgataaatgtacacacaggcgttaagaagacccataaaaataaccataaatgcaaaagaggtaatccaaaaataattggatgaatgttatttacaaaaggtaaaaaagcgaattgagcaataaatggaatgatgaatagaataaaaattatgaattttctgttcaattttactcctcctactaaaaatttatctaacaatgttcactatgatagcaagtctgacatggtaaagcaataagttttttgaaaattttgttataatctatggaaatttttttagaaaaacaaaaaagagcttatgatgagagtatatttgaaatgattatgaaagaaaaaaggggaataatctaagcgaagttgctcttgaagcaaaaagagaatggaaaagaagaaatttagttctgaccgggaagtttttgttatttcgctgagataaagtatattgctattgcattataagaaaagaatttgtatgttcaaatagagattcatggaaagaataaaacggagcaaataaaaaaactagacaataagtgcttgtctagttccaccactctgtcaatggtcctttgtcgccataaacaggatctgttgtaggaataggtacttgtgcaatttcatcaaatacgtgagggcgatcagtttgttttcctgttcgtaaattgtaatccatgccctctggataagctccaaccactttaaaatctgcagttgactgcagacgcatatgccctgttcctgcaggaagtacgagcacatcgccagcatgcactacgatattttcccccatatgtccacctagttttaaacgtgcagatccgctaattacacctagtgcttcatgagaattgctgtggtaatggtgaaaatcatatatgccgcctacccagctatttttccagttgtgagaattaaaaatgctctccactttctctttcttactaataaatacgtgttcatacaacaaaactggaagacgagggtgatttggaatggttccgtcgtcatcaaaataaagaacttttacatttgcataattcataagcatccctctaacaatcttttttcgtaattttccctgttttttgcttgcgtaaacagagaagtttgctcgaagtacttcatttgttgcgaagtgcatgatatgtaggttttaacgttttcctaaaagaagtctcccacttcaagcgtagctaagtggtgggcagttcactttagtatcttttcttcatattgtatataagtaaagggtctag

SEQ ID NO: 19 - DNA, 99398 bp, Priestia aryabhattai
  source 1..99398: mol_type = genomic DNA
atgtttgatacaaaagaaagaaaggttggcgaattcaaagttctatagcattcacctttcttttctattaattgaaaacatgggtaatggttagacaagcaatagaaaatatgcaacaatttttattaccagcttcttcaacataagataaattataaagaaggtaagaactttataaaaaggagattccgccatgggtaaaaaaaagaagattgatataggtggtcttagttttgcttgggatttagaaaaaggacaatttagctttgaaggagaagatgcgatccttttttggatttcttctgcgatgaaaacattgtttgacacaatcgaagaaatatctggagaagaggcagcttctgtagtactggaaaccactggtttccgacagggattagtagtaggagagtactttcaaaatatgaaaggcgtaacggtttttgaagcggatgagttaattacaaatacatacgcttcggctggatggggaaaaactactatcaaatatttaaatcctgaaagtaaaactctatctgctgaattaaaagacagttgggaacataaaattaacgttgcgcaaaagaaaacaaagggaggaaattttcttccggcccattatgcagggatttttacaggactattcggaacaaatatttggtacaaggtgattcaacatcaaatagaagggcatgaatgcactgcagtagaatacttcccttccaacattgatatcactcaaaatattcatcaattagccagaagaaaagaagcgcagaaaatagaacatttgcaaaacattgtagcagaaaaaacaggagagttaaaagatcttattaaaaagctttcttctcctattattccggttttggaaggcatagtcgtcgttcctttgattggcaaatacgacgaggatcgaactgaagatttgattgtcaatacattaaataacctcccaaaacatcaggctaattatcttgtgctggatttaaccggattggataaagaacttactgaatatacggcaagtcttattgaaaaattaggtgcagcagcgtccctgattggtacgaaaacaattttagtaggaatttctgctgacttaggcttagttatatcagagacccatattgatttatcaaaatatgattgttttcaaacattgcagcacggcattcattatgcattggcacaaagcggacgaagcatcgtttaaaagatatatttgaaatataacaaaatgcactcattcagcatcataacaaatctctttatcaaagaacggaaatgtattgaaggatttcatttttcaaaagaggaattgacatgaaatcaaaaggtgttatattatttttttatacaaccttttggtgttattttttaaaaaaggagaatgaagataacgatgaatgataaaagtgtagtagaagatgtaaaacagacgataatctttaatgcgccgattcaaaaagtttgggataaagtagcaaccgcagaagggctccaacaatggttcatgcctaatgattttcagcctcaggtaggatatgaatttcatttgcaatcgccttttggaccatctccgtgtaaagtattagaaatagatgcaccaaactatctttctttctcttgggatacggatggatgggtcgtttcgtttaccttaaaagaaatgggtaatcaaactgaatttacgcttattcatagcgggtggaaagaagctgaaacacttcttgaaaaagcaaacgaaaagagttcagtggtacgagatagaatgagctacgggtggattagtctcgtaaatgaaaaacttcgaaaggttgttgaaaactaaatgacttcatcagctgccaagcatgatatctttcaagccattgctgatcctactcgaagaaaagtacttgagctgctttctaaaaaagaattgcctatatcagaaataacgtctcatttttcaataagccgtaccgctattgtcaagcatctttatatactttcagaagcagacttagtccatggacagaaaaaaggcagagaaaaagtgtattatcttcagccagagcctttaaaagaagtacaagattggctttcttactacgagcaattttggacgaacaaattatctattcttcagcatattgttgaaagagatgaagaaagaaatcaatagaaaaagcataaaaacgttttttatagggaatatagcaaagccagtcgttaaaaagactggctgttttacataaaagctgattttattctagaaggacaaataaaagaaagatgcagaacaacataggacatttcttgaaataaaaagatagacctttagaagaaaagagggggaaacagaacaatgaacaagcttttattttacgggacgagcgatgctcaaggagtgcctcgattattatgtgactgtaaagtatgtacacaaaaagatcaattaaatcagcgcacaaggcctagtgcacagtttacaatggacggtaacgtgtttttgattgacgtatcacctgattttaaacatcaatttcatttatacaataacaaaaaaatcccttctaccgtttttattactcatcctcacaatgaccatgtggctggtttaggagatttagctgatttatgctattggaataatgtaaatacagaagtcgtaggagcacctgaagtcatcagcgagttaaccgaaagatttccttatctcgcaaaaagaaaagggcttacctttaaaggaacgttaaaatgggatagtggagaaacaaccattacgtttcataaagtaaatcacggatttaacggtcattcctacggcattgtggttcatcaaaaacaaggcgaacgctgggcatatgtatccgattcttttaatgtggcaaaagaacagtggcagcccttttaccacttagatttactgatatttggtacatctttctggaaagaatatcttcaaaaagaaaaaagatccgtatatgacgtgacagaggcaatggagatcaaggcgaagctacaggcaagaaacatggtgtttactcatttatcacatgatatcgatattcgaaagcacgctgagatgctctcagatgaaaacgtaagctttgcctatgacggacgcgagattttattaccctaagtatagcaatacataaacgcataaaaggtttcatttaaagaagcagcgtagctaaagcgctgcttctttaaatttgtaaattagatatgttcgataaagtcgcttacaactttgttaaatcggtcgctttcttcaagaaaagggcagtggcagctgttctcaaaaacttcaagtgcagaacctgaaaccagcttttgaatatgtcttccagctgctaccggaatgagcttttcttcttttccaaagcacagtaaggtagggattgtaataaacgggagagaatctcgatagtccacaatggattgatcaaacaaaatagcactggctatcgactcaggcattttcgttacttctttcataatccaatgtttatcttcttcagttaattcatccttaaacataagcggaataaaattttctaatgtacttgttcgatcaagctgaataccctgcatgagcgaaataagcgcaggtaaatcaaatgcaccgatcggaaagtcgggccatttaaaatctgaagccatttcatctacaataatatttccttttacattttcttgaccaaattgtttcaaatattcccacacaacaaaagcacccatcgaccagcctactaatatgacgtcttttaattgatgagtggttataaactcatgcacatcacgagcataagtggaaattgtatggccgtatggagtatgacttgaatttccatgtcctcttaaatccaaaagaatagtttgatactgttttgaaaaaaaagaaagctggttatgaaaaaaacgactgctcatccaaactccgtgaatgaaaataataggtgttccttccccttgttgttcatagtacaaagttgcaccgtcttttaatgtataaaaaggcattattttcgcccccaatctcaaagatttatatctcatcatgtatgcgcgggaaaattcaggtagaacgtatcgcgtcaataaaatttttattgaagaacaaatcctagaagtgaacgctttgatatgttatactattacaggcttaaatactgtatgttttgaaacaatcattcactgtaatactttttagatagaagcatccttataaaaaggatgttgtttttgtcgtaatgtacctttaagtaatgaattgttaccatcaattcggttcacaataaccgacctacatgcattatatcttgcaaatataaacagataggtggaagaagcaacatgactgaaagaaaaccatatcaagtactactatattatttgtacactccaattgaaaatcctgaagagttcacagctcagcacttggcattttgtaaagagcttgaattaaaaggacgcattttaattgcggctgaagggatcaatggaacggtatcaggaacagttgaacaaacagataaatacatggaaacgatgaaaaatgatcctcgttttgaaggtattgtatttaaaatagacgaagcagatgaacatgcgttcaaaaaaatgcacgtgcgtcaccgcaaagaattagtaactcttcgattagaagaagatgtgaatcctcttcgtgtaacgggtaattacttaagcccaaaagaatttcatcaagcgatgcaagatgagaatacggtcgtaattgatgcacgaaacgattatgaatacgatttaggtcatttccgaggagctgttcgtccggatattcgaaacttccgtgagcttcctgaatggattcgcgacaacaaagatcagtttgaggataaaaaaatcttaacgtactgcacaggcggtattcgctgtgaaaaattctctggatggcttcttgaagaaggtttcgaagatgtaagccagcttcacggaggtattgtaacatacggaaaagatccggaagtacaaggtgaactatgggacggtcagtgctatgtatttgatgagcgcatcagtgtaccagttaaccaaaaagagcatgtgattgtcggaaaagaccactttaccggcgagccttgtgaacgctatgttaactgtgcaaatccagaatgcaataagaaaatcttagcttctgaagaaaatgaacacaaatatttacgcgcttgttcacatgaatgccgagtgagccctcgtaaccgctatgtaaaagaacacggtttaacagaagaagagtttgcagcacgtgttaaagcgcttgaaaaagaacacgtaactttataataaaaaaagcagcacgctatacaaagcgtgctgctttttttatgaaaagattctcttagaacctggtgtttaaagaatgtcatacaacgggtatttatgaaaaaggaaagatattcctagctttttttatttgtttaaaagaatatttttttgagaaagcgattataaaaaaggttgtacataaaaacgaaaaaggagcttgaaaatggaagcgaaaattgaaaaaaagtacgatggccgtttgcttgaaggacccctatgggatgaagaaaatcaaaaattagtgctagtagacatcttagataacaagcttcttacgtacgatccaaaaacgacaactttagaaggtattgctcttccttcagtcgttacaagtgtttctaaaaccaatcattcaaaattgattgtctccacccgtaatcagctgcttttagttgataaaaacaaaaagaatcatgaagagtatatccgtttagatactcttgaaaaaaacatgcgttttaatgatgggaaatgtgatccatataatcgcttttggattggaacgatgagtgaagaagatgaagaaggaaaagcccagctgtacgtagtagatgaaaaaggtgtcattaagagcgctaaagaaggattaagcgtgtcaaacgggctagcttggaatcgaacaggagacaaattctttctggttgattcaccgaaaaataaaattatgtcttattcattttcgaaagaaacaaccaggctcgaagatgaaaaagtggtgattgacctttcagatatggacgggtttcctgatggaatgacaattgatgaacacgaccgattatgggtagcgctttggggaggttcgaaagttatttgtgtagatccagataaaggagaaattatagaatctattcatcttcctgtttccaatgtaacctgctgtacatttggaggagacgatttacaaaccttatttatcaccacagctaaggaagaagaaaaatacgaagaagctgccggctctcttttttcatgccgagtaggagtaaaaggcgtgccggcttatacttacgtatattagataagcgcttgtaaaaatgtaatgattcctaaagcccagtaacgagagatgttacaagcagcttctacaattcctttacattgtgttcacttctttacattttattctttatgaggaagaggaataaaatatggggataacgaatttccatagagaagccttttaaagaatatgaacacttttattgggtaataatggggaaaggtacaaaaggaggaattgttttggaacaaacattgtatgaaaaagtgggcggacaagaagctattgaaaaagtagttgattatttttattctgaactcgtattaaaagacgaaacggtcagtcactttttcgagcatacggacatggataaacagcgtcggcatcaagccaagtttataagttttgccttaggtggcccgaatcaatattcaggaaagtcgatggccaaagcacatgcaaatatgaatattcaacccgaacattttaatgcaattgctaagcatcttcacgatgcacttgctcactttaatgttgaagagcctgatattgacaaagcattaagtaaagttgaatccctaagaaatgatattcaatataaataactcataacaaaagaaggttactgtaaccttcttttttttatgctcaaagctgtgatgtatgaaggaaacatggaaaagacatcgtaatatgataaaaatgcaataggtaaaaatatttatcgaaagtctgggagtgggagtatgtcagcaattaatgggaagcaatatgtagagagaattaatcaattaaaagcaaatgtatgggttgatggcaagctcgtaacaggcgatatatcagaacatccggcttttaaaggagccattaacagtcaagctaaactttatgattttcagcatgataaaaaaattaaagatatcatgacataccaatctccggattctgaggatttttttggtacatcttatttacagcccaaaacaaaagaagagttaaaaaaaagacgagagatgactcagcaatgggcgcaattaacccatggtatgatagtttagttacaaaaacagaggagatgcttattgaataaatttgaaaaatctgcaataattttcagggaatcatttctgtgaaaatactaaggaatactataaagataggatgttacaatgaagcaattaatctattttggtttagaacaagcaaaatcttgtgtttttcctgttattattttccttacattggctatgacaaaaataattgaagtaccgtttatttctagatatgaccttattttgttagtctgtctaggaactcaagttttaatggtgatgtttaaacgagaaacgcttgatgaagtaaaagtcatcgcagtatttcatttaattggactagcgttagaactctacaaagttcatatgggctcatggagctatccggaaaaagcttttactaaagtctggggagtgccgctgtacagcggatttatgtatgctagtgtagccagctacatgtgccaagtgtggagaaggcttgaattaaagcttgcgaattggccttctacgtggatcgtcagtatactaagtatggctatttaccttaattttttcacgcatcattttatttacgacttccgctggtttttaaaactttttactttacttattttttatcgaacttttgtatattttacggttaacaaacgtacatatcgcatgcctttagtattgtcttttgtactgattggctttttcatttggatcgctgaaaatatcgcaacatttttcggagcatggcagtatccagatcaacagcagcagtggacaatggttcatataagtaaaattagctcttggcttcttcttgtgattgttagtttcttgattgttgctttactaaagcatttaaaagaaaatcaaagccaatttaaacaaaggaagaaatcaaaagaaacaaacgaaatatatgaaagatagaaacataactatgtacacgctattaatatgaagtgcagaatctttggaggcttatatgcaagaatatattttttatcttccctattttaaatcagcggggtagaccgtagcagttacaaatgaaaatgaagaaaatgtcggacagcttaagagaatgcataaaaatatgtggacgaaaagtattgattttttaactcgtgatggacttccagttttagattctatttcttggtttcctatcttttcctgcggcttaaaggtacatttacaagttcaatgggaaggaagaacgatgtttattgatcacgtgaaaaaacaccggtgggtgataaaagaaaatggaaaaacagtgggacatctattaggtaaaggaataattaaaaacgaaagagcacaagaaattagatggggaaataacgtctacatgttaagcagtcatgaagctgtagaggaagcgtgtatttttaatcaaaaaagagaaaaagtcgcagagtttaaatcagacctttttcattttaaagaaggcaaacactcaataagagtaacagaagaattgcccgtacccatttttatcgcttcttactatataactaatttattatgccatacatataatcaggcgcagaatgattctgcgcctgatttttatatcatgattttacaaatatcatttgtgaattcaacgggatcactaatagataagccttcaattagaagagcttggttatataataaatttgtataaaggtctaatttccctttatcattttcaaatgcatcttttaaagaagcgaatacatcatgatttacgttaatttctaacactttttctgcttttacatgctgattgtcaggcatagcacttaaaattttctccatttcaatcgttacttcaccatcagctgataagcaaacgggatgtgtttttaaacgtttagacgcacgcacatctcctacttttcccgccaaagcttttttcatatagtcaaatagctctttattttctctttcctcagactcattgagctgttcttcttctgcttcaatccctaagtcactgcttgaaatagatttaaattctttttcttcgtacgtcattaacattttaatcgcaaattcatcgatatcttctgtaaaatatagaatttcgtaccctttatctgcaaccaattctgcttgaggaagtttttcaattcggtcgtacgattcgcctgatgcataatagatatacttttgattctcaggcatgcgcgatacatactcatctagtgttacgagctttttctctgtagaagaatagaataaaagcaggtcttttaatacatctttgttgctgccaaaatcactgtaaacgccgtacttcagctggcggccaaatgattcataaaacttctcgtacttttcacgttcgtttttaagcaagctttttaattcatttttgattttcttgccgatgtttttggcaatcagctgaagctgtcggtcttgctgcaaaatttcacgtgaaatattaagagataaatcttcagaatctaccatgccttttacaaagctaaagtaatctggaagaagatctgcacatttattcataattaagacgccgtttgaatacagttcaagtcctttttcaaattcttttgagtagtaatcaaacggactattttctggaataaataaaatggcattgtagcgaatcgttccatccacattaatatgaaggtgagtgagcggtttatcaaatccgtagcgcttttctgaataaaactgctcatagtcttctgaagtcaattcatttttgtttttcttccagatcggcaccatactgttgataacttgttcttctgtataatcttctagctcgttatcagaaccttctttaggacgtttttcagttatgtccattttaatcgggtagcgaataaagtctgaatactttttaatgatctcttttaaacgatactcttctagatactcatcatatgtttcatcttctgtattttctttaatttttaaaatgatttgagttccaatcgtttctttttcgcaaggttcgattgtataaccatcagcaccagtagattcccatttataggcttcattgctgcctaacgctttactaatcaccgttacgacatctgccaccataaacgctgcgtaaaacccaacgccgaattggccaataatcgtgtgcccgtcctttgtttcattttcgtttttaaacgcaagagaaccgcttctcgcaattgtgcccaagctgctttcaagctcttcttgcgtcatgccaatcccagtatccgtaatggttaaggtacggttagttttatctggtgttacttttatgtaatagctttctttgttaaaacgcaaggagtcgtctgttaaagctttgtaataaattttatcgattgcatcgcttgaatttgacagaagttctctcaaaaacacttctttttgagaatagatggaattaatcatcatttctaataatcgctttgattcggctttgaattctttttttgacataagaagttctcctttccaaataggggttataaaataattagcacttgagtggatagagtgctaatcactcttcttatttaacatgtattaggatatttgtcaacatattaggagattaactaaagagattaaaaattagactgaaaaaagcaaacttttaaaaaaaggttgaacgttctgaaagagtttgctagaatatacttaatttcaaagactatatgtgactggcgaaacgcggataaccgtgaggaagcatatagtgacgtagccgttcgcctgggcagaggtaagggattaatacatatctcttacctctttctgtttaaggggagaggatatggaagttaccagacatgtaggctaaaaaaccagacttttaaaaaaattaaaaatgaagttcctttattcaagggtaaaaaacatgtaaaactacgatgataatcagaggagagtacaaaatgagcacattaacattagaaaaagtacaaacaatcaaaacattaaacaacattgcacaaaaaggtctaaatgtttttaatcaagaaggttatcaaattgacaacgacagcgaaaacccagatgcgattgtcgtgcgtagctttaacatgcacagcatggcatttgacaaaaatttaaaagctattgcacgagctggagcgggggttaataatataccggtggacgcttgcacggagcaaggtatcgttgtatttaatacgccaggagctaatgcaaacgcagtaaaagaaatggttttaactacaattatggcttcttctcgtaacttatttgctggagttgaatggacaaaaggattagacggccaaggtgatcaaattcctaagttagttgaagcaggtaaaaaacagtttgttggaaaagaaatcaaaggtaaaacattaggcgttattggtttaggtgcaattggtgctcttgtagcaaacgatgcgcttgatttagatatggacgtaattggttttgatccattcatttctgttaatacagcttggaatttgtctcgcaacgtacagcgtgcaatgtctctagaagaactatttgcagcatctgactatattacggttcacgttccattaacggacgatacaaaaggggttttcaataaagaaacgtttagcatcatgaaaccagatgttcatatcttgaacttctcacgcggtgagcttgtaaacgaagaagatatgaaagctgctcttgaaagtggaaaagttggccgatacattacagatttcccaaatcaaaatgtcttgaacatgaaaaatgttgtgccaattcctcatttaggggcatcaactcaagaatcagaagaaaactgtgcggtaatggcagcacgtcaagtgaaaaatttcttagaaacaggaaacgttaaaaactcagtgaacttcccgaatgcatctctgccttacactgggaaaaaacgcgtagctgctttccatcacaacgtgccgaatatggtaggacaacttacacaagtattctcaaactacaatttaaacatcgcagatatggtgaacagaagccgcggtgaatatgcgtatacaatgatcgatattgacaatcaagtaagtgatgagattgtgcctgagctagaagaaaaaattggtcaaattgaaggaattattacaagtcgtattatctaatttggttcccatcatattttaatgtttcagccctaacttttctaagttagggctgtttttacatggtgtttacctcatatcatttcctttattctcatagcatatagaaatacctttaaagaggtgaacgttttgtcaggagaactgataggaattttgatagggtcgcttatcgcgctggcaggaacattcattacgtctgtcgtagctatagtgatgtcgaaagagcaatacaaacaagagcttcgcaaagcatttatccaaaagaaagttgatgcctatacccatgtgtgtcaagttattctagctataaaaaatgatttacttacaaaaaccgtttcttcagccggcttaaactggacggctcaatctattaacaaactagcagatgtgtgtattacggaaggaccatggatcgatgaagaagacagcaaaaagctggaggttctgcagaagcagctttcaaagtttgtatttgatgaaatagaactgtctagacatgatatcctcacaacctgttataaaattgttgaatattgtgaaaaaaaggtaaggattcttcattttatgactacaaaagaataggtgattactactttaagaagtgatagtagaagtattaaaaaagcatcgaaatataaagtcacaaaacaattcgtttatacaccagtagtcgacgagggcattagtaaggaaaaggccaaggggaaatttcattttgtaaaagcgatagggaaagataggctcagtaccgggtctatctttttacgttatcttaaatttcaattcatactggcttcatataaattaatcatactgaatgtattaatgaaagatatgaggtggaacaatgctaaacaagctttttaaactatttacaccagaaaccgagatatctaaagataaagaagtagatctccacgaagagaacgattttaacgaagtttgtgatgatcatttcattatagatgagtattagaagccctataaaacgctgcaaaatttaaagaattgattgattatatctgtataaccattaatcgtacaagggtcgtaaaggtatacttttacggccgattaatattgatgaattgctttttacatgaaacaatgcgaaaaaaatgggcatcctagaagcaaaaggaggggatagaatgggcaaagaaccaaatgatgaaacaagtgaagggctgaatcagctttttgaaatcatcaatgcaaaaggcgacgagggcgaacttagagaaattgtcagcaggagcagtgaaaagaataatcataaaaatcatgaggatcaatcgtaaaaagaaaataaaaaacctcttcatggaaatcatgaagaggtcagatgaaatagtattgcaaccattccatcctgcagagttttaaagtgttttaaactcttgatacgactggttttatggaactgatgggattcgaacccacgaccccttgtctgccagacaagtattctcccactgaactacagtcccgattatgtagagcctttattgcgtgttgactctactatattctaatacgtatggcgcgcgttcgcaatagttattttcagggttttctaatttcttcatatgaatattaacttctaaaaaaatcatttacttcttgtttgtacgtataaaaaaaacttggaatttggcttggttccaatccttttgcagcgtatttgctgatggattcgtagtaccatttctgtttttcgaatcctcttttaaagctattccaaatcgtatctccttgctgatcgtagctttcttttaaagaccgtaaattgtctaatttatctgctacaattaaagatttcacttcaagagaaccagttttcacgatttgaattgtatgctgtttacgttcttcccagctttttgatttgtcttctgtatgagcttcaacaataccagctacctctaaaccaaatctttgtataatttcttcgagtgttacacttgtatcttctacagcatcatgcagataagctgctgcaattacttcttcactaaaacccgctttttctaaaatattacctacgttaatagggtgaacaatataaggtatatcggacagcttgcgcatttggccgctatgagcgtgttctgcatatctacgtgcttcttttattaaagacatcatattcctccactttttattcagtatatcttcatattattagtataaacgaatatggctttcctcactttataaaattgcacaaattcatttcttataataaggaaaggttaccaaaatcccttcttattgtagcttttttataaagcctaatatctatttaataggcctgtatcagttgccatttccttttttattcatagtttgtatgaaggagtgatagcaatgcaaaaccgtaataaacaaaatattaaggtcattgatgtttctcatcacaacggaacaattgattgggcaaaagtggcgtcggatggtgtaaaaggcgcgtatattaaattaacagaaggtacaaccttcttagataaaaaatcatatgataattatataggtgcaaaaaatgcaggtctacgtgtaggcttttatcactttgctcatgctgataatgatcccattgcagaagttaatttctttttaaataaattaggcagcatgaaggttgatttgcctcattgcttagatttggaagaaaataaagggaaaacaaaagcgcaggtcacagcctttgcagttggatggatggagtatattgaaaggaaaacaagcattacgcctattctttacacggggtatagttttattaaatccaatttcacaagcgctgtggcaagatatccgctatggatagctcgttacagtggaagcaaccgttctaagggatttgctaacccaggtgatacggcgatttgggataaatggtctatgtttcaatatacagatcaaggaaaagtaaacgggattaaaggcaatgttgatatcaatgaaatggatctggatttctttaatagtattaatacaggcgtgacggtggtggaaaataataagccatcagcacaattacaaccaggtgatagcggactagctataaaagaactgtagcaaaacttaattaaattaggatttaagctttcccagcaaggaaccgatggtcaatatggcagcgaaactgttgcaactgttaaagctcttcaagaaaagtatggattaacgtcaactggaaaagctgatgagaaaacattagctaaaatgatggaattacttaagggtgtaagtaatcctatagaagaatcattaccaaaggttacttcactcggagataaatattcttttcaagtaaaagcgaagaaggatatcggagtctacaaatatgcgaatgtaacagagaatttcagaactataaaaaaaggcacggtatttagcgtatatgggtatacgaatgcagcatgggctgttccaggcggatttgtgcaaatgaaagacgtagaacctatcccaattacaattaaaacaggcggattaagtaaagacatggaaacagagtttcgtgctttcttaaaaaatgaaggaattgacagtgaattaaacgtacatgcaataggtaatccgtccgctgaacttaccgcagctggactggattttgtaaaagttaagcagtttttagataaaaaaggctggtactacaagcaataaactcccgctccgaagagcgggggtttattttggtattttgtaaaaaagaatagcagagatcaattaagtaattaaaatatgttctaaataacaaagtagatggtaacaaaaaagtttctatgtatagttcacctctaacagtcatatttttagtcaacggcttatggagggtgaatgaatatgaaaaatacgcagattcgaattgaaacactatcctatcactatgaaagtattatggtgaatgatgcagtagagcgtgcgataaaaagtatcgaagtgacgtatcgagcatataaacataaccacgttttaaacggacatgtagtactttcaggagaagagatttacgatcttcagcagctgactcacgcagtggctggaaaaataaaagcagaattagaaactacataaaaaagcgcctttctttaatcttggtttaagatttaaagaaaggcgcttttttattaattattaattaaactgcaaaaagaataaattaaagtatgttctaaataaaatatataaataaaaaaaatagcatctaagagaattccttaaagcatacacattacctttgcattgtgaactttgtctcttttatcactacttttcttttactatgtgtaagcaacacgccacataacgtaatgatacttccaacaatggaagctgcactcgggatatcttttaaaagcagccacgctaagaaaaaggacagcgcaggagttaagtaaagagaaatggcagcctcagcagaacctatacgcgatgttagataagcaagtaccatatagggaataacggttggaaataatcctaaatatatcacgcttatcgctgatctgacagagatatgtgcaagttctgtttctaacccaggtaaaaaaacaagcatagaaattgtagctccccaaatactgtacgtcacaaaagaaaggaaaccatacttttttaataaatttttttgacgtactatatagatgctttctgcaagggcagctagcagaatcagtaagattccattaactgagtgtacaaaattctctttgctgaaggttaaaagtgcaatacccgcaaagcttactgcagatccaatccattttctttttccgaactcctcctgaaaaagaaaaatagctaaaagcgaagaaaaaataggagtagtcgagaccagtaaacttgcaatacccgcactcaccgttttttctccaatgtttaatgccgtgtgatatacggtaaaacctaaaaaaccgagcgctaaaagaagtggaatatcttttatatcaggcaagcgcatgcgtgtggctattgcaataactaacagcactacagaagcaatacttaaccgaacaaaagcgaggtgctgaggagaaaacgattccagccctatttgaataactggaaatgctgaagcccataagctaatcatcagtatatgtaagaacaccaaactaaacgttaatttcatgctattcatctccatttttcattttgaatccaaccagtatctattgtggttcccatgttaataaacatttgataaaatgtcttcaaccagtttaaaagtaattaacccaaccactttaaaaacaggagtaaatgtatgaatcaagagaacagttcgagttatccaaaatacaagcaaatcattgattttatgaaagagaaaattgcgcgtggagaatggccgattggaagtaaaattcctagtcagcgaaagcttgctgctatgtttgacgttaaccgaagtacggtcatcacggcattagaggaattaacagcggacggtttaattgaaggtaaaatgggaaagggaacaatcgttataaataatacatggacgcttttggctacgactccgcccgattggaatgttcatgtgaaatcaggtatgcatcgtccgagtcaagcaatggtccaagatattaatgaatccgaatttaactcaaaccttattcaattaagcaaaggagagctttcacctgacatattccctaaagataaaatgaaatacgctatggaaaaagtagcaaaaaacatggaggttctggggtacgaagaaccaaaggggtattttcctttacgaaaagagttaagtgtgtatatgaaagcaatggggattgaatcttctccagattctattttaattgtttccggcgctcttcaagctcttcagcttatttcaattggactgctacaaaagaactcttcggttttgctagaaaaaccttcttatctatactccttacatgtatttcaatcagccggaatgaaactcaaaggtctttctatggatgaggaaggaataaaagtaacagctataaaacgcgctgaccctcaagaagggcaagctattttatatacaaatccatgtttccataacccaacgggaacattaatgtctcaaaaaaggcgttatgatttgttgaaagaatgtgaggaacatcagcttcctattattgaagatgatctataccgcgaattatggctaaataaacagcctccgttgccattaaaagctttagataaaaatggacacgtgttatatgttagcagtctttctaaaacattaagcccgggattacgtatcggatggatagtcggcccagaaccagtcattgagcgtttggcggatattaaaatgcaaacggattatggaaccagctcattgtctcaaagagtagcggcagaatggtttgaacatggcttatatcaacagcatatggaaacggtacgaaccgaattgcgaacaagaagaaaagttatgctgaatgctttagaaacatatgcaggagatgtagcgacatggacgaatcctgaaggaggcttttttatatgggtgcatattcaaccttctatttcaatgaaatctttatactctcgtgctttaaaaagaggaatattgcttaattccggaagtatctatgcacaagaaaccggcagttatcttcggctttcttacgcctatgcttctttaccagatatcgatagaagcattaaaattcttgctgaacttattcgggaattgcaagtatagtaaaaaggaatagcggattacccactattcctttttacttgtatcaaactcttcttcctataaaaaactccaactaacaattgactatatattactgcctataaatacatgttatcttttatgacaaaaataagttaagaagacttttaatttgctttctgtatgttttacatgtaaatcgtgaatggttttaactacgtaatcattatcaaacattttcaacacctcaattattgttaagtttcctgtttgttatagtttatgaaataatcagacgcatatcatcggccatcagctgtaattttgcggttcatcttttacaactaaaggctgaaatgtacgctcatgattgaacgcacgaataacaggatatgcaaaaaaatgaaaagtgtgcacgttttgttttaaaaaagctatatcttaaaaaaagaaaattgtcacacacatttatgaatatgtatctactaagtaagaagacttttttagttggtgggattgaaggtgaaaaagatggatgaattatttaaagatcttgatgtgtacaggacgcaagaagaaatgaagcagtattttgaacatacgcagcaaatgattcatcaaaacagagaatatataaaattagctcgacttaaaaaagggcgtttcaaaaagttttttgaagagttttatccgctttattgcttcagccaatcttcctattgtccgaggaattcaaaattgaagcttattattggaagtcaaggatacgacggattaattctccaaccggatggtactgaaaaacgaattgaaattacttcttacaaagatgggaaactggaatttgaagatgcacagagggtgaattcaggaaattttgctctacctcgtatccagacggaaggttctgtagaagagtatatagaaaaagtgctagaaaacatccaaaaaaagagcaaaaaagattacagtggagcatcgattctatttgttgtacacacgtttcattattttgaagcctacggaaaaagttcagctgcctttattcgtaccttgaaaaaagaaatgaagaatactgattttcgagcggataaaatttatttattggaattaaatcagccagaaagtgaaagtgttaagcaaaacattcatttcattaaataagaagacacgctgcagatgttgaggcgtgtcttcttttctgataacagaactctcttaatacaggtggataattttgaaaattacaacaattaagtgctataattcaagtatgaacatgcattcagaggaggaaaaccaatggatttagcttatagagataaagcttacgaatatgccaaaagattcgaatctagctatgacgattatgatgaacgctataaggtgcacaataatccgacggtgtggcgatttatgccactgtctgattttcaagatttactggaaaccaatgcgctttttttcgcaaaacctgatgcattttcggacccccttgaaggatgctcttcaatgtggaacatagaagagttaagaaaaaaaggcgaacgtcataaccgtacctctagaacctatataagaaaaatccatgaattttctgctgtttcatcctggcatatcaatgattacgaagccgctggaatgtgggatctatatttaaaggggaatgatggcgtagctattaaaaccacctatgaaaatttattgtgcagtattaaagatttgcgctataaaatcttctctggcaaagtgcagtacatagacttccaaaaagaaatgatcagtcactctgtatatgacacgttattttacaagcgcaaatcctatcagcatgaaaatgaattgaggcttgttattgtagcaagtcgtatacacgcttggaagctgcaaaagctattcgaaattcaaggtatttccccaaatcaatggcaaaaacgaatggatatccttgaaaaaagatcgtatgagttttctcacgagcatggcaacctccttacatgtaatttgcatcagcttatcaatgaaatttacgtatccccaagaagcgctcaaagctgtgtagatgaagtaaaagcccttgctaaaaaacacggactcgcttataaaaaggtcactcagtccgacttgtatagggactatatttattaaatgtttatgttatttgaaaacaggtaaatcagtagtaaaagatgttttcaaggaggaatactatcatgccttacaattcattaaaagaactgccggatggagtaaaagataatcttcctcatcacgctcaggaaatttataaagaagcattcaattcagcaagtgatgaatacaaagaagaagctaccgctcacaaagttgcttggaatgcggtgaaaacgaagtacaaaaaagatgataatgacaactgggtgaaaaaatagagacaaaagagcctaaccataatggatttattattttttgaaaaaatctcccaattaggtttcaattatttttccgagggtatacattctatgcaaggccaatacaagaaaggagagactgtacacatgcattgttttacagcgacttcaagaaacgtattgagcaccttagaaggaagatttgttttgattacaaaaggcacattggtaaacaatcgttatactaagtgctaggctgtctaattaagacagaatactcgactattcaaatataacattcagtataaaaaagaagatgcgtgctaagcgcatcttcttttttgttgactctattttccctccctttttgtacttcgtcttatttttacgcataaagtaataaaaaggagggggttatgctgtttgattatgaacaggagttaacgattcaccgaaaagatgctactcaaaagactgcagcgactaatgctgagacttataaaaacatagactgggaacaagtgaaattagaacaaaatcttgcggattaccaagctcttatacgcgtaccttttcctctgattttcaaaaaaaatcagctgtatcctgtatgggatttaagaaaatacgcttttttatttgaacaatctacacctgctactgtccaccctaaactgtgggaacaaggaaaattaaatgtacaagccggcttatatcaagtaactgaaaatatctttcaagtaagaggctttgatatggctaatattacatttgttaaaggaaaaacgggatggattgttattgattgcttgacgtcaaaagaaacagcagaagaagcgcttaaactagtaaaccagcactgcggtaaacgctctatcaaagccgttatcttctctcattcgcatatagatcattacgggggagttctagggatattacctcactccacacaaaataaaaatagtaaagtttatgctcctgctgggtttatggatgctgttatcgatgaaaacgtcacggcggcaacagcaatgacacgaagaagtcaatacatgtacggtattcgactgcgacgcgatgaaaaaggcttaattgacaacggtatcggaaaagaaatttcgtttggaacaatcacgcttattaaaggaatagaagaaattcgtccttccgaacatcattcttatgtaagtaagaaaattgacggcgtctcatttcagtttcagcttacgccaggaacggaagcgcctgctgaaatgaatatttatattcctagtgaaaagtctctgtgtattgcagaaaactgtacggctactcagcacaacctctatacgctcagaggagcaaaagtaagagacgcagcagcatgggcaaggtacttgcagcaagcaatcgatttatttggccaagaactaacaactgtatttggggtacataattggccaagattcggaaacgagtcgtgtattacctatatcgaaaatcaacgagacgtttatcaatatattcatgatcagacattaaggctcatgaatcaaggatataccattgatcacgtcggccgaatgatgaagctgccagaaatcctatctcacgagtggtataccaacagtttttatggaacggttaaccacaacgcaaaagcggtttatcagcgctatatgggctggtataacagcaatcctgtagatttaaataaactgtttcctgaagagtcagctaagaagtatgtagagtatatggggggagcggacaacattgtcaaaaaagcgcagcgctgttttcaacaaggcgactatcaatgggtagctgaagtgaccaaacaagttatttacgctgaacctcaccatgtaaaggcaaaacttttatgtgcagacgcgcttgaacaattagggtatacagctgaatctggcccttggcgaaatgagtatttaacaggagccaaagagcttcgtttaggtaatataccgctgcctgccaacattattacaaaagaagtatgggatacacttcctttaaaaaatattttagaaatatttagcattcgcgtagatggattaaaggcaggtgcatgtaactatcgtatattgtttgtgatacccgatcgtaatgaagtagctctcacagaacttaagcatggaatctttaggtatcttggagatacgcgaaagaaagctgaggtgacggtaacgatgtggcaagataccttatatcgactcacaactacaaatgatcactcttatagctcggtcatatttgttcaaggagataaatcgaaatgggatttctttttgtcttgtcaggattctatcgatccaaactttaatattgtgacacctgtttctaaaaaatagagtacctgattacagctcagaaagcacatcgttgactttctgttcaaagcagctgtcgcatgtgaagatttctttttcttgaaaagatgttagcctttctccgcagatggaacagcattctatacagtgattgtttcgttcttgttcttttctttcatgtaacatagcactttcctcctttgcagtataaatagtttgtcttatttctttaagtatatactaatatcagcctatgcagggaatataaggcttgctaatgcagattatttataatataaaagcgttgtaaagcagcggaaattggcacaggaattgcatgttaaatcgttgagaaaattcaatgattaaatatggggtgaacagaatgtccattacaaaaacagctagtgaattaaaaaaagaacagcagcaagaacaggaatcacttaatttatttttatctactcaaacggttattcaagaagcgcttcaaaagctaggttatggtgaagaagtataccatttattgaaagaaccgctgcgcatgatgacggttcgcattccggttaaaatggataacggatcggtaaaagtcttcaccggctaccgctctcagcataatgatgctgtcgggcctactaaaggaggggtacgttttcatcctgaagtaaatgaagaagaagtgaaggcattatccatttggatgagtttaaaatgcggaattgtcgaccttccgtacggcggcggtaaaggcggaattgtatgtgacccaagaaacatgtcttttggtgaactagaacgactcagccgaggctatgtaagagccatcagtcaaatagttgggcctactaaagatattcctgcaccagatgtctatacaaactctcaaattatggcgtggatgatggatgaatatagccgattgcgtgagttcgattctcctggttttattaccggaaaacctatcgtactcggaggatctcaaggacgcgaaactgcaacggctaaaggagtaaccatttgtatagaagaagctgttaaaaagaaaaaccttaacttgcaagaagcgcgaattattattcaaggcttcggaaatgccggcagttttctcgctaagttcatgcatgatgcaggagcaaaagtaattggcatttcagatgcatacggagctctttatgatcctcttggtcttgatattgattacctgcttgaccgacgcgatagttttggtaccgtaacgaatttatttaccaatgtgatgacaaacgaagaactattagaaaaagaatgtgatattttagtgcccgcagccatttcgaatcaaattacggttcgtaatgctcatcgcattaaagcttctattgtagtcgaagcagcgaacggaccgactacacttgaggctacgcgcattttagatgaaaaaggcgtgcttttagtgccagatattttagccagtgctggaggcgtaacggtttcatacttcgaatgggtgcaaaataatcaaggctactactggtctgaagaggaagtagcttacaaattacgcaaggtaatggtggattcatttgaaacgatctaccaaatctctcaagaaaatgacgtagatatgagacttgctgcttacatggcaggaatcaaaaaatcagctgaagcttctcgtttccgcggctgggtataagataaaaaaacgatttggactctatgttccaaatcgttttttatttgccggaactgccaaataattaaaagaaaacctgctaaaaaaacaaacacgcttaaaaaattggcatatttatttatcgcgacccgaataatggcaaaacaattgacaatgagaatgattttcaattattctatagtcaagacaaatacatacttataataaattgaatgtagaaaaaggagacgaaaagcatgagcgtattagatattattaaagctagaagaacgattggggctatgcaagacaaagacgtatcagaagatgctattaaccttatgttagaagccggcacttgggctcctaaccataaaaagacagagccttggaaattccgagtgattacaggagattcacgcgttcgtttaggagacgaaatggaacgtattatgaagcaaaaaactgctcacttaagtgaagaagaagcattgaaaaaaacaacaaaagcaaaaaaaggaccgcttcgtgctcctgtcattattgctgtagcagtaagtccttctggaaaagtgcctgaaattgaagaaatctctgccgtagcagcaggcatacaaaatatgctattagtagcggaagagcaaggtttagcaacaatttggagaacaggtgaaattgtctatcagtcagaactaaatgactttttatctctagaagacggtgataagctcctaggcttaatttacgtcggacatcctaataaagaagcttcatcaaaacgtattccgtaccaagataaaacaatttggtatcgttaaaagttcttcccttgtttttataaataaaaaacagcagctcacgagttgagctgctgtttttttttattggccgagaaaaagaaattcctgtgttcagtcttcttttcgaagtccaaaataataggtacacgctaaaccaaagataatgggtaacaagagaaagacgatcatttaacggtcaccttcctttcggatgattgaacgtccactttctgcattggggtcgcagtgttgacaaagaagatgccttttaactttgaatattccatgaatactaacagcaagctcattgcaagcaggggaacacacaccactttggcaggaatgttgaaacaatagttaaggacggtgatgttggcaataatggggagaaaaataatgttccctagtgttgcggtacgcggaatcaccaataacaatgcagctaataattcgccagtggcaataaaatagttgtagaaattagagtaaccgaaaaaataccacgccagtttcattgcagaatcttttgttgagtcgaacacaaaatcgcctgttataaattgtcctgggtagattttggccattccataaataagaaacgtaatggccatggtccaccttagggtcgcaagaatacttaaacgaaatttctcttttgttgataaacgcattgttttcctccatttgtatgcttagtccaaaaatcgcattttagtttcaggggttggcaacatgcatgacgtttgttttccaaaccacttataccgattacgtgcaatgaaacgatagagtggttttcgaatgaatgcgggaacaactcggaaacacgccatcagttgaatgggcccccgaagccggcggacaatatgtaggatggccgtagactctgtgtaaagattcccgttcataagaagaatgaccgattgaagtggtggatgctcatagttatgctgactcagcaaggttcccgcagtatcggattgaagcgatgcaaaacgaaacagagcacgtgaatcccgcttgatgacaaattgaacccatcacaccatcaaatagaataataggatggtgtgatgggtttgggggcatgacttctccttccttttttataaatatttactaaaataagtataatagtttgtgtattggactaaaaggcataaggttagatataggaatgttttacttaaattcaagttaattgaaagaagaaaacagagtcaaatatgactttgtttttgtttaaatttgaatgtagcggatcatctaataagcttctacttttttgtgtttcttataaataattaaaaattttttacttatttttttcgaaatgtaaaactattcctgttttgaaacgtactagatatagtagaaatttacgaggtagacgcaataaaagcgtgaactacctttgttactacaaaaaaagaaacttacttcgaggtgaagacgtgaagaatcaacatattttagaggtgaaaaatttaactaaagtttataaaggagagggctatgaagttactgcactaaatgatatatcctttcagttaggggtaggtgaaatagttgctgttatgggaacaagtggttcaggaaaaagtacgctgctgaacattttaggagcactcgatgaaccaactagtggaacgattaaattaaaaggaatgctttcaaaagatatgttccaagaacctcaagcctcagcatacagacgagataatattggatttatctttcaatcattccacttattaaaggatttatctgtagaaaaaaatatagctctgccgctcgttttaaagggacttacatcggatgtaattgatttaaaagtaaataacgttgtcgagctcttgggcttaacagcttggaaaaaacaccgtcctgtacaactgtcaggtggacaacagcagcgcgtagctataggaagagcaattataactgaaccacctattattctggcagacgagcctacaggtaaccttgattttaatacttccgaagtcatactagacacactggtaaccacaaaaaacgaacttagccaaagcatacttcttgttactcacgatcctaatgtagctacttatgcagatcgcgttctattctttcatgatggctctattgtcgatacatatatctgtagcggaaatagtgatttagatcatatactagagaagtttaagcttattacaaaagtcgagagtcataagatatgaaaacactacgaggtttagcttttcgtttatttaagtccaataaatttatagtgttttcatctattgtaagtatagctatttctacaatgcttgtacttagtatggttttattctcttttaatgcgcagggcacattaaaaagtcaattaaaacaaacttacggtgagatggatttgtccgtagggtttgatatggatcaaggtaaaattttgacatcaactttagtggaagaaattcgccaggataaaatggtagataaggtatcaaaagtatctattgctcacttgaatctaaataaactaaatacctctgtctatacagtaggtgttgaaaacgattatttagctaaaagtcggtatcacttttccaaacctctaaatagctgctctgtggcaatgaataagagcttagccaaagctttaaacataaaaattggagataaagtccttattgaaaacagaacatacacattagcggaaacggtaaaagatttatccgctactggagtagctccagatatgctaatacttaatcaaaaaaacgtaaaaggctatattcaagcaaaagaaaaaagcagtgcagaagcaacttatttattaataaaggcacacaagaatgagagcgccttaaaattggccgatcgtataaaatcttatagcaaggacttacgtattgatatagctgaacaagatgcaggtgtgcaaaataatttacaatccttacatacatttattattcttttatcggcattagtgttaattatcacgtctcttattctcatttcaaactttgagcttttgctttacaagatgaggaatcagttcgccattatgcgttcaataggagccgctgctaaacagattagcaaggttatcacacttcaaagcaccattataaacaccgtaggtacaggtgtcgggtttttcctaaccttttgcagtcaaagatacttatacagctggttaggaaaagtgtcgaaaatatcttcctctccatctgactttaacgtaggtactgccattatccttacagttgtaatgtttgttattattcaattctttttactcattccagcttatcgaagcacaaaagtattgccgctaaaaacaatgcagaagaacgagaaaattaactatggtttttccaagacaagaatagtagtttttaaggtactattagcactgtccttatttttagttataggaagccaggtgtttcctacaagaggcacatacggacctgggatgttactaattacagttattttagttttgcttgcctttatactaatctttcctatcctagtgactaaaggattaaaatggtctttaccatatggacaaaaaatattcggcaaagaattttatattgcggcaaaaaacctaattcctcaagttagaaaaaacacaatgattatcttaataatatgcggattaataatcattactgtatttgggtcaattacatttagaaccattcaggttaatggactaacctacttaaaaaaagaatatgtaatgcccattattgtggaaactcgttctgacaacttaaagatagataccgaagaattgactaaaaaggtagaagagttacctaatgtaaagagtgttagtaatattagttctcaaagtacagctcgacttctaacgtcagaaaacaacacaggtgttaattactcggtagtcgatattaaaaggttacaacaacaaggtctgttagaacagtttccttacaataaaaaaacaacttcaaataacagggttgtactttcaaaaaagtttgctgaaaagaataacttaaaattaggacagacaatacatttaggattatacgcacaagatcaaaacggattttatataacggaaaaaataatacctaaaggcgattatgtaatatccgctacacctgaccaccttcttgaccataaccaagcatttttagacttaaagaacaactttgaagatttagagttctatcgattatatgtggattcaaagaatgtaaaggccgctgtaaaagaaattgagggcttaaaaagccagtatcccgaattaaaggtaagcagctatgatcaatccgttaaagaagcaaacgaaatgttttatcagcgttgggggatttttatagttgttattgtcacattggctgtttctaccatggtaggagtatttaattcattggcaaataatatttattcaaaacgaaaagaatttgctgttttacgcgcgatgggcatgacgccaaaatccattcgtaaagtcattctttcacaggtgaatttatatattacaattggagtaatatgtggaattgtaatgggacttttagtgacattaattctgctattaatggatccagggaagtttgttatagattataaaacaattctttctgtagtagtatcaatgcttgtagttagcacctttttattctcatacgtaagtcgaaaaatatctggacaagatctttctatagagcttactaatgataataagtgacttctcatgtagatatagtagaatactatagtattaataaaacccaatctctacaaagagattgggttttattagtttctatgttatttatttaacaacaacattccctacatattgtgcgtagcctctatcagtttgaagttctagcacataaacataattcccttttttctttgggaacgtaaaagttctatcttgttcgtttattctaatgtcttgcttcgcattactagtgcttattgtataagaagtaatgtcattaacaagaaaatcttcgctatcaaaccttaaatttccttgtgtttcaggggctacagttagctgttgctgctttttagctctatttataccattccttgtatttgtttcctttctgtactgttttccttcttcgccgcgccaatctacattagtttctttcagttcaacatccacaacatcattgaccgataatgtaaccgtagggggagagaagtcatattcctcgcctatacaccctgataatccaacgataataaacgtaaacagagataattttataaacactttcatatataatgtcccccttagttagctgcgactagtaaaaaaattgctgcttaatttcttggaacaggggagaggtagtaataaatatcatattctttatcaatatgagggactgcttcagtatcggtacgggtttcaattgtcatatttgattttgtgggagtaccggcataaaaatcgtactttacaccttttggagtcgttatttcactagtgatatctgtatttccctttgattgtttgataatagctggattcccattaaaataccaacggattttttgatccttttgagttaatgtagctgttcctacacctacattcgatttttctttaattgtatagataacaatcttttcgttatctacatatttactttcaccgataatatcttgtattcctgtagactctttttttgcattttcaaaggcttcatcttcactagaatagaattccacgtcttttttaccgtttacgctcgtttctgaacaagccgttagtatacttgctgacagtagaggtgcaagtaatgcagaatataactttttcatacaaacccccattttattaatttctttaattttaatcttaatataaatagttaaaataatccatatatggataaaataaaacatttcttcaaagtaggatgttaaaagatacattgaatagtataataatggtaatgaggaggtgattaaatgaaaaagaactatacggtactatttcttatgctttttgtcgtatctattgcgggaggattagcattaagcaatacatttaaatatgctatgttaattgcagtgcgaataggaacggtattccttgtgtgctctacgttctttgccgcaaaaaactacaatagttcaaagatgcagtaaagacaatctctgtgtctttgaaatcttagatgagctacaacttatactgaaaaaaatttatcctgatacaccgtttatacattatccggttgtatgcggaggccctacgataaatgttattgcttgagaggaagagctccaaatcatttggtgaaatgagtatacatacataatgtaataattattaaggtggtagatgcataacggtacattgtataaaccgacctgcattaaatggtttttatcactttttacttagcaacatagtttaaatgtcactcttataaccaccttccatatgtttctaataaaattaagaaactattgttttaattgaaaattccacaagaaagagggaagtaatggacgttcaaaaggtagcaaacttatttttgatttttgtcttaattgcaacaggcatttcattggtaattggctttgttgttgctgtgagaagtacaaactataaaaagggatatataagtacttttatatccagtgttttctttttaatacttattgtgagctggtatgataaagcatcttcaaacgtttttatggggacaataccttgggttttaaatgttattgccgtcattattgtgttaccactgtacttgttagttgctcgctttatatttaaaaaggttacaaaaggacaaaaaggaacaaaggaaaagattattggttaaattactttctttcatcgttttttctaatcttcacgattttaaataaatgaagatacacaaaaaaaatttttatcaatatcctgttagagaaagtgattgatatcattttctgtaaaggagagaacgtctatgattaaagttaaccaacaaattgtgaaaataagtgatctaaataatagttcgttaacgaaagaaaaagcagacattttaaaacagatggatgcctatagggaagtgtatgagtatgctacatttgaccagcttgattttgatgtatctgttaaattacaaattattgaatcgtctgtgttgctgcgcaaaagcggtgccaggtttgctacatttgcacgttctaggtgcaatgaaaagtattggaaacgaaccgatgatggaggatttcagctattgcctacagtttctccgaataaagccattgatgatattttttacaacgggcacgaatatgcgtttgaatgcgcgatggctgttattatcatcttttataaagccgtattgaacaatattggaaaagaaaactttaaccggctttttgctgatctttacttacacgattggcaatacgatgaagatcttgaacttcatggttataaagggtctgactacttgccaggagactgtgcatattttaaaaatcctgattataaccctgatactcctcagtggaaaggtgaaaacaccattgtattagatgagactctatattttggtcatggaattggaattacgacgaaggaaagaattattgaagtgttaaattcaaagcgaaaagacgacgcaaagcgctcagcttacctgtcagatgaaattgtgaggcttcacacccctcatctcagttattttgccgttagatacgaacctgttgtttggtacgacagaaacagcgctattatttccactattggatcggttacgtatgtagcttgattgatcaaagtttgctactttaggcttttttcataaaaaggaaaggattacatgaaagtaaatttgagaattcaaaaggattttatgtataaaaagaagaatccatttaatacacaggtcttaaaactaaaaggaaaggaggagattaccattaaaaatcgtgataaaagacgcaagagaaaacgcagcgcattaaaagattatctgaaaaataagcttggtcagctaaaaccgaagccaaacaaaggacctgtttcaaatttgaagtcttctgcttaaaacatccccctagtttttatatagggggatgtttcttttgaattttcttttatttcaaggtttacatgttatgagtggcatttaaggggtaatttgtgcacaatagacatcaaatagtttatctaatacgacaacgtaaggagagattagacgatggaaaacatgattttaaaacatatggacgttgtaagaggaattacgattagtatcctccaaaaaacaacagaagaggcagcggacatcacaccaaaaggattcaataacaatatccgctggaatcttgggcacattgcctttattcaagaaaagcttgtgtttggcttagctggtgaaccgatgcaaacgcccgagagttatgaaagcttgttcggcgcaggaacaaaacctgccgattggacggaggctgctccttctcttgaagaaattgcgaatgtgttgaaagatcaagcacatcgtattaaagatttcatgccagggcagtttgataagcagttgatcacaccttttacaaacaaagccggcatcaactttataacagttggcgaaacgtttttattcagcttctatcacgaagcgatgcatgtagaaacgattaagcaagtcgggaaagctgcagctgcacaataataaggaaataaaaaagaataaatcacatattctttataactattttacatagcgcctatgcatatactgatctatacagcgcataagatgtaacatgagctgcttttcctaatgcagttcgcaaggaggtgacaacgtgaaatttctttcaggtttaacgactcttcttgtgattttaggcggtttaaattggttagctgtagcattaggcatgaatgtagtagaagagctatttggctcttgggattggttagtaacaacgatttattggttagttggcctgtctgctctttatcaaatttttgataagttttttggaacgggagcgagtgtcaaaagcaaagcgctataataaatattattttttattatctctttagggagtttgaatgtatattcaaactccctttttcatggataaaagacgtgacatctttacaaaatacggtaaaataaggtaataactaaaaagtaggaggaatgggatggagctttggggtgtagtacctatcttagtgtttggagttctttatataggaatgattgctggtattatagctgttatcgttatagtgttaaagcgaatgaaagagagaaatcaatatttacgtgaaataagggatgaactgagaaatcaaaacagagcaactatagcagaaaataaagaatagaagagggtttaatagatgaagaaaagtgtacttcctatattttttatcgtaaatcttttttttatttactgtttattatttaatcaaggatacatctttcagctaaagaatctaccttacatatgggctatttatttacttcttggcacctgtttagctttttattatatgctgcgatacaaacaaaaaaaagacggacaggtgttgctttcaatcggcattttaactacaagcattagttcacttggctgtttaggtttcttttatttcttttatcacgcaatgggcggataaagagcaccacaagcgggggcttcagtgaaagtcgctgctttttacatttaggtctattgtataatagaaaaaaagaaatgaatgcaggaggggaactatgcgaattgtttcgctttgtccaagcaatacagaactaatagcgtatttaaaatgtgagcatttgctcgtagcaatagatgattattctgattggccgcagtctattggaggtctgccgcgtttaggtcccgatttatctattaatatggatgcggtggaagaagctaaaccagatttagtcctagcatcactaagcgttcctggaatggagcgaaatattgaagaactaaaaaaacgaaagcttccttatgtcgtatataatcctaattcgctagaagatatccgtcaaaatctacaggatttaggtcagcgattaaacattgaaacaaaagcagctgaactgttaaagcgttatgatcagtttctttctacatataaagggattgcaaatcaaattgatgaaaaagccactgtatactgggaatggtggccaaaacctgtctttactcctggcaaagcaaactggctgactgaaattagtgagttagcgggaggagaaaatatatttgctgatcataaagaagcaaatgtacagagtgattgggaagaagtgctcaaacgaaatccacttcatgtgtgtttggcttgggtgggcgtacagacaaacaaagtgaatccaacgattttacacaagagaccgaactggtctgacatgtctgccataaaagaacatcgcgtatatgtactagaagaatggctgtattgtcgtccttcacctaggttgctgttagggttaaaaaaactcgcgccgctcctccatccagatacgtttcctgcatttgacggcaaggaccccttattataaaaaaaaggagcgatacatatgaaagatataaaacaaataaaacataccattcaacaccgctatccttttttacttgttgatcgcatcttagagcaagaagaaggaaagcttgcgataggaattaaacaagtaacagcaaatgaacctttttttcaaggccacttccccgactatatggtaatgccaggggtacttattgtcgaagctcttgctcagctcggtggatttgccatggctgcggatgaccaaccaaaaggaagacttgcttttttagcggggatagacgaatgtcgttttaagcgtcaagtaaggtcaggagatacactacgtttagaatttgagattctcaaacagcgcggaaagattgtaagaggaaaaggaaaagcatttgtagacagcgagttagcttgtgaagcagtcattacctttgctcttgtatgatacaaaccaggataaagcgtattgaaggaaaccgccttatggcataagggcgtttttttgtaaataccttagtcaaacttccttttgatgaaagaagaaacggggtatagaagaaaaaagggagaggggagaatgcggtgagaacattaacggaagttgttgtattactcacactattgggtacgtatataggcatctcactacttgtctacaaacggaaaagaacgaatccgtttttctacagcatttacttttatttagctaccagtgtcattttgatttgcttggttatcttttggcttcagcttcgtttcggactcactgataagcaagtaggaggattgcttatcagtgtggttgcattctttttacttatttatgggttgttaaaaacaaaacaaaaagacaggtagccgatgctatctgtttttatttatattcatgttatatatttttatcaattgtagtgtcaattgaatggatctcttcatatactaaagataacagctttcttttgcaggttagttgacatcgtagcttataactcgctattcttttgataattcattttgtgaaaggaagtgaacgtatggatgcatcccgtattatagctaagttagaaaatcggataccgacaattcttgggatggagcagttttctcgcttcggtattcttgttccgcttattgaaaaacaaggggaactacatgttttatttgaggtaagagcgctcgatttacgaagacagcccggagaaatttgttttccaggagggcgtgtcgagaagacggatgcagacgaaaaagaaacggctatccgtgaaacctctgaggagttagggattacgcctcaatctattcagcaagtacaagctttagattatattgtttctcaattcggaacaatcatttatccttatgtaggttttattgatgagtcgcttgaacttcgaccgaatccttcggaagtagcagaagtatttaccgtgcctctttctttttttcagcgtaccgaacctgatatacacaatatccatttcagagtagaacccgaacataattttccttatgacgcgattattggtggtgaaaattataattggcaaacaagagagatggaagaacatttttattactatgaagatcgagtcatatggggactgacagcaaaagtgatttatcatttagtacatgtattaaatgataaataaaaagcagcgaatacgtattcgctgctttttttatattaaatagattgaatagcctctgcgataggcgtatcgcctgaaactaaatcaaaagaacgtccgaatgtatgatcttcgcttaacgtttccactaccacacgcgctacatcttcgcgaggaatggatccgcgctctttgttctccccagcatctacacgtcctgttcctggttcgtttaacaatccgcctggtcgaacaattgtatatgttaatccgcttgcttctaagattttatctgcgtaatgtttggctacatagtaaggaattagtgaagtattccagttttcacggtgatgtgcttgaagtgcgcttaccatcacaaatcgtttaatacctaaatcttctgcagcttccatcgcttttaccgcaccgtctaaatcaattaaaagtgttttatcatggcctgtatttccgcctgatcctgcgctaaagataacggcgtcacagcctttcatcacttccttaatttcatgtacagtgccttctaagcttgcaaaagccgtttcgatacctcttgcctcaagttcttttgcttgttcttctttacgaaccatcgcacgtacagtgtgcacatcactttcattcaaaatgtttacaatatgtttgcctacttgaccattcgcaccaattacaagaactttcatgtctaaatttgctcctttcaaatccaaatacttatacattattgtttcatattcaccgttttcattcaataaatgagctcaaaatccggtgaataaggggaaagtaagaaaatatattaaaaaaatgaaaaacaagaaataaaaactaatttacaaacaaaaaaaggaaaaaaatagttcgttaaacccagtgtctgaactatttaaattttgtaaatttttttcaaacccttggtaatacagcacttcttaaaaacagtatctcttttaacatttcccgatacaacctatataaacacattttgataattttaaacttttacttcggaaaaattttttgttattatgttttagtcattaaaatattcacgaacgaaatatttagtccgagcggacaaaggagaggataaaatgaacacattacaatacttagtcgcagaacgtgcagagatttctcctcaacatgaagcactagttgaacataatgaacgttatacatttaatgaatttcatgaaaaagtaaatcaattgtctcattacttcttagagaaaggaattcaaaaaggagatcgtattggtattttagctcatacaagcattgcttacccagtcgttacaatggggattttacaagtgggagcagtcgttgttccattaagtaagagcatgacaccttatgagcttgatagcattattacgagcggacagttaaaagcgattattcaccacaatgaatttacgtctgtattagaaaaagcggaacaaacggatggacttagctttacgttaaaaattgaggatgcaaaagaatttacaactcaattctcagcgtataacacaaacacacccgaaacacttcctgaagtacttcctgaagatctagcattgatgatgttcacatcaggtacaacaggtaagtcaaaaggatgtatgattgcacacggatcggtaagtgcctttttaaattctggcggacaggaagaacgtgcaaatattgataaaagcatgcgctatttgtttgttcatccattcttccacatgagttcgatgagcattttatttatgtgcattaacacaggaaacacaatggtatgttctgaagaaacagatccagctaaagtaattgaggtaattgaaaaagaaaacattaaaatgctgtttgcactaccaccagcattaaaatacatcgtagaagagcttgaaaaaggagatcactgtgatttccctctaaaacttgctgtgtcaggcggaacaaaagtatctgagtctttaatcgaacaatatgatcgtaacggaatgattttagctcaagggtacggaagcacagaagcttggattatcagttcatggcatcctcaaatgggatggaagaaagtaagctctgctggaaaacctgctccatatgtagaagtgaaaattgtagatccggatacacgtcaagaagtaccaactggagaaaaaggtgaagtacttgtacgaagcccttatcttttcaaaggctactggcaaaacgaagaagcaacaaacgctgtcttacaagatggctggttagcgatgggtgatgcaggtcgattagatgaagacggatttctttatattgaaggacgctataaagatgtaattgtatatggaggagacaacatctacccagatcaagtagaagaagttgtcctagcagcagattgtgtgttagaagcaacagttgtcggcatgcctgatgatgtgtacggcgaagttccatatgcatttgttgttaaacaagaagtatctgctttaactgaagaagatgtagtgaacttctgtaaagaacgattagcaccatataaagtgccaactgttgtatttgtttcatcacttcctaaaaacagcgtaggaaaagtgttgaaaaacgaagtgaaaaaacaagccttagcacacgcataataaaaaagcggcctttatagccgcttttttatatttattgctgtaatttttgagatatttttttcataatgtgaaagtattgatctctttcttcttgtgataagtgtgaaagtaaatctgaccaaaaatcgacacgagtagcttgcaatatttcgacaactttttcgcctttttccgtcaactctacccacacgcttcggcggttctgctttttataaatacgattcacaagctcatcatcttctaattgatttaatacaatggtgatagcaccaggtgagagcccaagtacttttgtgatatcgctaacaatacagctttttttatcgtgaatagtctttaagattgcctcttttgttgaagttaaatggtagggaagcaaatcatatttctcaccgattacggtgtttttatattttaaaagagcttcttttacatgatctatactttctagctgatgactaatctcttctttgctataacgttcagtcaagcgtaaatcctcctcataaaacaaattccatttttaccattataccatgtatactgcccatagaaaaatgaacaacactgcgaaaattgtcagaaaaattttaaaataattaccataattcgttaaaaaatccttgttttcgtgctattatatataagaatagtaataataggaaacgcatacaacatttgttttctattgagttcataagaaaaaatggggtctatgaacatcattccgctttacctcatgtgttgaacaaagaaaaaaatataaaaaatggtgattattcgctttgacatgtcgtcttttataagatgtttgtataaaatgaatgtatacatatttttatagaaaaaacatattgaggtaaagccgagatatggggggattcaattacatgaagaaagtcttaggggcgcttttgcttggcgcgacaattgttagtgcgtttattgcgtacagcatgtataccaatcattctgcaaagcaaacagccgcgatagaacaaaaacaagcagcgaaaaaagcagaaaaaaagactgagaaaaagaaaaaaccagtccttaaagtcgaagacctgacgtatcagctgaaagattcccgcacaggacaagtaatgaaagaattcaagccggttcattacaaggataaagacgcatacgaccaagaaattaagcaattagcgtctgagctggcaaaagggatcgacacgcctatgcaaaacataaaaatggatgcaaatggatcgttaaccggcgggtccaaacaaatcattttaaaagaagcagagcttgttaaaaatctgcagaacttaaatacgaaacaattggatgtaaaggttccgatttacgaaaccgctccaaatgtaacggcagcatcggctcaagggatcgctgatgtatcgctagcttcgtattctacacgttttcgtccaagtgatacaagtcgaaacagaaatgttcagctatccgcagaagcgattaacaacgttgtattagggcctggagattcattttcttataatcaaacagttggggagcgcacagcagaaagaggctatcagcctgctcctgaaatcatcaacaaacagctggtgatgggaattggcggagggatctgccaaacatcttctacgctatttaatgctattgacggcgctggtcttcaagtgacagctaggtctcaccattcaaaacatgtaggttatgtgcctgcaggaagagatgcaaccgtatcatggggaggtcctgatttcaaattcacaaacaacaaagattaccctgtcatcattaaagcgtacgcaaacgtaaataccggtgttttaacggtagatgttcgtacttcacagcatgctatctaataaaaaaagacgtatcctaacagatacgtctttttttcatttattatgctttttgttgctcgcgttcacgaagttccacacgtcgaattttacctgaattagtttttggcaattcatcaataaattcaattacgcgaggatacttgtaaggtgcagttaaagtctttacgtgattttgcagctctttaataagccctgcatctgttgtttttacatgatcgacaagaacaacatacgcttttacaacatggccgcgatcagcatctgggctagctataacggcacattctttcaccgctggatgcttaattaatgcatcttccacttcaaatggcccaattgtatagccggaactgataatgatatcatctccgcgtccttggaaccagtaatagttctcttcatctttagaagcgcggtcacctgttaaatagtagtttcctttatacgttttctcagtgcgctccatgtctttatagtagtgcttgaaaagagaagggaggtctctacgaacggcaatgtctccaacttctccaggcttacaaggttggccttcttcattaatgatttctacaaatccttcaagcatcggtttacccattgaaccaatcttcgtttttacaccttttaaagtaccaatcaaaagggtattttccgtttgtccgtatccatcgcgtacttggatattaaaatattttttaaacacattaatcacttcttcgtttagcggttctccggcagatacagcgctatgaaggtgagacaggtcaaaacgttcaagctcatcaattttagccataaagcggtactctgttggcgtgcagcacagtacgtttactttttcatcctgtaaaatttctaaaaactttttaggttcaaaacgtccgttatagataatgcctgttgcaccttgtccaagcacagataaaaacggagtccaaatccatttctgccaaccaggacctgctgttgcccagaccgtatcgccttttttaatatctaaccattcagcagccgcgatacgaaggtgagcataagcccatccatgagtatgaacaacaccttttggctgtcctgttgtaccagatgtataaggaaggaatgccgtatcatccttagttgttttagctgcttggaactgttctgatgcatccgccgtaagtgactctaagcgcgtccatgacgtaacatcagcaccaaacgtaattttatgttgtagagaagtagggaagttttcaatcttatcgatctcattgcagaaaggatggtaagaaataatcgcttttgcttcagcgtgatgtaaacgatattggatatcttttgctcgtaatagttctgaagaaggaattacaataatacctgcttttaagcatgctaagtaaataacatacgattcaataaggcgaggtgcaataaccaaaacatgatcgccttttgttaatcctagctccgttaacccgtttgccaccttatttgctttcgctaacagctcgttatatgtaatttcctcacgcacaccgtcagcgtcttgccactttaacgcaagctgatcggatgcatgtttttcaatttcttctgttaaattgtaatgttcacttggaactaaatcttttagttgaatcataaaaacgactccttatattatagatatcaatgatttttcatcattactattattatattactaactattagtacttgctactaatttgttttgggttttagtaaaaaagcaaaaaaagacccgcttgtcttattaagacagcgggtataacgtatgttatttaaataagctccattttgtatgaatgggtactagctcttcttcagactcgtcctcttcgtataaaccacgttcttttaaatattccacaaaatataagtctgcttccttacgttcatcataaggcttgatggataaaacaaatcctactttatgctgatcttcattttcaacgcctgaaagatacgcttttacattatgctgtaagaacagctctttagcgggaataattaagtctttgacgaactttgacagcaattctaactcaaagtcgaaggtgaacttagcaattttttctagatctgcaaataccacgccgataaaactcgtattatgtatttcgtagtctttcgttttttcattccactcaatatgtccaatttcctttaagtaattaataaaatatccaatgccttcattgcggccaaaaggctgtttagaaaggactaaaccaatctttttgtacttaggcagatacacgcatgagatagcggcttcaactttatgctgttgaaataaatgcgttgcaccttgaagtaaagcatctaaaacatgatgggtaattttcatttgtttacgagggaagtgatattcgttacgtgctaattcatctgtatcagcaaacgttgctccaataaagcctgtattggatagggtaggagggagcttctttctttttctttttcgtaccgtcattcaaaaacactccttgtgatcatcaatacgataaaaataaaacgaacatacgttcttgtctaatgatacaaaaaaagtgtcgaaaagtaaagagaagttaacggagaatttgaaattttataataaaagtaactaagatttgtaaaatgtagcggttagtagaagttaaagaggagagggggagcaaaaaataaaaggctgcagatgaaaagcatccacagccttttatatattcattaacgagcttctgttaaagctaccatatcttcatcatctaaatcgatatctacgtgacaatccattgtatgaattgttttatcttcatgatttccataataaattgtaatgttcatgagtatcgctcctttaaaactggataatgacatccaatttataccgtcatctatttgtttaatattatacccgatgaaaaaggaaactacaactaaaatcactaaaaagctgataagaaaggggttttcagtgattttaacaaggaatcagatagaataaaaatactaataaatgtattttattacagaaaatacgaggttttgactttcgttaatgaataaaaatccatttaatacaaacgtatgtactaaatgaaaaatatacgttctgtagcaaataaatccttaaaagattaaacgcaaaccgattttaacggtttgtaaagagttcattgagaatacggtgagaaaaaataaatgagtataaactctaaatcctacaagtaaactcattcatttttcaaaatctataaatataaatcgaactgatcaaacccaaaaacaatctggttaaatcaatatgcattctataaaatcatatccagatttgttctaattgaacaaatcttgttgataattagtttagtgagttgaatcatataaacgcaaaccctatctcatttttaaattccgtctcactatcataagtatacttttataatgagacggaatttacattttatctattggttcctagaatatatattatgtaaactagaaaaagaaataaaatcgttacggtctcccttgctcttagatttttagaacgcatactaccttttgctttcttcttaaagtacgtaggttttgctttcaagtcagctggttttgctcttatgagtttaatttgcaggttgtaaacagaacgcttaaaaaatctactgaatgacgcgcttgaggtcaaatgaattaaattatgtacaagctatggatagattatatcttagaaatcgttaaaatagccgctcacttaatttgagtatcaaaatagttctttaggattcacgatagtgtaaacttttatgttcttttcctcaatccctataaaatgagctttttgccttgtatctagccctctaagggttccgcttaacttacctattttttagcactactctctcctgctttccaactgtataatgttcctcctttgttgtatggactgtaaaaatagctatattctcctttaatacttatcgcttgtgatccatgtaacgtttcgggagtttgatgtacaatgaaggaatttttctcaggatttacttgaattaactcaaaatctgtatatggatataaccaaagtgtcgtatttttacctctgcaaattgcataacaatctgcaatggatggagcctctggtaaatgagagtggtattgaaaagctggtgaacctgtattatcaaacaatactaacccttctgttgatatcccttcatcaaaaacaccttcgtcaaaacagctgcaccatattccatctttactaaccgctacgtcttgtacagcatctccacaatagaatgaccgtacgacttctccatcaatattcataataaacaaattgtgcttttctcccttagctctaggattcattatcaaaaaatgcttataatcaatccatctgacaaaaggatagtttatttttaaaagtggataaagtgtagtaccgtttacagacagttcgaatttattatggcgtttttgaactaagaccagtccatattcatctttgtaatctgcatcaatgatatttaaacaattatcatcaggttcgatgctaaaaatagttctataatgtactgcctctttacgaaagtgaaatgaactataaaatgaagcgtggaactgataagctacttgataaatttgataaacacggcatcagccaaatatatgacattcatcgtaaaaatacgtgtaaaaaaatgtggttctaaaaaagcctacttagttaagtaggcttttaccatgttaccgttgtttattatttttcaattctctttttagttttcatatcacatttggctaacacctgtttttcttgtttgacaactaaaactccatctaaaagttgtggttctagcttttttaactgttggttagatgctttcaaaggagaagcttgctctttattagtcgaacctttaaaccctaaatcataattcaaagtaaaatatcccagtccagacctatcttgattatcatcaggattaaatacattgaagccaacgctctcttctagtgcattttttaattgtatatgaggctgaatttccatttcaattcctttgtcgggatgttctttcccaacgcgtttactagtgggcacgagctcttttcctttgtctttcccttctgtaataatgcaactccctttcagttaggaacgcttcttttaataaaccctttttatttaataaccatctaccgtaacatcagttattgacccatcactaggacttacttgataccaaccttgtgtagctgtatgttcctctcctgtttcttcattatccacaatattttcataaacatggataatatagtttcctgagtcgtcaacgtgatcatatgctacaaggagaggtgaatcttcagatatgccttgctgatcacgaactagctggatagcttgctcttgggaaactgtttgttcgactggttcctcttcctcaagggcttctgtatcttcttcttgctctggttctgattccgattccgtttgggcctcatcttctgaatcagtctgagcttcttcctcatcagcttttgcctgagcttcctcttcctcctgctgtttcttctcctcttctgctaaacgttcttcctccgctttacgatctgcttctgcctgagcttcagcatcagcttttgcctgcgcctctttttctttttgtcggtcttcttctagctgcgcatagtaatcatctaattccttttccatttgctgctgttcaaggtctgataattgcttttgttgttcttgtatttggttttgaagcaaagcaatttgttcttctgaagcattatcaacaaaattgatgttttctacataatcaccactcgcgtcaaaattaacttccatcatacaaaaaacattttgctcttgattaatgccatagtaaatatactgattgtcacctacttggatatactgataaccattcattacatttaataagtaatcgcgatcagcttctttagaattaaccgcttttttaattgtggatgcttttgtttgtaatgtattcggcgatgattcttttacagccgttttgttgccattttctttcgtatgaaccgctgttgatttctctgtaggctcttctttttgcgatacagtttcactggactcatcgctacaggctgctagcaatatagctaatattggaataccaaaagcaactttcaacattttcatagactattatcccctttttttatctttttttagggtttatataatcctaaagaactataaaaccttaggagttattgtaccaaaattaagaaaatataagaatattttcttgtgttgtttatggaattttttgaaaaaaatatcttttcatgcataaaaaacacaaagccatgtacctttttccaaacacggctttgtgttttcgtaacagattttaatgatgaaatccattgtcgtatttcgtgtctttaagaacaggtctatccaacgagttaagaaattcaacggcttgtttgaaattaaccataaataaatgagcaaggtcccttgaaaatccatttctaacaacaatgcgcatgattgttatttcttccatgtctgctgggagtggataagcaggcacttgccatccatacgtgcgtaattgtctagacaagtcataaagagtccagtttggcgtgtatccttcttttagtttccaagcaagaaccgggatatctgagccatcagcaagaatttcgaatgcttccatttctccaatttctttgctgagaaacagcgcgttttcttgtgaggttttttgcacggcataatagccgtctttacctaaacgcaagaaattgtagtactgcaaaagaacttgtgctcctggtctagagaagttgagcgcaaaagttggcatgttgcctcctaaataagaaacgcggaaaataagatcttcaggcaagtcctctttttctctccaaatcacccatcccaagccagggtaaactaaaccatacttgtgtcctgatacgttaatggactttactcgcggcaagcggaaatcccagataaggtctggttgaagaaatggagcgataaaacctccagaagcagcatctacatggataggaatatctaaccctgttttttcctgtaactcatctaatgcttttgcgatagcagcaattggttcgtaaactcctgtatacgtgactccaagaatcggtacgacgccaattgtattttcgtcaaccgcattaatgacgccttctgcatctaaataaggatgatctgcattaatgttcacataacgaggctctacgtcccaatagtttgcgaatttctcccacaccacttgaacggatgaactaaatacaatgttcggccggtccgttgatagacctttacttttacgcagcttctgccagcgtctttttaacgccagtccgccaagcatacaagcttcagatgaacctgtagtagaaacgcccatcgttgtatcacaattaggtgaattccacaaatccgctaaaatacgtacacatctctcttcaatagccgctgtctgcggatactcatctttatcgatcatattcttatcaaaagactctccgtacaaacgctttgcatcaggttccatccacgtagtaacaaacgtagctaaatttaaacgggcatttccgtctaaagcaatttcatcatgaatgatttgataagctgtttctggaagcataccttgatcaccgatacgcagccttggaatcgtcacttctccttgtcgagaaaaaagcggattaacaggaaattcatcaggtaaatttttttgttcacgatgcgggtgccattgaggcataaagtatcatctccttatgtatatctaacaaattgctttacgttcacctagtgttatcacaagcagggtctcctttacacattatgagctttgaagactattttcattcttttcattgcaagcagaacgaaaggatgaactttatttagtaacactcatgaaaaaaggggatgaaaatgatcttgtcacaactcaactggcgtaaaatatggtaatatattctaaaggaggtttttaaatggagaaacaaggcattatcttacaagacaagtttttcgagttaggtgaatctcctatttataatgaatcacaagaagttattggaaatgtcgcatataagttatctattgctaataaatttgagattttaaaggacgaagagatcgtatttacaggtaaatctaaaatgtttgcccttatgccaaagctgatcatttcagatcaccacggaaaagaagttggcatgattcagcgaaaattcactttttttaaaaagaagtacctttatatcagaaacgatggcgatacatatgaaattacggggaatataacagatcgcaaatttgacgttttgcgttccagcgttcctattattcaagtccgcacactctcttcttttttgtcattacgtccccacacgtttgctttagaatttctcgaaccttatcttgataagtgggaaggaattgcggttgtacaaggcgtaaggatgatggtgaaagacgaaaacagcagtacagctactgctccggctcaatagttgttatatgatattaaaaaacgaacaaacttcaatataaagtttgttcgttttttaattaagggccgaatactaacgtaccgatgacatggtaaccaattggtacaagaaacaagatgatatttaaaataatcgcccatagacagagcttgtctttttttataaagaaaccaataattgcaggaacaatcatgagcggaactaaaaagataggagcaacaataggcagaccttgaagtttttcagcaaaaattagtcctgtaaaaaagttaagaatcaataaagtattaataatgacatataaaagtgaaattcctccgagaatcccccctattatcccacttttagttgttttaacagttgcatccatgtttctatcacctcttttttagaaatataagtaaactatactataatgtggtttttattgtaaaggtatggagaaaacagctattgaaaggttgctacgaaagaaaaaactgtagcaatcgctacagtgctttttataaacagtgcattttttcctctgcttctttccaaggaaccgcatagccctgtccttttgagcaaaagacggaggatgagctgtattcgggatccgcctctttattgtagcggatttgttcaataacttcttctttattatgacagcgttcatatcctccgaataacagagacatcgttccttttccatgtgtaaaagatgctagcttcgaaccgtagttcataaaagtgaaaacaggaacttttcctgtaataatcgctttgttttccgttgtttgaggagaatcaaagcggccatgtgcactttgaacatcagctaataccctccccatttgatcgatatctactttaattttgaaatcataatacggttctagcacaatattttctgctttttctaagccttgtcgcaatgcacggtacgttgcttctctaaaatctcctccgctggtatgcttgttgtgggctcgtccagtacataacgtcacttttatatcagtaataggcgaacctgtcagcaaaccgtgatgcggcttttcaaatatatgctgacgcactaaattttgatacccaacggacaaagcgtcggcgtgacaagcattttcaaagataattccgctgtttcgttccgctgcttctatttttaagtgaacttctgcatagtgcttcaacggttcaaaatgcccgtagcccatcactgtattttgaatggattctttgtacaaaatttctggttcttcaaactgtacgtttatattaaaacgttcttttatcagtttttcgaggacttcaagctgaattgctcccattacatgaatatgaagttcttgagtcctttcttcccacgtcacatgtaaagaagggtcttcagcatctaataatcgaaaaagtttaattccttcttttggatgaacagaaggcccaaaaacaacttttgattttaacgtaggcaaaagttcgtaggatcggctttcttttaatgttccaagaccgtctccaatcgatgccgaagacaatcctgtaactgcaacaagttcgccggctgaaccttcattaacgtttttaaatgtgcttccgttataaacacgaatttgagtaattttttcttcgtatagctctccgtttttttcataagccacttcatcacgcacttgcagtgtcccgctaagagctttgataaacgtgatgcgcatgccgttttcatcgtgccgaattttatatacacgacttgaaaatgcttcttccttcgagtagcgcgtttctgttaacaaatcgagcttctctaaaaaactttcaatgccgatatcttgtaaagctgagccacaagcacacgggaaaagctgattggtttgaataagcttttgcatagccgctctccaataagcttgatcattcttgccttctataaatgcatctaaaagctcttcatctttttcagctataaattcaataagttcctcacttaacgagccacctataagctctgacgttatgtcataaacatcaggggttaagttatgtttaatatcatttataacacgttcaggatctgctcctacacgatcgattttattgatgaaaaagaatacgggcacacgatgtttttgaagcagctgccaaaccgtttctgtatggccttcgactccttctactgcacttaagataacaatcgcatagtccatcacttgaatagaacgttccatttcaggtgaaaaatcgacgtggcccggcgtatcaattaaataataagtagaaccgttatatgaaaaagttccttgatcggcaaataccgtaattcctcgttctttttcaatcgtatgggtatcaagaaaggagtctttgtggtcaactcttcctcgctgtttaatactttttgtatgataaagaagctgctcggaaaacgtagtcttccctgcatccacatgcgctgcaataccgattgttttgttagagtgtttcattgttaaataccaccttactactgtatgtatcactgttactctctattttataataatcgtaagaaaaagtggacgacaaagaactagagctgctcacatcaaaaaagaatgtgtgattaaacatcgcattccttttttgtacggcgtttggtatcttttttgccttttgctataaaaatagctgctataaggcacccaattccagctaaatgcatgatgttattacctgtcgcgcctagactgttactagtcaacccaactaaaatgctcccaaatataatcaataaaacagcaaacatgaacttcaatttcttcactctccgttagtaagttattaaatatgatttgcatacggatcatataaaccagtgattaataatagacttgctgataaaatcaatgttcctgcgattaacaaactgttgctacataccttttttctctttttgcgtaaaaacattcctgatataagaaatagtagtgcgacagatagtagaatcaatcctataccaatattcaatatttctttctctcccttgcgaatgtattcattaccatctagttaaccataatattattatgaaaataaaaagcgaacttgaacgtttaccgaacttaattgttttatatgttatcatacataaattgttaaaaatacattttttcacctttcactatttaaaaaaacagcctctttactaagagactgcttttttaaatgacaactgataaaaccgcttaagaagctttttttaattgttctttttgtttctgttgataagaagaaaaataaataagacctacaggaaagacggcccctcctaaaagattcgataaacttccccattcaggtggtaaattaccaatgacgcgcacatctagtaaaaaaccaagcgcaataaacgcgcctcctaaaaacccaagcatgagaatggaagaaagggatagcttcgtttttgaaatccctgcttctaaagcgatgtttaacattttatccggcttgtgaaatgccataaaaatcctccttaactaaaaaaaggcagcattcaaaaacaccttttacacaaggtttttgaatgctgcctaataatcctgcactttctttacagtatatcagtcatcattatctataataaaatcaaataaaaaataagcagatcctacttctctttcatttaattaaattatgtattttacgttgttctactgaatgttggtttcaaatacaaatacggaaacagcgatatcttcttctactttgatatcggaaaataagtactccagcttagctcctaacaagtcttcaagtccctctggaggagatgaagcataaaggttttgaataagcttcgttcttgccatatgtaccgtctctttaccttcggttgttctcgcgataaattctgggccttttccaaaaaggtttttgcgcagctttcggataatatcattaaaatcatgtattttcttagacactggtgtatgcctccgcttatctcgagtatgcctatcctgctcattcaagttttcaactaagaataagttacattatacatgacgacgtttacattgtatacaatgtatctgttttaccatcgttaatttaaacaatcaaacgattacgaaatgataaaaaaaatccttcacttattaaagtgaaggattacctttatatctctacttaaaggttacaaatagattctcagttatcaaagaaataactaagaactttgacaagatagcatgtcaaaatagtcaagtggtatgtttgtaccagtagttaatgctatcacgttaaagtcatggaatccaattagtttactttcataatactttatttaatttaaatattcttttttaataggtaatccttaatcttcatcacgatctgctctaaattcatcattagataatgaatttagttgatggctaagcttttcgtagttatcttgtttttggttttgttgtacatcgttagatataggagcttcactagaaacagtagatttttttctagtctcttcgcctccgctaactccaaacccaacattgttatctgtcatcggattcacctctttaactgttattatggagaattgctctaaaaaaatgacaggaaacaaaagggattcccacttagctaatagcggtccaagcttccttacttacaccaaatcgtatttaaataaggaaatgacctgctttaaccccataggcaataccaacaaaaaaacttgctatacctagtgtttgacttttacatacatactttatagttaagcctggaatcagaccccatataatgatgaaaatagcgaacgatactataatagaagaccatgcatcttgccctgatatacttataccttgcataaacgtttctcctttcagtacttatatcgggagaacataaattttttatagtatcttataatacgaactaaaaaattcaagtgacctgtccatatatgcatttacagcgaatggtggcgttcaagctcgattgtttttggtttttgccatattaatacccctgccgctacatacataaacgaagtgatgtaaaaaaggctgccgattgtaagaaaatcaatgatataccctgttgcaattacggctaaagctgcccatatagaggtccataaatgatagtgtcctacttgttttcccgtatgagcacgatctgtctgcctagataacgctattttttctgctgttttttgaagagctccaagtagccccattataacttgaatgatatacacctgcgtaatagttgatagaacgggaatcacaagcataacaatcgccatcccaaacgtatataaaatgagcaagcgcttttctcctactctgtcactccatgaaccgatcaaagggtgactcaaagctgcggttaaagcgaaaattccgtaagctaagccaaattgtgaataactatcgccaagatttcgaagcagtaaaaggtaaaaaggtaaaacaatactgcttgcggtaatcatcaggctttgtgagtgtaagagttgtttgtacgtcattttccatactccttataaaataaattaacgaacgtttcgttccgatcatattttcttttcaaattaaaaaaggcggttgtatgagggtaagcctcttctaattgcttcttgcttgggtagccgtaataaggcaagtaatagcttccttgatgctgcagcgtcacatccaccatttttctgacaactctttgtgtatcagccatgccttgatggtcttttttctggttaataagtaaaacgagagcaaacatatcgtcttttgcataagacatgactgctttattgtctttttctacatagcgaacagtaatgttcagtaaatttaatttctctgttgctaatacttcgcgtaaatcatcgatgtaagaagcaaattcatccaccggaacgaagtattcctgtaaaacttccgtccggctagcactttcgtattccataaaatcactttcagaacgcataacattatttcttgtttcaagccgtccattttgttttaagaaataagccttttgtgtttcccacagcatatcttttccccagtcactgtaccgagacagtcctagcataaatttaggaagtgccactattttttctgtcttgagcggttcgtttgtagtagaagtattttgagaagataagcgatagtttgtgacgtacatatctgttagcaattgattaggagaaacagaaatacgcgccatatgcatacgaacgtcagggttatgctgtacgtagtttttaaaatacgctgtatactgtctataatctaagcggataatttcatcttcgtaccattcatcgtccgttaaacgaagcgtcacatctaaaatcactccaaataacccgtatcctccgtttactaaagaaaacagctcaggatgtttcgtccggctaatttcgataatagatccgtccgcctgcaggagacgcatagatttgaccgtatccattaaagaaccgtatcgaatatctctgccgtgtacgttcacgctgatagaacctccaacggtaaaaatattttgtgattgcataacttgaagagcaagaccatctttatgtatatattgctgaatgtcattccatgttgtcccactttgaaccgtaatttctttttgacgtggcttgtaatctataattttattgtactgcttcatatcaagtaaaatagcattcggatagtacgtctgccctccttgactgtgctgcatgcctgaaatcgctattttttcatgatgctgtgaagcgtttttcacccaatctttcagctgtttttcagttgttccatgctttatttctttgacttttgtaggaagaagccgagcaacatcccccgttacaggatggctttgctgctgtttataaatatgataagaggcatatgaacccactagataaaaagataaaaaagttcctaacaacacgtttttcttcattctaaactgtaagctcctttctttatttctgtgaaattataccatataaaaagtgaaataacactataaaagtgtaattttacactaatttataacttatttcgagaaaatatatgaaaaaaacttgtaatttaatgtatgttaaccttattgaaacaaaaaaagaaaagacctagtgtcttttctttttttgtttctttatttttcagcttcgtatgcaactaaagctactctttttcctaacgtttgttgaaactgctcttctagctgtttaagcttcgcatgcatatcatcgttaattgaagctggctcaaaggtcatttttgtttgctccatcatactgtcacctctttcatgtgtgtatgttctactttttccaatataaaagaggtctatgacgatttgacgaaagtttacaaattaaatttgctaatgagcgctgttaattgttctgccatttgagacagagattgtgcggaaacagcaatttcctccattgaagccagctgttcttcagttgatgcagcaacttcttcagatgtagctgcatttcctttagcaaggatcgccatttcacccgctgtacgggccacttcttcaatcgctgctgaaatttgctgagcagttgcagcaacttcttctacttgcggagtcgtttcattcatgctgcttagaatttgttcgaatttttgaatagccgtttgtgatattgttcgtccttcttcaactttgtttgtaacttgctccattgtatgtacagattcctgggtatcttgttgaatagcttgaataagctcagaaatttgagacgcggacacttgtgattgttctgccagctttctcacttccgctgctacaacggaaaacccttttccatgttctccagctcgtgccgcttcgattgcagcatttaaggctagtaaatttgtttgagcagcaatgccgctgattacttctaaaatggttccaacttcttttgaacgttgaaacaaagtacgaatcgttgtattagatagctcgacggattgagaaatggattccatttgttcgaccgtttctctcacggcttttccgccttctacagcttcagacgttgtgtgatttgatagctgagaaacaatttctgtacgctgagcaatggtagaaactccttggacaatctcatctaaagaagctgtattttggtcaataacagccgtttgtttttctgcgctagaagccacttcttgtatcgcaaccgatacttgttcagtcgcagcgctcgtttgctgtgagctggccgttagctcttctgaagaagcagccacttgttctgcactcatttcaacattttgaattaatgtgcgaagattattttgcatctgactaaaagcataccctaactcgccgatttcatccttcgaattgacggtaatcgctgttgtcagatctccttcactaacgctcagagcctgattcttaagctgtttgagcggtttaataatcgattgtaacaccgcgaaaatagtaagactaccgattatcagacaagctacgataataaatagcgttttgtaaaagataggttgtgctgcttcacttacctctgatgaatacatcgtacctgcaactttccaattcgttgttttatttgtcgtaaagaccatctttttttcatcaccgttaaaggtatactcaaaagacccggaactctttgtataaagcttgtcaaaaagagagtctgtcacttttgttcctgctttttccgtaggatgaacaatgtatttcctttcaccatctaaaagaaatggatatcctttttcaccgatttttactttgctgacagttttattaatgcggcttatatctaaatttaaagcaacaaccccggtaccatctgccgttatttttgctacagtaataacggtctgccctgtagaagccgaaggataaggttcagtcacaactgtttttcctttgttttgcatagctagcttgtaccaatctcgttttcttggatcatagcctgcttgtgttacttttttaggtgattgaataaacttcccctgctgatttcctgtaaaaatactgatggcttctggatgaagtgaagcatataagttgaaatctttgcttaaagaagccgtatctttttcattatagcgctcgttgttcaccacggacgcaaaaaactctacatcgtgaatttttggtccaacagtatcgtcgatcactgaattaatggactgtacattttgctgtgctgtgttaataatttggttttcaatttcatgtttcgccgttatgtaagctgatacacctatcgtaacagatggcactaataagatcgctgcaaatgctagcaccagctttgtcttaaagttattaagggaccttttctttcttactctctccatgctatgtagcctctctctccgtagttaaaagtgatcgtgcactttctttctatcggcaagacttcatattcctttagtcatccatatacataattaacaatgggtgtgaaaagataagagtacgataaaaaaagtaggtgattttaatggaagagagtaaaaacagcaagtctttttcaatgtttgaaacagaaaaggttcagcgcggggaagaaaaagatatttttaatatctataaagaaggagtaaaaattgcagaagtaagaggaacggatcctcaaactcagcaggttattccgatgcatgacttaaatgattacgaagaaaataagcttcacgaatatattgctcatttagaccatacaacataaaaatgctaaaacaagagccctctcttgttttagtctttagaatcataaaaaacatgttcaaaatgcagcgtgtttttttgtatgtacagcagtccaaacgaaaattgcttttcacgccgcttgtcagtagcggaacctggattaaacaacgtaatatcaccaatttgtttatgaataggaatgtgagaatgaccaaaaattactgcgtcgacttgttcatgttcaaatgccaaaagtgcacgtttttcagtcgtttttcctttgccatgaccgtgggttacgccaatcgtaacgtcgtcaaacggaagaagtaatgaagatggaagtacttgctgaagctcttcactgtctacatttccaatcaccccatgtacaggagcaaacacacgcaggtcattgtatacatctatcgtttgaaaatccccagtatgaataatagcatcagctgtttccaattcggctaggagtctttttggaaaatgtttcgctctttttggaatatgagtgtcacctaaaataacgatcttcattcatcacacgctcctttttcgttcatttatgtagtgtagcgtattacgttggaatgaagcaactctatacggagcgtcaggcaaaaaatttctctttttcgtttaagtttgcgaaaatactttacatactaagttacagaatggagttttcgaaatggaagtaaaaattaatcgaaacgcagcaaaagtattaaaaaatgcgttggctagcccagaaggtcaaggaaaaatgattcgtgtatatgtaactatcgaccacggtgatcacgcgcattatgattggaaatttgatacgccgactgaacatgatgaaatcgtaaaaacagataaagatatcgatatcattttagataaacgcgagaaatttttagaaggcgtatggattcaatacttccacgttccagagtctgaatttgtgattagcagccttcaccacgcgcatcaccatcattaatacaaaaaacacaccttgttttataggtgtgttttttcgtttgtgtaaaaagcaaaaattttattgatgagaagaagagataaaattttgttgaagcaataaaaatgagctatagtggaattacggatgaaagaaaagaggttagcgtatgaaagtaagtgtgttagtaaggtctattttagttgttattttatataatttattcgttctgtacatcggatggaacgcttgggtgtggcttcacacaatgtttgaagtggaaaacaaatggattcttacggtgatcgttgtgttttttgcttattcctttatcatcggtcgtgcgtttcaacaagtgagcatatttaaaattgtgggatcgtactggttgggatttattcaatattcggttcttttgcttcctataagtaatctagccgtatatattcttacttttctaggcgcttcgctttctacagctatcgattcaatcggatttttcataattgccgcttttttattcatttttgcttacggtacgtataatgcttacagtcctgtggtaagaaaatacacgatttcacttgctaaaaagacgaatcgaaaaaaccttcgcattgctgtagcatctgatatgcactttggcacattgtcgggcaaaaaacatttgcagcggttaatcactcatgtacaaaagatacagccggatcttattttacttcctggagatattattgacgatgatccccaagtattctttaaaaaagaaatggattatatgatgaagcagctcaaagcgcctttaggcacatatggaattttgggaaaccatgagtattacggcgggaagatccctcagtttgtggaaagaatgaaagaaatgaacattcctattttaatggatgaagtattaaacataggtgatagcttgtatttaataggaagaaaagacaagacggataaaaatcgagacagctttttcgatttagcgagtgaaacggatcgttctctacctgtcattgcaatggatcatcagccgctttctttaaaagaagcggaacaagcaggcgtagatttgctgctatgcggccatactcacagagggcaaatggcacctaatcatttgatcaccaagcggttatttgaaattgattggggctacaagcaaaataatcaactgcataccattgtctcttcaggatttggcttttggggtcctccgcttcgaatcgggagccgatcagaaattattcaaattgatatttcgtttacaaaatagagaaagccctagggctttctctattttaatgtacgcagcaacgtcggaagctctgcataaatggcgactacttcatctactttcatccgaacgagcccgcttgaagacggagcaacaaagtccattattcctgataccatcgatttatcttgtttaccccactttacttgtttgcgtccgctgtactgctgatagacaccttttccaacaaaacaaacgattttaggcgtatatgtagctatttttttctttaagatttctctgccttctgcatattcttcttttgtaatctcatcagctgcctttgtaggacgctctacaatatttgttaaaccgtatcctagctggagcagcgagtgatcttcctccggatgatatttacgatctgtcaaacctgctttataaagaatcgtccagaaacgattggttggattagcaaaatgatgacccgtttcgccggaacggatgcttggattaaaaccgacaaataaaatatctaagctgggttgtatatgatcaaaaatagaattcatagtcatacgctccttacaatgtaaaaagaaaacacccaaattggatgttttctttttactataccctattaaatacgaactacgcgtccgttgaatttttgtttccagtagccgctgctcatgtttgcaattgcaacacctgttgagctttgagcaccgatgaacttgccgcctcctacataaatgccaacgtggccgtcttttttatatgtatcgaagaaaacaagatcgccaggctgcatttgactagaagacacttgtgttccagcatgttttaacgtttctgtacttacagatccaagaggtccaaggttaacgcctacctgagcatatgcccagtgtacaaatgacgagcagtcaaataaaccgtggttaatatcagactggctgcgtcctccgccaaatacgtaagcagagtttccaatccagcggtttcctactgttacaacattgctagcttttggagccggagcgcttgtaggtgccacatcattgctgcttgcttttggtgcttctgccttagcagaagatgaatcggctttttcagctggcgcagccgctgctttttgagcttgctcagctgctttcttagctgcctcttcagccgcttgttcagctgcttttcttgctgcctcttctgcagctttttgatctttaatattttgttcaagcgtagactgttcatttgcaagagagctgtcttttgattgtagagaagcttttagttcttcattttttgattctttatcttttagttcttttgccagtgcatctttttgtttcttttgagctgctagctgtacagtcatttcatccagttccgccttcatgtcttctaagctagcaagcttagatttaacatccgcttgttttgtttttaattcgtcttgcatatttttagtttcttttaaaataccacggtctgcatctacaatagttgaaacagctaacgcgcggtctacaaaatcaccaaaacttgaagaaccaagtaaaacttgtaaatactctacgttaccgccgctttcctggagggaacgtgcacgatcttttaaaatagcatttcgcttttcaagtttttcttgaagcagcttaatttctttttcaagctgctctacttgtttagacgtttctttaatatcggcttctgttttttgggcttttttattgttttcttcttctgctattgttaatcgctcaagctgtgctttcatttgatcttgttctgcttgaaggcgtgtcaattcatcagaagctgctttgatgttagattgcacatcttgacgctgattttgaatttgagatttttgcgattccatatcttgaatggtagaggcatacgctggagttgataaaactcctcccaggcctaataaaaccgttgtgttaagtaaaagcattttctttttcaatatgaattcctccgctttctcgctctgttaaactagtaatttctaattatgtatcaatatgtataaaagtctgacaatttatgtaaagttcactgtatttgtcgataaatagctaaatatgctaatgaaaatctacgaaaattataccacgataaacgttgaaaaaaagaataacaatattacaattgtatttcagtcatgtaacaattaacgcttgtgtatacattcatctttcacctgcaaaaatacacctttatatccctgttagaataaataatctacagggctttacacagcactgtttttaacatgataaaataggcgatcaagattttttaaggtggttggatataagttatttctaaagcgaacgtaacaatttttaacatccaggtctgttttttacctttttcttctatttttacaatatttgaaaatgattttctgaaatagtaacaactctatgtttatctgtcgtttgtacgtgtttaaaaagagagtaataggtaattatcaaacaatattcgacaacgcttggaagaagtcatacaaaagaccttctcgctgtgaggcgagaaggtcttttgttaatcacgctgctgataataatgttctaaagctacaattgcacttcccattctttcttgatcaggaataacaatacgatctactccttcttcttttaaagcagcagcggttacttttcctacggatacagctactacagagcttttaaagagttctcgaatgtgatcagcttgtccgtgttctcttgcaaatgaaaataaaaagcgggcctgcggagcgcttgtgaaattaacagcatcaatttttccgcttattaattcgtttataagctgttccatgacttctgcttgtggaggaatatgctgatacggtaaaatctctttaaattgggctttttgattcgaaagaaagtcaatcaattttggtgcaggatctccgtgaagctgaagcgctacatgctttccttcaaaagaaaacgaatgaagcgccctgactaggcctgcggtacttccatcatcatctcgaacggttggagtaacaccgaacttttttaacatatttacggttttatacccgcgtgcagcaatattagctgcttgtaaagacgaaagaaattcatccgccagtcctagcttatctgctgttttatacaaaatttccgtccccacgcctgtcgtaaaaataaaccaatcataatttccttttactagttctttaatatctgcttctaagtgtgtgtcatctaaaaagatggttccttgtgcaggtcgtacaagcggggtcccgccaaggttttcaacaattttgctaatttcttctactttacgctgacctacgagtgccactgttttaccttctaatcgtttcaatggtctacctccatttttctatgtatgctactttaatgatccttgataaccgagtttttcagaaattaagctcgccgcttctgttactttttgaataatgaacggcagtctgtctccttgaaatctcgcttcaattcccgctacgctaatgcctgcaaccacttcattttgatgatttacaatcggcgcgctcacggatgttgtaaagttttctaattcagatgtgctaatggtataccctttttcttttgcttcttttaatacatttcttagcttcttttgatctgtaatggttccaatacctattggagctagctccgtttgagtaatatattcctcttgttctttttctggtaaatgcgccaagataatgcgtgaacaagctcctgcataaagaggtgaacgccttccaattgatgtatagagacgcaccggatgaagcgtatctactttttcaatatacatagcttcattcccatctcgtacaattaaattaaccgcttcttctacttcatctcggagcgcttccattacaggctttgcgatatttctaatatctaagcgattggccactagctgaccaaattgcaagaataaaagtcctagcgaatagtatccttgcgcatcttttgtcaaaaatcccatctcttcaagtgaaccaaccatccggtgcaaagaagttttcggaacgcctgaatattccatcatttctgtgaaggtcagcttagggtgcttgataaaaagcgtgagaatctgcatggatttaaccactgttttattgttagcttgcataaaaccttctcccttatttgtgcgaatacatgtatttgatagacgtatagcttactagctaatcatatgttctttttattatacatgaagaaaaaaaggaaagcactcccttataagagcactttcctttcttacaccatttctagttctttaattgaaatagggttactttctagaaatttggttgtaaaatccccttctttaaaagaaggatggttcagtaattctaaatgaaaaggaatggttgtatgaatgcctataatgataaattcttcgagcgcgcgtttcattcgctgaatcgcttcatttcgatctttccccgttacaattaatttcgcgaccattgaatcataaaatggggaaatttcatagcctgggtaaacggcgctgtctacacgaactccgtagccgccaggaggtaaatacatctcgacttttccaggagaaggcataaagtttttagccggattttctgcattgatccggcattcaattgcccatcccttcaactgaacgtcctgctgagcaaatgatagcggatagcctgctgctactgaaatttgttctttaattaagtcaatgtttgttacaagttctgtaacaggatgttcaacttgaatccgcgtgttcatttccataaaataaaaatgcccgtgcttatctaacagaaactcaactgttccgacacctgtataatcaactgctttagctgccgagactgccgccttgcccattttcgcacgaaggttttcatctaccgcaggagacggagcttcttctaccaacttttgatgacggcgttgaatcgaacaatctcgttcacctaaatgaaccacattcccttcttcatcagcaatgatttgaatttcgatgtgttttggctcttctaggtacttttcaagatatacgccgccgtttccaaaggcagtttctgcttcatgctgagcttgacgaattgctttttccagctcttcttcgctatgagccagtcgcattccttttccgccaccgcccgctgtggcttttacgatgatgggataacctatttctcgtgctactggaatagctgagctgctatctttaatcagcccttctgttccaggtacaataggcacaccggcttgtttcattgtatctcgcgctacagcttttgctcccattttacggatggctttcgcttttggaccaataaaggtaatatcataggattcacacatctcagcaaaatcagcattttcagctaaaaatccatagccgggatgaatagcgtctgccttggttacttgcgctacggtaagcaaattacgaatgtttaagtagctttctttagaagacgttttgccaatacaaaatgactcatctgctagcttcacgtgaagtgcatctttgtctgcttctgaatacacggccacggttgcaattcccatctctttacaagcccgaatgatacgaactgcaatctcgccgcggtttgcgattaagatctttttaaacataatgactcctcctgacagtatgtatactttagtgtgattttacggtaaataaaggctgtccaaactcaacaacatccccgtctttcacaagaatttcaagcacttctccttctattcccgcatcgacttcgttaaacagcttcatcgcttcaatcacacatacaacatctttacgttcaactgtttgtcctacttgaacaaagggatcggcgtctgcttctggcttggcgtaaaatgttccgaccattggtgataaaatttgcttttcattgttttctgctgcgtttacagacatagaatcttgaggcgcttgttcagtggcagcggcttttacttcatctgttttcacttctgtaacagctgtgtcctctaaaggaattctcgctttatcgatgacaacttttgttccttcatgttcaatatgaagcttttgaataccagattcattcattaatgaaacaacttcttgcaattcacgtacgtttatcatttcttgtcactcccgttttgtgttatttagttgatgcaaggttaatagcaatcttcaattcttgaagcatctgttctttttctaaatagattttttccgcttcatgaagcgaaatgtgagaaaaataaatggattctccgggctttacttgagctaaaagcggtaaatccgctgtgatgacttgagcaattttagggtatccccccgtggtttgacggtctgctaacaggatgataggatttccatccggcgggacttgaacagaaccttgtgaaacggcttcagacaataactcttttttttcttgaagctgaagagaaggtccatccattcgatagcccattcggtctgattgattcgatactttaaaaggctctttcgtaaaatgacttttgctttcaggtgtaaataaatcgtattgactgccattaataacacggacacctggtttctttgtaaagtgaacaagttccttataatttacggaccatgaagaagtatatactccgtttatcagttcattggaaagaaaagcaggctttgaagcagcaggaacagatagagataaaacatcgtctgtttgtaatgctcttcctttgtagccgccgatttcacctcttaaatacgtacttttactatttaacacttcatcaatagcaaatcctcctgctacagataaataggaacgacaccctgttttgcaaggaccaaatgataaagtgcttcctttttgaataaataaaggtttccacatcgggactggctttccgttgatcgaaggagttaaatctcctccggtaattgctactaaacaatcattttctatttcaagggtaggccccattagcgtaacttcaagtcctgcttctttttcatcgttaccaactagtaaattagcaattcgaagggaataagaatccattgcaccgcttacaatcacaccgtgctgctgaaaccctctccttcctaaatcttgaatgctcgttaataacccagctttacttactcgcatactcatttcccctcctcctttgctttcatttcttgatactcttctttggagataggctcgaattttacaatatctccagcctgcagcaaacttggaggattttgctctggcaaaaacaatttaacgggcgtttgaccaattaactgccatcctccgggagtggaaatagggtacactcctgtttgcattcccgcaataccaaccgatccggcaggaatagaggtacgaggagatggccggcgaggcgtagcaattctttcagataaccctccgagaaatggaaatccaggagcaaatccaatcatatatgctaagtattcgccttcagaatgaatactaattacctcttcagttgttaagttatggtgacgagcgacatattcaaggtcaggtccatactctcctccgtagcaaactggaatggaaaccgtgcgatgagctaactctttttctgtctgttcgttttctagtttactttgaacaatagaagacactacttcaaaaggagaaacaaattccttcttctgcttttttcccaaggctgctacaacttcaagagggttatagaaaattgtaagatttgtaaatgccggcacgcattcaacaaacccggggaaagggtttaattctatcgaatctttacacgttttaatttgtttatgaacgtcgtactgaatgctatctccaaacgttataacaagagctgagtcgccaagcggagaaataacagctgacgcttttgttacagtttgattcatatctacacctctttcttttataaaacacctagtttttcatctcgaatatctgtaataaacatatgccccggagcatgtgtaatcataatagaaggttttgtttccattgctactgcttgaggggttacaccacaagcccaaaatacgggcacttccccttccttaatcggaacagcatcgccaaaatccggagagtgaaggtcttcaatgcctatcgcagcgggatctccaatgtgaacaggcccaccgtgtacagctggaaaacgtgaagttacttgggctgcccgcaccacgtcttgctgaggaattggacgcatactaactaccgtcgagccgtggaatattcccgcttcagcgcatgcaatatttgttttatacatagggacattacaattttcttcaatgtgacgaacaggtatgtcgttgtttaaaagcgcgtgttcaaatgtaaagctgcagccgataaggaaggctaccatatcttctgtccaatagtctgtgatatcggttacttcttttactagttccccattttcataaattcgatactttggaatgtctgtacgaatatctccggatggagccgcaaactttggcactggagatccagcatctgttacatctaaaagaggacaagatttagggttacgctgacagaacagtagaaagtcaaaagcttgttgctttggtaaaatagctaaattagcttgagcatagccgtttgccatgcctgctgttggttgaataagctgattgttacggattttctgacgaagttcagctggagttagttgtgaaaggtttgtcatatttctatctcccatcattgcccgcacgcaacttacgtgcgggcaccttgttttatttaaataattgaggaagttgatccattaacgtatagccgcccattaaagccattacaataacgaccagtacaccagaaatggtaagccataaaggatgtttatactcgccaacgatgctttttttgtatgcagcaaccagtaacgtcccaagagcgatcggcaaaattaatccattgattgctccaactaaaagaagaacttttacaggttttccaattaagacaaacgacagagttgaaataataataaatccaataataatccagtttgagtttttattaagtttttcactaaacgtttgaataaacgaaacagatgtataggcagctcccactacagacgtaatagcggcagaccacataacaataccaaagattttataaccgacgtttcctgctgcgagctgaaacacggatgctggaggattggctgggtcaatttgtaaacctttagacacaacgccaagtacagctagaaacaaagcgattcgcataacggaagtgataagaattcctgttacagaactttttgttacttgaggtaaagaatcgataccttttacgccggcatctaaaagacgatgtccaccagcaaaggtgatataaccaccgactgttcctccgacaagcgtaacgatcgcaatgatgtcaattttgtcaggtgtaaaagatttcactacagcttctccaacgggaggtgaagtggtagcggctacatatagcatcagcccaatcatgacaaaacctgcaatttgcgtgaagcgatccattgcttttccagcttcttttacaacgaagattaatacagcaataactgcactaattgcagctccggctgttggagaaatacccgtaatcgcatttaatccaagcccggcaccggcaatatttccaatattgaaagcaagtcctccaataacaattaaaatagcgagcacgtatcctaatccgggaaataccatgttagcgatttcttgtccgcgtttttcagaaacggcaataattctccatacgttggtttgagcaaagatatcaagaataattgaaattaaaataacgaatccgaagcttgcagctaaattttgtgtaaatacggtagtttgagttaaaaaacctggtccaatagccgatgtggccattaaaaaagcggctccaagcattaacgtccagtttactttaggcgcagccgaaagcttttgctgaggtgttgattttttaattggctccaatatcatcttcctcctgattgtatgtagtttttattttgaaatagccttaactaccacttctgatgctcgtaaagaacgattgacatgacgggcaaattcaagtgcgtgagctccgtctccatggatgcaaatcgtatctgcctgcaattctacatccttaccttgctgagattttaccttcccttctttcaccattgtaataacttgagaaacagcttcgtcgtcattttcaattaaagcatttggttctgtacgagcagtgagagaaccgtctaactgataggtacggtctgcaaatacttcgttagccgtctttaaaccaattctgttacctgcttgaatcagttcacttccagataacccaaacaaaatcagctcaggatttacgttgtaaacagcttttgctattgcttcagacaacgcttcgtttttagcagccatgttatacagtgcaccgtgaggttttacatgctgcattgataacccttctgcttgcataaaaccgtttaatgccccaatttgatagaccacgatatcgtaggcttcctgaggtgaaatattcatgtttctgcgtccaaaaccaataaggtcctgcaaaccaggatgagccccaatttgcacttttttttcagcggccaattttaccgtttttctcataacgctcggatcccctgcatgaaatccacaggctacgtttacagacgtcacgtgctctaaaatggcttcatcattgccaatacgataagcaccaaagctttcccctaaatcacagtttaaatctactttactcaatgcattcttcccccttaacccctttaatgtaagcgtaatcatttgcagatagtaaatgaaattcaagcttcattatctgcatcaatactttaagttccgtttttcggaacctcagtaccgtttttcagttatatttggattttagcacgagatgatgaattgaacaacaacattgtcagaatatttgacatagtcattattttaacttggataataatcccttattttattgctatcttctatctatagccttaatataacgcagccgcttaatgccattggacacagtaaataactaggttgtcagaaaaattactagttcaaaataatcaaaatgaaattttcgttgtaatcgttttcaaataggtgctatatttcaattgtagtcaatttatgcaaacgattgcaaaaaaggggatgaaacgatgaaagggaaaaaatggacagctttagctctaacactgccgctggctgctagcttatcaacaggcgttcacgccgaaaccgtacataaagttaaagctccaacagcagataaaaacggtgtcttttatgaggtgtatgtaaactctttttacgatgcaaataaagatggacatggtgatttaaaaggtcttacacaaaagctggactatttaaatgacggaaattctcatacaaagaatgatcttcaagtaaacgggatttggatgatgccagtcaacccttctcctagctatcataaatatgatgtaacagactattataacattgatccgcagtacggaaatctgcaagattttcgcaagctgatgaaagaagcagataaacgagacgtaaaagtcattatggacctcgttgtgaatcatacgagcagtgaacacccttggtttcaagctgcgttaaaagataaaaacagcaagtacagagattactatatttgggctgataaaaataccgatttgaatgaaaaaggttcttggggacagcaagtatggcataaagctccaaacggagagtatttttacggaacgttctgggaaggaatgcctgatttaaattacgataaccctgaagtaagaaaagaaatgattaacgtcggaaagttttggctaaagcaaggcgttgacggcttccgcttagatgctgcgcttcatatttttaaaggtcaaacacctgaaggcgctaagaaaaatatcctgtggtggaatgagtttagagatgcgatgaaaaaagaaaaccctaacgtatatctaacgggtgaagtatgggatcagcctgaagtggtagctccttactatcaatcacttgattctttatttaactttgatttagcaggaaaaattgtcagctctgtaaaagcaggaaatgatcaaggaatcgctactgcagcagcggcaactgatgagctgttcaaatcatacaatccaaataaaattgacggaattttcttaaccaaccatgaccaaaatcgcgtcatgagtgagctgagcggcgatgtgaacaaagcaaaatcagctgcttctatcttacttacgcttcctggcaacccgtatatttattacggtgaagaaatcggcatgaccggtgaaaagcctgatgagttaatccgtgaaccgttccgctggtacgaaggaaacggacttggacaaactagctgggaaacacctgtatacaataaaggtggcaacggcgtgtctgtagaagcacaaaccaaccaaaaggattctctgttaaatcattaccgtgaaatgattcgcgtgcgtcagcagcatgaagagttagtaaaaggaacgcttcaatctatttcagtagacagtaaggaagttgttgcctatagccgcacgtataaaggcaaatcgattagcgtgtatcataatatttcaaatcaacctataaaagtatctgtagcagagaaaggtaaattaatttttgctaatgaaaaaggtgctaaaaaagtcaaaaatcagcttgtgattccggcgaatacaacggttttaataaaataattaaacacacctctaagtaattacctggtaatcacttagaggtgtattttacacagaaggaataaaaaagcgccacagttttttttccttctatgctacaactgtcgtactagcgcggccgccctcttttaaaaatagttacatgatttatataagttgtaaaaaatacaacatttatcgtcagcgagtgtaaatagtgaaactttaataatatatattgtgttaaattttttcctttctgtcttataacgtatgaatagtaaaaaagtgtataatcattttatgttcttttataaaaaaagaaaagtaattactttttaagcaattactttcttaaataatcaatttagttgacataaaacaccttatcggaacaaatcaaaaaagaacccttgggaaattggggttctgattaaaattccttttttatcgtatgcagccttttgcaactgtatagctacttaagcccaattaatggttatcgtaagttacttttaacatgtaataataaatttataaattaccaaatcgctaataccacgcctaatattaacaaaaataaacaaattgaagagaaaagttgttgtatcaatttcacgtcactttgctcctttaattaaataagtcccgtatcacttagaccttttataaaacaagtcttttcatgagcagtatgaagtagaaataatatcacgactcatttttatttcttttcaccttgtagaaaatgaagcataaaagggggatagcgactaatggtagtacaatagaaaagtgttgatgtaaccaaattaacactaatttgatcccaattttttggttaaacttataaaccataaaagtccaaccgcccgagtatagggaagatgctaaaaggttagctagtaggtatttttttatcggaaactttaaaattccggctatataatgaatagggtgtcgaactccaggtacaaaaaaagctaacataatcgcccaagccccaaaacgatcaaggagcttttcggctttttgtaaccattttttcgccatccatttttcaattagaggcacctgcctaaagaatcttcctactagaaagaaccatagaaaagctataaagagtgtaatccaagacgatacccacactacataagggttgatgcccttagaagcccagataccgacttgagttagcattagaacatcatcagaaataggcgtaaacataatttctaatgctaatctaattagttcataaatcttcataaatggtctctttctcctttatatcttggtgcaaaggaaacgcaacatacatcgttatcttgttttgctcgctttctgcccatatttcgccttgatgaagttcaacaattcgtttggcaatggaaaggccaattcccgaccctacgactttgctagagcgtgctttatccattcgataaaacttatcaaacagatggcttaattcctctgaagcaatttgatcagttgtattagaaatacgtgtaataacttgtttttcgttagtatagagggctatttcaatatctccactttcatgactgtatttctcagcattcgaaagtaaattatcgaaaacgcgaatcattttctcaatatctatggagataaagacagcatcattgggaatatctagttttacagagagcccacgattttcaaacataggggtatactctcctacaagctgatataacaccccacttaaatcgacttcttgaaattgcatgtctacgtcaggtagagacaacttcgtatattcgaatagttcatccaataaatttttcaatttgaatgaaataccgtaggtagtttgaatgtattgctccagctcctcactattcttatactgcttatctttcaagagtgtcagatatccaataatagaggtcagtggagttcgtaaatcatgcgagagatttgtaattaattcattttttgcttgttccactttacgttctttttcaaaacgttgcctcatttgttcggtcatccaattgatgtttttagctaggaaagacagttcatttttacctttcatcggaatggaatacgtccaatccttgttcacaattctgttgattccctcttcaatctgcttaatatatcgtgtaataggccttgtacataaaaaaaacaaaacaaaaaagatgagcacactgcctccaagccccatatagacttgataaatatatctagttggactaaagataggctcaaaagacggtccctcaataatgaggtatcctatatcatcttgaagtgaaaggagtgatataaaagaagaatagtgtgcattaaatgattgattacccgtggattcagctgcaagcttttgtttaagtaaatactgtatattagtactttttatttttttgttatttgaatgaaaaagaacatctcctttagcatttgctactaagaaccctaagttaggatgagcttccgttataggatttagcgttgaagcaatgttatctatatcatctaagttcatctgcttctcttcgaatgaatgagtgagttgaacaaggagctttctaatagtctcttcctctttttgttgctctatttgttggttacggatatccccaaattcgggatttatgaagataaaaagaaaaaagctaaggatagatacaatcaaggagataataaaaataaggaataattttgtgttcaaattgactgatggtcgtccaattttgtctgcattatttctcgttttcatgctttatagcctacgccccataaagtctgaatataggttggctttttagggttctcttctattttgtctctaatttttgtcacatggaccataatcgtgttgtccgacttataaaagggttctttccatacagcttcataaatctgttgaatactaaatacttttccttgatgccgaagtaataaagagagaatttgaaattctttaggagttagacgtacctctcgatctcttacaaatacttcatttgttctttcatctacttttaagtctcccttttctaagaagggggaagaaacctctttttcaggggccatatagtatcgacgaagttgagattttacacgtgccatcagttctaatgggttaaaaggcttcgtaacatagtcttctgctccactggctaggccgtgaattttatccatgtcttctgatttagccgataaaaagataataggcatgttatattcttctctaatttttaagcaagcatctatcccattcatccctggcatcatcacatctagaataatcaggtcaattttttgtttttttaacaaatccatagctgttgcagcatccggtacatctactacttgatatccttcattttttaaataaatggacataagatttctgatttcggcttcatcgtcgacaataaggatggttctttctgacatgtttcttcactctttctatttttaaattcaatataaactagagaaaaggagtaggattagttattacatacgaatacataagctggtggaacatttctatacactttttcatactgaatcgtagtaaaaaaggattcaaagaaagattgtttcacttttgaatactggaatgtaatgaattttccttctggtcccaacaaagatcctgtttcatttaagatctgtgtagaaatagttcctggtaagcttgtaaaaggcaatccagatacgatatagtctactttttcaatgccatatagttttaaatagtcacttatattctcagcagagctatgaataatgtatacattctcgatatgtccatatttcttctttaacatgttatagaacgtttcattggcttctatcgctaagaaaatggtgtctttccgtttattttgaacaatttcttctgtaaatacgcctgttcctggaccatattcaatgatacatgttattttctcaaatggtataggcttaaccattttcttagctaatgatttagagctaggcatgattgctccaactgcacgtgggtgtctcatatattcttgaatgaaatgcatggcattcatctatttctcctcgtttcttcagatggtaggttataaaaattagtttaatgctaaaatcttaatacgatacgaggaaaaaccttaacaattcttaagaaatacttatgaaaaaataagcaccttttataaagaacctaaaaaacatgctgatattaaaaaagagggctatcttttccttgattgtatacttgttaacataatcatcattaacgaaaaaaaagaaccaattattttaattgattctttttttgttatgtactttaaaagaaattaaatatcttttagtttttttgctggatttcctgccatgataacattacttggaacatcttgtattacaactgaaccggcagcaataattgaattatcctcaattgtaacacccggtaaaatggtacaacttccaccaatccatacattattaccaatctttataggtattgcatacccacttttatttctatccttaggttctatagcatgaccagccgtatagataccaacatttggtccaatcatacaattatctccgactataacttcagccatatctaaaatcgtgcaattatatccagcataaaaattttcacctacgtgaatgttataacctagatcacaatgaaagttatgttcaatgctaggattccctccaacacttccaaaaagcgtcctaatgatctcttctttcttttcgaactcttcaactcctgcattattaaattcttgagttaatttatgagcacgaatattatcttttgttagttcttctgttcaataggttttcaatttatttttcacgatagaaagcacctcctcttatttacattactacactatcaaatagaagtcttttctccctcattattagctataaaataacatgtatactttatacctccttaattaacataatgtctctttccggaacacacaacaaaaaggaacccttcagggataagggttctgtatgaggccttgtttcttctttatgaaactttttatacatcattgttttatcaaccttgaacggggaaatcaaaagcaggaagatgcataaaaagctaccttttatgcatcttctaaacagcttaaatagttaattttatattaggaatagcttcttttctcctgctaaaattgagtacagttgcaagatcccaatcaataaagtaattttcgacttacatttaaagttacttatatataaggaattgttacaatttcataggcaacgaacacattgaagacataaatttctatgacaatcagttcggttacttccaaccgcatcgaatagaaggcttacgttgtcttcaacaggagcataaggatctgataataataaagtggttactatattttctttctttcacacgtttaatgcccagtaaaaaaatccgtgggttatatccacggatttttttacagctctttttccaagcagttcacttgattatgatgcagcggcttagttgcgtactgtgtaaaaccaagacgctcccaaaatagcttggccctaggattttgagacagaacaccaaggcgaagaactgaaactccttcttcctttagcttgtcttcaaatgctagatacgcctgcgttccaaaactaaaattatggtaggcgctatgaatgataaaagctccgatccatggatggtcatcgttaggattttgtttcatgtaatcgataacccctacgtatgtatcgtcagcttttataaaataactgtctgttttttcgttcatgtattctttaaaaagctcttcttcacttcgctctttcttaccattttctaacacattataagcttcgtttgaattgataatctctgaagcaatatacatcgtgtcagctgtaatgggttcaaatgaaatcatatgtcttcccttctttctctgtaaagtagctgtatatcgtcgctttgtcaattttaccatttttcattcgcggaaaggactttaaaattctccatacgcgcgggattttataagcagatactcgttttgtcagcgcttgtctcacatcagaaagagaaacgttctctaagacaattgctgcaccgactacttctgaacgttcagcatctactacactaaaaacggctgcttcgctaacgccgggtatttgcaaaagcagctcttcaatttcttcagcatacactaagcttccgctgcttttaatcacgtttttgtctctccctacgatggtaatgcttccgtcttgaagctgaaccgcaatatcatgcgacgtaacatatccgttaaaaaatgagcggttcgtttcttcgctgtccttaacaaacccttcaaatgcttgagttgttttcacaaatagtgttcctttttctacttcttttccacgctcgttcaggattaaaacgtctacgctgtcaacaggatagcctactgtatgaggcagcgtttcagctgtatgtggtgaaagcaccgtaacaaatcccatttcagaagatccgtaatattcatacagagaggcattaggaaacgcttgtgaaaatttctttcgaacggaaggagataatttattgcctactgaaattacggtttttggcagaagtcgtttttcttttggtctgctttgtacataacgaagcaacggagaaattaatgcgggtgtaatagacatacagctagcttctttgttaaaaacagacgaaggtgtgaacgcttctagcatgacggcgtgcataccgctgcaaagcgcatgcaaaactgggtaaagctgggcagaatacgagatatgtaaaggaacaagcactttgtcgtgttgctctaaagaaaatatatccgaccactcttgaaatgatgaagaccaagaataatgcgattttacaaatcctttaggcctacctgttgatccagaggtaaatccaaataaaaataaatcggacagtgcattcactcgtcgtacgggcaggattggtctttcttttgttattttagttagagaagatggtttccatagccaattcggggattgaatagaaaaataggtatccacttcaacctctgttagctcattatgtaaaagcatcacaattccacccgcttttaaaatcgctaaaaatgacacaacagcttctacattgtttggcatacttaacgcaacgagctctcctttttccatccctttttcctgtagctggttttcggctttgcatacatgatcccacatttgaccgtagcttagcttattaatagaatccgatagtgccagtttgccaggcgtttgttgacactgataaaaaattagttcttcaattcgtttcattactgcttaaactccttttttcttttacttttagtgtaccgtaaatgtgcgtttgagaaaacaaaaaaatgtaaacttatataaaaattaagttgactaattttagttttataagatacgatagtcatgttttatcatacatagcggaggtttacgatgaaaacaaaagatatgacgtacgttgcattattcacggctataatgggagctctaggactcgtccctcctatttttttatcctttacacccgttccgattactcttcagcccatgggtgtcatgctatcggggggaattcttggagctagactaggagctctaagtcaatttctttttttatgtttgctagcagctggcgttcctttacttgctggaggacgcggaggaatcggggtatttttgagtccgagtgctgggtatatcattggctatgtgtttgcagctttctttattggctggacgctgtcacgattaaaaaatgtaacggttgcaaaggcgtttgccgtaaatgtgttatttgggattggattggtatatgtatgcggcattcctatacaggcgatgcagcttcacattccatttctgaagtctcttcagctaagcttcgtctaccttccaggtgactgtataaaagcagtggtcgcggcgtatttaattacaaaagttcgaaaagcagtagcggtacctggtcgttctaaaacggcttctatgtaaggaagtgataattatgtatcaagccgcaattgtaaaagcgaagcgtacggtcattggaaaagaaaacggtatactgaaagattttcacgttcaagagctagctgctcctttattaaaacagcttagcgatggaattgaacatgaaattgatgacattattttagggaatgttgtaggtccaggaggaaacgtagctaggctatccgctttagaagcagacctccatttttcaatcccgggaatgaccattgatcgtcagtgcggagctggcttagaggcgattcggatggtcagctatttgataaaagcaggcgctggaacgtgttatttagctggaggcgttgaaagtacaagtacttctccttttgaaaaaagagcacgtttttctcctgatagaattggtgaccctgacatggggattgcagcagaaaacgtagctcagcgatacaatatatctaaaaatcagcaggacaggtatgctcttttaagtcatgaaagaagctgggaagcttttgaaaagagattgtttgaagaagaaacgcttcctcttccaaacgtgatgcacgatgaagcatttatgaaaaaacgaaacctaacaaagctgctgcaaaaagccagccctgtctttttaaaaaaagaaggcaccgtcactgcagccacaagctgcggaattaatgacggagcctgcattacacttgtgatggaagagcaaaaagcacgagccttaggctttcagcccgttttgcgttttatcgacgctgatatttcaggagtgtcacctctttaccctgctattgcgcctgtttctgcgattaaaaatatcttgaagcgaaattctcttacggtagatgatattgacttatttgaaataaatgaagcatttgccgttaaagttgtcgcttgtatgcaagaactcgggatatccgaagagaaagtaaatattcgcggtggagcattgaccctaggacacccgtacggagcatcaggagctattttagctacacgtcttttttatgaaagcaagcgccgtgacgtgcgatatgtcatagctgctttaggaagcggaggcggaataggaacagcggtattatttgaagtaatcaaataataccgctgtttttatgccttttttattacattatgtttcatcaaatattgctcaatatctttaaatgtttcaaccggaacaaacggaacgttttgtccgcgcagtaaatcttgcaaagaatcttttgcaaatgtgacatctgcatattttgccggatgcgaatccggctcgctgtctccagcaaaataaatcgtttcgtatgcttcctttagttcttgaataacagccgatttatcaataccgtagcgctctgaatgccatctgtgagcaggatctagacgcaagtgaacgttgttttgatggaaatatcctttatttgaataaacttccacttctttaataccgtatttatctaaaatcggtttaatatagtacgttgttccagcgcttaaaatataaaaatctccgccgtttttctgaacagctttaataaaagcaggcacgtattcatcaattggaatactcgctacttcttctaaaattttcggttcttcttggtgaatggattgaaaaacagtagataaaaaatcaatatctttcatttctcctgctttccatcggtggaaaagttcttcaccttctggaaaatacttttcaatcacaatccaataaaaatctttttttgaaattgttccatcaaaatctgatacaaacgcccattttttcattcatcacacatcctttgctacatactaagcagttctcgaagctcttcttctgtcaaactagaaagcattgtttctcccggctgaataacctgttcaatgagttcttttttcttttgctgcaagccgtaaattttttcttcgatggttccttgagaaataagcttgatgacctgcacaacatttttttgcccaatgcggtgtgcacgtcctgccgcttgttcttcaatcgctgggttccaccataagtcatataaaataaccgtatcggctcccgttaaatttaagcctgtgcctccggcttttaatgaaattaagaaaatgtcttgttttccattattaaaccgatccgccatttccactcgttcttttgatggcgtttgaccgtctaaataaaagtatgagagattttctttttgaagctcttctcgaataatgtgaagcatgcttgtaaactgagagaagattaacaaacgttttccgttggcaatcgcatttcttgtaatctcaagcagctgctctaatttgcttgaatccccttcataattttcaacgaataaagacggatgacagcaaatctggcgaagtcttgttaatcctgccaagatcttcattcggtttttattaaaatcttcaccggctaaagatgattttaactgttctaaataccctacatataattctttttgttctttagtcagctcagataaatgagttgtttcaattttatcaggcagttcttttaacacatccttttttactcgtcgcagtaaaaatggtcttacaattcgactgacctgctccgatgacatgtttttaaactggcgaagccctggaaataaaccaggaagaatggtctggaaaattgaccaaagctcatcaagtgagttttcaataggcgtaccgctcagcgcaaaacgttttttagctgaaatagtcctaacagctactgctgtcttcgttgtatgatttttaatactctgagcctcatctagaattaaagcatgaaaatcaaggtgctgatacaaatcgatatcttgacgcagcgtgggataagatgtgatccatacgtcagctgtgcgttttagcttctcctcacgctcgctcggcgttcctgtaatggtttgaaccgttaaattcggtgcaaatttctccaattcgttgcgccagttataaatcaaggaagccggcacaacaattaaaaaggcactgctatcttcagcaagctctttttcagataggatataggcaatgctttgaagcgtttttccaagccccatatcatcagccagcacgcctcctaaagagtagtgagccagagatttaaaccacttaaacccattgtactgataatcacgcagtgatgcctgcaaggattccggtacttcccaatccatttcctctggagatttgagctgtgtaagtaaccttttaaatgctgagccgaacttagccgctgatttatcacccgcactcataatctcttccacttgcattcctctgtataaaggtacttgcaatgagttatcctttaagtctttctcggttacgttcagctcacgaaacagattttgaatatgctcaaagccttcgttttcaagaggaataaacgcaccgttatctagacgatgatagcttttcttttctaaaacagattttaaaacatcttgaacggtctgatgattaatgtctcctaaatcaaaattaatttctaataatccattgctgtttttgatgtcaaccgttgttactggcgcagaaaaatccgtataagcataatctttcatctcatccgtaatatacacatccgctatttcatcaagctttggaacaatatgaaacaaaaattcatataaagatgattcatcttgatttaaatacagctggtttttataaatgtttaaaggagctgtttcaattaaatccatcacgcggtcttctttttctaaatctcgtattaagattttatcgtacttttcaggttgaggtaaaaatggattaattgaaatctctccatagtggtaccgaagcgtcacaaacagctgttcatcttcctggtcaataaatacttttgcttttagttcaggtgcaataatctgatgggatacttcttttgcgatatccactttccccactttttttagtcctggaacgacgtgagataaaaaattgcccatctgctcttctgctataggtacgactggcttcaaaggcgccgtttttcgaagcccttcaagaagcatacgctgatcttgagatagctcataaaatgtcccgtttaaaaatagccacccgtatcgatcaaaaaacgaagcttgatgaagctccgtaaagtctagttcaaatccagctgccgggtgcttatttaactgaaacgaaaaaggagctgagctttccgcgaagataatattttcatatgagtgcccgtcatgaataaatgtaaagttccgatctttgagcaattgaaataactctttggctatgatggagggaatgattagttctctgttatttgcagacgcacgatacatggaataagaatttttataaaatgattcatttgtcataatatccatcagcagctcaatgattttcctatcttcttctaaaaaaaaatgttccgccggatcatattcgaagcgcttggtaaattcgtgagttttgaattctttagcgtctgttaaaaattcttgaatgttttttactacatacgtccggtcgacgcctactttcatttcaagcgctacgtacattccttctgaacgtaaaaattcttctgagtaagacttgcaaataaattccactttcaacggatctttatctgcatattttctgtggtcgcttattgtttggtgatagcttgaaaataagtcgataaaatgatttacattctcgtattctttgctttggcgaaaaggcttcgttttaattggctgcggctttgctcgctcatcgcaaatggttaataaaacagctacttcgtgtttgcattctgaaaactcgtgataagcaggacaatcgcagaatgaataaaaagaatttcctttttgttcaaccattaccgtatacatttccgcgcctcgaacggatgctgtccacgtagtggtctgttcattgtattccaaatcaagcacacgcccctgcttgtaataggtgtgccctctatagtacgttctgcttgagtacgaatcttttaattgttctttgtttaatgttttatttatcatcgcttcacaatcttccaatcgcataacagtcaatgctgtttctgtttaatttctattcagaacaaataatgttcaacgtcataaacgttgaacattatttgtcaattcctctattataacatgcaacagacattataaaacactcttaagcaatgcagactgttttcgctgttttcttttgtagagtatccagcccgctccagcggatgataataaaagcaggctaagtcctaaaaaagccagtcctatacgatcgttagccgtaacgtacgtaaagaagaaaatcagtaaaattcgaatacctaacgtgataaagcgaaaaaagctgtcgactcttcccacgatgatattcggtattttctgcatcataaacgtatttcgagctactcttgtacctgcatttgcaaaagcaagaagaaacacaatagaaaaataaaccggcaaaagcttcataaagaagatgatagatattccgattgcaaaaaggcttatattaagcataaccgctagctctgtgcctgttcttttcataatagatacgatgaatacccctgccgttaacgccccgaaaccatatatagcactttcaatcccatatgctgctggacttgcgtgtaattcttgagtcagataaataggaaataaatagttcgtcatcatcacagcgatgaaaggcataaaagaaagcagtaaaaaaatagagatcgagcgattttcttttataaatgttaaaccttctttcatagcagtgtgtttcttgtcgcttcgttccctgttttgtttatatggaatactcaatagacaaaggaatgcagctatatacgtagctgcatcgactgttaaaatccactgaagcgaccaacgagtaatgactagactcgccaaagctcctgcaagcatactcgatagctgcccttgtatttccatgatactgtttaatgattgaaacgtatcttttgaaaaaacttcttgatttaaagcgaaaatcgttggataaaaaaacgtgtagtaaaggtttccggttccgtacaaaatgacgtagtgaatcgttgaatagtctgtcataaaaccaacgataacaaatagcatgatcgtggtaaaaccgataagttctaccgttagcaataattttttccgtgacatttgatcaataagaacgccgatatacggagtagcaacaaagctaatcaccgtcataataagcataatcgtaccaaataatctatttccatttggagatgcaactaacagtaaaggaatggcaagcatcgtaataccggagccgatagaggataaaacattagcagctactacggcttgaaagcgccggtcttgatggagggccttcatcaaacattttgcttagcttctaaaatttgcttagacacttgtgtatacagagtcagctcattaactaattcatgaattccgtcagctgcgttttttcgtaaagtccctttttccacgatgtctgcagggtctaataccaactgcttagatagaacattcgcatacaaggcgcgtgtaacggttctaaggttatttaaagcattaatgcctccttttcctcctcctgatactgctaaaagtgcagcgggcttatgcgcaaaataagcactgtttaagaagtcaaacgcgttttttaacgctccgctcatagctccgtggtactcgggcgtcgcaagtaaaagaccatccgctttttctattttttcaattagctcttgtacttcttctgtttcatactgatgaggttcacctgtgaatataggaagcgataattggcttaaatctagaaaagaactttgatagttttgatgaagctctctcgtgacttgtgttgttcggcctgtttctctgggacttccattgataataagtatgttcatgcttatctactcctccgtcgtttggttatatgtatagtataggaatgatcgagctttttttcgtcatgctattgatagaaagaaagctaccaatatagacggagaagcacagagaaaaacctacaactaaagtcgtaggttaggaaatgccgtgctgaacggcatatagagcagcttgcgtacggtcttgaactccgagcttcgataaaatattagacacatgtgttttcactgttttttctgtaatatgtaaggaagcaccaatttctttgttgcttttaccttttgcaatttcttttaatacgtctttttctcgtttcgttaagtgatcaataaaattgactttcttttcactgcttttggttaaccgtgttagcaagtgtgtggtgacttttggatgaagctgattttctccgttcattagctttcgaatagctgctacaagttcatctgggtcactttcttttagctgatagcctgaagctccagcttctagtgccggtatcacatggtcttgatccgaaaagcttgttaaaatcatgacttgtatatgcggtgcttgtttttttaattcttttgttgcttcaattccgtcgagaaccggcatcgataaatccattaaaacaatatggggctgtagggatgtcgctaactttaaagcttcctctccgttagaagcttctcctacaatttctaagtcgggctgcgtctgtaagaaaaagacaagtccttttcggacaacgtggtgatcatctgcgattagaatctttattttcatgtgcgctcctttccgttatgaaagaggaatagatacttccacaaccgttccgtttcctatgctgcttttaacagatagattcccatttaatctgtttattcgctcctgcatggtttttaagccaagcgtcggcaattctgctgaagcgctatatataaatccattgccgctatcttgaattttcataattacttgttctttgcttatatttacgtttaaatgtacctctgccgtacccgcatgctttcggcaattattaaaagcttcttgcccgaccctccacagtgtctcttcaatcacagcaggcaaaacggacactcctttaatttgttcttttacgttaagccctagcatttgaccatagctttttaacgcactgacaatgccgttttctaatccttgaggacgaagctgccaaattaatgctttcatttccacttgagcatgctgagcggtttcttggattaaggaaaaagtctcttttaactgcacatctgtcgctaagctgcttccggctttggctgtgacattaatcgaaaataacagctgattaacagaatcgtgaagatctttggccagtctgtttctttcttcaataagttttacttcctgctgagattgagtcagcttaatccgcttgatagccgtgccaatttgaagagcgacagatcctaataaatcaagctctcgctgttcaaaatgaattttatgaggggcagctacatttaataatccaaagcgctcatcccctgcttgtaagggaaccgttgcatgatgggtaatatcgtgtgtatctccccactcatgaatgacggaatcttcaagtctcttgcactccataatattagacgctttttgaagccggccatccatataccgatcaacacaccagcagcttccgttacacataggctgagcggttttatttaataaagccggcggcaaatgctgagcggcaatcatctcatgttttccattttcgtcaataaaaaagatccatcctgtttgtaaatctgttatttgcagcagttttaaaagagcatcgtgaagcattgtatgtaaattagtgccttcatttaaaatctcggcaatgtcttttaaaatcttaagctctgaaatatgatctttttccatagcctctctcctatatgatgtattttccattttttattttatcacaattaaagacgattccggctcatagggcgttatttttaagttgtttccgcttgggcatgtaagagtttttgacaccaataataaaaattccaaaaagtatgtcaggtagtttaacaattagctagagtctttacgtaaaacgaactatactacagataattcacgtaagaaaagaaaaaacgaaagaaactgagaagaaaaaaatattaaaattaatacattgaaaacgcttccaaatgtgaaggcatagtgctattatataattattaacagaatagggatgtgagaaagatgaataaattatttttagaagagttacgatacattatcttgtgtgaagtgcctatgacaaagtaccgagtagagcagcttcaagacaaatttgatcaaagcccatacttaattaatgaactttatcaactcctattcgaaaagcgtcacattttagcttttgttgatgatattgaatcatccctgtatgactatattgtgaataaagaaatgatggatgctaaaacgtattatggagctattgcacacgtagcaaatcttttcggcgaaacgcctacatatataaaatgcaaaataaaaaaatatagacagtcttcgatttcaagtatcagtgcctaaaagttgcgcacagctgattcaaataaaaagcaaaaaagaaatcctagcacaagggtttcttttttgtaccactaacatatagggaggaaaataagatgaagacattttttatcacgaatcgctattcgtttctcgaaaagcaagtagatgaatacatgcaatctttactggtaaaaacacctgaacaagttattttatatttcgaaagacaaattcaaaagtataaagtatatttacagaaaaaacatcattacccagagtgtatggttcaatctatccaccgtttgattgaagaatattcattaattatcattagagtgaaaaaatatattagctatcaaaacaagctgatgaataaacagctattagagccgcagtaaaacgaatcattttttatggttcgttttactgcggctctgccgttttactcctcatatttcagcagtaaatgcagaacagcgggacgttcttcaagatttttgtatgagtgtacatgacttccttcaaattttatagagtcaaattgttttagttcgtatagctcttcttctattttcatttcaattcttccttccattaccgttgctacttcaattaatcctttatgatgaggttcgggatagtatgtagcgagaggagaaagaaaggctcggtacatttcaatagttgaatctatttgattttgaaaaataaattctactttccacgcttcgtccggtcctttgagagaaaaaccttctccgcacttagatacagccactgaaggttcaactgacactaatttagttaaagggatatttaaacctgttgttattttccacattactcctaaggttggattagtctctcctctttcaattttccctaacgtgagtttgctgactcccgtcctatctgctaattcatcgagtgtgaattctcgctgtgttcttatttttctaagctcgttgcctacctttttcatcatttcttctgaatgcatttttttcttcctttcttttgtatattatgatacactttttttgtatctaagtatactataatgtacatttaggtatttttattaattaggaggaaaaagtatgaaagcaattttatgggggcttctctcgtctatgttcttttctgctacatttattgtgaatcgtgccatgaatgtatctggaacaagctgggcttggacagcatctcttcgttttttattagcactacctattttactcattttagtacttgtacaaaagaagtttacaccattatggatggaaatgaaaaagcatcctttcgcttggttaggctggggaactcttgcaggaattggattttattcattattaagtttttcttcactttttggaccgtcatggcttatagctggaacgtggcaagtaacgatcttggcaggtgcgctcatttctccacttttctatgtaacgattcaaactgcagacggaaacaaaaaagtaagaggaaacattccactcaaaacgcttggtatttcaacatttattttagcgggcgtgattctcatgcaagttaaagaagctgaaaacatcacgctttcacagtttgtgttgggttttctccctgtcgtcatggccgcttttttatatccgcttggaaatcgaaaaatgatggaagtttgcaaaggaaaattagatacatttcaacgtgttttaggtatggctatcggcagtataccactaagtatcatctatgcgatatatggattttatacaactggtatgccaacagctcctcaattttcgcaagcttttatattagcgatgagttcaggtgtaattgcgacgatgacgttctttcacgcaacagacttggcaaaagaaaatttagctttgcttggagcggttgaagcaactcaatcgggcagcatgatttttaccgttcttggcgaagtggttttattaaatgggcgtatgccaacagggatcgcgttagctggtatgatgataattgtaatcggaatgatcataaatagtatgttaaacaaaaaaacaaaactatctcagaccgcgccgccacccactctatcaaaataagaaaagaagagatgaaactctgtatacagagtttcatctcttctttttagtattcgaggtgattgttccaatagcgactccacagcacagggaatcgcatctgtaaaccatcctcatcatcttcatcccaatcaagatccaaatcttgctcatcgtaccacactgggtcaaactggtcatatttatcataataatagtcgttatctaaacctgtcttttcttcataagcttcacacgctacagcaagtaattcttctaattgaggagcatagccttctgcttctagtggttgaagaacagaaatcatcgtctcaggagattcaattgctttataataaatgtcttttccttgatataaaagccacgctctaaaataatcaaaacaatcatctgaacaaccgcccattacaatataagctgctgcccacaatgaagaagtataggattgatcaaaatgctgatttaatagctgatcaaagcggaaaatgtctttttcagaacgctttgctagcgttgagcggagccattccatttggtcgtcgacatctaattttgtcttcgccttttttatcagttcccaaaagagatcctctgacatcgtgctgtctttcattacttgcattgaacaagttaaaggcttatatcctttcttcaattttgcacgaatcagcttttcagcttccgcttcacaagcttctgcggaagcaaactcttttacttgcatgcgaccggctgtatcaacttttccaaagtgaatgactaacttactgtctcttctttcaactttccaaaatttattcgattgctcatctttatacactaaggttatttgcatgatacattcccctttttcatcctactactattgtgaatatttctctttttacaagttatgtagagccatggcgcttcataatacattttctttccttttgtaacatgttccagttgattttaattctttctaaagtttgttaaaagctgaagcgctattttttgattatacttcgctcagcttttaagtttaatgctactgatacagttcaaacagcgagaaattaaaacatcatgtatgtaatatttcactcgtttgttttttttgttgcatttacaacattttgtttttcctttatactcttttatatcagatatctttattatacaaaaaagaatcataaattcgcagcaaaggaaggattttcgatgaaaattaagcaagttacaacaaaagagcagcttgaagaagtatttcatatacgtaaaacagtgtttgttgaagaacaaggcgtgccattaaaagatgaatttgatgagcatgagaaaacggcaaaacatatgttgatttactataacaatgaaccggcagcttctggtagattccgcatagtagacgattacgccaaaatagagcggatatgcgtattaaaggaatttagaaaatacgggctcggaaaagaagtggtggccaacttagaagaagcagcgaaaaaagaaggattaactcaagctaaacttcacggtcaagttcaggctgaacctttttatcataaattaggctataagactgtttctgatgtctttatggaagacggtattccacacgttattatgaaaaaagaatttttgtgttagaaatgcttctttgcacagttactttaataaagaaaaaggctctcagcagagagccttttttgtactattagattttcataattccgcccgtgcttgcagaagttacaagtttagaatatcttgcaagatagccttttttcactttcggctcaaagcctttccagtttgcttttcgttctgcccaaacatctggagaaacttgaacattcatcgaacgatcttcaatgtcaatcacaatgtggtcgccatcttcgacaaatgctagcggtccgccttcagcagcttctggggacgcgtggccaattgataatccacgggaagccccagagaagcgtccgtccgttaatagcgctacttttgcgcctagtcccattcccataatttgagaagttggagctagcatttcaggcattcccggtccgccttttggtccttcatagcggatgactacaacatgtccttcttttacttttccgttagcaataccgtgcagcgcctcgtcttgagaatcaaatacaattgctggtccttcgtggcgagtaatgccgtcttgaacaccgcctgttttaatgatcgcgccgtctggagctaagttaccaaacaatacagcaagtccgcctttttcggtgaacggcttatcgattggatggataacgttatagtcttttacatcgcatccggcaatgttttcacctagcgttttcccagtaactgtcatagtatctaaatgaagggccccttcttttttagatagctcgtttaaagcagctgatacgcctcctgcttcatgtaagtcttcaataaatacatcagaagccggagccagttttgccaagtgaggcacgcgttctgctacttcattaatacgctctaatgggtactcaatttcagcttcattcgcaagagctagcgtatgaagaactgtatttgtagaaccacctaacgccatgtccaaagcaaacgcgttgtcgattgctttttctgttacgatatcacgtggttttaaatctaatttaattaattccataagctgtttagctgattttttaacgaattctctacgttcaggagcaactgctaagattgtaccatttccaggtaaagcaagtcctaacgcttcagctaagcagttcattgagttcgctgtaaacattcctgaacaagatccgcatgtcggacagccgaattgttctaattcaagtaatcctttatcatcaagtttaccagcttgatgagctcctacgccttcaaatactgaagaaagagaaatcttacgaccgtcgctcgttactccagccttcattggtccgccgctaacaaaaactgttggaatattcagacgtaatgaagccattaacatcccaggcgtgattttatcacagtttggaatacataccattccatcaaaccagtgagcagatactaccgtttcaactgagtcagcaatgatttcacgacttggtaatgaatagcgcataccgatatgtcccatcgcaataccgtcatctacaccgatagtgttcatttcaaaaggtacgccaccagcttcgcgaatcgcatcttttacgattttaccaaactcttgtaagtgaacatgacctggtacaatatcaatatatgaattgacaaccgcaataaacggtttgccgaaatcctcttcttttacaccagctgcacgcagtaggctgcggtgcggtgctctgtcgaatccttttttgatcatgttacttcttaattctgccacaataattccctccgtattcatctaacctattaaataacctattaaaaactgaatctttttaaattgtttaataatttttaatataaatactaatttaacaaatcacataaa

SEQ ID NO: 20 - DNA, 96080 bp, Priestia aryabhattai
  source 1..96080: mol_type = genomic DNA
tggcccgttggtcaagcggttaagacaccgccctttcacggcggtaacacgggttcgaatcccgtacgggtcatcttaaaagcagtttgcatatgcaaactgctttttttgtttgtaaacagagtttattcttttgtctaaactctatttttcgtttttctatgatttcctctccccaaattgcatttcttatagcacatctataaacgcttgttctaaatttcgaaaaaaaacctacaatagtaataacggcatactgtttgtacaaaaggaggggaatgcgtgaaaaaaattgtttggtggtccatcggagtttttcttgtgtatggagcgtgtatttgggtgtatttattctatataagcgatacctctattccacaatcattaaaaggcaccagcgtagacccggctacgtttatgaatgcccgagaacttatgttgaccgaaaaatattcaaaaattagagatgcactcttttttatccgaattccatatgaatggctagggtttattttaattttagtgttaggtgtgtctaagaaagttaataagtggtctaaagatgtcagccgtttcagtcttctccaaactgctatttatgtattttggttatctgttctgctgctgatctattcttttcctatggactggattagctataagctttcaaaggcttaccatattacgacacaacctttccaaggatggatgaaggatctttttacagatttttgggtgaactatgccaccatgtttttagtggttgctgtgttgtatgcattcattcgtaagttttcaaaaagatggtggctgtatgcgtggctagtatctattccatttacgctatttttgacgtttattcaaccagtggttatcgatccgttatataacgatttttatccattaaagaataaagagctggagacgaaaattttacatttagcagacgaagctcatatacctgctaagcatgtatatgaagtaaacatgtctgaaaaaacgaactctctcaatgcatatgtgacgggaataggttctaattcaagaattgtgttatgggatactactcttaataaattaacagaacgtgaaattttgtttatcatggcgcatgaaatgggtcattatgtaaagaaacatatttatgtggggattgcttcagcattagttttatcaatcgtaggcttatggctaacgaagcacttagctcgctttgtgattaagagatggggaaaagcattaaaaattacttctcttagtgatttaaattctttaccgcttattctacttattttttctgttcttacatttgctgtgagtccgttaacaaatatgcagtcgcgtcatcatgaacttcaatctgacacgtacgctatggacctaacaggagataagcaagctgctattaaaacgtttcaggacttaacgaaatcaggactgtctcaggtaaatccgccgtatttagtgaagattttccgatatggtcacccaacaatactggaaagaatttcatttgttgagaagtatgaaagaaatgaataagtgatataagaaaaagtaaaggatatatgaagccttttatacgtaggtattaatagaaaagcctccttgcgagtaggaaaaaaattctaaaaggaggtttcattttcgaaagtactgttatataataacgtatgtaaaataaaaactgttttataacaatagggaggaatagttatttgtgattgaaaagatagcagtctaaattctcagcgtacattcacctcagctaagtcttactacatgtctttcaactacttacttatttcatctacgttcttgctaatatcatggcaaactgctaatttacttcatcatgaaacagacatattctaactgctgcgttttatatttttatgaatatagaattttaaattcattagggggtataaagaatgaaagacattcgtgtaaaaaaccttgaagagaattggaaaagcgatgagcgttggaaaggaattgaacgtccatattctgcagaaaaagtcattgggctaagagggtccattgatattgaacatacgcttgctagaagaggggccgaaaagttctggaacttattaaaaacagagccatacgttcatgccttaggagctttaacagggaatcaagcagtacaacaggtaaaagcagggttaaaagcaatttacttaagcggatggcaagtagctgcagatgcaaatctttcaggaaacatgtatcctgatcaaagtttatacccggcaaacagcgtgccgcatgttgtgaaacgaatcaatcaagcgctgcagcgtgccgatcaaattcagcatttagaagaagaaggggatatcgattactttgctccaattgtagcagatgcagaagcagggtttggaggacagttaaacgtatttgaactcatgaaaggaatgattgagtcgggagcatctgccgtacactttgaagatcaattatcctctgagaaaaagtgtggtcatctcggcggcaaggtattgcttccaactcaaaccgctgtgaaaaatttgattgctgctcgtttagctgctgatgtaatgggtgttccaacacttctgattgctcgtaccgatgctgatgctgctgatttaattacaagtgatgttgatcctgtagatcgccagtttattacaggtgaacgcaccgctgaaggtttttatcgcacgagagccggaatcgatcaagctattgctcgtggcttagcatatgcgccatatgctgatctagtatggtgtgagacgtctgaaccaaacttggaacaagcacaaaaatttgcagatgctattcatgaaaaattcccaggtaaaatgcttgcttataactgttcaccatctttcaactggaagaaaaaattagataagaaaacgattgaaaaattccaaagagaaatcgcaaaaatgggctacaaattccaattcgtcacgcttgctggcttccacgctttaaatcacagcatgtttgagctggcacgaggatataaaacaagaggaatggcagcttattcagagttacaagaaagggagtttgctagtgaaataaatggatatactgctactagacatcagcgtgaagtaggaacgggttattttgatgaagtggcgcaagtagtttctggtggaacttcctctacaacagctttaaaaggttcaacggaagaagagcagtttcaggcacataaataacaaaaatctatgagtggaacggttggttacttccactcataggaaaaatcctaacaaaaaagattcttacagatgtaagaatctttttttatgtagtaaacacgatttaacagacagctgttcttcctgagaagaaagtatctgcctgttaaacgtacatataaatcattaacatgaattaaggtcttaaaatattaagtagatgtttgaagtagggattggtactgtgctgatagctcataaaaagcaatttcatcacgtagatctaatgccgtgttaatgtttgtttctaacagttctttttgacgcttaaaaagcgattcatcaattaccatttcgatataaacatccaacatactcacagtatcaattacttttttcttgcgagcgagggacttcatcatttccgtgtacgatttttcattgttcatacctcatcacctctgcaccctttttattattatatagattaaaagaagaaaaaacaaccaattttctaaatttttagatttttatttttagaaatgataaagtaagagggaaacgctactttcgtttttatcgattgactatttgatttaaaaatgaatgcttgggggcgaagaaattgaatcatttaaaaaagcgtacggtaacgatagaggatttgtatggattgaagtctgtttataatcctcagatttctccagatggaaaaagtgtagtttatacggtccgagaaacgaagaaaatagagaacgcgtatgaaacgcagctgtttatgttagatcttgaaacgaaaaaaacaaagcaattaacgtattataaaggaaataatcattctcccgcctggtcccctgacggcaagtggattgcttttttatccgatcgcagtcaagccgttcagctccacttattagcagcgacaggcggggaagcagaagcactcacagatcttgaaaaaggcgttagtaatccggtgtggtctccttatagtgacgaaattatgttttccacaaaagtagaagaaaaaactgtaagagttgaacaaaatcatgaacatccccagccatatgaagtggaacgtttactgtataaatccgatgttagcggttatttaaaaggtgaatatactcacgttgctgtcgttaaacttaaaaataaagaagtgacgtttgtaacgggtggaccttatcatcactctgtaggatgctgggcccctgatgcaaactcaattgtattttgcagcagccgaggagagaatccggatttatcgttaactatggacgtgtttattttgcatcgtgatactaaaaaagtaacatctattacaggagaaacaggatattttcatcaagtttcgtggtcaccggatgggtcatacatagcatacattggaaatgaacgtacttacggatcagcttcaatgaatgacatatacatttatcagatctctaatcaaaaaacagcttgtatcactgctggcatagacttagaagtaggagatatggtagcaggagattttcactttggcagaaccgcagcgagaattatgtggggcagtaatgaagaattttattttgtcgtaagtaaaaagggttctgtaggcatatataaaggaaatatgaatggaaagttagaccctgtacttatggataatgctcacgtatatggagtatctgttcttcccaattgtgaggaagctatcgtggcaatcagtacatttacacatcccggagatctttattctctaaatttaaaaacagaggaattagtgaagctgacaaacgttaatgactcatttttaaagcatgtgcagctcacagaagcagaatctttttacgccacttctacggacggtatacatatccacagttgggtagtaaaagctgctgctaccaatgatgtatctccaaccattttagaaatccatggaggtccgcatcttatgtatggtcatacatttatgcttgaattccaagtacttgcatcaaaagggttcaatatcctcttttctaatccaagaggcggcagaggatatggtcaagcatttacagatgcggttcgaggggattacggaggcatggattatacggacttgatggcagtaaccgacgaagcagttaagcgctactcttatattaatgaagataagcttggcgtaacaggaggaagctacggagggtttatgacaaactggattgtaggaagtacaaatcggtttaaagcagcggtgacgcaacggtctatttcaaattggacaagtttttacggcgttagtgatattggctattattttaccgaatgggaattaaaagctgatatttatgaaaatccggaaaaactttggaaccactcgccgcttcgtttagcggagaacgttaaaacaccgctgttaatcttgcatagcgaacaggattatagatgtccaattgaacaagctgaacagctttatgtagcactgaaaagaaaagataaagaagtagaatttattcgttttcctcagtctaatcatgaactttctagaagcggtaagcctaatttacgaacggcgagactaaaatatttaacaagctggtttaaacgttatttaaaacagtttcagtaaaaagtgcatggctgttcaaccaaatatgtgtgtgtaaataaaggctgtatggcaaacgtaaaaggacaggaaaggtaaagcgctgtaaaacttttgtttagtaaaggaaagtagtacaataagtgaaaagtagcacagttgtttaaataaggagaacattcgatggattttgaaacattaaagcattatttgacattagacggcgtcctcgagttattaaaacaatatcaatcatttggaatcattccagggctgctgttgcctattttagaagcgtttatccccatcttgccgctttttgcgtttgtaatggccaatgctgccgcttttggtttatggttaggttttttaatttcatgggtgggcagctgcgttggatcactcctcgtctttttgatttttagaaaatatggacaggccaggtttttgcattttatcagccggcatgcacaaattcgaaaaattatgatttgggtagaaagacacggtttcggaccgctgtttattatgctttgtttcccttttaccccctcttcggcaattaacgtagtagcagggctatcccgtgtcagtatggctcagtttatgcttgctgtattagctggtaaaatggtgatgatatttatgatgagttttattggagccgattttgtttcatttgtgaaacagcccttaaaggcagtacttgttttagtcatcatctttgtcttatggcttgttggaaaacaaattgaacgaagattaaatgaaaaatctaaagtgaaacagtatgacaaatagtttgtttatatataacaaatagtgatgaaagactgctttttaataggcagtcttttgttatacatacagccaaaaggggtactgtaaactatagaaaagccttttcttatagggatacaacagcatttttgaaaggatcttaaaatttttcttaaagaagttatttgtctgtttattcggttggtagaacaatgcacatacaaagtatctgtccagcaatgaacaagttttttgtttatcaattatgaaaaatatgctaaaataaaagaaaaaactgggaataacttagacgtctattcctagttgcacctaagtaatgacccctttgttttctaaagatatacatgttttttctcaacatgtattatcacctcatgtatttcaaaacgttttcttaaaaattatatgaatgatttttgagcttgactactaagatgtaagtagagggatcattactagaaaagcaccgaatgatcattaagacgtgcttggcgtcgttttgaggaggggaatgcgctactaagattcaagcgacttgctgattaatcgttgttagtaagcgtcttatagcgcgggtgacatgagattaaaagataaagtggcaattattacgggtgcagcaaatggattagggttcgaagcttctcgaatattcgcacaagagggtgcaaaggtcgctatggttgactacgatgcaaaaacgggagaagaaggagcagctcagctaaaagaagaaggcggagatgtagcattttttcaagtgaacgtagcggatcgagacagtgtagatgcaatggtagaagaagtagtgaaacgctactctaaaatagatattttaattaacaatgcaggtatcactagagatggaatgctaaccaaattatcagttgaaaattttcaagcagtaatcaacgtaaaccttacaggcgtttttcactgtacacaagcagtggtaccgcatatgattgctcaaggtaaagggaaaattattagcacatcttcggtatctggcgtatatggaaatgttggtcaaacaaactatgcggcgacaaaggcaggcgtagtaggaatgacaaaaacatgggctaaagagctgggacgaaaaggaattaatgtaaacgctgtagctcccgggtttattgagacggatatggtgaaggcgatgccagacaaaatcattgatcaaatgaaatccactattcctttacaaagattaggtcagccttctgacattggttatgcttatctgtatttggcatctgatgagtccaactatattaacggtacaacacttcatgtagatggtggaatcatgatgtaaaagtagaaaataattcgcttttctaaaacttttcagtggtcttttgactactgaaaagtttttttgttgcatccagcatttcacatatcggcaaagtggaattttgtctgcaagttcagtaaaataataaggagagagatagagagatttagatgattatcactataaaattttgacgactgcgtcacgtgtttacgtggcgtttatccattttgtacttaaacaaatgaaaacatagagaaaaaaatgaaggggtgaaaacgtggggctacagtttttattaggacgttcaggaagcgggaaaacggaatatcttttaaatagcatgcgccaagagctgttaaatgctccgcttgggcatccacttatttatattgtacctgaacagatgacatttcagtcggagtatgcgcttgttcaaacacctgggttagaaggcatgatgcgtgctcaagtttatagttttacacgtcttgcatggcgtatcctgcaagaagtgggaggtattagccgctatcatgtggatcaaacaggtattcatatgatgcttaaaaaaattatcgaacatcaaaaagaagagcttcgactgtttgcaaattcttcagaacaagcagggtttattgaagaactagaaaaaatggttaaagaatttaaacagtacacagtagatgtcccgtctctcgaagagatgaagaaaaagcttcaagcagaagatgagaaagtccttgctgataaattacatgatttacatctcatttacggagaattagaaaaacagctgatgacgaaatatgtagatggagaagattatttgaagctgctgggtgaaaaagtagcgtcttctgcctaccttgctcaagcaacgatttatgtagatggatttcatcactatactcctcaagaattaaccgtattagtagagctgatgaaagtttgtagagaagtaaaaatagcggtgacttctgattattcatatcaagattttattccaaatgacttgcacttgtttcgattaacgagcgaaacgtaccaagaaataatgggcctggcggctgaaaacgggatagagattcaagagccaatcgtatttaacgaacaaaaaaggcatcaaaacagtccagagcttgcctatttagaacgatattatgatgaacggccaacgccggaatttcagtcagagcccgagcacattcagctgctgccggctgttagccgaagagcagaagttgaagggattgcaagagaagttctgtcacttgtgcgcgatcacggctatcgctatcgtgatattgccttgattgttagaaatgcagaggattatcatgacttgcttcaaaccatttttcgagattatgaaattccgtactttattgaccaaaagcgagcgatgtttcaccatccactcgttgaatttattcgctcagtcttagaggtggtaagcgggtcatggcgatatgaaaccatctttcgagcagtgaaaacagatcttttatttcctttgccatctgatgtgcaccagcttcgcgaagagatggatgaattagaaaattacgtacttgcttacggtattcaaggatctaagtggacgagcaaggaaccatttacctacagaaaatatcgttcgcttgaagacatgaatcttggaaaaacagacgaagagcttgcttttgaacaaaaaataaatgaattaaaaaatatgattgtccctcctatttactcgcttcagcaaaaattaaaacaagcgaaaataggaaaagaaaaagcagaagcgctctatcgttttttaacgaatctagatattccacaaaagatagaagggctgcgcaatcgatgtgaagaagaaggaaagcttcaagaagcaagagagcacgagcaggtgtggaaagcaattcttcacttatttgatcagtttgttgaaatgatgggagaagagaaagtatcgatttctttgttcgcagatctatttgagacagggcttgacagcatgcagtttgcacttgttccgcctgcactggatcaagtggttgtggcaagttttgagcgttcgcgtttatccgatatcaaagcaagctttgtattaggtgtaaatgacggtgtgattccagctaaaccaaaaagcgatggcctgttatctgagaaggagagagagcagctgcttgaatcaggtttattacttgcgccaactggaagacaaaagctgtttgacgaacaatttctcatttatttagcactttccagctcttcggaaaaactttatgtttcgtatcctcttgccaatgaggaagggaagaccctgctgccttcactcgttattaatcgagtaaaagagctatttccgctcctgcaggaaaagctgttaatgacggaacctacagatttagaagaagaaaagcaagttgattatataacaaatcctttaacgagcatcgcgcatttagccagccagctgcaaggatggaaacgccattatccgatgagttccgcttggtgggatgtatataatttttatgtgaaaaatccagattggaactcatacagtgagaaagtactaagcagcttattttatcaaaatgaagcaaaacggttaacaaagaaaacgagtcagcgtctgtatggaaagcatattcaagcaagcgtatcgagaatggaaaaatttgaagcctgtccatatgcgcattttgcttctcacgggctcaagcttaaagaacgaaaagttttcaaattagcagctcctgacataggcgagttatttcacgcggcgttgaaaatgatttcagacgaacttcgcggcggtcaaaaagaatggaagaacttaacgagaaaagactgtcagcagctttctacggctgcggtgcatgaacttgctccgcgcttgcaaaatgagattttattgagctcgaatcgccaccactatttaacacataagctgcagcaaattattgaacgtgcgtcgcttgtgttaagtgagcacgctaagatgagcggctttgttcctgttggattggagcttggatttggacctagtgcagagctgccttctatgcagttcacactgccgaatggccatacgatggaactagttggccgaattgacagggtagataaagcggaaagctcaaaaggacttttactgcgtattgtcgactataaatcaagcgataaagcattaaacttagtggaagtgtactacggtttatctcttcaaattttagcttatttagacatagtcgtgacgtatgctgaacagcttcttcatgataatagaggagcattgcctgctggtgttctttatttccacgttcataatccaatgatcaacagtgctaaagcattacagcctgatcaaattgaagctgaaatcttcaagaagtttaaaatgaaaggactgcttttaggagacgaggaagcagtaaggttaatggacgaaacgttagaatcagggcactcacaggttatatcagctggcattaaaaagacagggggcttttattccaattcttcggttgcgagcgaagaagattttacacatctccgtcagtatgtgcgaggtaaattcgtggaggcaggtacagagattacaaatgggaaaattgatatttcgccttataaactaaaagataaaacaccatgtgcattttgtgaataccgctcaatttgtcagttcgatgaatcaatggaaaacaacgaatatcgtcagcttagtacagagagtcaaagtgttattttagataaaattcgagaggaggccaaacgagatgagtgaagatatacacgtaaaaccggccgactcccagtggacggatgatcagtggaacgccattgtttcatccggtcaagatatattagtagccgcggcggctggctcaggaaaaacagcggttttagttgaacgtattattaaaaagattacgatgggtgatgagccaaccgatgttgatagattactcgttgctacgtttacaaatgcttctgcagccgaaatgagaaatcgaattggagaagcattggaaaaagagttaaaaaagaatccatcttctttgcatctgcgcagacagcttaatttattaaaccgtgcgtcgatttctacgctccattctttttgtttagaagtcattcgaacgtattattatttgatcgatgtagaccctggttttcggattgcagatgatacggaagcggatcttctgcgtgaagaagtattagaagaattgtttgaagaacagtacagtattgaacagaacgagcgattctttgatttaattgatcgttatacaagtgacagaaatgacttagatattcagcttatggtaagaaagctgtatgactttgcaagatctaaccctgacccaaacggctggcttgaaatgatcgtgagtcaatatgatgtgatagaagactcttctattgattcacttccgtttctatcttttcttttacaagaagtaacaacgcagctgatgggcattgagtcgattttaaaacagggcttagagttaacaaagctgccaggagggcctgctcctcgcgccgttaatgcagaggaagacctggctcaaattcatcggctgctcagcgcttctaagcattcttttgctgatttgcatgaggaaatgcagaatttgaattttactcgtttaaagccatgtaaaggagaagcatacgacccgcagcttttagaggatttcggagagcttcgcaaaaaagctaaaacaagtcttgaaaaacttcatggtgatttgttttctaggcctttgcacggctacatggctgattttgagaaaatgaagcccgttattgaaacgctaatctttttagttcagcgcttcggtgaacgatatgaacatatgaaaaaagagaaagggttagtggacttttctgatttagaacattattgcctgcaaatcttgagtgtaaaagaagatggagtgcttaagccttcgtccattgcccaaaaatatcgcactcagtttgaagaggtgcttgttgacgaatatcaagatacaaatatggttcaagaaacactgattaaattagtgacgagagatagtgaagaacaagggaatttatttatggttggagatgtaaaacaatccatttaccgctttcgtttagcggagccatttttgtttttaacaaagtacaagtgctttacacaagatggtcgccagttcggaaaacgtatcgatttgaataaaaacttccgcagtcgttctcaagtgcttgatgctacaaactttatttttaaccagctgatggatgaagaagtaggagaaattgcatatgacgatgatgcttctttaaaattaggagcatcgtatccaaaagtggaaggaatggaaacggagcttctgctaattgcaaaagaaaatgtagaagaaggagcggaagaagaatcggattcttctctcgtcgctttttcagaagcagagcttgaaacggctcagttagaagcaagagcaatggcgcgcaaaatcaaagagctcgttcaaaaccgttttcaaatatatgaccgcaagctcgatatcatgagaaacgtgacgtatcgtgactttgttattttgcttcgttccatgccttgggctgcgcagattatggatgaatttaagcaagaaggcgtgccgatttatgccgatttatcaacaggctattttgatgctactgaagtgatgattatgatgtctttattaaaagtagtagataacccgcatcaagacattccgttagcttctgttcttcgctcgccggtagtagggctttcagatgaagagttagctacactgagagcagagcaaaagaaaggaacgtattacgatgcgttaaaaacgtacttagcggtttcagatgatgaagaacttcgcgataaagtaaagtatttctatgagcagttaaaagcatggagaacacaagctagacaaagctctttgtcagaactagtatggcaaatttaccgcgatacgggtttctttgaatttgttggcggacttcctggcgggaaacagcgtcaagccaatttacgtgctctttacgatcgcgctcgccagtacgagacaacttcatttagaggtctatttcgatttttacgctttattgaacgcatgcaggaccgagggaacgatttaggagctgctcgagcactgggagaacaagaagatgtggtgcgtttgatgacgatccacagcagtaaaggtcttgagtttcctgttgtttttgtagctggtcttgctcgtcagtttaacttaatggacttgaataaagcatatttactcgataaagaactaggttttggatctaaatatattgatccaaaactgcgtattacgtaccctactcttcttcagcagaccatgaagaaaaaaatgaaaaaagaaagcatggcagaggaaatgcgggtattatacgtagctttgacgcgtgcgaaagaaaaacttattttagttggaacagtaaaagatgcaccagaaaagctcagacaatggagctccgttatggcacatgaagattggacgcttccagctcacgtgagaagagatgcaaaatgttatttagactggattggaccttctttaattcgtcaccaagatgttagtcatatggttgaaggagaggtccagccggctgagatgattcatcagcatgcttcaagctggaaactttcaacgttattagcaggtgatttagccgaacagcctcttgaagagcagcagcatcatgaagagcttttaaacgctcttcaaaagcatgagccagtttcagaatcgagcgattataaagacgaagtgtatagacgcttaaattggtcttatgattatcgtgtagcttccgttcatcgttcgaagcaatctgtttctgaactaaaaaggcagcagcagctgacggatgcaggtggaagcgacgatctcgttcggggatctaaagcacctcttgaaaatcgtcctctgtttcttcaagagaaatctctcacaggagctgaaagaggaacagctacacatgccgttatgcagcagcttccattaaataaagcttatacccttgaaatggttcaagactttattcaatcaatggttaccaaagaattattgacgcaagaacaagcggatgctgttgatgcaaatgatgtagcagcctttttagacagtgacattgcacaaggtattcgaacggctcgcacggtttatagggagatgccttttagtttaggtgtctccgctaaagaaatctatgatcactgggagcaggaaaacgaaacaattttagtgcaaggtattattgattgtttgtatgaaacggaagaaggcctcattttacttgattttaaaacggataatatttcggatcgttttcaaggagattttgaacgagcaaaaccatttctaattgacagataccgcattcagttagagctttacgcaaaggccattgagcggattgtaaaacaacctgtgcagcatcgctatctgtactttttagatggtggacatgctgttgaaatataagaaaagaagaagacgctagtcttcttctttttcgacaataaggagagagtaacatgcgtttattacatacagcggattggcatttggggcgaacgttagagggtcgaagccgtctggctgagcaagcacagtttttagatgaactggcagacattgtggaagaagaaaagatagatgcgattctcatggcgggagatgcctttgatacggttaaccctccagcagcggcagagcagcttttttacgaaagtatgtctaggttgagcaacaatggaaaacgaccgattattgttattgcaggtaatcatgataacccagatcggctgtcggcggcttctccattagctgtttatcaaaatattacgcttcttggtttgcctactaccgatgtagaaagcattcacattcctacatcagatgaaatgttaaaggttgcggctcttccttacccatctgaatcaaggttaaaggaacttttagcagaagaaaatgatgagctggctcttcgaaactcatatgatgccagagtaaaaggtattttcgataaaatgagtgagcagttcacaacagataccgttaatattgccatgagtcatatttacgtagcaggtggaagttcaacggactcagaacgtccaattgaagtaggaggagcttatacggtggcggcaactagtttacctgctaatgctcaatatgtagcattaggacatttgcatcgcccgcaaatgatcaatcgcgccaacacccttgcaagatattccggttcacctcttgcttatagtttttcagagacaggatatgcaaagtccgttaccattttagatgctaagccaggaaaagagattgaaatgactgaaattccattatctagcggaaagcctttgacacgttggaaagcgaaaaacggattgtcagaagtatatacatggcttgatgagcaaaaagatacgcaagcatgggttgatttagaagttcacgtagaagatgcactttcactagaagaaatccatcgccttcgcaagcttcatccaggctttattcatatccgtccggtattcaaagcagaagaactagcaattgaaacacgttcacagcgcgaagtgccgatcgaagaactgtttgcaaagttctacagcaggcaaaccggcggaggggcaccagatactgaattagtcaaactgtttttaaccttgattaacgatgaagaagtatcgggaaaggaggatgaaaaatgaaacctattaacttgaccgtttcggggcttcacagttttagagaaaaacaaactgtcgattttgaagcgctgtgttcaggcggtgtgtttggaatatttggtcctacaggaagcgggaaatcctccattttggatgccattacactagctttatacggaaaagtagagcgtgcagccaataatacacaaggaattttaaatcacggggaaaatgaactgaaagtatcgtttacgttcgagctggaaaacgctagtcataaaaaacgctatactgttgaacgaagctttaaacggacggatgagcttcgtgtaaaatcagcttcaagtcgattgattgaaatcgaagatgaaacgtacgtattagcagataaaacaaatgatgtaaaccagcaggtacaggagcttcttggtttaacaattgatgattttacaagagctgttgtattaccgcaaggaaaatttgcggagtttttatcgttaaaagggaccgagcgtcgtcaaatgcttcagcgtctttttaatctcgagcagtacggagatcagcttagtaagaaaatacgctatcaagttcagcagctaaagacagacctagataaaatcacggcagaacaaacagggttaggtgaagcttcaacagagaaagtaacggaagccgagcagcttgtaagtgatagcattgtacttttggaaaaacgagaaaaagaagcgtctgatttgcaggaaagatacgatcagcaggcgtctctttggaaagcgcagcaggaaaaaatactgctagaagaaaaactagtgcatgcttctaagcaggaagaggagattagacaaaagcaagatgtgctgacgaaagctcagcaggcagagcgtctttttccttatttagaaacatttgaacaagctgaaaaacagcagaagctttacgaagataaagtggaaaaattaaaagcacaaattgttcaaaaaagtgaggaatataagcgatcgaatagtttatatgagcaggctcgcttacaaaaaaatgaacagcagcccaaattagttgttcaaaaagaacagcttcaacaagcttctgatcttcaaaaacaaattaaagaaggacagcaagaaataaaagaagcggaagtttctcttcagcaaaagcagcaggcacttcaagcgaaaaatgatgaattaatggaagcagataagcggtatcagcaaggcttaactcttcaaaaagagttaaaagaagcattaacaaaagtggagattcaacctgattatcggcaggctgttcagcaagcattctaccgttatcaagtatggaataacgataaaaaaaacctagatgaaggtcaaaaaacgtataaagaaaaagccgaacagcttaagcatttgcacacacaaaaacaaacacaccaagagagatatcagcaaacaatagaacaaagtaaagggttattttcagatattcaaggcttgtatcacactgtatgtgagcgggaaaaagagtttcagcagctttttcaacaagcagatggtttaatgagcgatctaaaaagacgcaaagaaaaagaatggtcacgccgtctggctcatcaattagctgagcagctgacccaaggagagccttgtccagtttgtggctctgagcatcaccctaacctcgtgttacaccaacaagaagatgacgtcacaactgaatcagctgatcagttcgaagatcaagtcaatcaattgcgtgaacagcgatttagctattcgtcgctcaaaatgctgcttgaacagctagctaaacctcttgttgaaaaaatacctgagttagctgagtttatgaacgaagctggcgaagttcctgctttaggagaaatggatacagatgcctttggccattatgctaagaaaatagaagttgaaatcaaatctcttgagcaggattatttgcaggtaagtgaaaaacagcaggcaattctcgggcagatacaaaaggtccagcaaagtcttgaaaagattgaattagagcttgctcattatcaaaaagaacaagctgaattagaaggaaaagtaaatcagcaaaaacaggcgctacaagcaggaaaagaagcttttcaacaagactatccttcctttgtatttgaagagatggaaaaaattaatgaaaggctgactgaaagagaaaaagaagagcagacaataaaagctcgaattgaaaaaagcagcgtattttttgaaaatcagcaaaagaaaatcgaacgtctaaaagaagagaaatatgcgggcgaaaaagaatttacagaattaaaagcaatgctgtctcataaacaatctcttgttcactcgcaaattgaacgcttgcgtacgcttacagatcaagaagatattgaacaggcgctgcaaaaaacagttcttttacttgcggagttagagacgaatgaacagcaggcatatcaacattggcagactgttcaaaaagcgtatcaaacgctgcaaatggatgaaaaagcagcgagcgaatctctagaaacagctcatatgcagtataaaaaagcagctgaaaaatgggaagaagctatagggaattctttattcagcgaaggaaaagaagttcagcaagctttgttatcacatgaggagatgaaattgttggatgaaactgttcaggcttattgggacaacataaaacagatgaagtcatcaattgaacagttaaatatccagctgaatcaccagtccatagaagagcagcaatttgaagaaactcagcagctgcttcatgatataaaagcggctgtgaaagaagccgttcagctcaagggagcagctgagcaaacgttaaaaagcgtcaaagaacgacatgagcgatttttagtgcttgaacaagaccgtgaagaaaaacaagcgttatttgaacagtatcaaaagcttcaaacagtatttaaaggaaatgctttcgtggaatatattgctgaagaacagctgatgtccgttagccgagatgcttcagagcgtctgggtatattaacacgtcagcgctatgcgattgaagttgattcccaaggcggctttattatgagagatgatgcaaatggaggcgtaaaacgtccggtttcaactttatctggtggagagacgtttttaacttcgctggctttagccctttcattatctgcacaaattcagctaagaggagaatatccactgcagtttttctttttagatgaaggatttggaacacttgatggagagcttcttgataccgttgttacagcgcttgaaaagcttcaatcaaataatttatcaattggagtaatcagtcacgttcaagaacttcgcgctcgtctgccaaaacgtttgattgttgagccatccgagccatctggcaaaggaactagtgtaagagtagaaactttatagggaaggaaatctatatgaagaaaaaagacaggcggataggaacatgcgaattatgcggaaggcaggatgtcttgacgaccgtacatcatttaacgccaaaagaaatgggcggagcgtttgaaccaacggcaaacttatgtattccgtgtcataaacaaattcatgcattatatacaaatgatgaattagccattcgtcttaatacgatttctttattacaagctgattctaaaattagctcttttattaaatggattcgtaaacagccttcttctaaattacctaaaacaaagaaatcaaacagccgaaaatccaagtgaataaaaaaccccttatctgctttaatagcaaagataaggggtttttttaagcatttgctgctatattttgatcgaataaatctggatctaacgtatttgttccggaaatgccgttatttgtattaacaaagttacctgtatttaaagaaccagagcctgacgctgttttagcagcgctttttggagaaacataaaacgtatctccaaacgttacgacaccgcctccgacgctcgtgatactaacgggcccaattattgctggcatgagattcacacccttttttcgtgatattaatttagtatatgagcagctttttaaaaggttcactaactgctgctagcttgtgaagaagcactacttgatgttcctgcttcagcttcttttgaaggttcatcattgatcagttcacgaatatgcttaatgcgagcttctgcataaacattgcacgttgagccaacatgaataactgatgagaatgagcatccctttatatcaattctgttaacgcggatcaaaggtatttcactccatgtttgaacgggaataggttcgtaatcgctatgaggaataggctcattaaagatagcgtaatcatcaaagtttccttctcgaccgtagaaaaacggatactgtctccgatcagctaaagctttattaagtagatgaatttctgttgaatctccaatttgacaaaaggagctcgccgacaaggaattaatttctatataattaacagaagatgtgcgtgaaagcataggtaagctcctttatgataacgatagtggaacataagggccgataatcaaagattcagccggcgtatcaaatgttgaggatagagagatgtaattggcatcaccaattaaaaaaagagaagaagaagatacacctgtaatactaacgtctccaacaagcaattcgcggtttacaacattaaagttcatgaagggggtccacctttctttaaagattcaggtaaatacgttaaaaatgcgtcaattccttttttcatatcttcataaagtttaccgataatttgaggtttgatttgttcaaaatttcgttccatttcttccggctgaacttgctgtatataaaaagtaatccgctgctgcagctgctttttaatatcttctaaaataaactcgtagtacgattcatcaatcatcatcgagcgctcatcaagcacatgttgaaccatagaaaatccatattgattaagttcagctaaaatcgtttcgtggatatcagagacccactgtttttctagctgacggtccaatggttttaagctaggattttgcggtccaggacctccgggttgtcccggctgctcaccttgaggtggctgcccctgcggctgagctccttgcgaaaacgttacttctggtttctcattgataatgatatcttctaaattatcaggcgtaagaggatttaatccaatatttaatgtaccatctaatgaatcaatttttaactgttcaaatttatattcaattttatcaattttaataggtggctgttcacctaattcttttattttttgctgaagttcttgtacgtttttttcaagctgtgcaatgcgtccttcttgctgctgaatatacgaagacatttgctgaacatactgatgtacttgctgaatatagttcatgttatccaccttcaatcacctcaattcccttatcttctgataaagaaaatagttatatatatacatatggcgatgaaggttgtaacatgtcagtcgttgtctcgagctggaggagttaacgactgtgaaaaaggagctggggcagtgcccgcgccggttccgggagtaaaggtagaaggagaaacagatccaagaatgcctttttttgtttcagtaggtgcggcgcctgtaaatcctcctgtattaaagagatttgagtttggtttaatgacaccgacgcttccaatttgaagtaccgaagagttacttacagcactgattttcatactttgaatacagatactttgattcacataaaagttcataagcatcctcctgtatgagcttcatttctattatagatttccagcgacattttgatcatttacgtcattgtctgacgtattggttgagctctgttgattcacaacatataatccgtctcctgtattaaacgaacctgcgccggcaaatgttttagcagtggaaataggggctattgtataaacatctccaatatgaaagacgctggctgaaccaacactgttaagattaacaacaccaacaatggcaggcataggcaaacacccttttaatttagtctagtaacagcatatgaagcctagacaaaaaggtgattaatgctttttctttatctatatgccgagagtaagcaaaacattaaagataggaatggaaatagtaaacattgaagaaaaacttttgcgttcgatataatgtgaaaacaataatgaaataatgtaaggtgtgaaagaatgaaatgtttcaaaatgaacgcagctgataaagaacagcgcattgaggcagcggatgtattaaaaggaatggcgcttattggtattttgctcatgaacatgccgaatttttattcacctgcttcctattacgaccataatttgttcgacggttcaagaatgaattatgttgctaatggattagttgatgtagttgtagggcagacaggctacgcgctgctcgctattttgtttggatttggttttatgaaaatgttccagcgtacatacgaaaggcaagtaagctttactcctttttatgtacgaagaatcacggctctgcttctcgttggggctattcatgctttatttatttggcacggtgatatgattgtgatgtacagcttctttgctttgatcatgctattttttcaagaagcaaagaaagaagtgttattagcgtggggaattggaatatttagcatttatgctgtgattatgattgttattttaacagtagcggcttttgttaatgaaggagatacagcagcgggaattcaccagcctattattgaccaagcgcttcaagcatatggacacggaagttttgcgtcaatctttcatcagcgcttgcttgattggtactacgcgtataatttaaatacggttccttttctgtttttatcgttatttccactgtttttattaggcggttttatggcaaaaagcgagtggttcgaagaaatagaagaatacatagtggagacaaagtggctttgtcttatttcattcatcgtgtatgcagcatcatctgtattgccgtatgttttagatcacaatgtagcgacatcttatattcacgatacaatcggaggaacggcaggagcaatttttattgtaacgttggtcacattagctatgcgaagtgtatctattcaaaaagtcatgcagccattcgcccttttggggagaatgattttaactaattatattgtccagtccattgtatgtacatttcttttttactcatatgggttaggatactacggacatattttaattgtagaaggtttggctattgcggggattatcatttttattcaactgctgggaagctggatatggatgagcctattttcagatgggccgcttgaaaaactcattcggtatgctacttatggacgcagccgctaaaaatccttttccttccttatattattggtgaaggaaaggttttcatgatatgatattttcagaaaggacgtgagatgaatggctccactacatattcatgtaacgctttggacattattgattatctcgtttgtggtttcgttgattttacatcgagcaggtaaagctaaaggtcaaaaaatcctacatatggtggctagactcctatacttattagtattagtatcaggtctgcatatgttagcagcttggtatcattttcaaggcgcagcgctcattaaagggattgccggagtgttagtgcttgtgggaatggaaatggtccttgttcgtactgaaaaaagaaagcgtacaggcgttgcttgggcagttcttgcaattgcgcttatcttagtattctattacggatatgtcgtactaggataagaaaaaagctatcttggataagatagcttttttcttttgttttaatttaaaaaaagattcattgaacgttctccatcattaacggtatattcaaatcgatctaggtgatgcgtgcctcgttcgaataaatgctgaacggcacaaattttttcctcattgtcataaatgataaaattagcaccttttgtatcaccgtctgtcggtaaaaaacataatgtgttgtgacagtaaatacaatcataaagagagaattttaatgaatttaagtgctgagtgaatgataaaaaggtctctttcggtagtgattgaagaagctgttcgtatgcataaggtagctttttagtcagtcttagcttatccccatttcgcaataaatacgttccatcgtgaagctttatttgacggtcatcaaccataatggctttttcccagcgtgtatcaataagaagttctaatgtatcatccattacttcatggagcatggaagcttcgtcactttcatcttcaaagaaaatccactgtgaatcaacacattcaaccgtaccaatcacgaaggaacgcggctgattgttcagagcttgttgtttagaataatgattcataatcaaacctccgtgtgaaatttatccatatttttttattgcctaaaaaagctctctttataactcgaaagtgaaaataaaatataaggacaattcaactgtaactattgcgtgcatacaatggcattatttcattcataaacaagagcgtgaaagaaaggatgataaacgatgtgtggtataacgggttgggtcgacttaaagcgatcgcttttaaatgaaacagcaacaataacaaaaatggctgacactttatcgaaaagaggtcctgatgacaccaacgtatggacacagcagcatgttgcttttgggcacaaacgcttagttgtagtagatcctcaaggcggaagacagcccatgacaagagaaaaaaatgaacagctctatacgctttgctataatggagagctttacaacacggaagatattcggaaagaattactaaaaagaggttatcaatttcagggacattcagatacggaagtacttctaacatcttatatagaatggaaagaatcatgcgtagatcattttaacggtatctttgctttttcaatctgggatgaagctaatgaaaagttatttatagcacgcgacagaatgggagtgaagcccttattctatcgatcttatgaaggcggaattcaatttgcatcggaattaaaagcgatattagctcatcctgaggtgaaagcggaagtaggattagatggattagcagaagtgtttggcttaggaccttctcgttcccccggccacggcgtatttaaagaaataaatgaattgcgcccggctcacgcgctcacgcttacgcgtaacgggttgaaaatttggcgatactggaacgtaaaaagtgagcagcatacagatgatttaggtgaaactacagaaaaagttaaatttttagtgcaagacgcgattgtaagacagctagtgtcggatgtcccggtttgtacatttttatcaggtggagtagattcaagcgccattacagcaattgctgcaaatgcgttcaaagaaagccgcaagggctctcttcatacgtattctatcgattatgaagacaatgataaattttttaaagcaaatgagtttcagccaaattctgatggaacttatatcaagctcatgtcggatacgtttcaaacaaatcatcaccgctgcattatttcaacggaggaccttgtgcagcatttaacagaggctgtagaggtgagagaccttcctggaatggctgatgtagattcatcgctgctttggttttgccgtgaaatcaaacaagattttgttgtgagcttatcaggagaatgtgcggatgaaatttttggaggatatccgtggtttcaccgaaaacatgatttgtcttcggataccttcccatggatgcgttcattagatgctcgaattgatttgctgcaaagttcatggagaaagaaattacagttagaagattatgtgcgtgcaagatatgaagaaacattaaaggaagtgcctgaattagatggtgaatcgttagaagatgcgcagcggagaaagcttttttatttaaatcagatttggtttatgacaactttattagatcgtaaagatcgtatgagcatgggcgcgagcttagaagtacgcgtaccttttgcagatcatcgccttgtggaatatgcatggaatattccgtgggagatgaaaatgacgggcaataaagagaaggggattttacgaaaagcgcttgaaggaattttgcctcatgatgttctttatcgcaagaaaagcccttatcctaaaacgcataacccagcttatacaaaagctgtaactgtatggcttcaatctcttttacaagataaacagtcacctcttcatgaattttttgataagcaacagttaaagcatattattgatacaggaggagaaggatttaaagcaccgtggtttggtcaattaatgacaggacctcagctgttagctcatctagctcaaattcacgtctggtttactcacaataatattcaaattgttgaatgacaggaccctctcagtacagagggtttttttttatgaaataagtcatctgtttctcttttttgtacgtttaactagagaagaagaccgcagtctatttttgtataactttacatagatataaaataaaagcttgaaagcaccgaataaagggaaagtgtaccggaaccctggaaaaatggtacaaacgtcatattttaatggtttagttattggtaattttatgattcgaataaagacaagcagtttatcgttgcgtttaataataaagctttgtataatttttgtataactattgtataaggttaggagtgtatgtatgcaaaaaaacgtaatcgtgattggagcaggtccaggaggactagcggcagcgatgctgttagcgagtcatggctataaagtagatgtatatgaaaagcaaggatacgtgggcgggcgaaattcagtgattaaaatgtcaggttatacgtttgatatgggtcctacatttttgagcatgccacagatttttgaagaattatttcaaactgctaatcgcaatgcgcatgattatatggacttaaaacgtctaaatctcatgtatgagcttattttcgatgatgcgcagattcagatgacggataaccataaaaagatgaaagaagaaatcgaacgtttatacccaggaaacggagaaggctatgagcgctttatgaaagacaccgaagcaaagatggcggctttgctgcctttattgcagggcgagatggatcgttttcatcactatttaaagcctgaagcaattcgagcattgccgcatttatccttaggtaaaacgctctatgatgtacttggcaagtatttcactgatgagaaattgaaattagcttttacttttcaatcgaagtacttgggaatgtccccttgggaatgtccaggagccttttctattttatcgtttatggaacacgcttacggtatcttccatccaataggaggagtaaaccaactatctcaagcaatggcaaaagtagtggaagaacatcaagggcacatccacttaaaccaaggtgtccaaaaactatggattgaaaataagagagtaaaaggaattattctagaaaatggagagcgagtaggggcagacgacgtcattatcaatggagattttgctcatgccatgacgaatttaatagatgaaggtacccttaaaaaatatgcagttaaaaaacttgaaaagaaaaaatactcttgttctactttcatgatttatctaggcatagacaaacagtacaaagatctgcctcatcacacgattgtgttcgctgaagattataaaaaaaatgtagaagagatcacaaaaacgctagctctttcagaggacccttctatctacatccaaaacccaggtgtaacagacccaactttagcaccagaaggaaagtctgctctttatattttagcgccggttccaaataatttcagcggtgtaaactgggatgaaaaacaaaaagattttcgggatgcagtattaaaaattgtagaaaagaaaacgggtttcaaagatttagagagtcatattgaagttgaaaaaatcatttcaccaaagcagtgggaagaagacgtgctggtctataaaggagcgacatttaaccttggacatcagctcactcaaatgatggtgctgcgtccacataataaatttgaagaattagaaaactgctggctagttggaggaggaactcatccaggaagcggtctaccaactattctggaatcatctcgcattacgacaaagctcatcttaaaaagagacggacaattactgaatgagccgtttaaaaccatgaaggaaatggagagtgcattatgagaacagcaattgttggaggcggcataggcggtttaattaccgctttgttattaagcaaacgaggattttctgttgatattttcgaaaaagaaaacaagcttggcggccggttggcgtttgtagaaaaagacggttataaaattgatgaaggtcccacgattgtcttactgcctttaatgcttgaacgtattttagatgaagcaggcatttctgcttctcaatatgaactaatacgctgtgatccactttatgatattcattttccagacggtacgacctatacaaaaaaagcgactgaaaaagatcagttagaggagattagccgtttgtttccaggcgaagagcaaaactaccggcgttttatgacagaattaaaaaagagatttgaattaggaagtaaggcatttttggaaaaaacatttgtaaataaacgagatttttggacatggcaaaacatcaaggcattaaaaaaaatgaatgcaaataaatcaatgagaaaatttgtttcaacgtatttccatgatgaacgtctagtagatgcctattccctgcaatctctctatattggaggaaatccttattcggcgccagctatttattcccttgttccttacagtgagcatgctcatggcatctattacgtaaaaggcggatacgcaagtcttgtgccacttcttgaaaaggcgctgatagagcaaggtgtaaacattcatttgaataaggcggttcaagagctttctatatcaggagacaagacggaaggagttattgttgacgaaaaactttatccatttgatcaagttgttttaaatggcgactttcctaatatggcgaaaattgctcgaaaaaaagaaaagaagtatgtgccttcgtccagctgtctgctgctttatcttggtttgaagagaaaatatgatcatcacaatgtgcatcaatactttatgggcaatgatttggctaaacatatggaagcagtgtttaagcataaaacgattcctgaagatcccgctatttatacatttaatccctctgttattgatccatcgttagcccctgaagggaaaagtgtgctatatgcacttgtaccggttccatcaggtggccacattgattggagcaatcagcaagattttgttgatggaatcattcgaactttagaagaaaaagggtttgaagagcttcgtaaagaaatagagtgggtaaaagtacgcacgccaaatgatgctcaagcatttggactttacgaaggaggaagctttggtattgctcctgagctgtttcaatcaggcgtattcagaccccagtaccagccgtacgaatataaaaatgtttttgccgtcggagcatctattcatccaggcggaggcgtgccaattgttatgcaaggagcaaaaatgttagctgatcatcttattgaacaatcatctgttcaaacggttgcaaagctttcttaagatcttgtaagccataaggaaatgatggtttatcctttaatagagaaaggggtcctatatgatgaacatttcgttagacaaagcgtacaatcagtgtgaagaaattattaaagaaaactcaaaaacgttttacaaagctttttccatgctgccgtcaaaacaaagaaaggcagtatgggcagtatatgcattttgccgtcaagtcgatgatattgtagatgaaggatgcaaccctgaaatagagctgcagcaattcgaatcagaatttgcccgatttaaaaatggagaactattaaacgaaagcgccatgtgggtagctctgcgtaatgtatttgaacaatatgagatgaatgttcaagcgtttgatgatatgattaccggccagagaatggatttagtaaaaaaagaatacgatacgcttgatgaagtgaaaacatactcttatcacgtagcgagtacggtagggttaatgcttttaccgattttagctccaactactcataaagaattagaagaagaagcagttgcattaggtattgcgatgcagctgaccaacattttaagagacgttggggaagacttagagcgagggcgcatttatttaccgaaagaccttatgaattcttacagatatacgcgcatgctattagagaaccggtgggtcacttctgaatttatagagatgtgggagcacctggccaaagaagcggaaatgtattatataaaaggacttcagtcgattcataaatatccggtggcttctcgtttaactcttacaggagcggcgcatttataccgagcgattcttgataaaattcgaaaagaaaattatgacgtatttacagaaaagcactttgtcacaagtcaagtgaaaaagaaaattatgacatctatttctacggggtaacgcaaaggaattaattttcctttgcgttacttttttttgaaaaggtatgaaagcgttaactattatgtaaataagaaaaaagtctcattcaatttgttctacgaatcaaataggcgacggaaaggtttttgtatatccggtagaggatgctgtacgaattagaacaggagaagcaggtgtagaggctattttataaaaagagagtgttattttaatagagggggagttaagcgttgaaaaagaaaattagtgcggctttgcttattagtttgttggcggcaacacgcgttaatgcggatgacccaactgttgaatcagtcagcgcatcaattgacatgatgtgggtaatgtttggggcagtacttgtgtttttaatgcacgcagggtttgcgatggttgaaacaggcttcactcgttcgaaaaattcgcttaatatcttaatgaaaaatatgctaacggtagctgtgtcttccgtcttgtattttgtggttggttttgcgcttatgtttggaagttctaaaggaggatttatcggttcgagcggtttctttttaaatggagaaagcgatcaaatgagcttttttgtctttcaaattgttttcgcagcaacatgcgctacgattatttcaggagcgttagcagaacgtatgaaattatcgagctatatgatgctcacaattgctatggtagctgttatttatccagttgcaggtcactgggtgtggggaggaggatggttgtctaaactaggcttcgtagattttgcagggtcgacagttgttcatttgactggagctcttggtgcggctgtagcagttacttttctaggagcacgtcttggaaagtatggaagcgatggaaaagtcaatgctattcaaggacataatattccacttggcgcattaggtgtatttatcctctggtttggatggtttggatttaatggagggagtacattagcagcggatcctgcccttgtaccaggaatcatcgcaactacattaatgtctgggtcatgcggagtcctgtcttctgctttatatacaaagtttcgctacaaacgtattgacgctagcttaacattaaacggtgccttagctggacttgtagggattacagctggaacagcaaacgtatcgattccaggtgcgatcgtcattgggctaattgcaggaattattctagtagaagctgtgcattttatcaatagcaaaatgaagttagatgatccagttggtgctattactgttcatggaatttgcggtatttgggggacgttagcagtggggctgtttgatacagctaatggtttattttatggcggcggcgtacagctattaggtattcaagctcttggaattatagctgtgatgggctggacaattggaacggttgggttattcttatttgttctcacgcgtttttcttctattcgagtatcaagcgaagaagaaattgctggtttagattttgctgaacacggttcatccgcatacgaatttcgtgaaagtttcgtagcgacaggagatggtaaccttcatcctgaatttggtgttggattgattgatcgactaaataaagttggtaaagtatcggataaacctcatatatcgaacgtaaatgagacggtatagcagtatatagatggaaaaaagtgattaaaagtaaaaacttttaatcactttttttgtttttatcaacttatttaacaataatgtaagcgttaacgttataatggaaacaaaagtgagtttgaaacagttcgtctataggaggggaatagatgaaatggaaaaggacaagtatgctacttatactattattgctttttggaagcagtgcctcagcgcaagatcataaagatatacgtgatgaggtaatatactcattgatgattaaccgtttttataacggaagtgaacagaatgatcgaaatgttaactatgaaagctcagatgcctattatggaggcgatttacagggaatagcacaaaagttagactatattcaagagatgggatttaccgctgttttattaactccttttatggaaaatgatgagacaggctatcatggatatgcggtgaccaaccattataaaatagacgatcattttggaacgttaaaagacttacaaaatcttgtgaagaaagcacatgagcgcaatataaaaattatggtcgaatttcctttgacaatcagtaacaatcatacctgggtagcagataaaggaaaacaaacatggataagtaatgaatccggtacagataacgaagtaattaaagcattgcctcaccttaatttaaaagaaagcgctgtgcagaaataccttattaaaaatgctgcttggtggagcaaacaagcagatattgacggatattacgttaaagatatcgatcaagctccttctgcatttatttcatccttttctaagacgctaaaaagcatggatccttcttttctattaataggagaaataaacgggcaaccattaaaaaaaaatgagcaggctgattcgttaggagtagatttgcttgtagatagaacgctagccgaagccactgctgctacgtttagcggtactaatcgtccgcagaaaatgttgtatgacaagtggggaaaaggaagtaatcagcctttagccaattttttagatgatgttcatagcacacgttttacagcacaagcattaaagagtgaaaatcatcctggagcccgaacaaagcaagggctttcctatctttatacttcgccgagtgtaccaatcgttttttatggaacggaaattgcgctgaatgggggaaagggagcagaaaattatgacatgatgaattttttagctaatcccgatattatagatcatttaaaaaaactggctgaacttagagcaaagtcgccttctcttcgaaaaggaagctttacccttgtgtctgagcaaaaaggtgtggctgtatacaagagaaggtataaggacgaaacgacgtttgttgtggttaataatacaaaggaaacgtcggccattaatgtcccgcttaaaaaagttggaaaagaaaatgaactaagagggttaataacggaaggaattatacgacccgttgacgatgtatacaacatttcattggagcctgagaccacaaatgtatataaagtagtgaaaaagtcagggtttaatattggatatatcgcagcggttgctgctgtttatacgggatttggcatctttttgtacaaagcatcttcaaaaagaagaaaagaaaagaaaatttctcaatctcgtaaaaaggacagcgcgtcgtagttgtcaaattatattggataagtattaatgaagaaaacataattaagaggtggaattatgggtgtaacaataaaagatgtggcaaatttagcaaatgtagccccttcgacggtatctcgcgtcattgcagacagctcaagaattagtgaaaaaacaaaacagcgcgtgcgatcggctatgaaagaacttggttatcacccaaatattattgcgcgaagtctagcaaatcaaacgacagaggcagtcggcctagtgatgccgagctcagcagacaaggtgtttcaaaatccattctttcccgaagtgctaagaggaatcagcaccggagctcacgaaaacaaaagagcgatttatatgtccactggagaaacggaagaagagatttttgcagaagttgttcaaatggtacaggggagacgagtggatggattaattttgctgtactccaaagttgatgatcaagtactttcttatttgcaagaacagagcgtgccgtttgtagttattggaaagccgtttaaacatagtgaaagcatcacgtttgttgataatgataattttaaagctggaaaagaagcgacggaatatttaattgaatctgggcatgagcgtattgcttttattggcggaagtcttgaattagtcgttaccattgaccgtttaacaggctatgataaagcgattcaaaaagcaaacattccttaccgggacgagtatgtgattcatgaagaatttctacagaagggaggaaaagaagctgtttgcgaacttttatctctaaaagaacgtccaacggctctggtagtagcagacgatctaatggcattaggcgttttaaatacattggatgaaatggggatttcagttcctgaagacatttcgattgtcagttttaataatgttctgatcgccgaaatggctagacctgctctcacatctattgatattaatatttttgaacttggttatcaggctgtacgctgcttgattaagcagattgaaacgccatatgctgttgcagaacaagtgcgcgttcctcacaaaatgattaaaagacagtcctgtaaaaccattcaaatgacgaagagataactttatatacaaatggaaaagaggctggaacaaaagtattgtagttgaaggaagatccgaacgagtttgattcttgatggggaatcaaacttgttcggattttttcgttgggagggtaaacgtaggtagctgcttcttagctggtgattgggttgatttaggtatgtctcaatatattctttatgccaaagatattggcgttttaaagtgcaaaaaaaatatacacatgccaattattttttcctttatcaaaaagaaagaaagatataagtggtgaaaaccttggtgacaaataggctgtaaagttttattaaaagttggcacgctatttgcataactataaagtaaacaaagatttgcatactaggaggtatatatcatggtagtttcttattctcatgaaccatttacaaattttaaggacgaaaacaataaaaaggcatttcaagaagcattaacatatgtaaatacacagcttggcaaaacgtacccgcttgtgatcgacggtgaaaaagtggaaactgaggagaaaattacgtctgttaacccagcgaatataaaagaagtgattggatatgtctctacagtaaataaagatctagcagagcaagcgatgcagtcagctttaaaagcttttgaaacgtggaaaaaatggaaagtagaacatcgagcagatattcttttccgtgcagcggccatcatccgtcgcagaaagcatgaattttctagttatcttgtaaaagaagcaggaaagccttggaacgaagcagatgctgatacagcagaagcaattgattttttagagtactatgcacgtcaagtcctgacgttaaaagatggttctccagtacagagtcgagacggtgagtataatcagtacaattatattccgatgggcgtaggtattatcatttcaccatttaacttcccgttagctatcatggctggaacagcagtagcagctatcgtaacaggcaacacgattttattaaagccagctgatgccactcctgtagtagcagcgaaatttgtagaagtaatggaagaagcaggtttaccgaaaggcgtattaaactttattcctggtgctacacctgaaatcggtgactacttagttgaacatccaaaaacacgctttgtttcatttaccggctcgcgcgcagtaggttgccgcatttacgaaagagcagcaaaagtacagccgggccaaaaatggctaaaacgcgttattgctgaaatgggcggaaaagatacggtggttgtagacaaagatgcggatcttgatttagctgcttcttcaatcgtatactctgcatttggttttgcagggcaaaagtgctccgctggttctcgtgctgttgtgcatcaagatgtgtatgatgaagtgcttgaaaaagcagttgcgctaacaaaaacattaaccgttggaaacccggaagaagtttcaacttatatgggacctgttattcacgaggcgtcgtataacaaagtattatcgtatattgaaattggaaaagaagaaggacggcttgttgcgggaggagaagcagacaattcaactggatactttattcagccaactatttttgcggatgtagatgaaaaagctcgtctcatgcaagaagaaatttttggtccggtagtagcattctctaaagcgcgagattttgatcatatgatggagattgcaaacaatacagaatatgcattaacaggcgctttattatcaaacaaccgtgagcatattgagcgcgctcgtgaagagttccatgttggaaatctgtattttaacagaggatgtacaggagcgattgttggttaccagccttttggcggatttaatatgtcaggaacggattcaaaagcaggcggaccggattatcttgttcttcacatgcaagcaaaaacaacatctgaaacattctaattagaaaataaggaggagtaaatatgacaactgaaacacaaaaaacggtgaaaatcattgagcaaacagaaaaatttggggcacacaactatcatccgctgccgattgtaattgaaaaggcagaaggcgtatgggtacacgatccagaaaataataaatatatggatatgctaagtgcttattctgctgttaaccaaggacatcgtcatccaaaaattattgaagcattaaaacgtcaagctgataaagtaacgttaacgtcacgagcgtttcataatgatcagcttggtccatggtatgaaaagatttgtaaattaacaaataaaaatatggctcttccaatgaatacgggagcagaagcggtggaaacagccattaaagctgcacgccgctgggcttacgatgtgaaaggcgttgctgaaaatcaagcacaaatcatcgcatgtgtgggcaacttccacggtcgtacaatgacagctgtttccttatcgtctgaagcagaatatcaacgtggttttggaccgatgcttccagggattcaaaccattccttatggtgatttagaagcgttaaaagctgctattacaccaaatacagccgcatttttaattgagccaattcaaggtgaagcaggtatcgttttacctccagaaggcttcttaaaagctgcagctgatttatgtaaagaacataatgtgctatttattgctgatgaaatccaagttggcttagcgcgtacaggcaaaatgtttgcttgtgattgggaaggcgtagaaccagatatgctgattttaggtaaagcgcttggaggaggagttttccctatttcttgcgtagtcgctaacgaagacattttaagtgtctttaaccctggctctcatggttcaacatttggaggaaacccgcttgcttgtgccgtatcattagctgctttggaagtaattgaagatgaagaacttccagtgcgttcattagaattaggttcttattttaagcagaagctccaaagcttaagtaatccagttattaaagaagtgcgcggccgaggtctattcatcggggtagaattacacgaagaagctcgtccttattgtgaaaaattaaaagaccaaggtttgctttgtaaagaaacgcacagtacggttattcgttttgctccgccgctaacgatttcaaaagaagagttagactgggcaattgaacgaattgaaaaagtatttgctgagtaatcggtttaaaataaataaaaatagtacgatatgtatatatcgtactatttttattcatatgcagctaaataacgtttttatttgataggcaggaggaatagaagtgtatatccaactctcacagctaagcatggaagagaaagttgaatgtttaacaaaagcgttagtgaaaatcaaaagtatcaatgggacaagcggcgaagtaaagattgctgatttcattaaaaacacgcttcaaagttttccttatttcaaagaaaatccccttcacgtttgggaacagaaaattaatggcgatacgctaggtagaaaaaatgtatttgcttttatccaaggcagcaaaaaaaatgctcaaacaatgatttatcacgctcacttagatacggttggcattgaagattttggtccattaaaagacatagcattagatccagaagaacttcagcgctatttctctatgcataacattaatgaagatgtacagcgagatgctcgctcaggtgaatggatgtttggaagaggagccgttgatatgcaaagtggaattgctgtacatttagccaatgtgctgcattttactaagcatccaaataaattagaaggaaacgtcctttttatggtcaacccagatgaggaaagtcagcatgctggaattatttctgctgtttctgaactgaaccgtttgaaaaaagaaaaaaatctttcatatgtagcagcgattaataccgactttattacacctctttacgatggagattccacgcgctatatttatacaggagccgctgggaaactgcttccatgtttttatatttacggaagggaggtacacgtaggagatacgcttgctggtatagatcctaatttgattgcatctgagattacgggaagcatccataacaatattaatctagctgaaaatattgaaggagagctggtactgccaccttcctgtctgtatcaacgagataataaagaggcttataatgtgcaaaccgctgtaagcagtcatttgtattttaactatttcatctatgaacgaacggcaaaagaagtgatgagtcaattaattggattatcaatcgaagcatgtgaaaaagtggagaaaaaactttctgattattacgaactttttgttcagagaacgaatttaccaaagcgaaacttgtcttggaaagtggatgttgtgagtttggaagattacctggaagaattggatcaaaaagggataaatgctcaggcttgtattgaacgagctttcgaacagtatgcgcatttagaacttagaacaaggtgcttcaaagtaattgaagaacttcaaaagttagatccgcatcaaagtccgcgcgtaattgtcttttttgcaccgccttacttgcctcataatcacttgaagaaagacgaaagcagagatcagcagcttctttatcccttgcaagcagctgtggagaaggttggaaaacagacgggagagacgtttcagtttaaaaaattttttccctacctagcggatggcagctttttatctcttcatgagacagatgaggaaatcgatgcttttacacgtaactttccggggggggggattgcaggggcgattcctttccgtgaaattcgagagttaaatattccgtccatcaatataggagtatatgggaaagacggacataagtggacagagcgagtgtataagccttattcgttcggagttcttcctaagttgattcaagaaacaactgttcagatgctaaaaagtaggcatgcttgtacaaaccacatataagaaaatgaagaacggaggtaccgatgaatagacatacagaacaaaaccaattacagagaacaatgaaaagcagacatttatttatgattgcgttaggaggcgtgattggaacaggcctatttttaggttcgggttttactattagccaggcagggccgggaggagccattcttgcatatataataggcggcttcctcatgtacttagttatgctttgtttaggagagctagcggtagcaatgccggtttcaggttcctttcaagaatacgctacaaggtttttaggaccttctacaggctttatgattggatggctgtactggttcagctgggcaaatacgacagggcttgaatttacgtcagcaggaattttaatgcagaggtggtttcctgatgtacctatatggtcatggtgcttgatttttggcgtcattacatttttaattaacgctctttctgctcgaagctatgctgaaactgagttttggttttcgagtattaaagttacggctattattctatttattttaattggaggagctgctgtttttggttttatcgatttcaagggaggagaacccgcaccgtttctttcacatttcacccaaggcgcaggtctttttccaaatggaatactggcagttttattgactttagtaacggttaacttttcgtttcaaggaacggagcttgtcggcattgcagcaggagaaagtgaaagtcctgagaaaatgttgccgagatctattcgaaacgtcatttggagaacgctgtttttctttgtgttagctatgtttgttttagtctctattctgccatacaaaacagcaggcgtcattgaaagtccgtttgttgccgtattagatcaaattggcattccatacgcagcggatatcatgaactttgtcattttaacagccgttctatcagtggcgaactccggcgtttatgctgcttctcgtatgctttggtcactgtcaaacagcaatatggggccaaaacctttgaagaaattatcttcaaaaggtgttccaattaacgcattaattgtgacaatgattatttcagggtgctcgttgattacaagcgtcgtggctgctgaaaccgtatatctttggtttatttcgatttcaggaatggtgaccattattgtttggatgtccatttgtgcctctcaatttatgttccgccgtcgttttttagcggaaggaggagacataaaggaattgaaatttaaaacgccgctttatccattcgttcctattctaggtttttgtttgtatggacttgtattaatcagcttaatttttattccggatcaacgaattggtctttactgtggtgtccctttaatcattgtactctatgtgtattatcacgtaggaatcaagaaaaatattgatcaaaaacaatcggattcatcagtttataaagcaaaataaaaaagaagtgcactgtgcacttcttttttatttagagcggatgtttaatcgtttcatacgatactgcaagctttgtctggtcagccctagtatcttagcactttttgagatgttgtggctgtgttgttcaagcgtttgtttaatacattctgcttcgaacgctaacagctgttcctttaaaggaagagaagggtgaaaagcgcttggataagaaggtgcgtcactgcttgctttattttcaaaatgttcatgctgctttagctggaacttcgttctgtattggaaaggaaggtgagaataatgaataacatcttcgtccattaccaagttcattgcaccttcaataatgtgttctaattcccgtacgttccctggccagtcataagagagaaaagaagacatgacttggtgatctacggtttttacattcatctgaaacaaatcattgtattttttgatgaaaaactttgttaattcaataatatcttcttttcgttcacgaagaggaggaataaaaagcgtcacgacgccaagtcgataatataagtctttgcgtaatcggttttctgcaattgcatcgattggatcttcattcatgttcgcgatcactcgaacgttaaccggtttgtccactgtatccccaattcttcgtacggttttttcctgcagcactcgaagaagcttagcctgaagatttgggtttaacgagttgatttcatctagcagtaatgtgcctccttgcgcttgttcgaaaagaccaggattatccattgcacctgtaaaagctccgcgtttcgtaccgaacaaaaggctttcaattaaattatccggtagcgcagcacagttttgtgaaataaaaggagcagaagagcggctgctgccattatgtatgctttgagcaaacagttcttttcccgtgcctgtttctccaataattaagacataagaaggagttctagtagctcgcttggcgtcttcaatcacatcgtgaacttcttgactgtttccgatgatgctatcaaacgtaaagcgtgtatttcctttttgcctaatgttttgccggattagacgctctagtttcgtcacgtcctgagcaatttcaaccgctccttgaatgaccccgtcttttaaaatagggaaggtattattaatcgtcgtgatttcttgtccttgattgttgaaatacgtttgcttgacgttaaccgtttcttttcctttttgcagcgcctgtacaagcgtgctttgctgattttctttgaacataaacacatctaacaagtttttatgtaaaacgtcttgttcatccatcagctccatctttgtcatcttttcattataaataatagtttttcctgtttcatcgaccgcatggataccggcatcgactttatttaaaatggtttcatatatatgtttaagagtgcttaatgtatcggtcattcaaatactctcctttagcggtgttcatatctctatttaaacaaaaatagctgaattctgatagtgtttccacataaaaataaatgaatgaccgaagagaaatgttatccgtttacaatggatcccccattaatgtgcagaacttgcccggacatataagaagaatcagagcttgccaagtatacataggccggtccgagctcagaaggctgtcctgcccgtttcataggtgtattagacccaaatgttgcaacttgctgttcgtcgaacgtagacggaataagaggtgtccaaatgggtcccggagctacgccgtttacgcgaatgccttttgttgcgagcgaagctgataaagaacgtgtaaaagcaacgatagcacctttggttgaagagtaatcaatcagctgatcgtgcccatggtaagctgtcacagacgttgtattaataatagcgcttccttgttttaaatgaggcaatgcagctttggtcagatgaaaaattgaaaaaatattcgtttgaaacgtacgagtaagctgttcagtcgtaatatccgtaatacttttttgaggatgctgttcagctgcattattgactaagatgtctatttttccgaaagtctgaatggcctttgagacgacttcttgacaaaaatgctcatctcctatatcaccagcaagcaataaacaagaagcttccattcgttcaacttgttttttggtttcatttgcatcatcatgttcattaagataggttatgacaacatttgcgccttctttagcgtaatgataagcgacggaacgtccaatgccgctgtctcctccggtgataatggctactttgttctgtaattttccgcttgccttatagtctggagcgatagaggtagggattggatgcatatctttctcaatacctggctgagtttgctgatgctgaggagggaagttttgtttttgattttgattcattggtatacactccttaattaatatgagtatgtaagcgtatactagtatttgttaagaaagtgtatctatgcataggaataagcctgaacgaataaaaaaaggctttaaaagaaaaaatgaatgccggggcatccatttttttagcggtaattaataaattgtacgtcaataggtaaatcagcgctgcgaatagctgaaataatttgctgcaggtcatcacgatttttaccgcttacgcgaagctgatcatcttggatctggctttttacttttaaaccagtatttttaataattgtattcagctttttagcgttgtctttgtcgataccttgaattagcttggcgcgttgtctaaccgttcctccagaggcgttctcaatttttccatatgagatattgcgtgtaggtacgccgcgtttaataagcttagagatcagtacgtcttttaactgttcaagcttaaattcatcatcagaaataagaacaagctcttcgttttcaagcgagatttcgcttttactgcctttaaaatcgtagcgggttttaatttcttttgttgccatggtaatgccgtttgttacctctgataaatcgacttgtgacacaatgtcaaatgaactatctttagccataataacctccatatgtaaagagtttgttcttttattataaataaaacacaaactgtatacaactgatattgaatagagagccggtaattgatacaatacaagttatgctttttgttgtaagctatagaagcagcttttttaaacaatgcatacatttaagttgatttgaaatttaaaatgctgtttgatgcaaagtgagaaggtatgtggtgacggaatagtcactactaatttatataaaggatggatagaacgatgaatgtagaagctgggatgaaagcgtatttaacagtaaaccgggaaacgccgattggttatatgttagcagaaggtgaagaagaaattttgctacataaaaatgaaacaacaagagaacttgctgaaggagaagaagtagaagtttttctataccttgatcagcatgaccgtttaacggcaacgatgcacttacctcttgttgaagaaggtgtttatgagtgggtcgaggtcgtagatgttaatccaggtttgggcgtgtttgtaaatatcggcatgaacaaagatatgttaattggttcaacagacttacctgcgctagaagatctgtggccagaagtcggaaacaaggtttactgtacaatgaagatttcaaagcgcggtaagatgtacggaaaaattgctacagacgatgtgatgaaagcaatggcattagatgctccgcccgaactttttaatcgtgaagtgagcggatacatctatcgcgtactgcgcgtaggttcatttattatgacagatgaaggatatgttggatttattcatgaaagcgagagacgcaaagaaccaaagcttggtacgtatgtaacaggccgcgtaattaatgtaaaagaagacggaacgctaaacgtatcgcttcttccgcgcaagcaagaaagcatggatgaagatgcacaagtactatacgattacatggaaagccgcggtggcgttatgccattttgggataaaagctatccggaagatattcgtgagcgctttaatatgagtaaagctgcgttcaaacgtgcgcttggtaaactgatgaaagaaggaaaagtttatcaagaagaaggatggacatattttaaaaaagaagaaaactaaaaggagaagccgctgaaaattcagcggcttctttttataagtgatcagtttttttagaaaatgaatgttttccaagctcacggttatgcttagcttgcagattcttttcgtgaagctttgcgttattatcttttgcttttttatcgttatcgctcgtttttggcattgtgatacacccctttttgatcgtacctttagaatgccctgacctctttaaattattcgatggtttcgtttaaaaagaagactgcaatcgtccctgggccagagtgagaacctatggctgcaccaataatattaataataaaatgtttggttccaaaacgttcttgaatcatctctttcagctgaagagctgtttctacatcatctccatggctaattccaatggtttgagaagagaggttttttcctcgctcttccattacatcaagcatgcgcttaaatacttttttacggccgcgtattttttcgattggaatcaattttccatcttccacatgaagtagcggcttaatattaagcagacctcctacaaaagcagaagctttgctcacgcggcctccttgagcaagaaaatctaagtcatcgaccgtgaaaatatgttccatatgcagcgcgtattgttttattttttctgtcatctctactagtgagagcttttgttgtagtaattgtgctgcataataagtaactactccctggccaagagatgcacatttcgtatcgattatctctaattggaaatcgggatacttttctaggagttcttctcgaatcatcattgctgtttgatatgtaccggataattctgaagaaaaagctaaataaacgcacgaatcacctgatttagctatgtcctcaaagacttcatacatagtagttggagccgcttgagatgtttttggcatcttgcctttacggatggcttcgtagacagaagctggctcaatcgtttggagatctaaaaattcttgattatctaggcttacgcgaagcggtaaaaaaccaacgttattttcttgaaaaaaggataaaggcaaatcgcttgcactatcggttaaaagtttaattgacataaatgtcaccttcctaattgcatttataaagtattaaatgagtttgatgtataaacattgagaagcgttgtatacgacatagtattagtgtataagcactttgaggaaaatacaatttttgaataagtttttttaattctgccaaatcgtacatactatatgtactaactattttaaagatgctgactttattcattttataaatgggtataggagagtaagaagttttaaaaaagcggaggtcggtcatttgaatatgtggcttgaaacaaaaaaagcgatagtcgtcttggtaggagcattattgaatgcgcttgcgctcaacttgtttttgatacctgctaatgtatattcgagcggctttactggagtagcgcagcttgtttcgagtatcgtgacagattacaccccttttactatttccactggagtgctgctgttgttgttaaatattcctgtaactattttagggtggaaaaaagttgggaagtcatttactgtttacagctttatcagcgttgctgcaacaactttgtttcttggaattattcctattcaagcactttctaaagacatcatccttaacgcagtttttggaggcgttattttagcggtaggggtaggaattacgttaaaatttggagcttcaactggtgggctcgatattattgccctgattttgtctcgagtaaaagaccgaccaattggcacttatatgttcatattaaacgcaattattatcgtgctagcaggtcttttatatggtgctgagaagtcactctatacgcttgtgacgctttatacaactactcgcgtcattgatgttattcatacgcgtcatgtcaaacttacagcaatgatcgtaacgaaaaaaggagtggagctaagaaaggcgattcatgccaaactcgtgcgagggattacggcggtaccggctaaaggcggctttacaaatgaagataaagaaatgctaatgattgttttgactagatatgaattatttgacttggaacgagtgattaaagaggtagatcctaaggcatttaccaatattgttcagacaacgggaatccttggtttgtttcgcaaggattaaaaaagtccaggtaattaattacctggaccctttgtattaatgtgtaccttttaagtcattagaaagctcttgaagctgagcttgttcttcaggagaagcattttgctgcgcatgagacagcatatcagctgcaatgttttcatcagaagctgcagacgtatgagcctgagacgtttgctgattttgatcagcagctcccaatgtattctgaagctgctgaagctgagcttgttcttcaggagaagcgctttgctgtgcatgagacagcatatcagctgctacgttttcactagacgtgtgagcttcaccgtgagcatgagactgaccgccttctaaagtgctttgaagctgttcaagctggctcttttcttcaggagaagcattttgctgtgcatgagataatatatcagctgccacgctttcactggacgtgtgagctttaccgtgagcgtgagactgaccgccttctaaagtgttttgaagctgttcaagctgtgccttctcttcaggagaagcattctgaacgatatgagacagcgtatcagacgtaatgtctgcgcttttctcttgtgaatgcgattctccatctgtatgatacgcttgatgcaatgagttttggaattgcttcagctgctcttgctcctcaggagaagcgttagaagcaatgctatttaatacgccttctgaaatatcaagttcaccgttgccattcttttgacggtgaggctgatcttctgaatggccggatactgcatttcgaatcgcatcttttacttggccaaaaagtgaatttttcataagttactgtcctccatgaggagtttggcgctgctgagcttgaaatgcttctgcctctgccatagtcatatgataaggaattcgttcatcatgtttttgaactgcgtctgcaccttgtttcacaaaacgttttgatcgattgcctctgcccatcataaattcctcctcgtaatataaataaaaccgacaccttaagaagtgtcggttatagtgtgtgctaaataaaaaaaatgatagcgataaaaatttaccttgcttttcaaaaatagctaagttataaatttaacgttttttccaaataataagcaataccatcattttcattcgattttgttacttcacgcgctagctgttttaattcgctaataccattttccatcgcgattccgtgtcctgcaaatttaatcatttcaaaatcattgtcttcatctccaaacgcaataattcgttcgcgtggaatttgataatgattagctacgcgctcaagacctaccgctttattaagtcctttttttacaatttcaacaacatgccaaggtgctccccagcgtctgtgctctagtacttctgcatgaacatctgaaaggtgagaacgtatatcttgtacatgttcttcatctgcgtgaattaaaatagacgttggatcgtgctgcagcgtatgacgcaaatcacccgtttgtaatttgggatcccctaggctaagtacatccattaattttcgatcttcaaaatgaagatacacatcatcttgtacttccgccatgatattgttgatgcgatagtcttgcatagctgtcacaatgtcatggacagtgcggcggtttaaaggctcgtgatgcgtgccgaaatcaggctgaaggggatgatggacaagcgctccgttaaagtttacgataggcgtggataaatctaattcgctgtaatacatagcactggaacgataaggtcttccagttgcaatcattacaatatgtccttcttgtttggctttttctaatacccgttttgttgtaggtgaaatggttttttcattcgttaacaatgttccatccagatctaaggcgattaagtgttgatcgtttctcatatagggctccttttaaattgaagtagttatacgattatattgaattctactaatattcatgcttgtattcccatattttacacaacttttccttatgagaaaagcagaacgattgacatgcaaaagctgtcttgttacggtgtaagacatagttattgattgcttacgataaattgtttcagggtatatttaatacgtgaagataattacggaagtaaaagaaaggagaatgaatatggataaacagttagaagacaaaatcatggaatcactagaagaagtaattgatccagagcttggcgttgatatcgtaaatttaggcttagtttacggtgtagaaatggaagaaaacaacacagtcatcgtgacgatgacgttaacttctatcggctgcccgctggctggtgtgattggtgaacaggtgaaaaaacaattaatttctcttgaagaagtagaaaatgtagaagtgaatatcacctttaatccgccatgggataaagatcgcatgacgcgctacgctaaaattgcattaggtgttcaataagaaaaaagccatcaacgatggctttttttcttattcaattctgcacaattccacagggcagtcctcacagtctatttctttctttaaaaaagaaagcttatgaatgataatttttccatctgccattgaaatcacttcgttttttcgcaactcagcgagcatgcgattgaccacttctcgagatgtcccgcatagattggcgatttcttgatttgtcaacgttacgtttaataaaataccatttggcttcattactccaaagctattagacatgcggatcagagtagaatagagggcacctttttttccgtttagaattaagtctctaaattttgtctgcattcgcttaatttgtagtcccatccacttcatgtactccatagaaagagcagggtattgtgctagttcgttttctaacacccgtttttgaatactgattgccgtacaatgttcaatagcttttgcttgaagcatatggggagtagatccgcaaaacagcatgacttccccgactaagtctcctgaactcgccagctgaagcgtcagctcgcgtccttctggtgtcactttacctacttgcacggcccctgacgtaataaaaaataaatgagttgaaatcgaaccttcttgaaagagaaagtcaccttttttaaacgaaattttatgatcaaagttcataaaaaattgctgcagctcatttgaaaaagaatccgttgtgatgttcatcatgttatcaccttttaattaaaatttttgcgactgctacttattaatctattaagttagagcagtctgtatatgctgtacgtccactagccatataaaaaaatatcatacggatgatttttatcgatattcttattatacacaaaaacaaccagtgttttccaaaactatctatgaacaatttctaaacaaaaatagaaaggtagttataaaaataaaaacttatgaataaataaaaatgtttaaaaatatagaataaagtgttggattttttaaatattcatttgattttatttttatacggtattataatgataaataattcaaatagatacgtggaaaaaggagttttaaaatgaaagaatacaaggtaggaattgttggagcaacagggtatggaggagtagaactgattcgtttgttagcgaatcacccacattttcatgtttatgcagtttattcatcctctcaggatgggacggaactagcggaagtttatcctcacctttctaatactgtatatacactgcaagatataaaccctaagaatatggctgaagaattagatttagtgtttacagcaactccgtccggtgtttctagcaaacttgtacctcaattaatagaagaaggaataaaagtggtagatctatctggagattttagattaaaaacagaagcgctttatgaaaaatggtacaaaaagcctgctgcagccgaagcgtttttacaacagtctgtgtatggattatcagaatggtttgcagataaagtcgaaagcagtacgttcgttgcgaacccgggttgttatccaacagctacactgcttgggctagctcccctcgttagtaaacaaatggtgaaatcaaactctattatcattgatgcaaagtccggaatctcaggagcaggacgtggtctttcgcaaatggctcattatgctgaaatcaatgaaaatatgaaaatatacaaagttaatcaacatcagcatatcccagaaatcgaatctattttagaaaagtgggatgaggaaattggccacgttacgttcagtacgcacttagttccaatgacgcgagggattatgagtacaatatacgctgaactttctgaagaaagctcagaacaagagcttcatcagctatatgtagatacatatcaaaactccccgttcgttcgcgttcgaaaagctggtgaatttccgtctactaaagaagtaagtgcatcaaattattgcgatatcggtgttgcatttgacgaacgaacaaagcgtgtcacgattgtttctgtcattgataacttagttaaaggggcagccggtcaggccattcaaaatgccaatatcatgatgggatttgaacagcaggcgggtatcgggctactgcctgtcttcccataaaggcaaagcatcactaatcacgataaaagcaggagggaacgtatagtgattacggttaaacaaacgaaagaaaagataaagaaaatagagaacggtacaattgtaacgccgctaggtttttcagcagatggcgttcacgctggtttacgttatgctaaaaaagatttaggagttattgtaagcgacgtaccagctaattgcgcagctgtttacacgcttaatgcctttcaagcagcgcctttagctgttacaaaagaaagtgtagcggtggagcagaagctgcaagcgatcgttgtgaacagcgcatgtgcaaatgcatgtactggagaacaaggattaaaagatgcataccaaatgcgaaatacatgtgcagaaaagcttaatatcctacctcaccatgtagcggtagcttctacaggcgtaattggagagcttctagatatggaaaaaattgttaaaggtattgggttattaagcccttcgtcgaacaaagaaaaagcagaagaatttcaaacggctattttaacaacagatacagtgatgaagtcagcttgctatgaaacaaaaattgacggcaaagtagttaccattggaggcacagcgaaaggatcaggtatgattcacccaaatatggctacgatgcttagctttatcacaacggatgctaaggttgaagcttcagtgctacaagatgcgctaggttctattacaaataaaagctttaatcaaattacagtggatggtgatacgtcaaccaacgatatggttgttgttttagcaaatggaaaagctgatcacaaatcgcttacaccagatcatcctgaatggaattcattttatgaagcactgcgcttgacgtgtgaagatttagccaaacaaattgcacgcgacggtgaaggagcaacaaaactaattgaagtaaacgtatctggtgctcatacaaacgaagaagcaaatgtgattgctaaacaaattgtgggctcgaacctagtgaaaacggccatgtatggagccgatgctaattggggacgaattatttgttcagttgggtacagcggagtagcgcttaatccagaaacagtgaatgtttcgttaggtaatatccagatgttagaaaacagtcagcctgtttcatttagtgaagaagaagcaaaggcttatctagaaaatgatacggtcgaagtctatgttgacttgcagcagggaaatggaattggcaaggcgtggggctgcgatttgacttacgattatgtcaaaatcaacgccagttatcgaacgtaaggagagagtgaaatgagcagtgaaaaaatcgtcgttgtaaaatgcggaggcagcattgtcaatcagttaacaagcgctttttttgaaagtattcagcagttaaaagcgagtggatatcagatcattgttgtgcacggaggcgggcctgatattcaagatacgcttaccaaacttcacattgaaacggaatttgtagatgggcttcgaaaaacgtccaaagaagcattagaagttgtgacgatggtattagcaggcaaggttaataaacagcttgtaaaagaactacaaaaagcgaacttaaaagcagtaggactatcaggaattgatggattattgcttaaagcagaggcaattgatatggaacgtctaggttacgttggggaagtaaagggcgtaaacgatacattattaaaacaactaactgacagtcagtatattccagttatttcttccattggagccgatgaagaaggcaatagctataacattaatgctgacgtggcggccggagccgttgcacaagcagtaaatgctgaaaagctgatgtttgtaacggatgtaaaaggagtgctaaaggatggagcattgcttcctgaacttacaaagtcagagattgatgcacttattgaagaaaaagtaatttacggcggaatgattccgaaagtaacatcagcggtaaatgcgttatctcctttgcttgaagaagttcatattattagcggaactgatggatttttagataaggaaggaaagctgattggtacagcaattaaatatagtggaaaaggtggagaagatagcgatgagttcattgtttccaacatatcaacggtttgatatccatgtggaagaggcgcaaggaacaaaattaatagataacaaaggaaatgagtatttagattttatttcaggtatcgctgtttgtaacgtaggtcatcgtcatcctgatgttcaaaaagcggtcgaagagcagttaaataaagtgtggcacgtgtcaaatttatttcatcaatcgattcaagaagaggtagcaggtaggcttgtgggacactcaaacggtgatgcggtatttttctgtaacagcggtgcagaagccaacgaagcggcgattaaattagcgcgcaagtacacacaaaaacacaaaattattacatttacaaaatcatttcatggacgtacatttgctacaatgacagctacagggcaggcaaaaattcatgatggcttcggtcctcttgttaatgagtttgtttacgtgccatacaatgatgaagaagcattaaaacaagaaatggacgatagcgtagcagcaattatggttgaagtcattcaaggagaaggcggagtggttccaggaaccgaagcatttttaataaccattcaagagctgtgtaaaaagcacgaagcactgtttatagtcgatgaagtgcaaactggaattggcagaactggaaaaccatttgcttatcagcattttaaagtttcaccagatattattacagcagccaaagggttaggaagcggaatgccggttggtgcgatgattggaaaaggctatctcaaagaagcgtttggacctggtactcacggaacaacctttggaggaaacccaattgcattagcttcagccaaagcaaccttaaacattatttttaatgaagcatttttggcagaggttacagaaaaaagcctttattttaccaatgctttgaaaaatagtgtagcagattattcatttgtaaccgatgttcgcggaaaaggttttatgattggaattgaatgcggagaacatcagtcagcattgcttgcagctatgcgtgaaaaaggattgctagcactgggagcaggaccgcacgtagtacgattgctgccgcctttaactgtaacaaaagaagagttggaccaagcgattcatatcattgaagaagcgtttagccaaacaaaaattacttcataatacaaatttttttgaatatgtttgtataaaaattctgttttataaataattattcgaagagggatgcacaatgaacggatatttacacttagcaaacggcgattcgttcgccggacatattgaacatacagcaacgcaccaggcagaaggagaaattgttttctttactggaatgactggttatcaagaagttgtgactgatccatcttacaaagatcaaattatcgtctttacgtacccgttaattgggaactatggtatcaatgaaaaagattatgaaagcaaaaagcctcacgtagcaggcgttgtcgtatacgaatgttcagatgaagggttccattacgaagcgatgtacagctttaaacaatatttaaagaaatggaacattccgcttattacacatgtggatacgagagcggtcgtaaaacgaattcgaaaagaaggtacgatgcaatctgccttttcgacatctgctgagccgccagcatttactgctgaatgcgatggatatgtagtaaaagaagtatcaacaaaagagccagttacttacggaaacggtgaaaaacacgttgtattaatggactttggctataaaaaatcaattttacaagagctgttaaatcgagagtgcaaagtaacagttgttccttattctacaagctcttcaaaagtaaaagagctgcagccggatggcattgtcttatcaaacggacctggagatccaactcaagtgagcagtcagctggatgaattaaaagaaattatttcatcgtatccgactttgggaatttgctttggacatcagttgattgggctcgcttttggggcacaaaccaaaaagctggcgttcggtcaccgaggagctaatcagcctgtaattgatttaacaaataacaaagtgtgtatgacgtctcaaaaccacagctatgtcgtagacgaacagacgattatgtctacgccattaaacgttcgatttaaaaatgtgaatgacggatcggttgaaggtttaatgcataaagaccttcctgttatgtcggttcaataccatccagaagcacatcctggaccaagtgacagcacgtatatctttgatgaatttatgacgaaagtacagcaagtagggagcggaaaagtatatgcctaaagaccaaacgttaaaaaaaattttagtaatcggatcaggaccaatcgtaatcgggcaagcagcagaatttgattattcaggaactcaggcatgcttgtcattaaaagaagaaggttatgaagttatcttaatcaataataatccagctacaattatgacggacactcacgtagcagatcgaatctattttgaaccattaacagtagactgcgtagagaaaattattgcaaaagaaaagccggatggtttgttagccacattaggtggacagacgggtttaaacttagcccttgagcttcacgaacagaacattttgccgaaatacgatgtgaaacttttaggaacaccgattgaatcaatcaaaaaaggtgaaagccgcgaagagttccgtgcattgatgaatgaactgaatgaaccggtgccggaaagtgaagttgtcacaaaagtagaagaagcgttagcttttgccgagaaaattggttttcctgttattgtacgtcctgcttatacgttaggcggaacgggcggaggaattgctcattctatggaagagcttgaaaagctttcggcgtcaggtttgcgtgaaagtgctattactcagtgcttaattgaaaaaagcatcgctggatttaaagaagttgagtacgaggttatgcgtgacgtgaacaatacgtgcatcacaatttgtaatatggaaaacatcgatcccgtaggcgtccatactggagattcggtagtcgttgctccttctcaaacgttaacagacgtggaatatcaaatgcttcgctctgcttcagttaaaattatttcatcgcttggcattattggaggttgcaacattcagtttgcgcttgatccaaaaagcaagcagtactatctaattgaagtaaatccgcgtgtgagccgttcgtctgctcttgcatcaaaagcaacgggctatccgattgctaaaattgctgcaaagctatcggtaggctacacgcttcatgagttattaaatcctgtgacaggagacacgtatgcaagctttgaacctgctcttgactatgtagtagtgaaatttccaagatggccgtttgacaagtttttctacgctgaaagaacgcttggtacacaaatgaaagcaactggagaagtaatggctattgaccgtaactttacacgtagcttccaaaaggcattatcttctttagaaattgacttacaaggattagaagtagaagaactgcaagaactttcaacggatgaattaaaaagcaagctaggcgaacaaagcgatgagcgtatttttgttatccttgagcttttacgccgcggcacaacgcctgagtatatccatgaagtaacacaaattgattatttctatttaacacactttgcacagctgattaaaatggaagcctctttaaaagaagtacgttttgattccattacagctgaacactttaaacaagtgaaggagcatggttttacagatgcgtatctagcaaacgtatggaatgtgccagaacttgacgtaagagcgaaacgtaaagcactacatattacgccaagctataaaatggtggatacatgtgcagcggagtttgaatcttcaacggcttatttctactctagttactacggcgaaagtgagattgaaccatcaacgaataaaaaagttgctattatcggttctggaccaattcgtatcgggcaaggagtagagttcgactacagctctgtacacggtgtgctagctcttgaaaaagaaggatacgaaacgattttaattaacaataatccagaaacggtaagtacggattttgaagtagcagatcgcttatatttcgaacctgtaacagtagaagacgtattaaatgttcttgatgctgaaaatgtgaaggatgtaattgttcaatatggaggtcaaacagctatttcgcttgttaaagggctagaagaagctggcgtcaatttactagggattacaaatgatgtcattgatgcacttgaagatcgtgacctgttttacaagcttttagatgagtgtgatatccctcatatcccaggtgaaatggcgaaagacgctaaagagcttgtccaaaaagcaaaagatatgggattcccattactcattcgtccttcttacgtaattggcggaaaagggatgctaaccattcaaaacgaaacagagcttcaggcttgtttaccggctattaaagcgtctcatttcccaatgcttattgatgcttacttccctggaaaagaagcagaagttgatgttgtagcagacggaaaagatgtgttgattccgacaatcgttgaacatattgaaaaagccggggttcattcaggagacagctatgcgcttttaccagccaaaacagtagaagcagcacataaagaaaaaatagtgagctacgctcaaaaaattgtaaacaaacttcaatataaagggattatgaatatccaatatgttatttacaacgatgaagtctacatgctggaagttaatccgcgtgccagccgtacagtgcctgtagtaagcaaagtatgcaacacgccgcttgtttcgctatcaactcaaatattgcttgggaaatcattgtcggaaattagtgaaaagctaggtttattgccagatccagcttacacaaccattaagtttccagtgttttcgacaagtaaattatcaggagtcgatcctcttgtgggaccggaaatgaagtcaactggtgaaggaattgcgatttcttcaacgattgaagaagcagcaaaaaaagtattccatcagtatgtgttaagtaaaaaaggtgctgcagaagtgtatatcaacggagaagcgcaaggtcttgaagcacttgtgcaaagcgcgggcttaactcttgttaaagataaagaagttagtgaatgggtgaaaacgaaagaagctttattatacgtaagcttgcagcctgaagataaagaaagccgtatgtcagcgttaaaacacggtttaatggttatgacggaggcagaaacggcttcgctatttttccaatcgttccaagtcgatgaatatcaggtttcatcactacaagaatggtttcaaaaaactaaaaaggaagtgacagtatcatgagtacagtatcggtaaataccaatttaaaaggaaaagatttacttacgcttaaagatttatcatcagacgatattatgtcacttttggagagcgccatcgagctgaaagaaaagcataaaaatggtgaaatcgtaacatcgttaaaaggaaaaacgttggggctcatttttgaaaaatcttcaacaagaacaagagtctcatttgaagcaggaatgatgcagcttggaggaaacgccctctttttaagcagccaagatttacaaattggacgcggagaaacgattgctgatacagcacgcgtactatctgaattcatcgatgctataatgattcgtacgtttgaacacagcaagatcgaagagcttgcagattacgcatccattcccgttattaatggtttgacagatgattatcatccttgtcaggctctagctgatttattaacgatttacgagcacaagaaatcgttcgaagggctaaaagtagcttatgttggagacggaaataatgtagcgcattcgttaatgattgcatgtgcaaaaatggggatagatatttcaattggatgccctgatggttatgagccaaaagactttgtaacagcttatgttaatgaaatagctgctacaacaggtgccaaggttatgattacaaaagatcctgtagaggctgtgaaaaatgccgatgctatttatgcagacgtatggacaagtatgggacaggaagaagaagcacagcagcgcttgaaaatatttgctccttatcaagtaaatgaagaactagctgcctatgctaagtcagactatttatttttacactgcttgcctgcgcatcgtgaagaagaagtaacagcaagcattattgacggcccaaattctgttgtctttcagcaggctggaaatcgtatgcatgtacaaaaagctttgctgcaagccattttagcttaagagaaaaaccctttctgagaatatcagaaggggttttttgtttaaagggaattaattgagggaacaccacttgtatactaaacagaacgaaaggtgatttatgatgaaagtattagttgttggagcaaacggaacaacgggaaaacaagtggtagaaaaagttgcaaacagcaagcagcacgaagcttatgcgatgattcgcgacgaaaagcaagcagacgcgttaaagaagctaggtgccaacgttgtgcttgctgacttggagcaagatgtttcagatgctttaagaggtatggacgctgtcatatttgcagcaggttctggaggacataccggcgacgaaaagacaatcgctgtagatcaaaacggtgctaaaaatatcattgatgaagcaaaaaatcaaggtgtaaagcgctttgttatgttaagttcaatgggaacagacgcacctgaacaaggaccagaaggcttacagctttacctccgtgcgaaagcgatagcggatgaatacctaaagcagtctaatctacagtatacaattgtacgaccaggaactttatcgaatgatcaagctactggcaaaattgatatcaacaatgatattgaagataaatctcagacggttccccgagcagatgtagcagcagtgcttgtagaatgtctaaacgaagaagctacgataggaaaaacgtttgaaatgctagctggagaaactaaaatcgaacaagctattaaatttactcattaatataagagggcggatctaaaggtctgctctttttctctgcctaatatgaaaacatctccattatgaaacagaaatcttaagggaatagtataggagaacatttcatttcaggaatgaggaggcaggacaatgggacaaaatcgtcatttcacaccgggtcaaaaagctcctaataacggagtgtatattgaaattggtgaaacaggaagcaacgtaaataatcctcaaaaggttaaattaaaagcaggagagcgttttccagagacggccaacgatgatcgccactggacgtacatgcgcaagccttaaatagtaaaaaataaagaagccattctaaattgaatggctttacttgttttcctattgctgggtataatgaaataaaggtcaataaaggtcaaatgtatcgaaggaggatgttcaatggatataaataaaatgacccaaaaattgcaagaaggcgtgatggaagcgcagtccgaagctattaaacgaaatcagcaggaagtggatattgctcatttgctttatacgctcattcatcagcaagatggtattgctcctcgcatattagatcatttacatatagatcatcaatcttttcagcagcaggtaaatcaattgcttgcgaaaaaaccagccgttacaggaagtggtgctgaagcagggaaggtttatattacgaataaacttcagcagctgtttgttaaagctcaagaagaagcatctcgtctgcaagatgattatgtttcagttgagcacatctttttagcattagcacaggaaccgtcttctagtgaatatggcaagttattttcaagtcacggtataacaaaaaaagctctgcaagatgtgcttaccagccttcgaggaaatcagcgaattacaagtcaaaatccggaagtcacatatgaagcgttagctaaatatggaagagacttagtagcagaagtacgagcagggaacattgatccagtcattggacgagatggagaaattcgccgcgttatccgcattttatcgcgaaaaacaaaaaacaatccagttttgatcggagaacctggcgttggtaaaacagcgattgttgaaggtctagcacagcgtattgttcgccgagatgtgcctgaaggattaaaagataaaaccatcttttcattagatatgggagctttagtagcaggagcgaaattcaggggagaatttgaagaacgtttaaaagctgttcttcaagaagttaagaaaagcaacgggcaaattcttttattcattgatgagcttcatacaatcgttggcgcaggccgtacggatggagcgatggatgcagggaatattttaaaaccaatgcttgctagaggagaacttcactgtataggagctacaactcttgatgagtaccgtcagtatattgaaaaagatccagcgcttgaaagacgctttcaacaggtgctggttgaagaaccttcagtagaagatacaatctctattttacgtggtttaaaagaacgatttgaaattcatcacggtgtaaacattcatgaccgagcgattgtttcagcagcggttatgtctgatcgttatatctcagatcgctttttacctgataaagcaattgatttaattgatgaagcatgcgcaactattcgaacagaaattgattcgatgccatcagaattagatgaagttacacgacgtgtcatgcagcttgaaattgaagaagcggcattaagtaaagaaacagatcaagcaagcatcacaaggttagaggcaattcgaaaagaagtctctgatttaagagaacgtgcagatacaatgaagctgcagtgggaaaaagaaaagcagtcgattcaaacggtgcaagatgtccgggagcagcttgaaaaagcgaagcgagacctagaagaagctgaagggaaatatgatttaaataaagcagctgaacttcgccacggacgcattccagctcttgaaaaagaactaaaacagctggaagaaacagctgctgaaaaagcacaagaaaaccgtttgttaagagaagaagtaacagaagaagaaattgctgaaattgtaggaagatggacgggaattccggtatcaaaactagttgaaggggaaagagaaaagctgttgaagcttgagtcaattttacagcagcgtgtgattggacaagacgaagccgtatccttagtgacggatgctgtgattcgcgcacgggcagggattaaagatccaaaccgtccgattggatcatttattttcctaggacctaccggagtaggaaaaacggagctagccaaaacgttggcacattctttatttgacagtgaagaacaaatggttcgtattgatatgtctgagtacatggaaaagcacgcggtctctaggcttataggagcgcctcctggctatgtaggatacgaagaaggcggccagctaacggaagcggtgagacgcaagccttattcagtcgttttgttggatgaaattgaaaaagcacatcccgaagtatttaatgtgctccttcaaatactagatgatggaagagcaacagattcaaaaggaaaagtcattgattttaaaaatacagtcattattatgacgtcgaatattggttctcaatttttattagacggtttaacaagtgaaggcgagattactgaaaaagccagagagcaagtgatggctcaattaagacagcattttcgtccagaatttttaaatcgagtagacgacacgattttattcaaaccgctaactgttcatgaagtaaaaggaattattgataagctattgcttcagcttgaaaagcgtttatccgatcgtcatatttcgttaacgttaacagaagaagcaaaaaattatattgcagcctccggatttgatccggtatacggagctcgccctttaaaaaggtttattcaaaaatatattgaaacaaaaattgccagagaattaattgcagggcaaattgaagattatagtcaagtgacagttgatgtaaaagatgatgagtttgttgtcagcgtataagttttctaaaaagaccattcatgataaattgaatggtctttttttgctatcaaaagcagctcttcttttaaaataaataaaaagaaatgaaagaaaatacgtgagagctaagcataaaaacttattcagttttaggttgtagaatatatctaattcatttatgataatacaaaatgggcaaaggagcatgaatgagcacatgaaggaccgtatagagcttatatatgacgaagcatacgattttatagatcaggcattaactaaaataagagcactggataaaaatgattttcaagctgaaaatgaagaagtgcaggaaaaggcagaacggacagagtttgcacttcaagctgcacgagatattttagaaaatatgattatcccgggtaaaaaattgacttttatttacgaaaagggttctgtggtagtagaaattcccgataaaaaataaaaacgacttcctttgatggaagtcgtttttattttggcaatgcaaagtgctcatcaatggatgcatcactttttcgatactgcccgggtgtcatattggttgttttgcgaaatacttttgttaaataattggcatttgcatagccgacgttttcagcaatttcttcgattgaatatttggtttgatgcaatagctcggccgctttttgaatgcgaagcttcgttaaatattgaatcggcgtaatcccagttgtttgtttgaataaccggctaaaatgatagcgagataaatgagctgcatctgccatttcatccggaccgatttcttcatgataatgattacgggcaaataaaatagagctaatgatactttcaggccaatcttctgtaaaactgtccatgcttttaatatattggtacagctccattacaaagcggtaagataagcttgaggcatgaaatggatctgctatatgtttttcacttgcccgcttatatatttgagcaagcagctgaacaggtgctgattcaggatgaaacctaattacaggggagtgggttgactgaatataatcccagcatttttgtacttcatctccgtataatgtaagaaaaataaactcccagttttcactttcctttggtaagtaatagcgataatttccaggtatattgacgatgaatgctttcccagcatccactttatattcttgtccatctatttcaatcatcccgtacccagaaaccgtgtattgaaaaatatatttccctacgtcttttcgctgatttccgctccagttataaaggggagagaaaacttcatcccacccaacagaccatagctgcgcaacttcatttgtgcgggattctaaaaacctgtatgcgtacgttgaatattcttgagcttggaaatgtgagagcaaattttcaccttctttttgaaataaagtagtacttaattcttactttaacgtaatcgctttcatttttctataattttttgaaaatatcgtgattatttttagggaatgtctctaaatctattattttcttataatttgcaagtcaaggctcacataaagataacatctttttggcgcaagagtagttcatcgtcagttcaaaagaatcatttttaaagggataagcaaaaaagtaccgattatcgatagtaattttaccattgaggcaaggaaaattggactttacaatgtacatatgaatccgtttccaaaaaactacttaaaataggtgataataaatgctgggaaaattaatcgaagagttcaaacaaatatttcattcgtcagaagctattcgctgcttttttgcgccaggacgtgtcaatttaattggagaacatactgattataatggagggcatgtttttccttgttcattgagtataggaacgtatgcggtagtacaaaaacgtcatgatcgaaaaatacgtatgtattctaaaaacttctctgaagcaggcgttattgaatcctctttagagcaattaacgtacaaaaccgaagatgattgggctaattatccaaaaggagtaatggacacctttaaaaagcacggatatgatcttccttttggttttgatattttgtttttcggcaacattcctaacggagcagggctttcatcgtcagcatcaattgagttagtcacatgcgtatttttaaataaaattcttgaattgaatatcgatatgatgaaccttgtaaaaatggcgcagcaagctgaaaatgaatttatcggcgtaagctgcgggattatggaccagtttgcaattggaatgggaaaagaaaatcaagccgtattgttaaactgtcaaactcttgaataccaatatagcccgctgcagttaacagatgctgtgctcgttatttctaacacaaataagcgaagagggctggcagattcaaaatataatgagcgccgcatggagtgtgaaagagcgctgtcagatttacaaacgtcactttccattaattcgcttggtgatttaaccaaagaacaatttgaaaagcataaatctttgatacaaaacgacgtagattgtaagcgcgctaaacatgcggtatatgaaaatgaacgcacaaaagaagcggttgctaaattgcaaaacggtgatttaaaagggtttggtcaattgatgaatgaatcgcactgctcactgcgagatgactatgaagtaagtgggaaagaactagatgctcttgtagaagcagcttggttgcaagaaggtgtgattggatcacgcatgacaggggcaggctttggcggctgtacaattagcatcgtacaaaaagcacaggttgataggtttgttgaaaaagtaaggaatacctattatgagaaaacaagtttagaagctgaattttatgtggttacggttggagaaggagcgcgtgaactcacactagaagcagtataagagaaaacagatagagaaaggaacgagtgtatgtcagttaacattcatgaagaaatcacccgacttattcaatatggtttacaaaagaatctattaacaaaatgggatatagatgtggtgagaaataaactgctggaagtgttaaggatcgatgaatgtattatagtagaagtcaaagaagaacgtctggaacatccagctgctattttagacaacatgcttgattgggctgcagaaaacaatcgaatcgccgagaattctatcacgtatagagatttattcgataccaaaataatgggatgctttgcaagcatgccttcagaggttaatcggacattttatgatcactatcagcaaagccctcaaaaagccacaagctattattataagctgtcaaaagacattcactatattcgaagagatcgaattgctaaaaacgaaagatgggtaacaaacactgactttggagaacttgaaattactatcaacttatcaaagccggaaaaagatccaaaagcaattgcagcaagcaaatcattgaaggaaggcaactatccgctgtgtcttctctgtaaagaaaatgctggttatgcaggtcgtattaaccacccagctcgtcaaaatcaccggattattcctgtggaattgcaggaagagctgtggtacatgcagttttcaccttatgtttattataatgaacatgccattgtttttgcgagtgaacatacacccatgcatatttcaaagcaaacgtttaagcggctgcttgccttcgttgaacaatttccacattattttttaggatcaaatgcagatttacccatcgtaggaggatctattttaactcatgaccactttcaaggcggctatcatgattttcctatggctaaagcaaaaataaatacattgttctctcttaaagcatatccagacgtgaaagctggaattgttcattggccgatgtcggtcgttcgtcttcaaagttcgcaccttgcaccattagtggaagcagcggatttcattttgaagaaatggaaatcatatagtgatcaaagtgctggtattttagcttttacagatcaaactcctcacaacacggtaacgcctattgctcggaaaagaggagatttgtacgaattagatttagtactgcgaaacaatcgaacaaacggcaaacatccagatggcatttatcatccgcatgcagaagttcatcatattaaaaaagagaacataggtttaattgaagtaatggggcttgcggttttacccggtcgtttgaaagacgaaatgagtctagtggccaaagggttagttcagaataatctgagcgagttagccagcagacatgatcaagtgaaaaaacacgtgaagtgggccgaacaaatcaagaaaaaatatccacatattgaagcggaaaatgtccaaagcattctccaacaagagctcggtttggtctttgcgactattttagaacatgcaggtgtgtttaaacaaaatactgaagggcagctcgcattcagtcgttttatgaattcgttaaatgaagcgtaaatcattaataaaaacaggcagctcgtaatgagctgcctgtttttatacagttagggcatgctgttttaaaaggatatacagagcctgtgttcctttattatcatcgccttgtttttcgagctgttcataaagcgattttgctaattttagccctggtgtatacagctccatttcttcagctgattcaatggcaatcttcatatctttaatgaagtgtttaatataaaaacctggttcgaagtctcctttaatcatgcgaggagctaaattacttaacgaccagcttcccgctgcgcctgtttcaatactttttagaacggtattcggatctaatccggctttttctgcataaagtatagcttcgcatacacccatcatattagaggcaatagcaatttgattgcacattttggtatgttgaccagcaccagcgcttccttgaagaacgatatttgtccccattttttcaagtataggcgtaacggcagagaatgcttcagaatcgcctcctaccataatcgctaatgttgctttctgagctccaatatcgcctcctgaaacaggagcgtcaagcgcatgaatgtgcttctcttttgctgcttgatgtatctcacgagcaagtatagggctcgatgtcgtcatatcaattgtatagcagcctttctttgcattatgtataatgccgtcttttcctaaataaatctcttttacatcgtgagggtagcctaccatggtgataataacatcagattgttcggccacttcttgaacggtttctttccatttggcccctctttcaagtagtgcttgagcacgggtttttgttcgtgtataaacaaggacttcatatcctgcgtcaattaaatgcccggccatgctttgacccataacgcctgttccgataaaaccaatcttttctttagtcacagcagtattcactcctacaattaatagtttgattattctaaaattatacagttaaagtctggtataatcaatgattatgaatgtatataaatgtaaaaaagtagcttcaatcattcgttttgaatacgagttaacgaaagaaattgctgagaagtgcttatgccaaaagataaaaaaagcgctggctttacagccaacactttttagtggtgattatttgctggtttattcggtacacccagttctccaatcaaaattacaactagcgtgaaaactactccaaggatggaagcggttgcgaaactgtaagtaccacccgtcattgcagagattacgtacactgccatattcattagtaaaaagccccaaacaaaagccattacgacacgcattctattcacctcgtttatagtacagtttgatttcattttagcatatagcagtcaaataagaaattgaattttttatgaataaataaggggcgtgttcccatatagaaacaaaagagcaataagtcagaaataggcattattctagtgcgctttttgatggttctatcatacactgtatggaacaactagtaagttacggaggaagagctatgatacatcgacgcttttttagcttagatacgcaatggaatgtcgtacatgtccctgaacgaccgaatggtttcggtgtgttagtattgggtgataaagatcattttgttgaaagttcaactagcttatggattcagcacggcggaaggtcacagctgttgcaatgtttacaagatgaaggatacacagtattttattccaatttatatggccgtcattgggggtctcctgaagcatatcaccttgcaaaacaactttatcatttagtaatgaaacaagaaattttaaataaacgaattcatattttagctgaaggaatgggggctctgttagcgctgcagctaatggaaaatgacgggaatacgttcattcgatcagctggtttactaaatccatgtattgatcttcatacgcatgcagaacatgaaaaaaacaataaattcttttataaacaattcatgaaggacttgactcaagcttataaagtggagcgcaagcaagtatcaaagctaattaaggagtacccttctgttacagaattaaaatcaacgctgcccgtgaagatatggaccgcgcctaatgcctctactcattatccaattgcacacagtaaaaaatatgaactacatcgtgaagaacttcactctccgattatgctttcactttatttgccggaaaaaaactatttgtttgaacggtcccttctccaattttataaacagcatgaaaaagtgttataagcaaagcttctatgattatacatatcataggggctttttgtataagagataaaaggaaaaaaagagttcatgatgcttttacagataaacttctttgaaataaggaatgagtactctctataactatagggctttaagctttttgttgaataaatgatgaatgaagaattggaggaagcgatatgggaaatgtagtagtaataggggcaaaccgctttattggttttcatttatgtatggcttttttagacgaaggtacagaagtaaaaggatatacacattctgctcataaagaagaagatgatttgcaggaagagatgaaatttttcttagggcgaaacgctaattatgcatcgactgaagtaggagagtcattagatatgattacctcagaaacggatattgtctacttcacgtatttcgatggaggagatttttatcatcctgattttttaagacaagaaatgcaaaaagcgcagcaagtgctcattcaagcgcttaacaaatgtcgtcaattcaacattcgatttgtgtttgtttctaccatgcgcgtatttggagaccagcagcgaaagattgaagaaacaacgattccagaaccggacagtagtgaaggaaggctatacgttcattttgagcgaatgatagagaagtataaagatgatgaatggcccattataattgtcagaacgccgactctttacggaccttggcagcctttgtcaatgtgctattctaaaaatattgccgggtacgaagaggcttttaacattatggaaggcacggattttattatttatattgaagatgccatcagtgcacttagacgctgtaaaactgctgcatattcatatgaagtggttcatttagttgaagaaaagttacagtcttggagcgcaggagcaaacattactgatatggaggtgaaggaagaagcggctcaagaaaaatatgaaatcagcaggaaagcgaaagaactgctgcatttttcttcaagagtaacggctaaagaaggcatttatctgcaaaaaaaacatatgagaacattccttttacctcttcattaaaaggagaaagttgtacttatagaatagattcgctaatataaggaggaataaatgttttaataaaggagatttcactatggatgagcaaaatatgcaattcatgcaaattgcaatgaagtacttgccagaagcaaagcagatcttagatgaaacaggcgttgagttatcgatggaacacgtgcagccggtattgacattactaacaaaagtaatgaacgatgcctatgagcttggcaagcaagatgcattagctgaaaatgaaaacaactaaagaaaacagctcggtagaatccgagctgttatttttgtttggaaaataaatcgactaaaggggcaaactgtttaagcagaggagctagttcttcgacggcgagtacaatttcatcgatttgtttaaataatctttcccactcctctcgctctctttcttctcttgattttctgcgcccagctccaaacatataatcagaaaaagcttcatttctttgtcttcttgccatgatactcattcctttcactattttaatggtgggtaagttcttacctaatgccccatactagagtaagagggtcccgtatgattactatatgtagcatgatagatacctgagtaggacgaacacctatatagacaaaaaataaaaaatgaagtaaaattagtaccaactcataataattgattatataatcgataaatgaaatgacggatataggttttataggaatataagccttttatttaaaggagaggttgatatgaacgctggtgttctaggaattggacgttatgtaccagagaaagttgtaacaaatttagatcttgaaaaagtaatggatacatcagatgagtggattcgtacgcgcacaggtattcaagagcgccgaattgcagctgataacgaggacacatctgatttagcttataaagcagcagttgaagctttacataaagctaacgtcgaggcagaagatattgacatgatcattgttgctacggtaacgccagatcaaccgtttcctacagtatcatgtatgctacaagaaaaattgggagcaaaaaaagcagcttcttacgatgtgagtgccgcatgtgcagggtttatgtacggcatgattacagctaagcaatttattgaaaccaatgcttacaagcatatattagtggtcggtgtagaaaagctttctaagattacagattgggacgaccgtaacacggctgttttattcggagacggagcaggtgcagttgtaatgggacctgtatcagaaggacgaggcattttatcctttgaactagggtccgacggtacgggaggcaagcacttgtatcaaaacgagcttgatcatattgtcatgaacggacgtgaagtatttaagtttgctgttcgacaaatgggggaatctgctgttaatgtaattgaaaaagcaggtttaacaaaagaggatgttgattttcttgtacctcatcaagcgaatattcgtatcatggaagctgcaagacagcgattagacttacctgaagaaaaaatgtctaaaacaatccaatactacggcaatacatcagcagcatcgattccaatttcaattgttcatgagcttgaagaagggaaaattcaagatgatgatttaattgtaatggttggcttcggaggcggcttaacatggggagctattgctattagatggggaaaataacactacatttttaaagcaactgaaggagatgaatgtacgatgaataaaaaacgtgtagttgtaacaggacttggtgggcttacaccaattggaaatgacgtggaaacagcttggaaaaacgcagtagcaggcgtgtctggcgttggtcctttaacaagactagatgcagatgaattcccggctaaagtagcggctgaagtaaaagattttaacgtggaagattttattgaccgtaaagaagctcgtaagatggatcgctttactcaatatgcaatggtagctgcattggcggctgttaaagatgcggatttgactattacagaagaaattgctccaaacgtcggcgtttggattggttctggaattggcggtatggaaacgtttgaaaaccaatattcaacgttattagaaaaaggtgcccgccgtgtaagtccattcttcattccgatgatgattcctgatatggcaacaggacaagtttctattgctttaggggcgaaaggcgtgaactcttgtacggtaacggcatgtgcaacaggtacaaactctattggtgatgcgtttaaagtaattcaacgcggagatgcagacgtgatggtgacgggcggtacggaagcgccaatcacgcgtttatctattgctggtttctgtgcgaataaagcactttctacaaatccagatcctgcaacagcatctcgtccgtttgataaagaccgcgacggcttcgttatgggagaaggtgcgggtgttattgtgcttgaagagcttgaacatgcactagcgcgcggcgcacgtatttatgctgaaattgtgggctatggttcaactggagatgctcatcatatcacagcgccagctccaggaggagaaggcggcgttcgtgcaatgcgtcatgcgattgaagatgcgggcctacagccaagtgatattgattacatcaatgctcacggtacaagtacaggatacaatgataaatttgaaacaatggctattaaagaagtatttggtgaccacgctcaaaaagtagcaattagttcaacaaagtcaatgactggccacttgttaggagctgctgggggagtagaagctatctttagtgtgaaagcaattcaagatggtattcttcctccaacaattaactatcaaacacctgatgaagagtgcgatttagactacattccaaacaaagcgcgtaagcaagaagtaaaagcggtgctaagcaactcacttggatttggcggtcataatgcaactatcatctttaaaaaatacgaagcataatgaaaaattctaggctgatgcctagaattttttttatttttaataaccaaaagagtagctgtgaacatatcatgaaacaaaaggatgaagaaagtgaggggaaaacatgccgattgtttcaacttctacttggacggagccgaaagaaataagccgttatcttgcgcgctattttaagaagttaaaagaaaaagaatatatggaattactttttaactatggaatgtgtccgccttctttaatgtttataaaagaattagaagaaatgaagaaaaggcaggtttggaagaaagttaaagcacattatgagaagcttaaaaaagcatggaatgggcccgatgtagcggtgctagtgcttccaagcaatcctagaaatcgaaaaatgcagcgtgaatttaacggaagagcaggtgtcgcttttaccgataaattatttgtgtttatgacaagtcatacatccgatgaagaaatgttagcggtacttacccatgaataccatcacgtctgcaggctaaaagccattaataaatctgatgaaacgattactttgttagacgctatgatgatggaagggttagctgaaagagctgtagaggagtattgtggtaaaaaatatttagctccttggacaaattattataccattgaagaagctaaaaaaatgtgggaaaagcatgttaaaccttattacaatctgcgcgctgacgaaaaaaaatatgatcaactgttatttggacaaaattggtatccagaaatgatgggctacaatattggttatcatcttgttacttcatgtatgaagcctcacactttaactactacccagctgcttcctcttagcaccaatactatcttaaaaaaatctgcgttccaactgtaaaaaaacaagttctatatacctaaagttaaaaatagtaaattttatcctattttcaacgaaaaattaggagatttatgcgttaaattactgaagaggtattcagaaatgattattttgaaaataaaaaatataattaattttcaaaatatattgattttgtaatgaaattgtaataatatcttattcaaatataacaatttttagaaaaatgaggtgtgcactataaatggataaaaaacccgtcgaatcaacacctttactagaagtgaaaaatttacaaactgctttttccattaatgattcctggcataatgctgtggacgacgtgtcgtttcaagtcggacgaaagcgaattgtaggagttgtcggagaatccggctgtggaaaaagcgtattgtctttatccgttattgggttattacctaaagtgaatagtcaaattagaagcggaagcgttttatttaacggaaagaatcttacgcgcttatcagaagatgagatgaatgatgttcgggggaaagacatctcaatgattttccaagaaccgatgacatcccttaatcctgtgttaaccattgggtatcagctgcaggaagtattgtttaaccatatgaatatatcgaaagcggaagcgcgtgaaaaaagcattgcgcttttaaaaagcgttggtatttcgagatccgaaaagctcatcgatgaatatccgcatcagctgtcaggaggaatgaggcagcgtgtcatgattgccatggcggtagcttgtcagcctaaacttttaattgctgatgagccgacaacggccctagatgttacggttcaagctcaaattttagagttgctaaaagaaattcaagaaagcaatgatatgtctattattatgatcacacatgatttaggagtagttgctgagatgtgtgacgaagtgattgtcatgtatggcgggaaaattgttgagcatacagatgttgatacgttattttatgccccgaaacatccgtacacgaaagcgcttcttcactcaattccacgcatggaagatgatgtagaagtattaaatacgattaaaggaattgtgccttctcttgtaaacatgccgcggacaggctgtcgtttcgttaaccgatgtcctcatgcaatggaagactgcagttccgttacgcctgttcttcgccaagattcacaggggcatggtgtcgcatgtctgctgtataaaaatagctatccgttaaaaggagtgaagacaagctaatgactaaagcggtgaaagatgtattgctagaagttcagcatttaaaaacctactatcctattcacggcggattttttcgaaagaaaattggtgatgtaaaagcagttgacggtatttcttttgctattcgaaaaggagaaacgctcggtctagtaggagaatctggctgtggaaaatccacggcaggaaggacgattctaagactgttggaaccaactagcggaaaaattattttcgatggtaaagatatcacagaagtaaaaggaacttctctccgtaaaattagacaagattttcaaatggtttttcaagatccctatgcttccctcaatccaatgcaaatggttggagatgttatttctgaaccaattcggaattttacagggaaatcaaccaatcaattaaaatcagaagttatgaatctacttacaaaagtagggttaccggaagatgcatactataaatatcctcacgaattttccggtggacagcgtcagcggattggaattgcacgtgcacttgcacttcgtccaaaacttattattgctgatgagccggtatcggcactggacgtttctgtccaatcacaagttttaaaccttcttaaagaacttcaacaagaattcgacctaacctttttatttattgcccatgatttgagtgttgttaaacatatgagtgaccgtatcggtgttatgtacctaggcggtttagtggaaattgctgataagaaaagcctatacgcagagccattgcacccttatacgcaagcgcttgtatcggctatacctgaaccagatccacgaaagaaaaaacagcgtattattttacagggagatgtgccaagtccaattgatccgccaaaagactgtgcgtttcatcctcgctgtatacatgccatggcagagtgcagccaaacgaaacctgccttaaaggaggtgagacctggccatcaagtagcttgccatttatataactcgtaaaagctacatacgaacagattattagttaaatagggggaacgtcatgatgaaaaagaaatcgtttttatcacttgtttccattttgcttgtgctatcgctttttctagcggcatgcagcggtggaagcagttcttcatcttctagtaataaagaaggcggagaaacaaaaactgaaggtggaaaaacagacaagccaaaagatggcggaacgattacgtatgggattgacggagcgccggaagggctttttgagtacgcattgtatggcagtgcatacgatagccaaatcttagaatttatcaatgaaggtctctttacttatgataagaaattaaagattaaatctgacttagctacttgggaggtgagtggtgataaactaacttacacgtttaaattaaaaaaggggattaagtggcataatggagatccattaactgcagatgattttaaatatacgtatgaaacgattgccgataaagactatacaggtccacgctatgtaaacgttgagcacattaaaggcgctcaagaatatcacgacggcaaagcggattctatttccggagttgaagtagtagatccgcaaacatttaaagtaacatttaaagaagttcgtgtaaataacttagacaatctatggccgtatccaatgccgaaaaagtactatgaaggaattgctgtaaaagatcttgcagagtccaaacaagttcgtaaagagcctattggtgttggaccgtttaaagtgaaaaaagtggtagcaagtgaatatgtccaaatggagcgtaatgatgattattggaaaggtaaacctcatcttgatggtgttgttgtaaaagtactggatccatctgtttccgccggagcattgaaaaaaggcgatgtcgacattatggatgttcgtccagctgatttagggcaagttgaaaaagcagaaaacttagactttttggaagggaaatcaactagttattcgtatattggtctacgatttggacatcgtgatcaaaaggctggtaaaaacgtagatgattatgaaaagttcaaagatctaaaacttcgtcaagcattgctttatgcaatagatagaaaagcaatggtaaaagcatttatgaacgacaaagcggtagtttctaacacagttattccgtctgtattctggattgctgctgaccaaaaagatttagcaaagtacaagtatagtccagaaaaagctaaaaagttattagctgaagctggttataaagataagaataatgacggttttgtagaagatccaaacggaaaaccatttaccatctcatttggtcactatgctggtccagccaacttcgagggccgtgcgaaagctattatgcaagcatggaatgatattggtattaaaacaaaattagcaacgggttcacttgttgaatttaacttgtacaatgaaatgaaagataacgacgataaggcgttagaagcgttctttggttcttgggacactggttcagatccagatcctacaggattatggagctctaatgctgaatggaattatggccgttgggtaaataaggaatctgatgaaatgcttaaagacggtttgagtgaaaaatcatttgatgataaataccgtaaagatgtatatgtaaaatggcaaaaattctttaatgagcagctgccagcacttcctttatgggaaaatatcaatatttatgctgtgaataagcgtgtgaaaaacgtaactctagatccatcaacggtagttgtagatccggagaaatggtctgtaacggaataagtattttacatgtaaaggagagtcaacgatgctgcaatactcactaagacgtattttagggatgattccaatgttgattctgatctcctttgttgtgttttccctggcaaaaatgatgccaggggacccttttgggggagaaatcaaccctagtaatacagatccaaaatacattgaggaaatgcgtgataagctaggatataacgatcctatctacgttcaatattggaactgggtaaagggcgtggcacaaggggatttaggaaagtcaacaactcataagttaccgacattagatattattttagagcgtatgcctaatactatctttttagctttgacttcgcttttgattacgtatgtgtttgcatttattttaggtatgtatgcaggaagaaaaccgtataccttagcagataactttattgcaggatataattactttgcattagcggttccatcgtttatcgcagggatcgtaggcatttatttattttcctttcagttaggttggtttccatttagcggttctgttgaagtaggattgaaagaggggtcatgggaatttattcaaagtagaattcatcacgttatattacccgcgctgattcttggcttgatgtcgaccgcgcagtatacccaatttttgcgcaatgacattattgaaaacagtcgcaaagattttgtacgcacagctagagcaaaagggacaaaagaatctaaaatttataatgttcatatcttacgcaactcaatgattccccttatcacttttttagggtttgatcttgtaacaatcattagcggttctatcattacagagacgatctttacgtatccaggaatcggaaagttgtttgttgactctgtagcaactcgtgactactcagttatgatgtcgcttacaatgttgttttcaattttaacactggttgggaatctagttgctgatttgttatatggcgtagcggatccgcgtattcgtttggattaggaggagaaagtatggaaattgtaacgaaaaaagatgtacagccagaagtgaatatgaaagttcctaaaaacctttctccatgggcgattgcgcgaaagaagtttgttaaaaataaactagccatgataagtttagcttttatgattgtgattacgcttcttgccatttttgcaccgctgcttacaaaagcagatattacacgtatcgactatatggcgatgaatgcagcgccttctagtgagcattggttcggaacggatacaaatgggcgagacgtatttgcacgtacattgtatggaggaagaacttcgttactgattggagttgcttgtacaacactcgttatcttaataggaactcttattggttcgattgcgggttattacggaggcaaagtggatcaattcttaatgcgttttacagactttgtattaaactttccactaattgttttcgttgtagtgttaaatacaatcctaattggaaagatctcaggcgtttggacgctcatcctagttgttagtttcttaagctggggaagtacggcccggctggttcgaagcaaagtcttggctgaaaaagaaaatgaatatgtgctttcagctgtttccattgggtgcagcccgtttaaaatcatctttaaacatttgctgccaaatgtgttttcaacgattgtggttcaagccagtttgcagatggccatccttattgtgtttgagtcagcaattagcttcatcggttttggcgtgccggctgatacgccaagctgggggaatatgctgacagaagcaagggaatcagatgtgctgcagaataagccttggatgtgggttccgccaggtttagctattacatttacgatcctagctatcaacttcattggtgaaggattaaaagatgctttaaatccaaaatctcttcgttaaaaatctattacaaaagtgtgatagatttttttaggtttgtcagacctcctgacaaacctattattatagaagaaactcggatttttttctgcttatagaggtggatatagcacataaagcctttagcaatcattagcactggcgttatgtctgagcttcgaaagaagtacatttgaataaaagccaaaaacgaaggtattttacaattaatttttagaaaaataacatcatttggaataaaaattcctttctctgcctatactgatggataacaaacagatagtaagtgaggggtaaattatgctatatcttcatgatgtatgggttaattggtttgaaggcgaagaaaacggttataatgtgtgtcatttccatgagtggagaaaagacgattgtgtagaactgctcgatcaagcaccattattaaaagtaaatccgcttttatttcattacattgaaaatgatctttccgagctacctcaacaactactacaagatgtctatcagaaagcatacattcggaaaaatcatgaacgcacgcaggttgaatattgttttatcgttacagatggaacgaatattttagcaattgatacgatgggatatcatattccgattcgaaaaagccgcttaattccaagacaagagcagttagtctatgagatgattgcggatcaagaagagctagaatataagttcagtgaagacgagctaaataaaaaagagcatcatattctttcaccgtctcctgaaacgatgagaggactaacacgtaaagaacgtcagctaaaacagctgttatttatggcacttgatcagctacataccacaaaaaatacagctcaaatccgctactggtacacagagtggaatccaacgaagtacgaagacattcaagagatgtcgtttcaagacgtatggagtcagctatacgatgaaacgaagtcagggtggtcaccgaaacataaattattatgcgagcgcttagtaaaaggacaacctttctttgaaaaactttgggaaattgaacaagaaccaaaagttaattaaaaaaaacgactgcatagcagtcgttttttttaacgtttacggccaattcccattgcgtttcgcattttacgaagcattttattagccgttgcatttgctttatcggcaccttgatctaaaatatcatctagctcgctagaatcaactaattcataatatctttcttgaattggagcgaatgcttcagctactactttagctgtgtcagctttaaagtcaccataacctttgccttcgtacattgcttcaatgtcttcgatcgatttattggctaggattgaataaatacttagtaagtttgaaatacctggcttattttctttatcgtagcgaacaataccttctgaatccgttacggcacttttgattttcttttcaattgttttagcgtcatccaaaagcgtaatgaaagctttttggtttggatcggacttgctcatttttttcgtgggatcttgaagagacatgacgcgtgcgcccacttttggaatacgtacttcaggaatagtgaagatatcattgtattttttgttgaagcgctcagctaagtcacgcgttaattctaaatgctgtttttgatcttcaccaactggaaccaaatcggtgttgtataaaagaatatcagctgccattaatggaggataagttagtaatcctgctgatactgcttcttttccagcggatttatctttaaactgagtcatacgttcaagttcaccgatatacgctacgcactgtaacatccatcccgcttctgtgtgggcaggcacttccgattgaataaataaagtcgattttgctggatcaattcctaccgctacatacagagcagcaaggctgcgaatgtttttacgaagtgctaaacgatcttgaggcgttgtaatcgcatgctgatctacaatacaaaaatgacagttatagtcatgttgaagttcaacaaattgcttcatcgctccaatgtagttacctaaagtgattgtaccgcttggttgaatacctgaaaaaattgttttcatcaaatcttcctttcatctgcacatatatgatgctaatttacgaatacaacataaaaaggcccatccactcctagcataagctaggggcgaatggaccgcgttgccaccctaattagcacacataattgtgaactatctttattcatataacgttgaggtcaacgttcaagctttgcacttgaaagctccaaagtccattctgcaggtttcaatgtttgttttcaccagccacaaactctctaaaaatgaaaattctgcatactactctttttcacagctttaattatatagttattcgttattataacgcgaaaaagcaggaatttaaacatcttatcgctaaaaagttttataagacaatttactggaatttttcagcgacaaaaaaagacaagaaccttttaattaaagcatttcttgatgaaaatttggtgtaggatttggtaaaaatcttttatttagtatttctaataactttgtaatactattgtaatacctatactacaaaaaagattttagacgtcagacaagtaggcacaatccttataagataaggttttttcccttatgacaaaaaaataccattaaatcatcgtattgcaataaatttttaaaatatttataatagtcgtaacaaacatatttttcacaaaggtattacaatttcttaatttttcagaaaacacaaaatagacaatgttttgtttcaattagcgaattttgtaatgaatgagtcttctacatattaagcgcatacattggatttacagcatgtaaacaattgatgacagtttcatagagtagaagaataattttgcagtgaggtctttaatgctctactatgtgaaaaaataactgattattttgtattgaaagatgattaagaaattagtacatatcaaaaaaatatggttgccacacaaacaaaatttaatagggggtaatacgcaatgaagaaaaggttgtcgattcttttcagtttgctgcttgtcatgagcttgtttttagctgcatgcggatttaacaaagaatctggtggcagtagtagcggaggcgatgatagcggaaaagctaaaagccaagatctgcgtgtaaatatcaaaacagaaccgttttctctaaacccaggtttagcaaatgatagtgtatctggtgcagttttaagacaaacttttgaaggtttaactcgtctaggtaaagatggtaagcctgaagaagcaatggcgaaaaaaattgatgtaagtgatgatgggttagtttacacatttaaattaagagatgctaagtggtcaaacggtgaccctgtaatagcaaaagactttgaatatgcttggaaatgggctttagatgctaaaaatgaatcacaatatgctgaacagctttattacatcaaaggtggagaagctgctaataagggtacgggaagtatggatgatgttggtattaaagtagtagatgataaaactttacaagtaactttagaacatccgacaacttactttttagagttaacagctttctatacatactatccggttgatagtaaagttgtagaaaaaaatcctaaatggtatacaaatgctggagataattacgtaacaaatggtccttttaaaatgactcagtggaagcataacgacaaaattgttttaaaacctagcgaaaattattgggacaaagatgctgtaaaattaaaaaatattgaaatgtatatgattaacgataatgctactgagctttctatgtttgaaaaaggtgaactagattgggctggtaaccctgcaggacaacttcctcaggatgcaattccacaattaaaagataaaggaaatcttcatgttaacgtaaaaacaggaacatacatgtacaagtttaacactgaagataaagcattaagtaatgctaacgttcgaaaagctttagcttatgcaattaaccgtaaagcaattgtggaaaatgtaactaaagctgaacaagttccagcaactgctatggtgcctgcacaagcatatggtgagaagaaaaataatttatttaaagataatgatgtaaaaaaagcgaaagaacttttaaacaaaggtttgaaagagatgggattgtctaaacttcctccaattaaaatttcttataacacagacgaagggcatcaaaaagtagcacaagccgttcaagatatgtggaagaaaaatctgggtgtagacgtccaacttaataaccaagagtggaacgtttatattgatgaattaaataaagggaatttccaaattggccgtatgggttggatagcagatttcaatgatccaattacattcttagaaatgttcgaagataaaaacggtggaaataataacacattctgggaaaaccctaaataccaacagttacttgatcaatctcgtaaagagcaggattctaaaaagcgttatgacatcttaaagcaagcagagaaaatccttatgactgacatgcctgcagcaccaatttactattacacagatgcttgggtgcaggatgaaaacttgaaagatgtagttatgtcttcaactggagatattcagtttaaatgggctcactttaagtgaaaatagcgaacttttaagagaaagtatatgggagaaatcccatatacttttctgcttgaataagtagtgaatgttaaattatggaggtgtatatgatggtcaaatatatagggaaaagagtaatctatatgttactatcattatttttaattgtctcagctacgtttctcttaatgagagcggcgccaggagggccattttctggagagaaaaagcttccgccagagattattgcaaatctaaacaaattttatggtttagatcaaccctggtatatccaatatgtagattatttgaaatctgtaagtacttgggattttggaccttcttttaaatataaaggtcaaacagttaacgatttaataagcagtggatttccggtttcatttatgttgggaatggaagctattttaatagcactagctattggagttgttctaggtgtcttctcagcgatgaagcacaataaatggcaagattatgctgcaatggttattgccgttctaggcatttctgtaccaagttttattatggcaactcttcttcaatacacattagcaatgaagttagacctgtttccagtggcacgttgggaatcgtgggctcacactgttttacccgcattagcattggctgctacgcctatggcatttattgcacgacttactcgttcaagtatgcttgaagtattgagcaatgactatatgagaacggctaaagcaaaaggtttaagtagaggtgctatcataataaggcatgcaataagaaatgctatgttaccggtagtctcttatttaggccctttaactgcagggattttaacaggtagtttcattattgaaaagattttcggaattcctggattaggattacattttgttactagtatcaccaaccgggactacacagtaattatgggagttacagtattttatagtattttgcttctagcttcagtattactcgtagatattctgtatggtctgattgatccacgcattaagttaagtggtggaaagaaaggggcttaattaaattatgcaacagattcctaaagacatgtttgaaccagcatccgtagatttaagtgaagcagaaaagatttctagaccaagtttatctttttggaaagatgtgcgtttgagattcagagaaaataaactggctatgtttggagtaatcctcctgatattaattgttttcatggctatatttggacccatgatgactaaatacgattatgcaactaacgacttagttaatgctaacaaaccaccttcatcagagcattggtttggaacagatgatttaggtagagatgtatttacaagaacatgggaaggagctcgcatttccctattcattggtttatctgcagcattaattgatttatttatcggtgtagtatggggcagcatttccggttaccgtggcggacgcacggatgaagtaatgatgcgatttgcagacatcctatacggagttccatatttattgcttgttattctattaatggttgtatttgatcaaggtttaggaactatgattatagctatgactctaactgggtggattaatatggctcgtattgttcgtggtcaagtaatgcagttgaaaaaccaggagtacgtaatggcttcacaaacattaggtgcaaatactaacagaattttattcaagcatttgattcctaactctatgggtcaaattttagttacaatgacattaacaatcccttcagcaatctttacagaagcatttttaagctacttggggctaggcgttccggcaccgcttgcaagctggggaacaatggcttccgatgctttaccagctctagagtactatccatggagattattcttcccagctacgtttatttgcttgactatattagcatttaatgtagtaggtgatggattacgagacgcattagatccaaaactacgtaagtaaggaagtgaacttatatgtcacgtttattagaaataaagaatttagctgtatcatttaaaacatatggcggtgaagtacaagccattcgcggcgttaacttccacttaaataaaggtgaaactttagcaattgttggtgagtcaggatctggtaaaagtgtaacttcacaaacgatcatgcgccttattccgatgcctccaggccgaattaaaagcggtgaaatgctgtttgacggcattgatttagctaagaaaacggataaagaaatggaagccatccgcggtaaagatatcggtatgattttccaagatccaatgacttctttaaatccaacgatgaaagttggagctcaaattggtgaagtcgtaatcaagcactccaaagtgtctaaagcagaagcgaaaaaacgtgcagtcgagttattaacgcttgtaggtattccttttccagaacagcgtgtaaaccaatatccgcatgaattcagcggcgggatgagacagcgtgttgtcattgcgatggctcttgcttctaatccgaaacttctgatcgctgatgaaccgacaacggcgcttgatgtaaccattcaagctcaaattttagagttaatgaaagacattcagaaaaaaacggatacatctgttattttcattacccatgatcttggtgtagtagccaatgtagctgatcgagtagcggttatgtatgctggtcaaattgttgaaatgggcactgtggatgaagtgttttatgatccgaaacatccgtatacgtggggactgctagcttctatgccaagcttagataacgaggcagaagaagagctggctgctattcctggaacgccgccagatttaacgaatcctccaaagggagatgcatttgcagcgcgaaatccatacgcaatgaaaattgattttgagcaagagcctccaatgttcaaaatatctgatacgcactatgcgaaaacatggctgttacatcccgatgcaccaaaagtagagccgcctgcttcagttcagcgccgcatgcgtaaagttgataatgtatacagtacacctgtactcgcagcgaaggatggtgaataacatgacagataaattattagagattaaaggcttaaaacaacattttttcacaagtaaaggaacaattaaagcagttgatggtctgacgtttgacatcttccgcggagaaacattagggcttgtaggtgaatccggttgcggcaagtcaacgacaggcagaacaattattcgtttatacgacgctactagcggtgaggtgctatttaatggcgaaaatgtacatggtcgcaaatctcgctcagagcttaaaaaattcaatcgtaaaatgcaaatgattttccaagatccatatgcgtcgcttaaccctcgtatgaccgtagcagatatcatcgcagagggcattgacattcacggtttagctaagacgaaaaaggatcgtatggcaaaggttcacgagcttcttgaaacagtggggcttaacaaagaacatgcaaatcgctatccacatgagtttagtggcgggcagcgtcagcgtatcggtatcgcaagagcactggcagtagaacctgattttatcatcgcagatgaaccaatctcagctttagacgtatctatacaagctcaagttgttaacttaatgaagaagttacagcgtgaacgtggactaacatatttatttattgcccatgatttgtcaatggtaaaatacatcagtgaccgcatcggcgttatgtacagaggtaagattgtagagcttgcaccaagtgatgaactttatcgaaaccctgttcatccatatacaaaagcgttgctttcagctattccgcttcccgatcctgacagtgaaaaaacacgtcagcgcaaaatttatgatccaagtatccataactataacggtgaagaaccggagcttagagaagtatctccaggtcactacgtgtcttgttctcaagcagagtttgccacatatacaacataacaaaaacgatctcacaacgaggtcgttttttatgtagttatcaaagaacactaagcttcaagttgcaaaaaacatgtaagaacaagtaacattagcgctttacaggtattatacagtaaacgattgaaaaatactattgaaaattttcagaattttatatttaagacaaaatgtctatgtataaaccttataactaaaggaatataagtgattaataatgttttgtgttgaataataattcaaaaaaaacaaaaagaaggtagaaacatgtctaccttctttttataaatctgctaagatatcgccgtctttacgatttttgtcaatttttaatacttgatctgccggctgataagacgcaccatatatttctttgtctttgtacgtatgaattaactcgtacgtgtttttcattttatttaaaatgctttcctctgtttcagaggtaggagaccaatatagaatttccatctggttaatttcatttgtagctaatgaccggcggttatagccaattgtttgagcatgcctaaagtctgcacgtttataaaaatgcagtcgttttgctgagtctgaatctttatagtctacaggctctacttctaaaataattggtttgttatgctgttttaactcatcaattaatttaccgccaagcccttgacctcgagcgtcttttgaaacaaagaggtaatcaataaagataaattggtctgtttccacgtacattaatacgtggtgaggtccttcatttttatgataaatatcgctgcgttcttgtaaaagcgtttcgatatgcttctttgatttcatttcttcaatgggaaaatattgacttagtttttcataccaattcatagcaccctcctactgatcttttcatgatgatattcataatagtgtttaaacagctatcttatctttaccctttttagggaaaagtaagcatctataattgaaaatatggaagaataaacgatagattattcttaatagttagaaaattacagcgaggtaagaacatataatgtaaaaaatggtttttattatatttcgagcgtaagtttatttgtggaaatcacaaaaaactatcgcattttttgtgatttttgataaaatgaacaaagtgaagtttttttaatattgtattttatagatgtgatagcggtaaaagtgcaggtgtgaaacttgcaatatcagatttttagtacatacactgcctagaattatttggctgaaaaataagttaatactatacaggtagccgctatcgctattaaatgaaatggatatgttaggagagagaattatgcaagggaacacgcaagaaaaagaattaagccgtggacttgaggaaagacatattagcttaatgtctttaggtgcagctatcggagttggattgtttttaggttctgcatccgctattcggttagcgggtcctggtattcttatcatgtatggaatcagtggtcttattatgttttttattatgagagcgttaggtgaaatggcagtacaaaatccagtagccggttcttttagtaagtatgctaacgattatttagggccacttgccggttatttaacaggctggaactactggtttatgtggattattacatgtatggctgaaattacagctgttggagtatatatggagttttggttcccgggtgtacctcagtggatatgggcacttgcagcactcgttatcatgacaggggttaactttttagctgtaaaagcatatggcgaactagagttttggttttctcttattaaagtagtaacgattatccttatgattgtgctgggactaggcatgattatctttggaattggaaatggcggtattgcaacaggaatcagtaatttatggagtcacggaggttttttcccgaatggcatgaagggtgttcttttatcccttcaaatggttatgtttgcttaccttggtattgaaatgattggggtaacagcaggagaggtgaaaaatccggaaaaaacactaacaaaagcaattgataatgtactgtggagaattttgattttttacatcggagctttgtttgttattatgtctatttatccttggccagagatcggaacacaaggaagcccatttgttttaacatttgataaagctggaattcccgctgcagcagggattataaactttgtagtgttaacagcggctttatcttcttgtaacagtggaatttttagtacaggccgtatgttatttaatttagctcagcacggggaagcaccaaaacgctatgccaacttaacaaaaggcggcgtgcctggtgcagcagttattgcttcagctgttgtactgctactgggagttggcttaaactatgttgttcctgataaagtgttcacctgggtgacaagtattgctactattggagcgatttggacatggggaattattttactttctcaaattcgcttccgcagaggattaagcgatcagcaagtacgtgatttaaaatataagcttccgttttttccgtatacgtcgtatctcgctcttgctttcttagcgggagtagtagtggtgatgggtttttcctctgatacaagaatagcccttattgtaggtccgatatggtttgttttattggttgttgtctactattcaaaaggttttcataaaagataaaaaatgaggctcggacaaaagtagtttcattgaaggaaaatccgaacgagttgaattcttgattaagaatccaacttgttcggatttttttatggtgatggtgaacataagtttactgtatgtagggcttttagctattgattggagggaaaggcgaagactcctgggggaaagcgagaccctgcgggagcggaagcaacgaggaggctcaccgcccgcccgcggaaagcgaagtcttgcacggaaatcaatagcggtgtaacaagcgcaatccatacgagctcatatatcccatttgttcatctttagattgatgtagttatgtcccagccgcatttttttccaaaagaaaatgaaggatttattatttcactttttgctttagtgtgctaatatattatattgttaaacaaatgaagaaacaaataatttttacgtgttaatagattagcatcgagctttctatctcaaaagcttaagcttttagaaagaaaaaggagacacagcaaatgaaagataaaaaatggggactttggtttttaacagcctttgtagttggtaatatggtaggcggcggagtatttatgcttccttctaatttagcaaacgtatcaagtccaatcggttcaacacttgcttggattgcaacaggtcttggcgtgttcatgattgctcttgtattcgggaacttagtgatgagaaagcctgaattaaaaggagggcctcaaagttatgcagcgaatcttttttcatcgcctaaagcaggtaaagtagcagggtatagcatggcttggggctactgggcagccaactgggctgcaacagcatctgtcatcatatcgtttgcgggatatttaacaacgttctttccagtaatggagagtaaggatattttattttccgtcggagattttaaattagaagctggaaaattcattacgtttttagtatgctctattgtcctatggggaattcaagctattttgcagcgagatatcaatagcgccggtaatattaactttatcacaacggcagctaaaattattggattcggtttatttattgttgtggcgctatcgctatttagcgcatccaacctcgtcagtacagaatttgttaattcaaagggtataaatgtaggattgggaagtcaggtcaatggggcagccatcgctacgctttgggcgtttatcggaattgaatcggctgtactgttatctaaccgtgcaaaatcacaaaaagtagtgaagaaagcaacgctgcttggattattgatctcgatggttatctatgtggggattacgcttctagctatgggtattctttcaacagctcagcttcagcagtctcaaaaacctttggtagatacgttagaaatggtgattggacataaaggtgcttacgtaatggccattttagcacttatttctttattaggttctactgttggatggattgtggttagtgcagaagttccttatcaagcagcaaaatcagggttgtttccacagtggtttgctaaaacgaatcagaacaatagtccagcccgctcactaacattaacaaatggcttaacacagttgtttttgtttgcgactatttcaggtacagtttcacaagcctataatttcgctatcgttgtagctactctcgcttatttagttccttatttcgtgacgacagtttatcaattaaagcttattgtgacgggtgagacgtacgatatcattaaaggatcgcgcgtaaaagacggaattattgcctcgttagcacttatttattcactttgggtgattaagacagggacagctgatttaaaaacatttttcttaggtattggcttatttgtaatcgggctgttactgtatcctatcttaatgagacgaggaaaaagcagcacatcagctattaaataaataagaggttatctcaaaagctttgcagaaaagtccgttcttctgcaaggcttttttagtgactgaaaaatttgaggaatttgtgaaagaaaaaaataataaaaaaatgaaactaatctacaggtttattcgtaatagtagtgtggtaaataaataatgaagaaaatcggcaatgaaaataatgacagtgaaggaa

SEQ ID NO: 21 - DNA, 88076 bp, Priestia aryabhattai
  source 1..88076: mol_type = genomic DNA
atttctagagaggaagtgaagaggtgaaacgcacgttaaatcaagatacgattaaagatgccatgttgtttaatcagcttgtgatgcaagtaagcaaagctctttggaagtctactgaaaaggattgggagcagtgggttaagccgtacgatttgagcattaatgagcatcacattttggggattgcttatcagctggaaattgcttcgatgaccgacatttcaaagctaggcgtcatgcatttatccacagcttttaactttgcaaaaaaattgcacttgcggggctatcttaccctttctaaaaatgagaaagataagcggaatacatacgtacagctcacagaagaaggaaaaaagatgttcttaaaaacgctcgaggattataaccctcttgaaaatccattgtttcaaggagcgatgccgctgcgggatgtttacggagagctgcctgactttgttgagctgacggctctgattcgaagcatatacggagaggattttgtccagtttatcgaacgtttttctcaagagcccgctagcttgaaaaaataaaaaagccttcttgtgcaagctgagaaggctttttttgcatatcaacttttttcagttaaccgttcaagttcttctgaggaatgtgccatcttctcaattcgcagagacagctgcttcattacatccgctattttttcaagctctttttttgttagaacggtttgctgtttgttctcggttgttatactaagaacgttcgtgaaaaaagaagtaatgttgttcatattgtcagccgtatcttttgttaatgtagcgacttctccacctaatgccgagacgctttcgatttgtttttgaatgtctccgataaaagtggaaatattagcaatagatttcttcgtttcttctgcaagcttccgtacttcctgtgccaccactgcaaatccttttccatgctcgcccgctcgagcagactcaatcgaagcgtttaatgctaataaatttgtttgctcagcaatagaagtaacaatcgaaacgatttgatgaatttgctgtgatgtatgttcgagcgttttcattttgttttgaatgagcgacgtatttttttgtatgcttcccagcatgttttgttcttcttttaattttgcttgactcgtaacagattctttctcaataacttctgctagttcagagcttttgtttgcataagaaacgacgtcagaggactgattgtgcatttgattcataaacgtcttcgtttcttcagataacgaagaaaggatagatgatgtacgcgagatttctagctgaattttctctttttgagtctgaagtccagcgcgctgctcgtcatattcaagctcataggcttttaatacaatttgctgctctagactaataagctttgtcatacttgcaataaaagccagacattcttcttttgattccatcgtacgttcacatactgaaagaagcgacgtaaataaattttgaaatgcgcacaaataccagtttggctcaagtccaattttaacgtgaatcttggaaattttttgacgttttaccataaaagcatcgtctatttgtccatcaaacatttctaaaatatgccgttttaacgtttgttttaatgcatggacgctgctgtgcttttcgataatcgcaaccaaatgggcctgttcgccaatagctttgtaaaaatcattcacgatcttttcgatggcattcagcgcgtgaacttgaaatctggcaatccgttcgagatcctctgctgttaaggaaatcatgttaatctgcttttttatcatcgggtccgacacatgaagctttacagtgatggattcgacagccgctgcttcggcgtgcgctttgtttcgtttaaaccaattcatgtttatcacctttatttgctagaatagttgtttttctcttcttcttatatttcggcgttttacatccaagagttgaggctgtttaagaagattgttatcaaattgttatcttctattaattgaattgttacccgcagatggtatggttgtacggtgcttaaaacatgattcggggaggaaacgaaatgaaaaaaatgctatcggcgcttcttgtaggaggagctttatttgcaagtccggcaatgggacatgctgcgtttggcgaaacggttttaaaacaagggatgacaaatgacgatgttgaacaagttaaaacggtgttaaaagataaaggatttttaaaaggcgaagtatcgcgctattttaattatgaaacaaaaaaagcggtcatggcttttcaagagaaacataacttagaagcagacggagtagttggagagaatacatacaatgcattaggtaaaggcggcgttgtagaaggcgaatcagaagtgaatacagataaagtaattagcaaagcaaaatctttaatgggtacgccgtataaatggggcggaaccacaccttcaggatttgactgcagcggatatcttcagtatgtgtataaagaaagcgtaggcgttgatattccaagaacggttgaagatatctataaagccggtgaaaatgtaagtgaaccgcaagtgggagatcttgttttctttgaaacgtataaagaaggtccttctcatgcaggcatttatcttggagacgaaaagtttattaatgcatcgtcttctaaaggcgttacgattagcgataaaaattcaagctattggaaagagcgctatataggagcaaagcgtattgcagctaactgatttatcatttaatagataaaaaaaggcaaagcctaagggctttgtcttttttttattggtttcagtaggtaggagattatcctatacaaaataggctagtcaagtgcgtatttgtagggaaatacgacaaaagttctgtcacctttatgatacagcttgtatatattgataaagtaatctctcagcttacgtcaattgttgtaggtaatttgaagggatagcagtataaaaaggaggaacaaaatttatgtttttttgttgttaccgtcgctatgtagaaaagataaaacaccttttgttttcaaatcgatttgctgaatttattcaggaaaacacaaaaaaagcagtagaagacgttgtttattctgacacgtttagagaatacgtgatcagtattattaaagaatctcaagaatcaccttttaaagaaattgccgagcagtatatcggacaggaagttgtgattgaaacgacagctggtccacttgagggtgtggttacgtttgtgggagatgattatttggaattagtagagtctccaacatcaacggtattactgccatttacaagcattgtgactattcaaagcgcttaaacgaaaggagggaaaaatatgtttcaagagacattacgagaaaatgtaggttcatttgtgcaaatcatcacagctattgacgttattaatggaacactgcttgctgttacggacgcagcggctgttgtgcgtacatccagctcatatggtgagcctgcagatgtaaccatttcactagtatccattacgtatgttcgaattttcagcggagttgagtgagtttgaaagtatcagtgattattccagcctgtaacgaggccgattcgttattgcctgtaattaaagaagttcaaaaaatgaagccgtttgagattattgtcgtcgtaaatggatccagtgatacaacaaaggaaatcgccgagggtgcaggctgccgcgttgtttattatgaagaagctcttggtattaatattggaagggccattggggctaaaaaagcaaaaggagatattttgctttttttggacggagatatagcggttcctcatgaggagctgatgaaatatacgaaggctatagaaaccggtcatgatatagcgttgaacaacctttcatggattatgaagcggaaggtgcgtccacatccggtttccgttgcgaaatacatgctgaacttatgcttgcagcgtgaagatttatccgttcaagcattaacagctattccccatgctatcaagaaaacatcagcagctaaaattggatacgagagcttagctcacccgcctcttgctcatacgattgctcttttaaaaggaatgtcaatcgttgcaccgtgttcttcagacgttatttataccaataagattagaactacccacaaaaccattcctaccaattctcctttccctatttccactaactatattataggagatcatattaaagcgttagctcatcttatcgaagaaaaaggaataagaggcgggctcacagatggtgatcgaaaccgagaagttgtttccgcttatacaccgaatgtaaaacggaaaacaggagttaagtacagtgctgttattccagcaggtgaagaaaaagagacgattgcaaacgtgattaaagaagtaagaaaagccggagtagaggaaatcattgtggttgccaacggagccgatgaagtaacggtcaaacgagcgattgaagccggagctactgtttttcattacaagcagcggcttgggcataacgtacctcgagcaatcggtgcgatgtacagcagcggtgagatttgcttgttcatagacggagacattgtgatttccgcggaagatttacggcggtatttagaagcagctgaccaaggcattgatgtagcgcttaataatttagagtgtctgcttgacgaagtgcatcctattcactcggtaagtgctgccaaatatttcctgaaccttgtctgtaaacgtcctgatttaacaattaatacaacaacggctattccccatgccattaaacgagatgtaatggagaaagtaggctacgaatctcttattattccgcctttatttcaattgaaaagtattatgtacggctttaatgtcctgcctgttcattttgtagatgtggcgcgaacaaaccggattcgaaaagagcatatgaaagtcaaaggtctagcagcatcaactcagcgaattctaggagattatgtagaggctatggcgtactatattagccaaactagcgaaagaggcgaatttcttcccgacatacgaagacatgatcttttgtttgaggtgttgaagaatgaataaaaaagttgccgttattggtctagggtatgtgggactgccgcttgctcttttgtttgctaagaaaaactataccgtgattggacttgatattgacgtccggaaaattgaagcgctaaaacaagggaaaagctatattccagatgtacgtaatgatgtgattcaaagtgagaaaaactttcaagcatatgaactgaaaaaaggtatttccgcatttcaagcatgcgattatgtagtggtaaccgtgccaactcctattacagagaatcataacccagacctaggacccgttattagcgcatctacgtttttgaaagaacatatggtaaaaggacaaaccgttatttatgaaagctctacctatccaggcacgcttgaagaagtcattttacctattttaaaggagtctgaattgcaagcgggagttgatttttatttagcttattctccagagcgagtcgatccagcaaacaagtcgtacgacattgagtatattccaaaagtgattagcggctacactaaagactgtctttatcacgtgcagacgttttatgaaagtatttttcagcaagtcgtacctgtttcttctccaaaagtagcggaaatgtgtaagctgtttgaaaacattcagcgccttgtcaatatttcgttggttaatgaaacaaatgaactgtgcgaggaattagggattgattttcatgaggtattacaggcggcatctactaagccgtttgggttcacaccgtattatccaggtcccggaatcggaggacactgcatacccgttgatccgctttattttttatggaaactaaagcaaaatgggctaacgagcgaacttattgaagcggctcatcatattaatgaagaaatgcccaataaagtaattagacgtgttgaaaagcagctcgcagcaaatgagaaacgcgtgtttgttgtaggcatggcgtataaaaaagacgtaaatgatatgcgtgaatcgccggcgctgacggtatgtgaaggtcttttagcaaaaggatatgagctgacgtatcatgacccctacattgactccgctatattaaataagcaaacgtatttctctgtcccgctgacaaaagaagaagttaaaaaaagcgatgttgtacttgtgttaaccgatcacagtcaaatcgattggtcgattgtaaaatacgcaaaaaaagttgtggatacaagaggtattttaaatgaatgaagccgctgaattgttcagtggttctttttttaggggggatatcaatgaaaactctttctgtcgttctgcccgtttacaatgaagaagaaacgctaaaaaccgtgcttaaacaaattaagaaagtgaatgtgcttgagattattgtggtcgcaaatggctgtacagatgcttcagtaaaaatagcgaaagaagaggggtgcacggtaaaagtaatggaaaagcgtatgtcttcacatgaagcgagaatggaaggggcaaagactgccaaaggagatgccgtcttgtttgtagacggagacattattctttcggcttccgagcttgagcgttttgttcagccgctgttatttgaacatagcgatgtggtgctaaacaagtgggggaaaatgaaaatgaatgcctttaaccgcagcgagctgacgtggagtacggttttgcatcatgcgattgggaagcctcatcgtgccaacgcttatttaaaagcgccttacggtgtgctgttaaacgtgttgaagaactactgggatctgccgcctctttctttatttgtgacgtttttaacacagtatcgtgtaagctcgcatattacgattgaaacacaggggaaaggaagctttcgtccatttgatcgcccgctgcgtagcaaagagcgaattcaatcctatcagcagcttcttcaaacatactatacgcttgcgtcaaatcgtaaaaggcgagtggatatgcttgcgcagcccattccagttgtggagcacggctgggggaaattatcttctttttatggaggcaaacagctgtctgttattgttccggtttgcaacgaagaacaaacaatcaaacaagtgattgcagaagcaagaaaacttgagccgttagaaatcattgtcgtgattaacggttccactgatcagtcggaggcgtatgccaaagaacagggtgtcaaaaccctcgtctacgatgagcggttagggcatgattgcggaagagctgcgggggcccttgcagcaacgggagatatacttctctttatagatggggattttgttctttcagctcaagagttgtatccgtttgcttcagcggtagcgagcggcgttgatgtagctttaaacgtatgtgaagatgaagcgaagctcacgcatgttgtgcaggggtggaagtacgtgttaaatgagacggtaggaagaaaagatttattaatgagctcgatgacagctgttcctcatgccataagcagagagtgcctgcaaaaaattggaaccaaatctcttgtgatgccgccttttgctcaagtaaaagcgataatagaagattttcatgtgcaggccgttcaccacgttgacgtaaataaattcaatcggtttcgatattctgagcacctaccattgaagagccattctcctatggcagaactcattattgacgatcatatttttgcttttctctcttatcttcagcgtgactgagcctggagtattgccttacttctaaaagaaacgtttaaaatgagataaagaaatttgctgatatcttgtttttctgttctaaccccttgaatttgttcacagttgtaactaaaattgttacatgtgcagacaaaagtaaaaaaggaggaaaagaaatgaaaagctatcagcttggaacgtttttacttcgtcttatgttaggactaacgttttttactcatggtcttggcaaattccaaagcggtattgataatacggtcggttttttccacagcatgggcattcctgcgtttttcgcttatgcggttgcggttattgaattcgtagggggagccgctatgatccttggatttcaaacgcgtttaatcggtgtcttgtttgcgattgtgatgattggcgctatttttacagcgaaaagcggtgctggttttacaggcggctatgagcttgaggttgccctttttgtcgtttcgcttcatatgattctagcaggaagcggcgcgtacgcgttagacaaccgattacaaaaaccagaagaacattattcttaaaaaggtaggcgctatgcgcctacccttttttgtaaaatatatccttctatcgattcatttttattaaaatacacagctatcatttttaagaaaattcgtatatatggtactatttggtcatagatgactacacagtcattctatttgaaggatacggggaggttttaacatgaaaaccgaaagagaaaacggaatcgtccgtcaagtgaatacgattcaaacaaaagaagagcgctttaatcctttttcatggtatgaagagatgagaaacagcgcgcctgtgcaatgggatgaagaaaggcaggtatgggatatttttcactatggcggggtcaaagaagtgctagaacaaaagaatattttttcttctgatcgaagacctccacaaaaccaaagacaaactgctctaggaacgagcctaattaacattgatccgcctaagcatgctgaaatgagatcgcttgttaataaagcttttacgcctaaagcaatgaaagcatgggagcctaaaattgcgcgtattacaaatgaattactacaagaagttgagcatcttgaagatattaatatagtcgagcatctatcctatccgcttccggttatggtaattgccgatattttaggcgtgccgatagaagatcagcgtcagtttaaagattggtcggatattatcgtagcgggtccctctaataacgaacgtgaaacgctcgaaaaattgcagcaagataaaatgaaagcaaatgatgagcttgaaacttacttttatcgaatcattgaagaaaaacgcacgcgtccaggagatgatattatctccgtgcttcttcaggcaaaagaagaagggaaacagctaacggatgaagaaatcgtcggtttttctattttgctgctgattgcaggaaacgaaacaaccacaaatttaatttcaaatacgatttattgtttaatggaagataaagcttcttttgaacgactcaaacgagagaaagaacttttgccttctgcgattgaagaagttcttcgctatcgttcacccgttcaggctcttcaccgaatcgtaaaagaagatgtgactcttgcaggcaagaaactaaaagcgggcgaacacgtcgttccatggatgggatctgcgcatcgagacgctcagtattttgaagacccggatgtatttaaaatcgatcgaaagccaaatgtgcacatggcatttggaagaggcattcatttttgcttaggagcaccgcttgctcgaatcgaagcaaaaattatgctggccgagctgattgaccgctatccgcagatggactggagcccggcatttgagttaaagccgattgaaagtacatttgtatacggattaaaagaattattgattcgtaaacatgtataaaaaaagcacgctttgcgtgctttttactctttctctgcttgaattctcgcttcagcaattttatccgtatgatcatatccccatttaaacatcagctcgataatagggatgagcgtttctccaaagggcgttaaataatattctactttaggcggaacttgtttatagacttcgcggtggataattccgtcgcgctcgagttcgcgaagctgcagtgtgagcattcgctgcgtcacgccaggaatgagtctgcgcagttcattaaagcgccggcgttccttcgataattgatacaaaatgacgcttttccattttcctccgactacatcaacggctgcttccacagggcaagaataaccgtgaggctcccattttgttaagtcgtatttcatagtgattactccttttatcagtgagttcagctgcatttgtgctgtttatactatagcacgtcttatttgataaaaacatggaaatgattcaaggaattattgacggaaaattaaaaaagtaatggaaataattatgagtttgttgtatgatgaaactatgaaaataacttttctattaaaaagcgaaatattttgaaagcgctttatttataaagaacgacaggggaaagggcggaggaatgatgaaaagatttatcaaagtagaaaaaagaaatcatgtggcggttgtacgaatgaatcagtcaatgcttaatcgtttgaacagtgaagtcatgtatgagctgcaagaaatgatgaatgagctgcagcacgatgcgtcggtgggatctattgtatttatgggagagtactataaaatgaacggagatcatagaacaacttctttcctacgtgaagaaacaggaaggctttatcagccaattcatgcagtagcagctcgagcgatttttcagcgtatttcatgcagctccaaacaaacgattgcgcttcttacaaactttacgtttggcggagggtatgagttagctttagcgtgcgatgtacgaattgcggaagaacctgtgcagctcaagttaacaaacggcatgaccgttagtgcggaagaagcgtgcaatatgggcaaagtgcagcatgttgtgcaaaaagggaaaggattagaatattcacttgcgctgaacgcattagaaaaagaagcttaaaaaacgctttcactttatttttataaagtgaaagcgtttttatttcgttttgttgataaaaaggtattgaaaattctgaaaaaaagagtagaatgataacaaatctacttattttaaataagcaaaggagctggtatcaatgccattcatttttaaagaagcggtagtcggattgtttacagcggcagcagcaggtttactggcgtttcaaggggtagaagtggtgtcagccatcattcatctgctaactttttggaaacagtaatagctaataagtagaggaacgacctataaagataaggggcttgagactttctcagccctttttgttgtggagttcattatttttcagtatactaacggtggaaattaagacataatatggttacatagcagggatttacgaactcagtagggaagtatgtagattctgaaaaaaataaacaacgatcgcttttacccggtaacaagttttgttatcgggtaacgtgtgtaaggggtgtggataagtgaaagacaaaaatttaacagaagaacagcagcgagttgattgggtagtagaagaaatcagccaaaaagctgaaaaaataggcaaaagcgtaggaaacgtaaaaggcgaaattgtcgatttgcgaagcacattttgggacgatgtcacggttaatatggatgagccggatgacgtgattgagacatttacaagtattaagcagcaggcagaactgttagctgaacgtgaaattacccatagacaagcgtatgatcaattaaaaacattaaaaaaactaacgcaatccccttattttggacgttttgattttatagaaaatggtgaaaaagaagcggaagctatttatgtgggcgtgggctctttaatggatcaaaaagatgaagagtttttaatttatgattggcgtgcgcctatttcgagtctttattatgattattcaccgggaaaagcgcagtacgaaacgccaggtgaagcgattaaaggcgagatgaagctaaagcgtcagtttattatcgaaaatagcgtaattaaaagcatgtttgatacaggaattaccattcgagatgagctgcttcaagaagtgctcggacataatgcaagcagtcaaatgaaaagtattgtagcgactattcaaaaagaacaaaaccaaattattcgaaatgaaaaaaataaagtgctgatcgttcaaggggtagcagggagcggtaaaacgtctgcggctcttcagcgcgtggcttatcttctctatcatcatcgaaagcagctgactgcagaaaacatgatgctgttttcaccaaatccgctttttaacagctacgtctcaaccgttcttccggagcttggagaagacaatatgaaacaaacaacgtttcagcaatatgccgatggccggttaggaaacgagtttgaagtggaggacttgttcgttcaaatcgaatatttgctaacggaaaaagatgccgcgacaaaaaagcaaaaaatgcaggaaattcgctacaaggcaagccgtgaatttaaaaagcaggtagatgcgtatattgaaggactgtctactaaagacatcatttttaaaaacattaagtttcgcggcgaaatcgtgttatccgctcggcgtttgctgtcttatttctattcgcttgatacgggaatttccatacccaacaggatgcagctcgtagcggaatgggcgcttaaactcattaatcagcttgaaaaacttgagcgcaaaaaagattgggttcaagaagaaattcagcttttagaaaaagaagattatgtggaggcctatcagcacctgcagaaaaaggaaggctatacggaaagctcatttgatgatttcgaccgggaacaaacgtatttagccaaagcggttgtagctaagaaaatgaaatttattaagcaagccatcaagcagcttaaatttatcgacattcgccgtatctatatgcagctgtttgaaagaaatcaccttttttcccacgtagagggatgggaagacactgctaaaaacacggtgcacagagtcatgaatatgaagctgtcttatgaagacgtaacgccttacttatatataaaagatcaaattgaagggcgcaaagccaatcctgtcattcgctatttgtttattgatgaagcacaagactattcaccgtttcagctggcgtttttaaaagagctgtttccgcatgccagaatgacgctgcttggagacttaaatcaagcgatctatgcgcacgctatgaacgcaccgaccattctttcaagcgaactgtacgaagagaaagaagcagaaacgctgactcttacgagaagctaccgatcaacacgtcaaattgtcgagttttcaagggatatggtggcaaatggccatttaatcgagccgtttaatcgagacggagcgaaaccgaccgtgacggctacaggcgacgtgcaaaagctgcatgaggcaatcatacacaaaattaatgaattggagcagcaaaactataaaacgattgctgttattgccaaaacagctgaggaaagtcgtcaagcattccaagcactgcctgaagcgatgtctgcaaggctgctgacaaaagaaacaagttcatttgaaaaaggcatgcttgttctgccagcttacttagcaaaaggaattgaatttgatgccgtcatcatttacaatgcgtcgagtgaatgttaccaagatgaatacgagcgtaatttattttatacggcatgcacaagagcgatgcatgagctgcacttgttctcgcttggtgaaatcagcccgtttatatcaaataaagaaacttatgaataccaaggtcaataaaagaaggcagccagtaggctgccttcttttattgactttcaaaatgcagcaaatacttcactaaataaaggcctgagtttgttttttcttgaagaggaatggtcaggcatgtgacgtaataatatccttttggaatgtcatagcttaaggtttcagataggacgcttttgatttcaatcccatcgctttcgacgtgaaaaggaagtcgagtggtcttttcagcccgtgatgcgtctggagtttcgtttacccacacttcaataatggcttttgtgttcgatacggcttcaaatgaaatagctttatcgtctgcgacataccctttttgaatatcttcatcactccagtcgtgatggggctttggctgtcctttttgaaacagcgtaaactgatgataagacatggttagctcttgttctttccattttgttttcatgatttcacctcttcaaagtaaagctttttctgctattattgaacgataaattgtacgcgtgtaccatctggatactgttctaactgatttccaacccatgagccggctccgcggttatcagaaggtgaaatatagcgaatgtcagctcctgctccgccttcttcgcacatagccattggccattcatcacggtcataacctgtttttgtcggatatcctttcagcgattcttcccggttcgcttcagcaccgtcgcgatcaattgtgcaaacggaagagtgcccagcggcaatcgcgtcacgaatatgatcacccgtttcaggatatcggtctaacggaaaataaagcgtcgcatcatagtttacttcagcttccgttttttcaggagctaaaaaagctgcatgtcccataaaccctaaaatacatgccatgataatgaatagacttgccattaattttttcccgtatgtagccatttcaaacctccagtgtaagtcgtttttacagcttaactatactctcagattgctaagtttagattacaggacaataaatacggtgtaaacaagtattaacatttatgttaaacttcctttacttgacatcataccctaataggtataaagttgtgtatacatttactttttgcgtacagcttaaaagcaagaaacgcaatcatacatgagcggaggtagtagtagtatgatggaatatgataagcaagttaaaaatcgtttaaaacgaattgaaggtcagttaaaaggtgtcttaaatatgatggaacaaggaaaagactgccgtgacattgtgacacagctctcagcagccagaagcgcaattgatcgcacaatgggtgttattgtcagcaccaatcttgaacaatgcgtaagagaaagcattgaaaaaggcgagaataccgaaaacttagtaaaagaagcagtagagctgttagtaaaaagcagatgagacattcgtttcatctgctttttgtttttactgtacgctgctcagaaggataaaaaccgctgttcctaaacacaatacggataggaacagcggttttttaggtttatctcgttttaagaacaggaaagatatatggagagaaaggaggaggtcaaggtgagtgatgacaaaaagtcaccaacatataatcatacggaaattcatcataaaattgaggcttctccaaaagcgccgggaatcaaagctgcttttcgctttaaccatgcttcttctccgtgggtaagaggaatcagctcaggcttgtcttcaagcttgccgattttgatagggattttgtttggttatttgcagtacggacttattgcaagcattggcggctttacatatctatatacgaaagatgagccttatgcgcagcgtggcgttaagttatttttagctttgcttggcgttacgctgtgctttacactcggctcgttatttgctgacgtagcttggatgaaaactattttatttggtgttattggagctgtatcggtttatgttttcggagcgttaaaaattccaggaccttctgccatgttttttgtcctttcatttgctgtgagcacgagcattccagcgccgaatttgcaggccgtttttttgcacgcaggactcgtttttttaggaggagcactatcttggtgtattagcatgagcggctggcttattaacccgcgcggacctgaaactgccgctgtggcgaaagcgtacaggcagctagcttcatttgtcgggtctcttggtacggaatcgtttcacgccgagcaacataaaacggttgtagagcttcgggcagcggaaacagcgatgaaacaagcgaaaattaatcgaaaaaaatcatcgtttgcccatcgtctatttttattaaatcaaaaagccgaagggttgtttatctttgtgatggccgctgcgaacgattttaatccagctgtttctaaaaaagcacagacagtgattgaaacgttcgcatccgaaatggccacgttaaaaaaacataaaaaaattcgagacgttcgagaagaaattgaagagctgtccatcaaagaagagctgcgtacattgctattggatgtaaatgacgttcttcaaatgaaagaattaaaagaaacggagtatattcaattttcacaaggcagcgtaaaaacacggttaaaagctgcttttcacaaacgttcgtatgtgcttaaaaatgctttgcgctacggaattattatgatcatcgcagcagccattgcctacacgacaaatattccaaggtcttactggattccgcttacgtgtgcgggagtgatgcttggcgcaaccgttcgtgcaacggttcagcgaggtattcagcgctctgttggaaccattttaggtattttaattggaaccgggattctcatgcttgaaccaacgggaatcgtcattgcgctcattgtctttgtgcttcagtcgacgattgagattgtgattgttaaaaactacgcgctcggtacgctctttatcacgccgaacgctcttttaatcgctgaaagcggtcatccggataaagcgattagctactttacgtctgctcgagtgattgatattgtcattggttctgttattggagtggtcggcacggtattaattttcaaacgagcttcttcacttcgtttgccatatttgcttggagatgtgatacgaaaagaaggacagtttttagaaatgctaagcaccgaacaagatgaagaaagaattaaacgagaaagaaataagcttcaaggggaactcgttaatcttcgggcgctttacgataatgtgattggagaatattctaaaacggccgtcaaactggaagggttgtggcctgcggttgtcgctacacagcagttgggttatatgcttcttgcgtcgtttgaaggatatgagctgtcagaaacggagaaacgagagcttaaggaaacatttgctcagctagctgcagcagctgagcaaaaacgagcgccaaagctttcaagtgttccgaccctgaaacactacccaattattcaaggagaaatagtcgctttatatgaaagtctgcaggtagaaatataaaaagcacggaacccaggggctccgtgcttttgtttttacatatccacaacttcatttaccgttttatttacatcgtcacgcgtcattttttcttttcctttcatcaaggcgtttaatgttccatcagcaagcgctaacggaattttacagaaatgaaggatcggaagcgatttgacatcttctaaatatttctttcctagtgaaagattgcggcgagcgtaggcaaacatatcttctctgctccaattgttaggaaagaagctgactccgcgctctgaatcttccgaggtattacgcaggatattaacagactgcaagccgcgtccaaacgcaatagctaattctttgtctgtttccgtgccgtcataccatttccaaatgtcattaagcatcacacctactagaccagctacgtagaacgtatagtcatctaaatccgcttcattttgaatatgccagtctttttctacccaatcggccattcctttggccataatagaagttgcatctaatacttgatctgcaactccagtcggacaaagcgcaatccagttgccgagctgaagcgttacgtcaggtaaatcagcttgataaggacctactaatgccatgtactcgtcttcgttaaaagacttttttaacaggtcactaatggcgtaaagcaagcggctttttacaccggcttctagctcagggtgatcttcaatttcatcaattgccctcatacataagtaagcagatcctactgcatcctgcaattctgccggcaagtggctaattggaataaaaaatgttcggcttgtctcttttaacatcaccattgcgttgtcgcgtaatttgttgggtacactcattgataactagctcctttttacatatccacatgtcaaattagtttaagttttcatcttatatactatagtaacaaaaaatgagcatttaatggagtttaaagattacttattaacgatattgtcattattttgtagtatttgaacagagaaacttgtaacatatacaagtttacactacgataatactcgttcattcttcgttttacagaaataaatggtttatttttaagaaaattgctgtcatgctaatggatgagatgagcttttaagagagtattcaatagtgggttatacataatgtataggacaatacagaggtgaatgtatgaaaattttaattgtagaagacgatgataaaatatatgaattagtgaaagagaaatttgaacagtggtcatttgaagtggctggagtagaagactttcaaaaggtaatggaagtatttattgcagaaaacccagagcttgttattttagatgtgaatttgcccgtatatgacgggttttactggtgtcagcaaatacgtacagtttcaaaaactcctatcgtctttctttcctctcgtgaacatccaatggatattgttatggcaatgaatgttggtgcggatgactatattcaaaagccgtttaacttagatgttcttattgctaaagtgcaggcgcttctgcgcagaacgtattcatatggagacacgatttcagacgttatcgagtggaacggcgcggtgctagacttaaaaaaaggaagtttgcattataacgaccaagaaattcatttaacgaaaaatgaatttttcattttacggcttcttttggaagaacgaggcaagattgtatcgcgagaagagcttatgcgaaggttatgggaagatgagaaatttgtaagtgacaatacgctttctgtcaacatcacacgcattcgcaccaagctggaagacatcgggctgaataataaaattgtgaccaaaaaaggtcaaggatatttggtgaattaagatgtggaaaaattttttaagagaaagactaagctggattctattcgttcttctatggctgagtgtaatcgatgctctgctgctgcttgagtatgatattaaggtgtcgtccacttcgttttggtatttgaatcttttaacgctgtgtctgttgattctgtttcttttatggagaggagtaaaagaaagaagatttctaaaaaagttaagcttaatgctgcggaatgatgcgtacgatttgcaagaaatgcagccatatgttcgaacaaaagcagatgaagacatgctgagtttgctgcagcatatagatcgtgtgtatcgcagacaaactcatgttcttcacgtacagcagcgagagcagcaggaatatgtaacgacttgggttcatgagattaagacgccgcttactgcgatgaagctgcttattaatgctcatcgtacagagctttataaatggccttggctaaaggatattgaagatgagtggatgaaaattgacggattagtagatcagaatttatattctgcacgcctgcagtacttagaaaaagattatcaggtgcaggcagtgtcactaagtgaacttgtttttccaaacgttgcgtacttttcaaaatggtgtattgaaaagaaactgcatattgatgaaaaaaatctagacacactggtgcacactgacccaaagtggatgcagtttgttgtgaggcaagtgctgtctaacgccattaaatatagtcctctagatggaaagctttctttttttagtgaagaaacgccaaagtacgtaaagttatttatcgctgatcaagggaaagggattccaactcaagatcttccccgggtttttgaaaaaggattcacaggaaatgcgggaagaaaaacgaagggagctacggggctagggctgtatttttcaaaaaaaattacagatgctcttggccatcgaatagaggtgaattcacttttacccgaaggaaccacggtgattctgaccttctacaaaccgaattcttttgataacctttcaaaaatgtaagattgcacgctgagattgtcatctgcttcaaacgaatctttccttgtttcaaagtaagatagagctatacacaaggagggaacgtacatgaagcgaaagtggattagcctcttagctctgctttttgttgtaggagcaggtataggaggaataaagatttatcaaaaagccgcaacggagcatcaatacgggattgtcccaaaagaagcaaaaaaagtggatgattatggacgagttcaatatacaatttcagtgataaacgaaaaaggacaaacaacgtttcaaacatttacaacgattaaacagttaaaagaaggaacggttattgaccttttcgttcgaggcaatgaagttcggaaatatgacattataacaaaaaatgagctgccgcagcgggtgaaaagcgtgtggccgacaaaagaacgaaaggaggaggaggaaaagtgagcattgttcttgaagggaaaaatgtaaccaaaacgtttggatcaagaggaaatgtatacgaagcgctaaaaggaattgattttacaatcgaagaaggagagtttgtcggtattatgggaccatccggagcgggaaaaacgacgctgatgaacattctttcaacgattgaccgtccaaccgatggcgagatatggattcaaggagaaaacgtggcgctcatgaaagataagaagctgtctgctttcagacgcaatcatttaggatttatttttcaagattataatttattggatacgttaacggtaaaagaaaatattcttctgccgcttacggttacaaaaatgtctaagaaagagatggaagcgaagcttaacgacacagcaacgcgactaggtatctatgagctggcggataagtatccgtatgagatttctggcggacaaaaacagcgcgttgcagcagcgagagcaatgattacgaatccagccgttattttcgccgatgaacctaccggagctcttgattccaaagctgcttcaagcctgctcgaaaagctgtcgcagctaaatcaagaagaccgtgccaccattattatggtgacgcatgatccgttggcttcaagctactgcagccgcgtgctgtttattaaagacggacaaatttatacggagctgtttaaaggcgaacaaacgagacaagcattttttaaacgaattatgaacattcaaggcgcattaggcggtgaaggctatgaccgtatttgatcttgttaaaaagaatatgcgcaaaaatattagccgttacagcctttatttcttttcaatgatttttagcattattgtgtactatgtgtttgctacgcttcagtacgaccaatcgatttcaaaggttattggagaagagatgaggctgcagggcatttttaatgcttcaaactacgttttgcttacctttattgtcgtctttatttggtacacaaactcattttttatcaggcagcgtaagagagagctcgggctgtatcatttagtcggcattgaaaaacgtacgattggaaaaatgattttctatgagaatatgctgctggggatttcttctttggtgggcggtattttactaggtaccgtgttttcaaggctgtttgtgctgtttttactaaagcttatgggactgtcgctttctattacgctcacattttcttttcaagcggttttaaaaacagccgtagtgtttttgattgttaccatttttatatcgtttcaaggctattttattatgtaccgctatacgctattagatctgtttcaagcagaaagcaaaagtgaacgcgtaaataaagtgaattcgaaacgctcaattgtagttggaggactaggtatcttactcgttggctacgggtactacctttcgtcaggaaacattgtgacgcctaagttttttctaattgtagccgttgtactgttctcggtcattttcggcacatttttactttttaaagccacaattgagtggctgatggggctttaccgagagcatgcaagcggatattactcgtttgcaaatatgctaagcgtttctactatgatgtatcgaattaaagcaaatgcacgagtgttaactctaattacgattttgtcagctactacacttgtagcagttggtttgacgtattcctcgtactataacacaaaagccgacgccagaagcttgcagccttatgactatacgctgcacagcaaaaacgcagcgcaagactttatggaagtactgcgtgagttagatatccaatcaaatcagtatgtgtatcatatcgtgaagcactctgctgatttatcggactttcgatttattacatctggttattacggagatggtgagcgaatcagttttttagatgaagaagaagtgcggaaaaacggcgtttcggttccttcgttaaaagcaaacgaaaccgttgtttttgattcgatggcaaaaggaaaagtgtttaagcctagtacaggtaaaacggcagctgtgcagctgaacaaatcagaacagcttgctttaaaagtcgttaaatcagaaccttcacttattcttgactctgaaagtgccggctatcagtttgtagtcaatcacgacacgtttttcaaactttcaaaggctggacaaaagcaagcggtgtacatgtttaatacggatgatggaaacaaacaaaatgaacttactaagaactatcatcaaatcgcaaaagaagctggagaaagccgtacttcatactatgatgtgtttcaggcaggcttaatgagtaaaggattgtttatttttattggaggatttttagggctcgtctttttgatggcaacgggcagtattatttattttaagcaaatctcagaagctgaacaagaacgcaaaagatttgaagtactgcgtaagcttgggttttcagtgtctcaaatgatgagcgccgttcgaaagcagcagctgtttacgtttggtttgcctttagtaattggtatcttgcatagtctatttgcgctgaaggtcattacaaacctaatcggtgaaagtctgatagttcctgttttaatagcggatgcagtatacgggattatttattttcttttctactggctgacaatgaattactaccgaatggtaataaagcgactgtaaagaaaagactgtttcgatcaaagaaacagtctttttttgttgggaaaataaaaggtatggagtagcgaaaacctgaatataaaaaagggtatataaaaactagaaagttgcaggggaggggaaaatgtgaaagcggatgctgtatttgaagggggaggcgttcgaggaattgcattcacgggtgcgattgaagcgatggaagaaagcaatgtagaatggcagcgtctagcaggtacgtcagcgggagcgttaattgcggcacttttagcgagcggctataaaagcggtgaaattcgcagggagcttcaaaacatggactatgctaagtttcgcgggaaaacgatcattaaccgaattcctctgattggaaacttgattgaattaatgattcatttaggtttttataaaaatgattatttggaaaaatgggtgtatggtctgctccgtgaaaaaggaatcgaaacgtttgcggatttgccggcagataagttgaaaattattgcctcagacatttcgaacggacagatgcttgtgctgcctgacgacttgccccgatacggaatgcagccaagtgatatgaagatttcacaagccgtgatgatgagtgcgtccattccttttttctttcgtcccgtcatttggaagtccaaagggttcaagaggtcgtacattgtcgatggagcgcttttaagcaattttccgatttggctgtttgatacggagcatccgcgtttcccgacgtttggttttcgatttgtaaaagaagaaattgatacagccgctattattccgacgccggtccatttatttaaaagcatgtttacgacgatgctgcaagcacatgatttgcggtatttgaacgcggagacaaaagaacgaacggtgcaaattccaacgggtgtgattacggcaacggattttgccttaaaggaagaagaaatcgaatttttatatgaatctggttatatatcagcaaagcgctttttagaaaagtgggattttgaacagcataaaatgaatcggaccggacgtcagctgacacgaagaaagctcccgtaacaggagcttttctacggctgttttaaaatgttgactccaacagcctcgccttttgccggaacggaatactgaacgcttttgtcttttttgagccatgctttaacaagctgtccttttttgtatgtttgatcatccgaaacttttacataaataggctgtacatcgctagaaccaagtatttcttttgttgtatagtcaagcgcagtatctcgcggaatgacgtttgcaataagaatttcatcctgtttcacttctaaaatgcgcccttgaactaaatagccagccggcttttttgattgctccgcgttatcagaacagccgcttaaacaaataaaaaagagaagaaaaagtgcagttgattgaacggtaaacttcataaaatctcctttccgtttcaacatgactaccattataacgcgtttgaccatttcttttccagttttcggagaaagcaggaggtaatcgttgacgttatttcagcaagcgtgatatgttttaactcataaacgctatttttactagaagtcacgcttagtacgggaggtccttatatggatgttacctttttaaccaatgttattcgacatatattagaacgagataattttgtcattgactttgaagaatcagacgaacaaaatattcacttctggcatcgagacgagccgtttcgcctttttatttcagagcaaacggaaagttatttagtatggaccgtttttgaagatgaaaaggaacagtggagcggaaaaacatttcttcaagaagtgacgaatacgtgtaaagactgcagtgaaccaatcgcgcactggatttataaagacggaggcaaagcaggttattgcgatcattgtcttcaaacgtttggaaatgcgtattttacaaatgctgatgatatcaagcaaaaccttcatttaattgacggttctatttgttttattaccgatgaaaccggaagcgattggtggattgcatatgaaggattcaaacgagtaattgcaagattagaagaaaatcccgatcagaaagtagaaatgtacaagcccgaatatccggtctttaaatgggaaatacattttctaacggaaaacaattctgctagctttaagttcaaagatgactttgcatctggaattgtaccgaagggaagaatactttaacatccttgttacaagggtgttttttcttataacgggaagtttttttaaaaaaaataattaatttaggttaaaaagaaggaattaaagggtaaagagtagaagatatatcactatagaaagaatgggggaaataattatgacaactacgacaaatttaacactggggtacaaaatgtacacgattgattttagccgtccaacgcagtctaacgaggcactgcttgatttctttaaagatgtgcagcacagacagggaaataatgcagaaagcttttctaaaacattaatggaaatcgaagaaatcaaaacaaaatatgtagatcacgaaatcgtacagctggctaaatcgcttgaacagcaaataagccgctcaaatgcagaaaaacttgaggtctgataatcaccagaaatggtcgatttatcagaccttttttatttctatcgatgtagcactgtctccttgactaaagggcagccaaggagacagtgctagacctattggggtgaagtcaagggtacggggtatctggtagtataggttttgggtcgaggataaaattctgtacatttctcaggatgtttgattttatcaaaagttgtagatgaatagactatcaagtcgttggaggcgttgtatggttggaatttgtagctggaagtgtgcggtgagtggaataagtattgcaagtgtctacagtaagcagccgtcgtggcagcgggagtgttatttggtgacacctggtaaagtttattatgagtcgtgctatcaagggtacggagagtttgcaggaatggatattttttgtttgatgagagaaagcggagcggagaaagaagacagtgaaggggtagcggcttttaagcctaagattgtgctggcgaagtattacagcggacagcgttatgaagaactgccagaatcagagccgtgtccgtatggaggctatttttttgaaggttggaaagaaggctgaccaatatatataaaagctgtagagatatctctacagcttgttattaacgtcttgtttcatcgacagactgttctaagtcacttacttcttgcgtaattgtatttaattcttcttgcaccgcttcagcttcaagaacaggatcttgaacgatttctgtcgtttcaagctcttctgctgcagccgtttctgcaagcggctgttctttagcagtgcgcagagatttcactttgttgacaacttgcgaagactgttcggagactttttgtgaaagacgagccgtgcgctgtttgaggtcttggcctttagcatataccgtttctttcacttgacctgttttagcaagtgcttgattcgctccgtcttgaatagaagcacgcagctcttttcctgactttggcgctactagtaaagctgttgttacacccactacgctgcctactaacgtgccgactaataactctttgcttccaccttttgtttctttacccactgtttcttttacgttttcttttgtcatgacatttcctccttttataatatgtaatatgaagggtttaccattttgttgaatacttcctgcaaaacgcaaatgattcgctaaaaaaatgtgcaagtgccgtcggacgctcgtacaggctggtgaaatttgattgtatatagtattcaaccacctgacagaaaaaccttcttttctgctataaaaacagaaaaaaagttatctgtaaaatccgacacaagaaaacgacaacattcgttctttggtagcattttcacttgaaattttatatcatagagggcaaggagaatacgttctctttttttagatgctggagggattgaagaaatggctgaatcgaagtacagaacgattttagaagcaaaatctggtgagttagacgcattaaaagacaaagcagtcaaagacagctggcagccgatttatcatattcatccacagtacgggctgatgaatgatccaaacggattgattcaattaaacggtgaatatcacgtgttttatcagtggtatccgtacggtgcgatgcatggaatgaagcactgggctcatgtgaaatctacggatttagtaacgtgggagcgccttccggttgcgttaacgccaacggaagaatatgaatcgcacggcgcatactcaggcggcgcgattgaaaaagatggtcaagggctgctgttttatacggggaatgtaaaatacgaagacggctcacgttcagctaatcaatgtatcgcgatgctaaacagggatggaagtgtggaaaaatacacgtataatccagcggtacaaggcgttcctgatgggtatacaggacatgtgcgtgatccgaaagtatggaaagaaaatgatacatattatatgctgctaggcgctcagcgtgaaaacgaaacgggcgcgttaattgtgtatgaatcaagcgatgcgcttcagtggtcatttaaaggcgaagttaaaacatcgcttcctgactttggctatatgtgggagtgcccggattactttaaactggacggaaaagatgtgtttgtcttttcgccgcaaggaatcaaagcggatggccacgattttcataatatttataatgtgatttacgcggtgggaacatttgatgtggaaagtttaacgtttgaaatggagtattaccgtgaaattgataaagggtttgacttttatgcaccgcaaacgttccaagatgaaggcggacgtcgcttgctgttggcatggattggaaacccggacgttgactatccgtcagacgaatacggatgggcccatgccttaacgcttcctcgtgagctttcgcttgaaggaaatgaacttgttcaaaagcctgtagaagagttacataagcttcgagatcaagcggttcattttagaggaacgctaaaaaatgaagaagtgatcattgacgaagcaacaaataatgcatatgaaatcaatatgacgttccgtgagataggggccaaacagtttggtttagagctgtttaatagtaaagaagaagagcttcgcctcgtgtttgatacagaaaagcaagaagtgcgactcgaccgttcttcattccaccatcaatatgcaacagaatacggtgtggttcgctctgaaaaatggacagcgtcaaacgaagtcgatgttcgcgtatttgtcgacaaaagcatcgtcgaaatttatataaacggaggcaaaattgtcttcacttcccgggtattcccgaaaaaagattccaaatcagctgtaaatgtatttgcagaaggagctgtggattatcgtattgattattacggtatgtcgcgcggtatttaatataataaataagaaaagccaatgaagatcattcattggctttttggtttctataaaaataagatacaaatacatgaagcaactaaatgaggaacagctgcaataataaaacgtttcatccattctgtatcctctcgctgccggaccggggtaaagtaaggtcctctcgtttcaaaacgaaatgcgtccagtaaggttacgagtgcaattgccgtaagtaatatgccaagagggcctgaaatatagtaaatatactgccagttgcctgctgtaatagaaatgataatcacaataattaaagatataatgccagatattaatcctgttttcaaactcaaaatctccttacatccagtttttgcttatctattttaccataaccgaatgaaggtttgtatatacggctcggggcggatatttacttcttaatggaccttctatgtaagtaccttctcgtataaaatgagtttcctagcaaaagcagtgtccctagaatccacccggctgcaggggaataaggaaagatattttttaaagccatcccaaaagaaatagaggctgctccgagtataaataaaagcagcgtgattccttgacgttttttcatatgtaccacctctcttactaattttaccataagatatgagcatagtagaataaaatgtaagatatcatacaaaaaaagaagtatatggtaaaatttaaggggtaggaagggaagaggtatgcaatgattaaaaaaggatttatagcaggtatcgtgacggtcgggattgttcttgcgcttgctgcttttacagggaagtggagctatctctattttgtgtcaggcacaatgggagcagtatcactggttttagctttggcataccttgttgacagtatcgtgctaggaagtacaggcacattcttttcagccacaaagacgcgcaaggtgagccgagttgaagatgcaaaacgatttggagctcttgctgtgccgaacgtactagccgctttaatttatatagtcgttggatgataatcaggaatttataaaaaaacagcttgaggtatagtctcaagctgttttttatatatgcacgcacgcttaaggcttgtcttaaagtggacgttaaggtgtatgataagagagagtaaagacagcaaagacagcaataaaaaggagagggtatcgatgcaatatcgaaagcttggaacaacaggtctggaagtatcaaatttaagtctaggtaccatggcgtttggacgatggattgacgaaaaagcgtcggcagctattttacatagcgccattgaaaacggcattaacttcattgacacagccaactattacggaaaagggcaggatgaagagtttagatatggcacaggggaatctgaagaaattattgggcgtgcgttaaaaggaaaaagagatgatgttgtgcttgcgacaaaagtcggaattgccgtagggaaaggaaaaaatgataaaggactttcacgcactcatattatgagagaagtagataatcagctgcgccgactgcagacggattacattgatctttatcaagttcatctttttgatcaccatacacctatggaagaaacgcttcgcgcgctagatgatttagttcgtcaaggcaaagttcgttatattggctgttccaattacgccgcgtggcaaatcgcaaagtctcatcatattagtgacaaaatgaatcttgaaaaatttatttccgttcagcctcagtacaatcttctctctcgtgaaattgaacaagagctgctgccgtttagtcaatctgaaggtgtaggcgtcatggtatacagtccgttagcgcgcggcatgctttcaggaaaatataaaacaccaaatgacgtgccgccagaaagccgcgctgcgcacggtgaaaagctgctgcgaaactactttacagaccgaaactttcagctggtggagcagtatcgcaagttagcagaacaaaatgaagtaagcttgtctcagtttgctctttcatgggtattaaatcagcccgctgtaacgtcaagcattatcggagctagtaaattgcaccacgtaacagatgcggttgaaatcagcgattggacatggtcagaagagctgttgaataccgtgaattcactgtattaataaaaaatccgcaggtgcacctgcggatttttgtgtttaaattttaatttctttttgcgttaattttgcttctagtgagtcgtacaaagcgagcttatagttaatttgttcaaggtatttaaaagttttggccatttcttcttccactgcttctttgtgctgaagcatcatgctttttcgttctttaatcgtgctttcgccttgtttatagagctctacatagcgcttgatttctacaagaggcatgcccgttgagcgcagagctaagataaaacgaatccattcaatattcgtatcgttatagaggcgctttccattttcatcacgctctacaaaaggaagaattccttctttttcatagtagcgtaaagtcggtgcggaaagcccggttttttcattcatttccttcatgctataagacaagatagttcactcccactcatgaatcgtaaaacttactttaaggtatatgataatcgatagctaaacgttttatcaaattacttttcgtttatttgaaaaatatggaacttttatacagtttgttcgtaataacaagtagacaataagaaacttactgtaaaaggttaagtaaaggggatagagtggctaagtgttaagcctctgtatccccatgaagatacgtttatgcgagctttaggatggatgcttggcttttttgtttccgccgtcgcttttagtatatgtttcatcttcacggcgtttcttggaaaacgttcagcacgtgtgtaatgatatcatccgtttattaacgtttttttctagttaactactattcacgaaagcaggggtaaacgtgattcgagaaatttcagcttccgatgcagccgcttttttagcgttaaataaagagcttgatcgagaaacagcatatatgctgtacgaggaaaatgagcgtgcgactacgcttgaacagcagaaaaaaatgattacaacttttttaaagatgccgaattcgaccattttagtggcggaacaagacggacagctcgtcggacatttatctgtgattggcggaagcgttaaccgaaaaaaatacagcgcatacttagctgttggcgtacttcaatcttacggaaaccggggcatcggcacttcgttgtttaaagaaatggagagatgggcagcgcagagcggcattaaacgagtggagctaacggttatgacccacaatgaaccggccatttcgctgtataaaaagatgggttttaaaatagaagggaaaaaagtatgttcactcgttgtagatggaaaatcagtcgatgaatattatatggggaaggtttttgaaaaaacgtgcttaaaggagaaatgaacatggaaacgacgattgttcagttaaatgaatggatgataaagcttcctaaaaagcttgaggtattctctgaagcagcggcgtcaaaccgtcccgcgcctaagaaatggtcaccaaaagaaattgtggggcacttatgtgactcggctattcacaatttgcagcggtttatcaacgtacaacatgaaaaaaatccttttgtactgacgccttataaacaagatgaatgggtagagctgcagcactatcaaggtacgtcgatggaagacgtagttgtcctatggcgcagtttaaataagcaaattgcttccgttctttcgcatataccaacagaaaagcatatgtctcaattcgacataggagatggaaagttcgtttcgcttgagtggctggctaaagattatatagctcatttagagcatcatattaagcaaattgacgctcaactgccgctaggaggcaaagtgaatgaaaaaagaacataaaaaagaagaatctcaggtgaaagtcgattttagaacaggccgcgcctatggtaatcatgaatacataggaagttcaaaaaaaggcgtgcttcttgctttgttaccggttctaatcattgccggaggcatactttttgtgatggttaaatgacaaaagccgcattatagcggctttttttcatagaagtgctgggttttactttcttcgggattgttgcggctttctagggtggaaaagcctgcgtgttttgcgactattttagccgcggaaggaagcgtttcgactctttcccaagattctgtataccacagctttgatcgcttgaatgctttgctacagtggagaaagcattcttgtacttcgacgccgatagcgagcagcggagttttattgtgaaccgccattttttcaagcagcgctttttcttttacaatgcaagctttgccgttaatccgcagcgtttcttctatgcctggaatcgaaaaaagcagccctatttgaggattagataaaatattttccaatgaatctactttttgattgccgcgcctctctggaatcaacagccgtttctcatccactacttgtacaaaaccagcatgatcctcccggggagaactgtcgcaaattcctttataatcagctgtagcgatgatgacaaaaggggaatgtttaataaattcccggcagtgtcgatctaaataaggaattattttttgatgtcccaatttgttaggcgcgccgactatacggcgaagctcttctttcgtttttactcgttctttaaagtgaccgttttccattcctttttcactcctactttttgcgtatactgaaaataccatttttacatatgaaatactatatttttatatttaaaaaacagaaaaatcagtatatttaaatggagtagaagtgttataccgctagcttcggtcttttttaaaatttttgattgcgttatcaaatatgtcattaaccgtcttcatatgttcgctgacgagatgattcgagtctttttcccgctggcgcatgtctttcagcaaatcatccatatcatctagcaaactttgaaaatactcatctttttgttcttctttcattgtggaatcgtccatttcatcaagcttatcgagcttatcttcaatttttttgaagtattcatctctcaagaatctcaccccatttataaagtagctttctgcttattgtatgcaaaatgtttgcttgcatgagtaagaagtagaaagtacataaagaaaaggagagtctgaaaagctcaattactccttagtaggttactttttagttcccatattactttaaagtgcgtacttttttttcttgtttatatgcttcataatgaattttgtcaggggataacatgacatttaatgaatccattagtcgttgatttgaccttcgcactgatcaatttctagaatagagttaaaacaaatttcaggaggttttattcatatgagagagatactgcaaggaaaactagggtttgggactgcaccattaggcaatatgtatcgtaatattcccgaagaagaagccatcgcaacagttgatgctgcttgggaaagcggcatccgttactttgacgcagccccgctttatggagctggtttagcagagatgcgccttggtgaagcactatcaaaaagaaatcgtaatgagtatgtgctaagtacaaaagtaggtcgcgttatttcagatgagctggaagactcatcttcacgtgacttaggagaaaaaggcggactttttgaatttggccgtaaaaataaaattatcaatgactacagcgcggatgcaactcttcgttcaatcgagcaaagtttaaaccgtttaaaaacagatcgattggactttgtgtatattcatgatgtcgcgcaagatttttatggagacgggtgggtaggacaatttgagtctgctcgaactggagcatttcgtgtgcttacacgtttacgtgaagaaggagttattaaaggatggggacttggagtaaaccgagtagagccaattgaaatcatgctggatttggaagaagcaaagccagatgtctccttgctagctggccgatacacactattagaccatgagcgtgcactgcagcgagtaatgcctgcagccgtaaaacataatatgggcattgttgtgggtgggccatacagctcaggcgttcttgctggaggtacgcactttgaatatcaaaaagcatcttcagacattatggcaaaagtagaaaaaatcaaaagtattgcagatcgtcatcatatcagtattaaggctgctgctgtacaattctcacttgctaatccagcggttgctgctgttattcctggcgctagtcgtccagaacgtattgcagaagacaaatctgcattaaacacagtaattccgccagagttctgggaagaaatgcgtgaacaacagcttgtagcggctcatgcaccgctgccaattaacgttaagtgaagttagaacggtaaatgtttagtaagtagaaaaatcgtctcaaagttccgattttgagacgatttttttgttttgagatagatatttataaaagatttagtgaagttttgttaaaaaacgaacattttaacgtaaatttaattaaaatattcgttttttgtattgagtgaccagcctatatttgatacatttagaaagtgaaaaatattgctcgtatatgcttggaaatatgggctaagtgtctctacctagttcccattcaaagaactggactacgagttaaagtgtaaaaatgttcggtttatcaatacagaaactttatttcgtgcttaatttcttatactttgactctaaaaagcgtagacaattaaacatgttctaggtttttttcttttgtccaaacatcgagtgtattaaacaacaaaacgaaacggagtgaacgtaacaatctatgaaaaacaacatgttaaaaacaggggctttatttgctattggtatgatcttattactatctatacttgccgggtgtaattcaacttcaaaaaaggaagctggagataaacagaagcctattattgttcaagggccgatgccgatagaagcgcagaaattcgctaaaaaattagaaaatgtaaaagaagaaaaatcagggaattttgttttttacaaaggaaccgtcgataattatccggtcattgttgttaaaacgggaaagggaatggaaaacacagcagctgctacagcggtagctatagagaaataccatcctagagcgattatcaatcaaggaacatcaggtggacatgatgaaaatctaaacgtgtttgatattgttttagggaagcaaacaaccaatataggctccttaaaaacagcagataaaaaagaaggcgaaggaatggatcctactgcgtggaagccgatggatttgatggcttctgaaggaagtgctggggaagatcctgatgctgaaaaagctcgttattatgaaggagataaaaaattacttgcggctgcaaatgaagtaaaagatacatataaaaagggtaaagtggttgaaggaacgataggatcagcagacacgtggaataacgaagtggatagaattaagtggttccacactaagtatgggacgtctgtagaagaaatggaaggtgcagcggcagcacaaattgcaggaagctataacgttccattcttaggtatcagagtgctatctaacaacaaagtaaacaatggaaaatataatccaaacacagcagctgcttgtcaagactacgtttatgaagtaattaaacactatatcagcacaaaagctaagtaaatctttatttaaagttttgatgtgttgagttataattaattgtaaagaagcttattgataggaactcatcacatatgtttttttatctttggtgacttgactatatgtagatatatggcgggctggataacaagtattgaaaaatgctgagtcgttaacccatcataaagaaatttgtacaactatgcacaaatttctttatgatgggtttttttgtggaggagtggagatattggagacaactaaaaaagcagcaggctctaaaacaggctaatagcttttgagtgttttactaacatgaatagaatcaatgtaaggaagttagataaaaggaagggatacaaaggtgtttaaactatttttatgtaaaaaaaggcagtatctaattacgacatatcaatttattttaaatgtctcgctgattgttcttgggtttatactcgtttatttcttattgagagagcttttttatattatgaatgatgccttaacaggaaataataacgttcataaaatcctaggaaaagtattggttttctttttatattttgcttttgtttcgatgattatgacttattttaaggaaagctgccatttcccgttaagttatcttttatatattggaattaccgctacaatacgatttattattgtgaataacaattatcaaattggaagtttatttttatcgttaggaattatcgctttaactattagttacttaatgttaacgaaaaaaagattagaagataatgaaaggagaatttgaacatgagtagaaatagggagcatgaatttagtaatttggtgcgcgaaatccgtaaagagcaggttggaaacggaccgagggaaatcactactcgttttatagatacatgggctgttagcgaaatgaaaggcaatcttacgaatgtagaaaagtttatgataacttctcctgaaggcaaacggatggttcatgaggcacgtacggaactagtaaaaaaaatttatgattgttcagatatacgagataagtttgaaaaacttgtccatgcaaaaattataagagttttttcagacattaacattgaagaagatgttgcgatgactacttttgtttttgatagaaagttagaagattaactaaaatagtctttttggaagaaagaggaatttagtcacggcaacaacagagatatagcgtatgcttggtgttgtgaagaataagtgtaaaaagcatcaaagcccttgtttccttaatgaaggctttgatgcttttttcatctaggcgcttatccgttcttcacgccgctcatcagcaaaaacaaaggaatgcgcattcgacgctcgtaagtttcggcgctgtcgaagtgttctttttgagggcatgcttcctttaagtttgtgacggtaaatccgctttgctgcatcaaagaaaagtattcttcaagcgtgcgatgatattttcgaacgtatccgcccatccagtgctgctggcggaatcccattaagaaatagttgtccacggtccagtttgtgcggagagcggaaggctgaagagtagacgtaatgactggatgttcaacggaaaaaataaatgttccttcaggtttgagcgcttgattcactttaatgaaaatgcgagctaagtcttccatatagtgaagagacagtcttgcggtaaccaaatcgtattcggcacgtggtggagtatattgctccatcgattcatggatcactcttgcatttgggtagtttgaaagctgttgatgagcagcgtttaacatattgattgagccgtctactcccgtatacgagaaacacccttgtgcaagaagctccacgccaaattcagcgtttccgcaccctaaatctaaaatatttgcatctgtaacatcacttagaagctgtagaatggccggtttttcaatcgtatcgttggcattttctttctgctgccggcgtttagtatatgctaaaaacgtctcgtcattatcgtaaaattcagctccggttgaactcttcaactaaatcagcctcctctatgcaaagtaccttattatactcatatattcaaattatttacaataatcagaatatatgaaaatagtattttattttagtataaaggaaagatcacagaacatacgaagacattatcagaactcgatatccttccaagcgaacatgatgaaaatgtgaaaaaacttgtaggaaatgactatgaagcgcttgttgataactttcaaatcgtacatgaagaaaaagatttagatggcttaggcgcgacagcgctatcagggggagtaaccggtttgtacacgcttatggaaggaatcattgagtatgataagcaaggctattattacgtagcgttaattgttgacagtgacaaagtaaaattctacacgaataatcccacatatcgagatcgtatcacactcacagtaaaagagtggatgagtcgctttagtgattatccagtagaaacagtgtataaagaaataaaaagataagtctaaaagctaagagttgagtatggaagtgttaagtctatgcgcaactcttagcttttgctttgaagtcgtagggaaccatttgtttctggtgttgttcttatttcgataattttccaaatattgcggtgtctatttgctgagataatacgctgctaatctctttttcattctccactttttctaaaattagctgcttattacccgtctttatttttaacatcgtacctgagtggatagagaactcatctcgcagctttttaggaatggtaagtctaaaacggtcatcaatttttcgagattgagccgtaaatgttaaagtcgttttcttaccaaaactcatttcatatttttgaatcacaatgttatttttttggttaataaaaaattgaacctccgtgtttgcatccaatccgactgacgttaaaagttcagaagtgagctgaatctgccgtccagttaatgttgcataataaggaggggacgccgcagttttttgtgaaagcgctgtcgatttttcgtctctttttttcataacaatttgctgctctatcacgtatagttctacataatcaaagggcttaagttcatagtcatctcgcagggatctcggaatgactattctacccatatggttaattgttcgaatgaagatatgagaaggaacgggaacatattcgtcatggtgatcgataataatccaatcatcacagctccgtaaaaaaactttgtcgttcgtctctagtttcgttagttgcataaacaaagaaggaagggatactcttcccatttcatcaattatacactcttctttttttgtacgcatcttgctacttaatcctttctaaaaacattttagatggggtatgttacttaaattacacagcatttatttctttgtcaaatgaagaaaatgagtatttattcatcgtaaagattgagaaatacaggaagtttaaccctgtccactagatgtatagctgtcccgtgtaaacggtaataatctgaagaaagcagccaatctattaattgaaaaagcatagaatagaagcgtttttctttcttttggttttattgtaagaagagaagtaagaaaaggcttaaaaaggaccagtatcccatttctaaagagcaggtttaggtttttaatcaaaaaaatgtagccaaactcagtctgaatgatgaatagatttatgcatattaagctcagaaaaaattttcaaacggtgcttttttacttgttttggagatcagttatagttgaaggataaagaaaaaagctcaaagtaatgagctttgaggcaattttatcgtttttcaaccagcagtaagatgaaggtagcaatcggtcctaaagcaagagataataagaaccagtgcagaccggcccgatttttaccttgcgctaatccggcattaattagagccagcgttccccatcctacaacgtattgattatccatatgacaccccgctactatttgtttctttatatgatcaacaaattttatattagcataaatatccatatttttgattggaattcctgaattagggtggagaaacattgaatttcttcatgaagcaaagtttcctgttttcctcaacttagtgaaggtagtagtgaataagagaagggtgcacgtagtacacgtgaacgataaattctgtgaaatttctaagtatgaaagacatgagcccctagatcaagatcatcgtattattaattcgaaacatcattcaagcttgttttttaaagagttatggaacacgataagctccggtaaggtatggcacggagagataaaaaacaaagcaaaagacagttcgtattactgggtagatacaaccattgttccttttttagacgaacgaggcaaaccgtatcagtacgtatcgattcgtaatgatattacaaagcgaaaagcatatgaagaaaaaattaagcaaatggcttattatgatcctttaaccaatttgcctaatcgctactggttaaataagcagttgaaaaagctgcttttagatgaagaatctcctgaactgctggcgattttatttttagatttagaccgttttaaatcaataaatgatacgcttgaccatcatcacggagatgtgctgctgaggtgcgtagcagaaagattaagaaaatggtattccttcctctgattttatctcacggcacgggggcgatgagttcattttagtgctgcattctctaaagaccgttgaggaaatcgaggaaatgaccgagcagattgtaaaagaaatgtcgctgcctttttatatagacggagataaagtgttaacctctacaagcgttggcatcggcttgttttcaaaggaatgtcagtagcatattattctaaaagacgcatatgaactaatcgactggctgatcaagcaagcagatattgcgatgtatgtggcaaaacgaaatggaccaaataattatgaaatgagttcgtcttcatcaaatgaacgaatgattaaaacgatcatcatggagaatgtgttaaagtatatgcgttagaaagaaatgagtttcagctcgtttatcagtcgttaattgatttaaaaacgtctgatgtcataggggcagaagcgctcatccgctggagtagcgtaaaatttggtaccgtctatccaaatgaatttttgcccattttagaagaagtaggtctgattgtgccggttggaaagtgggtgttagaagaagcgtgtaagcagatgaaaacatggacggagctgaattcaaaagcgagtaaaataggagtgaacgtgtcacctattcagctgaaatcctcaagatttgtaacggacatggaacaaattttgaaagaaacgggccttgagctgcactttcttgaacttgaaatcactgaaagcgttattcaaaacagtcaagaatcgaaaaaagtgctaaaccgcctgcggagtctagggataaaagtagcgatggatgattttggaacgtgctactgttccctaagctatcttaaacacttgccgattaatacgttaaaaattgataaatcatttattgacgacttagatgaagtcggaaaagtgttagtggaaacgattattcaaatggggaaaaaacttaactttgacttaaccgcagaaggaatcgaaaacgaagaacagctgcagtttgtgacggaacaaggctgtcatatcggtcaaggctatatatttgataagccgctttctcctgagaaaatgggccggttgttgaattgaaggagaatcagttgtacggaaagaagctctttaatagagctttttttatggtttttaatacgatacaaggagtgataaagccgtgaaagagtatgtcggaatctgcacggtatgtcaaaaggaagtgtactgcttagagggatttttgaacggcgtggttgtcgaaggaaagcttgtgtgctttgcatgtgaagaaaaagagaagtgcgactttcataaaaacaaaaactagctatcttgggtagctagtttttgtttcttcacatacagtccgctcacataaagagaagagattgtatatgggatgttttcgactgtttcctaatgttcatttcgtacgatttcccaaaggtacattttatggttatttataaagctgtttccgctgcgcgctttcgtttcttttttaacgtaaacgttaaaggaatcgtcaggattacaataaccgttgttaaaaagaacacgtcattcatgccaaggctcattgcttgttcatgaagcatcgtatcttggctatttatgtgctgaagctcctttgtatgaacaaaagtacgagaagcaagaatggcgctgaatatgcctattgaaaaagagccgattacttgtcgcgtccagttattgatagacgaggcgtgcccagagtattcttttggaataacgctcattccggcattattaacaggcatgtgggaaaaagcggtcccgacatagcgaatgcccatccataaagagagatatataaatgaagactgcggcgttaacgatttaaatttccacgtggcaattccaattaagacaattccgataaagctaagccacatgggccctacttttccataaattttcccgataagtaatgtaaaaagaatcatggctaacgagccgggaagcaagatcaatcccgtatgtaaagcagaagcgtgctgaacgctttgagaaaagacgggaatcaaaaacgtgctggaatataagctgataccaataacacagtttaaaatgacgctgtaggtgtaccgtgtatatttaaaaacacgcaaatttaacagaggctctgatgtccgaagctcccaaaagataaaaagagataaactgataagacctaataaaagaagaaatattgtttttccatcgagccatccccagttgttacctaagctaaatgcgacaagaagagaggcgctgctgacgataaccgtgacaaatccaaccgcgtcaaatgacttcacttggcttaagcgatagtaaggaacaaagcgagcagcgatgataatggcgataatcccgattggaagattcattaaaaacagcgatttccagccgaaatattcggtcatcaagcctcctaaagtagggccaaatgcaggagcaaacatcgcagatacgctccaaagactaatcgcaaacgtttgtttttctttttcaattacctgataaataatcgtcatagtagtaggcatgacaattccgctgcaaattccctgtaaaattcgaaaggtaataagcgactcaatattccatgcggctgcgcataagctagaaaacaaagtaaagccaatgagtgtatatacgtatagttttttatagcttagtttatctcctaaatagccgacgataggcgcgattattccagttgctagcataaagccagtcactgcccactgtgcagagcttaaatttgtttcaaagtgactcattaaaacgggcagagcaacattgatggtagaagtgcttaaaatagctaaaaaattcccaaagaagactgctaaaatgatgggccaaaaaggtgcttgttttgtactgtacacattcatatgttcttaactcctatacattgtgataaagttcgtctttataaacaagtatacttataatattacgttgacgtaaaggttagaatatatgcaggtgaagaacaaaacatgacaaaataaagagagaaagctgtcttatcagtcacttcatgggacttcaaagacagccattctctttactgcgcattcactttttcagcttgccagtaatactcgctgaacacatctgaaaaagctttgacggtatttgttagttcttccatattgttatcaacgcctcctacttcaatcaaaatggaacggtcggataagtcttgattatacaagccgttattgccgcttgttttctttttgcttaatactccgcggctaagacctggatattttttctcaagcttttcatgaatcgctttggccattttaacattttcatcaaatttcgggtttgcttcacctaatacaatcatcattttagcgtacgatttgccgttgatagtagccgttgttttttcttgtcgcagtgaatcacgatgaatatcaattaaataatcgacgtctttgttttgctgaagcgctgtttccaccacacttcgagacatcgtataggatcgtcctgtaccccagcctttttcattcagtttttgagtcatgttggttgtatctacttctgagccaattccatctgcttttaattccatacctagcatttgaccaacgagcgtgatgttggttttgttatcaacggctttatcttcgttcgcttcaccttgcatcccgagtaaaggaaaataagattcccagctgtgcgtgtggtagatgtatacgacttttttgtctcctgtgctttgcttggcctgtgtttgagactgttttttactttcttcgtacgttttgctttcagcaggatctaaatcacgctctccggaaatgctttcgagcggaggagccgattcatggggaatggttgtataatcggttccttcaccggctagtagaatatgagaatcaaaaatagaaaagccgggcagttctgatccaaataaacttcgtgcatccgccacgcgtatattagtcgcaagctgtaaagagacagaagagagggcaggcggggagaaattttcttcaaatgcatgagaaaaatgatggttttccgtatgcatgaggtaaaacagactttgggctttatagtttgatagcgcttgatagacaacgtttgagcgcagcgtatgctgaagagttgaatacgtgacggtaaaaatagcggcagacgttaacagaacaaatagtatagctataattaacgatttataagaaagaatccaaaaaagctttttcggcttttcagtaaacttgtttttcatagaatgaacctcctctaatgaaattttaaaatcagtggatgagaactctgagaggagaatgttatgtatctactatttactctattaaaaagaaaaagaaatatgatagaaaccatgatatttaacacaacataaaaaagtttgtattgggtaatactgtgaaaaaacggtacgtattggagctggttagatgaacgattcatggatctatcatcattttattaatacacatttatttcctttagcactgtttggagtggcattttgtgtacttgggctattgctgtacatgctgtggaaagaaaagcaaaaagaaggaccaaaagaaaacaagagctcttgttttgtcgaacattcagttagaaaaagggaaattcactttctctaagaactccattcggttgccaaaaggatcatcgacgtaaattctttcagcaccggggagatttttatcttctataaaagaaatatcaagattagtcagatgctgttttaacgcagtgctgtttttaacataaaatcccgggtgcgctttttttgcgggtgaaaaggtagtttcaacaccaatatgcaactgataagatccaaattcaaaccacacgccgccgcgcttttttagattttccggcttttcgacttctgttaagccaagaacggttccgaaaaagtgtcgtgcttcgctttctgaattcgggggtgcagctagctgaatatgatcaatatgcgtcagtgtaaaagtcataaacattcctccttaaatagtagagtactagttaagtttacgtgatatatacgtgtaaataaatgacaaaaagatgatgctttttataagaaaaacttattattttatatacatataacaccaaatgaggtatattttattttgttgttatttaggagaattggagattaatatggaatatcactatacgttaaccaaagatgattacgtagcttttaacatgcatcacgctcaacattcggaaagagtacaaaaagtgctgagagttcagcgatggatgtcgcttatttttcttcttattcctttgcttgtttcgtgggttgaaggagaattttcacttggcatgttcgtagcgtttgcactgcttgcggtgctgtggtttttattttatccgaagtatttttacggaagtattaaaaagaacattgtaaaggtaataaatgaaggagataacagcagtctgacgggtaagcatactatgatggttacggaagatggcttggtagagaaaagctcaaaaggagaagtgaagactccttggtcaagcatcactcaaattagagaaactgatgaacatatctttattcttgttagcgcaatgagcggatacgttattcctacaagcacatttgcagatgtaaaagcgctacagcagtttaaagaaacgctgaatgctgcaagagacgaaaaaacaggctgagtagtaaataataataataatgtggaaaaacgccctcctagatacttttctaagagggcgtttttttaacagcagtcccagttgtataaaacatctctaaagttaaggttgcgaaggtctttttctttaataaagaaattggctacgcccgcatcaccaaacataatatcagcttcgtcgtccatggcgaattgaagaagcaaaacatcgtatgctctcagcacttcatcgtagtctcgaggatcgctttgagtgaaaaaagcgtatccgcccattttatgatactcgcccgtaagctcatcccagtaaatttcttcagtttcttcatcgtcaaataaatctgattctatatcattatatcgatagtcagtaggggaaacgggttcgatttttatttcaaactgtaagcctacttcttgaggaatagggaacatatctcggtcaatgtcttcaagatacgtaaaatcggttgttagctttttttcgtcagttgttacgtcttcataaaaaacgacgcgaaagtctttttgagccgtaggatggtcaaaatcaagaccgtacatatcgccggtgctttcgttatcagctccgcaaatgaaaaattgaagcatgccttgaatgggcatattttcataggaagttacttcagaaaaattgatttgtgccatcaggagcatcggcttaccctgagaatcaagagggtgatttgcttctagaggaaggtaagggttgccgccaaacttgctttcatataattttggactgttcatgaccgtattgatgtggatgtaaggcttacatgttttttcgatttcttttcggtaaggttctagcttaggaggcagttctaattttgatagaggattcatatgtactctccttttttgtttggaataaaaggaacatttgttcgtatttttattttaccttaatacatactcaaagggaagagaaatcgtataaaaaaatccctttgcagaagcatctacaaagggcacaaagaaatgatagcgttttcattaagagacttagtaaatcaattcttatttagaaaagaatccttttaaagcaaatgcgacgttttgcggtctttctgctaagcggcgcataaagtagccaaaccagtcgttgccaaatggaacgtatacgcgcattgtatagccttcttttgcaaggctaagctgcatgtctgtgcggaatccgtacagcatttgaaattcaaactgcgtgcgcgggatgttgtttttgtgagcgaactcttttacttttgcaataatattatggtcgtgagatgcaatagccgtgtatgttccgctcagcaagtgctcttcaataattcgcatatagttctcgtcaatttgggctttatcttgaaacgccacggttggtgattcttgatacgcgccttttaccaatcgaagaggaatgccttttagttcttttacgtcttgttcagcgcggaacaggtaagcttgaataaccgttccaacattatcaaacgtctcgcgaagctctcgtaaaatatctagcgtcatttgacagtgggcatagtcttccatgtcaattcgaacaaagttattgtattttttggccgtttcaagaatgcggcgcatgttctcaacgcaaaaactgcggtcaatatccaaaccaagctgcgtcatttttacagataagttgcacgttacaccggcttgacccatagcttccagcgttctgacattatattgagttgcttcgatagcttcttctctgcttgaaacaaattcccctaaatgatcaagcgtacaaacaagtcctttttcattcaattcccgtacttttttaatcgcatgttcaattgtgtcgccagctaccacttgagctgcaccaaagcgaagaccccattttttcgccgctttgtttagcgctttattttgggaagcgtgaagaaacacatttttagatacctctgctaacataaatatctccccctatagaaaaaatcccttgttgttttaagatagagcagcctagggctgctctactgagtattaaagcgttgtgcttgttgtttttgcttgcagatgcagaatcaagtaatcaggaccgccagcttttgaatctgttcctgacatattaaatccgccaaacggctggtacccaacgatggcacctgtacaaccgcggttgaagtaaaggtttccgacgtggaactcttcttttgcacgctcgatgtgctcaggcgtatttgaaagaagggcacctgttaagccgtagtctgtgttgttcgcaatttccatcatatgatcgaagtcgcgcgctttgcagaatgctacgactgggccgaagatttcttcttgcattaaacgtgctttttcatctacatctgcaatgatcgtaggctgaatgaagtagccttttgaatcatctgcttctccgcccgtcattaaacggccttcttctttaccgatttcaatgtactttgtaattttgttgaaagaagcctggtcaataacaggtcccatatacgtatttacatcttcaggactgcccattgttaatgtttttgtcagcgcaactgctttttcaagaacgatatcgtatacgtcttggtgaacaaccgcacgagaccctgctgaacacttttgtccagagaagccaaatgctgaatacacaatagaagaagcagctaaatctaaatcagcatccttatctacaacgaccgtgtctttaccgcccatttcagcaataacgcgttttagccagatttgaccaggctgtacttttgctgcgcgttcatagatgcggcagcctacttcacgcgaacctgtaaatgaaacaaagcgtgtttttggatgatctactaaatagtcgccaatttcgcttccgcttcccggcacgtagttcagtacgccgtctggaaggccagcttctttcattacttctacaaattttgctgcgataaccggtgtattgttagccggttttaatagaactgtatttcctgctacgattgctgctgctgctgttccagccatgatcgctaacgggaagttaaacggtgaaataataacgccgacaccaagcggaatgtagttaaatttattttcttcaccgtcgcggctttcaaccggggcaccgtcttttagctgcaccatttggcgagcgtagtattcaaggaagtcaattgcttctgctgtatcagcatctgcttctttccacggttttccggcttctttcacaaggtaagctgaaaattcatgcttgcggcggcgaataatgtccgctgcgcggaaaagaatatctgctcgtgcttccggcgcttcttttttccaagtattaaaggtagaaagtgctgcttgcattgctttttcagccaagtcttgatctgcttttgacacgcggccgataacttctgttttatttgctgggttaatggactgaatttgatcttctgttgtaattaattctccgccaattacaagaggatagtccttgccaagctctgattgtacaagttctaatgcagattcaaatgcatctttgttttctgcaatcgtaaagtctgtgaaaggctcgtgtttgtattgtttgatttcgttgatattcattgtgttcattttcattaccccttttttagaaaatttgcaacataattaatattccaacaccctatacctgtattataatcaccttattatcgttttgtacatagttttttaacaaaaatgttcaaaaaaatttaaaaataaacacttttgtttaaagaaccaatgaatctatggtttttatagtgattttgaacaaaacgaaaagaaaggagtgtcggtaaagtataagaaaagatgttttgaagtgaagaattacgataggggaaagagtttatagttagtaaattaaaatgatcttcctttcaaaaaaaacaatagacaaagttgttcaatataaattatcatataattcgaaaagtaatttttgtcgaatgaagctatctttttcgtcaagtgaaggctttatttgaatgtacacataaaaggagggtaggaaaacggcagttatttgtccatattattgtaagggcttacatatttaacgcgcgatgcgaaggacgtgtaattctttaaatgacggttcctataaggaggattttaacatgagtcatcaaccgcctgagttaaaaaaagaattaaaaattcgacacataaccatgatttctttagggggaatcattggtgccggtttgttcattggaagcggatcgctcattaacgcagcgggtcctggttccattttttcgtacgcgtttgccggtatgctggtgattttagttatgcgaatgctgggggaaatgtctacggctaatccttcaagcggctcgttcgccacatatgccagagaagcgcttgggccgtgggccggctacacaatcggctggctgtactggtttttctgggtcattgttattgcagttgaagcgattgcgggttcgacgattattcaatattggtttccgtctttaccgtcttggggcgtgagtctgatcctgacgtttttactaacgttaacaaacttatactctgttaaatcatttggtgaatttgaatactggttttcacttattaaagtagttagtttagtgctgtttttacttttaggaggagcgatcatcctcggtttaataccgggagtagagtctccgggagcgtcgaaccttcttcatagaggaggatttcttccaaatggaatcagttccgtctttttaggagtggcgattgtcatgttttcttttatgggaacagaaattgttgcaacagcggctggagaatcggctcagcctgagcgagcgatcaccatcgcaacaaataccgttatttatcgtattttaattttttatcttgggtccattttaatcttagtgactattcttccgtgggattcttcaagcttgatgaaaagtccgtttgtttcgatattagagctggtaaacgttccggcagcggctcaaattatgaactttatcgtactgactgctgttttgtcctgcttaaattcaggtctatacacgagttctcgtatgctgtactcaatggcgcaaaaaggagacgcgccgcgcatgtttttaaaagtgaataaaaaaggcattccgtttaatgccattgtaggatgtaccgtgatttcttacatcagcgttggttttaactatctttcacctgataaaatctttttatttttagtaaacgcatcgggaggcgtagcgcttcttgtgtaccttgttattgctttttcacagcttcgcatgagaaagaaatacgaaaaagaaaagccggaagcattaaaaatcagaatgtggctgtttccttatttaacgtatggaacgattgcggcaatcacaagtatctttattgcgatggcatttattgattcacttcgcactcagttttatctcacgctgctgattgctgtatttgtggtatgttcgtacttctttatgaaaaagaaaaaagatgatagttccctatcaggacaggggaataaaagaatttcttaatagaagagaaaatcatcacgaggggctaggaggaagtaaattggcaaacaaagagttaaaaagagggcttgaatctcgtcatatccaaatgattgctcttggaggaacgattggggtagggttattcatgggttcagcaagcaccattaaatggacggggccatccgtcctgcttgcgtatgctatttgcggcgtttttattttctttattatgcgtgcaatgggtgagatgctctatttagagccaagtacgggttcgtttgcgacatttggccataaatatattcatccgttagctggttatatcacggcttggagcaactggtttcaatgggtgattgtcggcatggcagagattattgcagtcggagcttatatgcagtactggttcccacatttaccggcgtgggttccgggaattgtcgccatggttattctcggtggggccaatttaatctcggtgaaatcgtttggagagtttgaattttggtttgcaatgattaaaattgttacgattgttctcatgattattgccggtcttggccttatttttttcggtcttggaaacggcggcgaagcgcttggtctgtcgaatttgtgggcaaacggcggtttctttacaggcggatggtcaggctttttctttgccctgtcgcttgttattgctgcctatcaaggagtagagcttattggaattacagcaggagaagcaaaagatcctaaaaaaacgttaacaagtgcgattcaaagcttaatttggcgtattttaattttttatatcggcgccatctttgtgattgtaacggtgtatccgtggaacgagctggattcactcggcagtccgtttgtttctacgtttgctaaagtaggaattacagcagcggcgggcattattaactttgttgtcatcacagcggcaatgtctgggtgcaacagcggaattttcagtgcgggacgtatgctttacacgctaggtgtaaacggtcaggctccggccttttttacaaaggtttctcgaaacggtgtgcctatttatagtaccgttgcggtgatgattggcttagcggcgggcgttgtcttaaattatattgcaccgccaaacgtttttgtgtacgtgtacagcgcgagcgtgcttccaggtatgattccgtggtttgtgattcttatcagtcaaattcgttttcgaaaagcaaaaggagcggcgatggagcaacatccatttaaaatgccttttgctcctgtgacgaactacgtaaccatcgcgtttttatttatggtgcttgtaggcatgtggtttaatgatgaaacgcgcatatcgctgattgttggcattatctttttagctattgttgtgctgagctactatgtactaggtatcggtaagcgcacggaagctcgttcttctgaaagacgtaagctagtgaaataaatgattttgtaagaaaggctaaaaaacattttagtttaaggagaagatccgaacgatgaatgtaacgcgttcggatttttttattggtatggtgaacgtaagtttcagctcatgtatctcatttgtttgtctttagattggattgattttgttatgtcttaatctcttttggacagaggagaagaagcgaagtcagcgcttttcttaggctgttttcttcttttattaatgaggtgcatggcaagaaggaaaaagaaaaaagaaaaaattagagtcaaaagggcgtgttcaggcataagataatccaactcaagtgaaatgcaagcggcgtttttcttgaggaaagagtaattaaagaaaaggaagtgttcgtatgtctggaaaccctggatatggtcatggatctggttttgctttattagttgtattgtttattttattagtgatcatcggctgcagctgctacggcggaggctttggctggtaattcactcatttcaaaagccctataagggctttttctatacttataaataacgttttttccctttttgataaatgtttacatgaaaaccgtttacttcactcataaagattttagaaggaaaatctgctgttttgacagatgaagtgatttcgacagtttgatacgtttttggttccaacctaacagtatgaagcttaggtttattcatcatcactaaaaaaggggtatcttctttaaaataggagcgttcatccagtgctacttcaaacgtaataggttttgagctgcgattttcaaatgaaaggtcacaggtgcccgttaatacggtttcttttttatttctctcaaatgtacaaacgctgttttccgcatcgtaagaaatggcatacatgcctggtaatacgatcttttgcatcgcttcaaccatatgaccaggacccgatatgacaataaacgcagctaaaatcgttagttttaaacgatgccgatttaaacttttgtaaagggcaaaaagaccaagtgaaagtataattccccaagcattgctagcatattgaattcccgtcattgtttcttcatttccatagatgggaaggcctaaaaaagaaaagacagaatgactgagcggcgttgaattaggaaaagggatgtttaaaataaaaacagctagtaaaaaggtgagtccttttatcaaaagtgatcgttcacgaatcatgttgttcctccttagctataaatcacgtattattatatactattattatcttattttgtaattaatggttattttgctacgcgtggaggaaagatgaatgaaaacttttttattagttaggcattgtgaagcagaagggcaagaagcaaaagcatcactgactgaacaaggcatacagcaagcccagcagttaatggattatttgaacaagctgagttatcccattgataaaattatttcaagtccgtacaaacgagccgttcaaacaattgaaccttatgcaaaagatacaggtctgcctcttcatatagatacaaggctagaagaaaggcgtttaagcggacagcctcttttcaactggatagaagtattgaaaagagcttttgatgatatagactttaaggtagacggaggagaatcgaccaaagaagccgcggtacgtgctttagagctgtttaaagaaataatgaatgaaaaacagaaaacgactctgtttgttacgcacggcaatttgatgacgttaatcctcagatattttgatccgaagtttgggtttggtgaatggtcgcgtttaacaaatccggatgtatatcaaatcgatctccaaaagaagagcgtttccattacaaggctttggaatgagcagacaacaaattgatgaaataaaagatttttctatgcatttgtgcagatgacaagtttagctcagtataaaaaccttatgccgcatcacaatccagaaatgttggtagcctcaaagctgccccgtaggcttttagcagatacataattagtataaagtctgtcttagaacagaaacttgctatttctaaattgatatgttacactaaggttaattatttttgttcggtatgaaattgaaagaagagaaatattcttcaatagaaatttttatctggaaatagtacgattgagcaagggtagtaatatatgtgtggagtaattccaccactggaggaaatagtatgactgaaggtacagtaaaatggtttaatgcagaaaaaggtttcggtttcatcgaaattgaaggcggagaagatgtattcgtacatttcagcgcaattcaaggcgacggattcaaatctttagacgaaggtcaaaaagtgactttcgacatcgagcaaggtcaacgcggtgcacaagctgctaacgttgtaaaagcataattttatgcaatccaaaaaagactccgactttggacggggtctttttttattgtagcaaacacgcaggtaacggaggaatacgtatgagtaaagcaaaaggtaaaggcggcacggggcgaggcaccggcaaaaaagggtggaaccgctggcaggcgagtgcaaaaaagaagaaaaatgcaaagccttataaaagcaagggaacaaaaaatgctgataagccggaaggcaactaatcctatatgcgcagtatcatctgcaacttcgacttactctgcttgagtaagtttatttaatatggaagtatttttttattgcttttttgacagattgctgtcactatatgaaataataaaatgatttgtgtgaattttctataaaaattgattttttttgcaagcactttcatatttcgacaacctttttggtttttatcgtttatacttctttataatagattatagaaagatgcaggggagcataaagtgagagaggaaagcgacagtttactctgtacgctttttacgtttctggaccgtattgcagtagcgtcgtaacaagtagatcatgcatcagtttagaacacatcaaaactcaactaagtgtaacggggggatatgagtgagcgtaggcatcgtaattgaaaaagttcaaaattatgctatgttagaagatcatgttttggttgaaatggttcatagtggagacgaaaaatcattagagtatttaatcaacaagtatcaaaatcttgtaaggggaaaagcaagaaaatactttttgattggtgctgaaaaagaagatatcgtccaagaaggaatgattggactgtacaaagcaattcgcgactttaacgaagacaagctaacatcttttaaagggtttgcggagttatgtatcacaagacaaatcattacggcaattaaaacggctactcgtcaaaagcacggtccgttaaattcgtacatttcattggacaagcctctgtatgatgaagaatcaaactatacgctgatggatatgattcctggcgatcaaattgctaatccggaagcggtgctgattcatcaagaaaaagtggaagaccgcgaattaaaaattgcggaaacacttagtgaattggaaagaaaagcattgacgctgtatatggacggccattcatacgctgaaatttcgaaagaattaaatacgcacgtcaagtcaattgacaacgcgctgcagcgtatcaaaagaaagttaggtcgagacgtagaaagcagacaagctatttcataataggtaaaaaacagccggacctcaaaggggtttcggctctttttcacggtcttttaaaatgtcttgaataatttcaatatgaacagaagcccacgattgttcatggaaatgaagaaacacgcttggaatgagaataaaaacatacagcacgacaaagataatccaaagccagctgccgtctttaaataaaaattgctgcagccgctgcgaaaataaaaaaaagagccaaggcaaggcagaaacaaggatgggaatgacgccggagccgtttttttctttggtcattcggtaataaacttttcgcaaagtagcgctgtcgagcgtaaggtaaagctgcaggatttcttctatttccgctaattcatcaatttcttctgcgttttggtgttgatgagccgcttttttcagtttaaggtagactttatgagcatcgccgcgcagtgaaaacatataccagcctcccgcatattgtttcgtcttctttaacagagtttgcaggtgcatgtaaatatatacaaaaagtttcgtgatacgaaagaataagaaaatagaagtgaaagcgtaaatcattagtagaaatttagagaaaatagctgtttttcgctcttttttgccgcctttacacattgactagcagcacatatactaataaaagaacaattagttacctaggtaaataaaagtgtgaggtgagaaaaagtgaataacttggtgtttcatgagcttcatcaaaagtcgaggttgtctattaaagaagtaaatgaagtgttaaaagcgtacgggctatacagctcacagtattcgattttattttgtttaaagcgattcggctcgatgacgcagacagagatttggcagtatttaaatgtcgaagcgccaacggttacgcgaacgttaacaaggcttgaaaaaagcggatggatcgttcggaaagcaggcagtgataaacgagagcgcatcgtttatttatctcctcaagcgaagaaaaagcttccggaaattcaagaggaaatagaacgtttggaagaaaatttgctgattgctttatccgacagcgaacaagatcagcttatttcgttattaaagaaaatttgtaaatctacagaaaagggtgaaatgaatgacgaaccagcaggagccaatctggactaaaagctttatcagcattgcaattaccaacttttttatttttgtcgtgttttatgcattgctgacgctgctgccgatttatgtattagacgccttagaaggcacgagtacgcaggcagggcttgttgttaccatctttttattatctgcgattattgttagaccattttcagggaaagtcattgaaaacattggaaagaaaaaaacgcttgtatttagtaccctcatttttgcgctttcttccttcttatatatgttcatccaccattttaacgtgcttttattactgcgcttctttcaagggatttcattcagcttagcaacaaccgtcaccggagcgattgcagcggatttagtgcccgctaaacgacgaggagaagggcttggctacttcggaatgtcaatgaacttagccgttgttgcagggccgtttttagcattaacgcttcatcaatacatggcatacaacattattttccttgtatttggcgtgattatgctcgttggctggctgtgcggaatgatggtcaaaaatcttcaagaaaacgctgctccgtcagtaaataaatcattttcactgagcgatttatttgaaaagaaatccatgccgatttcatctgtaggtattctcgtttctttttcgtatgcaagtattatttcttttatttctgtgtacgcacagtcgcttggattgattaaaacagcaagctttttctttgtcgtattcgcagctgcgatgctgatttcacgaccgtttacaggaagattatttgataaatctggaccaaacattgtgattattccatcatgtattgtctttgcaattggtctatttagcttaagccttacacattcttcttggatgctgctgttttcaggtgcgttagtaggtctaggctacggaacgctgcttcctagcttccaaacgcttgcgattcaagcggcgcctgctcatcgaagcgcatatgcaactgccacgttctttacgttttatgatagcggtattgcggttggttcatttgtattaggaattgcagcaggtgctttagggtattcaaaactgtactttgcgcttggtatttttgttcttttgattacactttactacaagtggattgcaaatttacgtcaaaaacaaaaagcagcaaatatccaggtgggcatgaaataaaaaagctcggcgccatacgcgccgagtttttttctggattttttacaggactttggaaggtaagcatatttaagccaaaaggtactagccaattcctatccatctgcacgatactttaacagaggaaccatttacatataaaacttcttggatgaaataaaaaacaaaggagaacaaagatgaaagtaatgaaacctcttatggtcacagcgttagggcttagtcttaccattttttataaaggcgcttttcctccagaaaaagccgtgcaagtacaggctgctacagatgaaaacgtgattgctgacaaagcaaaaacgtatgaaggagcggattatacgtctggaggagagacgctaagcgaagggtttgacagctctggcttcgttcaatatgtatttaagcaagcgcttgatacaacgcttcctcgttccgtgaaagaacagtcagagcttggaacagatgtcgataaaaatgagctgcaggcaggcgatgtattgttttttgacaccgatgaaaacggtgaagtggacgtagccgctatttatatcggagacgatgagatgatttatgcatcttcttcagacggaaaagtcgttgtgaaaaacatttcaagcagcgcgtattggtcatcacatttcgccaaagcaaagcgcattacaggagcaccggaaattgcaaaagataatgaagttattgcagaagcgctaaagcatctcggcacaccatatgtatttggaggcgagtcgccaacggacggttttgactgttccgcatttgttgcatatgtatttcaacacgcatcggacgtgtaccttccgagatcaaccgatcagcagtggcaagttggagaagaagttgctcgcgcagatttaaagccaggagacgttatcttttttaaagacacgtatcgtgaagggatttcacacgtcggtatctacgcaggcggcaatcagtttattcatgccaagcgcagcggaaatgtgacggtggattacctgacaagcagctactggacgtctaagtacgcaggagcaagacgctacgatgacttatcgctgtcaaaagacaattcatttgtgacggaatctcttaaatatgtaggagaagtaccttacgcacaaggtgagacaagcccttctacaggctttgatacggctggttttgttcaatacatttacaaagaagcagatggaaaagacattccgcgctatgcgagtcagcagtgggaagcaggggaaactatttcacaatctgacttgaagccgggagatctcgtcttttttgaaggaagttcacttattccatctatctacattggaaatgattacgtcgttcacgtatctacatctgagggcgtgaaaattacaaactataaagtagacagctactgggcgcctaaatactacggagcaaagcgcatgccataaaggtaaaaaaacaagacagtctggggctgtcttgtttttttaataggtagtcaattgtttttgtatatctttgattcgctctagcgttatcccttcccgccgctcgacggctaaagggtgatcggttggctctaactcgatgagcggtcttgttccaacagatcttgtatgcacatttgtttttaaatttaacgtttcgggataacctggaattgaaactgaaaaccagccgaaataaggcggttcattttctcttttgtcattttcccataaatctatcattcgatggaaattttcttcgcttaaagaaacccatatgttccaagtgaaaaattcttcttcattaagaacaggaatttcaacacagcctcttacgaaaaaatgttcttggttcatgatacaaatctctgaatatagttcaaagtcgttttggctttcatcgtctgacgcgtcataatagtaaaaaggagcttcacttgtatagctcataggcaaagcaggctgagggtgttcacaggttaagtctttatagggaagtttgttcgttttcttcttgccatataatcgtcttcttcgcatattattttaggctcctcagataaaagtatcttcattataatacaaaaaaatgactgcttaagcgtataatgtgtaaaaagatttgattccccgtatcttttgaacttcctttaatcgtttagtaaatagagagtgcaaaaggagtgaaaattatgtcacattcaaaaaaaattgaaacacaaacagaaagctttgacgatgcctgctggaacgagcattacccaaaattacagcagtactgccgttttttaacgcaaaatgcgtgggatggagacgatattgcccaagaaacgtttttaaaagctcagcgatataaaggtgaagagcacaagctgtcttccgcgctgttaaataaaattgcgtatcatcactggattgatctgctgagaaaacgaaagcgtgaagtaatagccggagaagaagctttggaccaacaagacgacaagcaggcgtttgatatgaaaggacactctgttgaactgcttcttagtcagtttacgccgaagcaagcggttatctttttcttaaaagaaggattccgctatcaggtgaaagaaatcgcttcgattttacaaacgtcagaaacagcggtgaaaagcaatttgcatcgtgctaagcagcgtctagaaaaagacggtgagccgttttccacagattctttttgggatgaaaaagaacgtaaagagctgtcagagcttttttataagacgctagaagtgcaggatccagcacttttgattcaagctttgccttccttaaaaagcgtcattcaaaaaccaacgtatactccgacgtgcactctctgcatggctgcatagccatattacgtgtgataaggaggatatatatgagtacaattccatatgtaattgaacaaagtaaccgcggtgaacgttcgtatgatatttattcgaggctgttaaaagaccgaattattttaattggtgatgaaattaatgatcatattgccaacagtgtggtcgcacagctcttatttctcgccgcagatgatcctaaaaaagatatttcactttatattaacagccccggaggttcgacttcagcagggtttgcgatttatgataccatgcagtatatcgagccggatattcaaacgatttgcacgggcatggctgcttcttttggcgcactgcttctcctagcaggagcaaaaggaaagcgctatgcacttccaaatagtgaagttatgattcatcagccgctgggaggggctagagggcaggcgactgaaattgaaattagcgcccggcggattttaaaattgaagcagcatattaatgaaatcatatcaacacgaacgggacagccggttgaaaaagtggcaaacgatacggaacgagattattttatgagtgctgaagaagcaaagacttacggaattattgacggtattcttttgccgaaataaaggtataacaagtaagcatagacggcagcgtctatgcttacttgtctataaaaataagaaaaaagaccttagtattatctttatttttcttaaaaaggtaggtattatataaaatataacagattttagaaagaaggttttacacatgcaagaagtgattggagtagagcagcggtctctgtttcaaaaagtattagtaacatttattttttcgttatttatttccacagttggcttatacgtaggtcaatatgtgccgccggcttattttattccgttagcgattgctgaacttgtgatgctggttgcggcatttatgttaagaaagaaaaaaagcgtaggatacggttttacatatgcgttttcatttatatcaggcatcacgctgtttccgattgttagccactatgcctcagtagcgggagcggaagtcgttctttatgcgtttggaagcacgttcgttatttttacggtgatgggtgtaattggcgcaaaaacaaaaaaagatctagggtttttaggcagctttttattagtggcgctgttagcattagtgtgcatcagcattttctcgctgtttagtccattaacaacgcctggactcatggcattttcagtgattggtaccatcgttttctcactttatgtgctgtatgattttaataaaatgaagcacggtgaaatcacagaagagcttgttccgattttggcactgtctttgtatttagattttattaatctattcatcaacttgcttcgttttttcggtattttaggaagcgatgattaaaacgaaagaggctgggacaaaagtgttctagctgaaggaagatccgaacggtgaagattcttgatggagaatcaacttcgttcggattttttattggtagggtgaacgtaggtttaatctatttagttgcttctagctgctgattgaagggcaaggcgaagactcccgcggaaagcaaagtcttgcacggcaatcaacagcggcctaataagcaagccataatatatcatttgttcaattttctcttctttagagtagagtggtgtagttatgtctcaatctttttttgttttagttattctcctccatctccattaacgtcattctcggttttttcataatttggaccggtagcgtaaggctctttcaacagtttgccaagccacgtggaacttgtagcaacaacgccgtttttagcgtgaataaattcactgattgtatatatttcaacgacttgctttcgatatttctgaaataaaaatgcgctggcaacaacgccaatgctaatgattacatacgtattcacgaaagcctccttataaaagggttagtgttatgtatgccggcgagtaaaaggatatgctcggaacattgtaaacaaacagattgatgtaaatcataattgttacgatttttaatggtttcccttatggatatttttggtattatatatttgtaatgaaaaataagatgaggagaagagccagtcttaagaggaggggaagtatgaataaagtagctattacatcgttattctttttcttactagttggttgcaaccaagaaaaggtaaatgtatctacacctaatgatgagcaagttccagtgtcaggaagcattgtggttaatgataaagagtacgaaatgtcagtaggagaatatgaatggaacggtgacgatggtgcgcacataaccaaaacggattcttactcaccaaaagaggttgctaaagaatttgttgaccttacgctagagaaaggtaccaaagttaaaattctactaaaaaacaatccaaaacttactgtttatcaactaaaccaaaacaatcaaaaagaaaaaattacgataaagaataatcgtattgaagtgtcttcaaagagcggttactatctttatgaagtatctgggaaatggcctcatggaaaagcaacttatttatttgatgggaatataaaatagctagctaattgcatattggtgagttatagtaaatggttatacatgcatgaacctaaaacaagttcgtttagtggtgtaagcctttgaaaaaatggtagtatagagcatgtctggtacatagagaacgtaatttttttggaaggatgcatgttagtggtgaattttaaagagttttttaccatttcttcgtatgaagtaatggagcatttgagtcgaaaagaaaacggaaagaatatagatgaatatgaagtgatgctgtacaacgaaaacatcagtcaaacggaaaatgtaaaaatcaaattcaaaaagacgaacgatgaaatagaagcggaaaaggtacaaacgctctcttattttaataaacagcgtcctaaacaaccatgtgcgatttgcggaagcgaaatgatggtaaaagagaacagcagcgaagaaccagaagtttatgtacatgattgttcatttaacagtgaggaaatagaggattgtttaagggaactagtacaaaatgaacttttgcaggatgaatttactcaagaagaatttgaccggaactatggagttaattaccgtgatgacagtaataaagaatatggcttttacgacgcgcaacaacgaaatactttttataccatctttaacgatagtgtttatcacacttcctacgcaggaccacaagagttacgctgtaagttttgcgggatggatgaagagctgcttgtcgtagacggagccttctaccaaaagtgcgcagtgctaactccacataccaatcgaattattgatatgattgaagcaagaaaacaaaatgaaccggacgtaccaaaaagcttatgagagtaaaggtgctggcagctgctttataaccttcttggtaggagtttgtaaaaaacataaaaaaagaagcttccttttgagcgaaaggaagcttatcaagtttgtacctatagggttgagtacacaattaaatagctatcggaataaccgatgaatcattaaagtaaacaacttctgaaagaatactgcagcctttcagctttttgagctgactaagtgcttcttccttactgtcaaactcgtacattttcatttcaccttttcctacataacacgtaattacatacattttagaagtacctccacctatcatttatcaatttattaataaaaagccataacggcttttattcctattaaaatagcgtaagtgcgcctgtgacaatagcaaggacaatcagaacaagagaggttaaaactgcccatttaaatgcaaagcgctgatgttcaccaagatcaacacctaccatacctacaagtaagaaagtagacgcaacgagcggacttaacagatgaacaggttgtccgagtactgaagcccgcgcaatttccatcggatcaattccgtaagaagcagctgtttcagcgaatattggtaaaacaccgaagtaataagcgtcgttactcatcacaaatgtaaacggcatgcttgttaaagcaacgattgtcggtaaaaacgaaccgagtgaatcaggaactaaatgaattaacaggcttgccatttcgtcaaccattttagtgccggatagtattcctgtaaaaataccggctgcaaagacaagggctgcaacggttaacgcgttgcctgcatgagccattaaacgttctttttgatcctcgagttttggatagttaatcataagagcaagcgcaaaaccaatcataaataaaacggaaacagaccaaatgccagaaactaacacgaccatgagtgcaatggttaaagttaagttaatccagatttttttaggctgtgtaatatcttcctgagaagttaaggacgcgtcttcagcaaaagcaagcgagctttttagctcaaactgctcaatgtcaatagcaccaagtcgtctgcgctctttttttccaagaatatagcccgtaaaaatcacccacaaagctccgccaattaacgttggaagaagcggaataaagaactctgatgcatcgaggtgaagggcgacaatcgcacgagtagccgggcctccccaaggcgtcatactgctcataatactaagagaaagcatcgcaactgtcgttaacactaacggactcatattcaggcgtttataaagtggaagaagagcagaaaccgtaatcatataagtggttgtaccgtctccgtctagtgcaactaaaagcgatagaagagccgttccgatgacgattttgagcggatcgccttttacgatttttaacagctgcttaattaatggatcaaacagtccggcatcaatcataaccccgaaatataagatggcgaacagcagcatcgcagctgacggagctacttgttttagcccttctagcatcatgtctccgacgcctttgccaaaccctccaatcaccgcaaaaagaagtggaatgatcattaaagctacgataggagacatcctttttgacataatgagatacgtaaagacaataatcattgtaaaacctagtagtgctagcattcaaacaacctcctttattttccctcttttctttgaaagcgttttcttttagagtaaaaaaacgtgactaacatctctcatccccatgcatgagtcgtagtttgattattaagaatttttaaagccgctctttactcccgctgatgtttcttgttttcatgttagtacattttgaaaaataaaggaaatataggtttttttagaaagttcataaaaaatttttataatggtaatctagaaaaaagcttggtccaaaagagaggttctcccaagacgcaaactttttagcttttactttacttttcacttcgcttcaaaaagtcaataaatgctttcacgaccgatagattcaagtaagaaggatcgtacatgagccacgtgtttcgaagtaaaggtgattcatctcggtacgaaagtccgtatgtatataagttgtcgctggagtgaaggcaaatttcaggtaaaattgcaaagcctaaatcatttttgaccatttctttagccgtttcttgccggtcaacttccattgccacaaacggaggctctgaaaacttgtcatgccaccagtcttgaatgagatcttttaatgacgtatcggttttatagttaatataaggcaggttcggcaagtcatcgatcgcaatttcttttttcgaaattaagcaaagtcgctctttcgtcagcagtgatttttctccgttccacgggtaattgcctcgtaaaataccaacgtgcacacgcgaagagtctaatagattcataacttgcgtactccagcccgtattgacgctgaactgtacatttgggtagtgaagagagaactgctttaaaattttaggaagcttatgctgtgcaaagttactcgatacccctaagcgaagcgttcccgtaacggtttcgctcatattgcgcatgctgtcttttgtttcctgcagctgcttccacatattttccgcatagcgaacaagatgctcaccttcagatgtaaactcaattcctttttttgttttaaaaaaaagcgtcacgccaaattcttcttcaagatttttaaggcggtagcttaaagaaggctgcgatacgtagagtctttcagccgttcgcgtaatgttcttttcttcgtgaagcgttttaattaatatccaatctttttgatccatcccaatccccccttgtatttagattataaaatttttttaaaaaagacaataaattttatgtattttacttatgaccacctctattatacgataaatggcaaatgaaccggttctaaatagtaaaaaaataaaatggtttgatgaacgcctcggcgtttgttagtaggggagaaaggtgattaagatgacgcgtattcctgtaacggttatgagaggtggaacgagtaaaggggtttttatcaatcatgaagaaatgcctgtgaacaaatcggattgggaaccgtttttgctagatataatgggaagtccagatcaacgtcaaattgacgggttaggcggagctaattcgctgacgagtaaaattgcgattataaaaaaatcagatttagagaaagccgacgtagattacacgtttgcgcaggtcagcatcagcgaatctctcgttgattttaaaggaaactgcggcaatatctcttcagcggtcggcccttatgcaatcgaacaaggacttgtacaagctgtggaaccggtgactaaagtacggatctataatacgaataccaaaaaagtaattgtagcggaaatagaagtagaaaacgggaaagtgaaaacagaaggatcgtgtatgattcctggagtgccaggtacgggttcacccatttatctttcgtttgaaaacggagaaggagccgttactggaaaactgcttccgaccgggaacgctattgatcttctgcaaacatccatcgggacaataaaagcatcaattgttgatgtaggaaacccgcttgtatttgttaaagcagcggatattggcctaaagggaacagaacttccgcatgaatacacggacaaacagctgaagctgtttgaagaaattcgctccattgcagcggaaaaagcggggcttgcacctcaagacaaagcaactaaactatcaccagcggttccaaaaatgacgattatttctcctcctatggaccaccgagacgggactggcagagacaaagctgcttctcaaatggacgtattaatccggatgatgtcaatgcaaaaaccgcatcaaacgcttgccattacaggagcaatttgtacaacggcggctatttatacaaaaggcacgttggtgtcggaaatggttaaggtaaaagacgataccgttcgaattgctcatccaatgggaattatggaaaccagtgtggatttaaaagatggacaagttaaaggaattaaagtagtgcgtacagcccgtcttatttttgaaggatttgtttatacaaagcatacgtacgatgtatgtttatcaagttaataatgttctctaaaaaaagctctttctaggaaactaggaagagcctttttatgttagaatatttttactgaatattgaaaaagtaagtgaaggtatgaaaaaaagaacgtatattgatctaagccacatcattgaagacggagttatcacacataaaggcttgccggcaccaatcatttgcgactatttaagccgagaagattctagaaggctttatgaaccagggactgaatttcaaatcggtaaaattgaaatggtcacgaataccggtacgtatattgacgtgccgtttcaccgatacaaagacggagcggatttagctcaaacggctattgataaaacagccggactggaaggaatagtggtttcagtcgacccgactttaacggctattgatgaatctcattttcaacatatagacgtaaaaggcaaagcggtattaattcacacgggatgggatcgctactggaatacagacgattatttagaaaaccatccatacttaacagaacgcgcggcagcttatttagtgtctcaacagcctgctcttgtcggaattgattcgatgaatattgacgacacaaagggaaaagcaagaccagctcatacactgctgttaggagcggacattgtgattgctgaacacttatgtcacttagatcaactaacggagtcctttttattttacgccgtgcctcctaaaataaaaggagccggaacgtttccggtaagagcatttgcggaggtagaaagaaaatgatccagttacataggtatatagaagtgcaggagtttaaaaaccatgtagaaccgcttttagcgaaaaatgaaattcttcataacttagcgcttggcattttacacagcttacatgaaagcagcaaaccaaattttatgggcgttatttttaaagatagatgtgctgcgcttgttttgctgcaaacgcatcctcagcaaatcatactgtctcaaatacaaaagctaacggagcgtgacctaagcgaagcggcggagctattacaaaaaatcaacacaccaggcttagttggagaaagacaaacggttttatatctttctcaaaaactagcagatttaaaaaatcaagaagcttctttgaaaatggatcagcgtatttaccggttagacaaagtaaaaaaagctgcggatgctgaaggaatgctggtaaaagcaaggctggagcacctttcgctcgtaacggagtgggttcgagagtttatggatatcattgggaagcctatatcgaaagaacaagctgccaaagcaggaaaagcttttattgaagcaggacggttatttttatgggaagtgaacgagaagtacgtatccatggcaaatgccgcgcgtccaacagctcataatattacgattaactatgtgtacacgcctcttgaagaacgtaaaaaaggctatgcatcaagctgtgtgtccacgctttctcagcttatgctagacgaaggctttcaaacaacaagtctatacacagatatgacaaatcctacgtctaacaagatttacatggaaattggctatgaacacgtggctaattcagcattggttttacttcacgaaaaaaagtagcaggctatctgctactttttctatgaattaaggttttgcaactaagtttacgtgatttaatgttttggcatcatcaaagataaattcaagatcataggcgccggcgtgataggtgtacttcgtttgagtagtaccatcaccttttactttgcttgtaaagttcggctgacctaattccttctttaagttagcttgcgtgatggagcctagatttgtttggcgctctacatttgtaccaaaatagcggatttcgttaatgacgttattttgatcatagccaaatgcatatccaggatggcccatttctgcatgatagtagtcaaagttgtttgatgagccttcagggggcggaccgaactggtcgcgaacgtcttgacgcagggttttgccaattttgaagtctgccgttaagcgtggcacttcaccttttaccccggcattataaatttcgttaatgttttttacagctgtttgactttgactgcttgtttcttgagatgtagctgcgtgtgctggtgtatcaagctgagcgacaggagcaaatccaaatgcagcaattcctgtaatcgttgccgccgccgccgcttttgatagtcgttgtttcattttcatgattttttcctcctatatataacgatttagcaacctcagtctacctaaaagagcaggtaggccagaatagtcaaggagtcttagttgagttggtaactgatatatatatataatgtaacacctcttttagaatgtaaacgtcggctaaagtgaaaagtagaaaacgattcgtttttcataggtgtaaagggtggtttatattcctttattatgtaataaaacttaatataggaagaattctaagtctttataaaaaactggataataaatgtaagtatgatacaataaaccaagtatttgttaaaaatatattatttattgctggagttttgatgtatggaaaaaaatttgatgagaggtacgcttttgttaacggcgtcttctttactaacaaagattttaggttttatttatattattccgtttacagcgttagtgggaacgtcaggctacgcgctttataagtacgcatacggtccatatacattgatgctaagcttatcaacgatgggtcttccgcttgctgtttcaaagtttcgctcttgctatacctattactacaatactagtaataaaaataactacgattccaatattggttggggtatcaaagaatatttttgaaaccgccaaagcgataatgagcccaatggctattccagataattcttttattaatttcaacgttaacacctcttaaaaatactacttaggaaaagtctaacattagtgggaatgttattccaccatcatccggttcgctgaagaaatgttcgtttatgatttaatagaatcgaactttatactctacctgcgttaaagttttttgtgtgaaaaagaaaaataatattgacaattatgacaaaaagcttaatactgactttattacataaaacaaatacaatttgtttccttatcaagagaggtggagggactggccctgtgaaacccggcaaccgctgtctatgacagaatggtgccaaatccttaagagcgcgctgctcttagagataaggaagaagctgaaacgaagctcttccttgtttaaggaagggctttttatgtagaaaaaacaacgaggtgatacatttgaacaaagcagaccgtattaaacgaatgaaaacaccggaaattgaaccaaagtatgaaggacgagtgcctccgggccaggtagtaacggagcgctttcccattttacatgaaggcgacgtgccggagtataacttagaggagtggacgcttcgggtatttggattggtagacaaagaagtgacgctttcgtatcaagatatattggacatgccgcaaacgacagtgaaatgtgatattcactgcgtaacgagatggacaaggcttgataatgaatttacgggcgtgctgtttacagactttttaaaagcagttggcgtggagttgaaaagtaaatacatcatgctgcacggagataatgactatacgtcaaacattgagggaaaagatttactgagagacgatattcttctcgctcattcctttaacggagagccgcttacacctaagcatggatatccgctgcgattggttgttccgcatttgtacttttggaaaagtgttaaatggcttcgaggctttgaagtcattgatgaaaatcatcctggcttttgggagcaaaacggctttcatcttagaggagatccgcttaaagaagagcgtttttctggagaagatttaggtattccagaagatgagtgggtacataaagactatgattaatgaaaatgcctatgcgtgtgcataggcattttgtcagcgctggcggtttaattcccacacaacgtggcgaagttcaggcaaaatcagcttggtcatagctagacgaacagcaccgcttgatcctggtgtagaaaaaacggctttttcgttaatcgtcccggcaattgcccggctcataatcgccgcgctgccaatgtcttcggtgtagctcagcatgcgaaacagctcgccaaacccaacgatttctttatgaatcagcgcttgaacggcttcaatcgtgacgtctcgttttgtaatgccagtcccgccgtttgtgagaacaacgtcaatgtcctcatcactgcatccggcaagtatcgcttgttgaatcgacgtttggtcgtcttttacaatttcataggaagcgacctgcatgtcgtgttctttcagaagttggatcattagcgcgccgcttttatcggtttcttttgtacgtgtatcggataccgtaatgattttgcaacgaacgggctgagttgctttagatttatgttcatgtacgctcattatgtacctcctttacgattctgtgcgcttgtagtcaccgtttttgccgcctgatttttcaagcagatacgtttcgccgataatcatgcctttatcaatggctttgcacatatcatagacagttaatgcgcaggcagaagcagcggttaaagcttccatttcaacacccgttgagccttccgtttttaccgttgcttctattaataaacgatattgatcattgcttgtatcccagtcaaatgaaaggtttacgccttttaatagaagagggtgacacatcggaataatgtcagacgtgcgttttgctgccatgattcccgctacttgtgcgacagcaaggacgtcgccttttccgatcttatgttctacaatggcttcgtgaatttctttgttaacgagtatgcttgaacgagccgttgcgacgcggcgagtgatagatttttcgctaatatcgaccatattggcacggccttggtcattaaaatgtgtaaaagaagacatcggtgttttcatcctttttcagtaaattttgttgtatgatagaaatagtgagatatgctatgattttacaccatagcgcaaaaagtgaacagacataaaggaagtgaagaatgtatgttagaaagcagaacacctatttcaattcctgaagcaattgaaaaagttatgacatataaaagaaaaggcagcatcgaacgcgtatcgatcaccgaaagctatggaagatatttaggagaagatattatcgctgaccaaaacgttcctcattttaataaatcgctttatgacggctttgcagttcgagcgcaagactgcgtagaagtctcaagtgaacatcctgtggagttcgaagttgtaggtgaaatcggtgcaggttttgtttttgaaggagaagtaaagccatttcaagcggtgcgcattatgacaggagcgcaggtgcctcattcgtgtgatgcggttgtgatgcttgaagtaacgaagtcgtatgaaaaagaaggtaaaacgtatatggcgttaagccgacctgcttcaaagtgggaacacattgcattaaaaggagaagaaacgaaaaaaggagacgtgcttgtttcaaaagggacgcgcattaatccaggtgtcaccgcttttttagctacgtttggctatgcggatgtcgctgttgtgaagcagccggttgttggggttttaacaacaggaagcgaactgcttgatgtgaacgagccgttagaaccaggaaaaatccgcaacagcaactcctatatggcactcgcgcaaatcgtaagaagcgggggaattccgaaatatttagggaagcttgaagatgattttgaccgctgctatgaagcagtagaaaaagcgctcgaagaagtggatattttgctgacaaccggtggggtatccgttggggactatgattatttgccggctatttatgaaaagcttggcgccaatgtgctgtttaacaaaattgcgatgcggccgggaagcgtcacaacagttgcagaacgaaacgggcagctgctgtttggactatcgggaaacccatctgcttgctatgtcgggtttgaactgtttgttcgtccaattgttcgcagctttttgcattctcctctgcctcatttacataaaacaaaagcggtattaaacggctgcttcaaagagcctaatgcatttacaagaatggtgcgaggagagatttcagacgaaggcgaaaagcttgttgtgacgcctgttggcatggataagtcaggcgctatttcgtcattagctgcagcaaacgtactgattgttcttccaggtggagagcatgggtatgataaaggaacagaagtgaacgtgctgcatcttgaaaacgaaggtacgagttcgctttgggtataaaaagactattttttatgtaagagttctagtctgaatagtgatcaaagtactggtaaattaacaacaatatatgaggttgtgtataaaaaagaaaatgagtatgcgaacgagtccttgtgtaccaagggctcgttttttatgatgtatttcggaaggcgtgattatgttaactataattatatatcatatacagcctgaaaatagaaaaagctaccttagataaagggtctagctttttgggttcagttcagagaaggtagttttttctatgacgtaattgggtttcatgagtgatgctccattgcatcttgggtagtttgcttaatagataaaaaatatattcatactaattttaaagcttctttatttttggtattagtgagtggtttcacatgatatatctacttaacgaatagtaactaataaccatgggaactttatctattaacaaaaggaaaggaggagaaagtatgcagaaaaaatggtctgttttattatgtacgttagctttagctatgaccactttcatctcaccggttaatgctgaaaataataacgtagatagagcaaattacaatgatgacgtaaatacctataacgatggcgtaaatactcgaaatgtcactacagcaactgatgtggatgatgacaatgattcaccttgggaactacttggattattaggactagttggtctttttggtcttaaaagaagagatgaccgtgaagaaaaagttcgttaatatctattttgcatgagtagagataaataaaggttgtcaaagattagctttctctagagtccacaaaggtgtcttctagcaattagggacacctttgttatttcctataaagtatattacgttgaatgaatctgtgtaggctttacataaaaagcagaaaaagctccctatttccgtagggagctttttttgctgcaagaattgtttctcacataggtcgatgcgttgcggcatttccaatagtttaattaaatgatggaatattattcgctctttaacttacagcttttagttttgatttagagttcaagctccataagctaaatagtacggtcattaacccaagtattatgctagaccaaagtaccccatctgttaatgaataaacaaagggaaaaagaacaaaccataatccggtaatgagcgaaatccatttttgccatgaattccatcctgatttagtagtttcccaaaaagacatgatcacttgaagggttccaaatacaatacttgctgaagtagctcctgcatcgtataaaaacccaagcatccaaggagcaataacgagccaaataccgattacagcgttaataatacctcttgttttcaccgctatccctcctcaaagtatgacactcttcattctgtcattattaaactatatatttgtaagagacgtgtgttgagtattcttcaacgcctgttgagattttttcaacttttaacataggaacaagcacttctgttgatgagttctcataagatgtttcaaaatcaaatataagaaagagagtggaaaacgaatgtactattgcgttacttgctgcagattgcaaaatgaaaatgttattaagagtaagctgtttgaaaatggattttatatagatccattttcaggagagaaaattcctttaggtatgtgtgcgcataaatgtaaccatgagccatgtgaaaaagaaaaaatcatcaaaaaggttgtgccaaaggaattatttaaattaaagaaagcaatagagtatttacctgctcatcgttcagaaaaagttccgttttcacaataaataggggcataccgcgttcagttcccttaataaaactcagtttttattccgtaagttgattcattaccagttgtacagctattgcatcgtctaaatagccgattggaaagacatagtctgggataatatcggtaggcaaaataaaatacagtagcgcacttcccaatattgagcgcttggcagctgatgttttttcatcacaatattcaagatacatttgctttaattgatcaataaaggttccgacgctgccgacttgctctattttggtttgaaagttattacaaatcatgctgtgtccttcgtctgtctgtgcatattgcttatattttgttagttcttgttcgacacgttcaatcgtaaagtttgtatctgctatattaaaagatttaagtatttcttgaattttatcaatggagtaatgaatgcctgtttctaattcattttctgtattgtttgaagcagctccagcagggtcaattaatgcttcaagaggagtatttaaatagtgcgcaaattgttttaaatgatgtagatttgcttgctgttttccatttataatccgtgagatagttgctgtatcaatccccgtaagtgagctaagtttccgcatagataaagcattttcctttaataaagaccttaataacaaaccaagactttgactttgatcattttgggtgttggacatcgcgattcacctctttatatttttcaacgcgcagtgatcattttattgaaggtttatcaacaatatatgcaacaaataagcaaatctcctcaacattatcaacaaaaggagaatacaaaatggaatggttattcatattaggttttgcattatcatcgagtatagataacttcggtgtaggaatatcatacggagttcgaaaggtaaggataaaatggctttctaatttactgatagcagctatttgtttcctctttagcatggtggggattatgtttggcaggtggatttcaacaatcttgccaggagtgttccatgttattgtagccgtcgtattattaacgctaattgggattcgcattattttattagttgtatcccaaagaaataacggaagtgatgaattagatagtagtggtcaagaaaacgtacgatatattgggtggatcgaaagcattgtcctaggtgttgcactttcagcaaatgcacttacaaacggtctaggagcgggtttacttggtttatcacctttagctatttcgcttacatcagcatttggcagttttatcaccgtatggctaggagtaatggtggggaaaaaagcagcaaatgttcaaattgggaaatttacattgagtcaatttggaacgttgataagcgggattacgattttaattgtagcctttactcagatattctaaaagaagagacgccatttattaaagtaaatggcgttttttctttgtattttgtagtaactggttttccataggttatacaaagtaaaaagtagatgattaatgctcttatcaatgctacatgagaatttatttaatgaagaggtaagggaacttaattctgtaattatttcttgttaagttttaatcgtacttgagcagggtatagtattctttagtcaaagcaccaaaataaccggcgtaaacgttatctcatttacaacataggtacactattctaaaaaatagccgtataccctaaaacaaaggggagaacatctagttttgacagacaagaatgcaaagcgtagaattgttctaacgaatagacaatttactagtttaagagtcttaacatttaggttcattttatataagggagcgtacacacttgaaaaatcagtttgctcaattgatacagaataatgaaagcgttcatatttactataatattgtcgatatgagaagttacttagataaccttgtgtcttatattgtgtcggggattgaacaggagagacatactttagttatagaaagtgaaagactaattccgctgattttcaaaagagtagagggaattttaactaaagaccaattaacatatatacataccattaataattttgactattactgttcaagtggaagttttcagccttccataatttttgaacatctgtctaaacatttagatcctttctataaaaacaatacgtcttttcaaatatgggctcatgtagaatggggacagcaagaagggattatacctattttagaggagtttgaaaatgaagcagacaaattagtaaataaaggcggattatatttagtatgcgcttatgatgaagagagagtaccagaagttcttaaacttgctttaatgaaatgtcatccatacttaattttagaaaacaaaattactccatccaatttatatgtaatgacagatgcagtgtaattaatagtatgcttgggcttttattcttaaaaaacaaaggtaaatagagaacaaataaggagccttatttaaggctccttatttgttgtttgtacagagtatgtataccatagatctttatatctagtgtgtatcttcaattaaaatccctattccttaaaatgaagttttttcgtatctgctctgtctcattttccataacttctggatagtgcctagataagacattagctaaactttcttctttaggtatatgtaaaaaacgtgaatatacttccgtaccgcttggtaactcatcttcttcacataagagaaaggcatctaaactctcaatcaattggaatttcacagtctgatcataaacgttggtatagctgtcttcacattcttttgctttcttttctgcaaattcataagcttgatcaaatgattgggttttaactaataagatactttcttcaaatatctgatgttcttcataattttcgtcaatcttttctgtattaggtttaccctctactaagtacttataaagaacctttactccataccactggacatctaactcttcgctattagttgttttcatataaactctccattcttaactaaaggaaccataataattaattttatcatcgtattccttatcgtcctccttacttatataactgagtttgtatatcgtgttcatccactaatctatgataaaatggaaatataatcaaggtatttctatatattagggggtgtaaaatagaatatattgatcaaataacaaatgctgcggtgaatggagaaagtgaagagataaaagcgttattaaataaagaaccatctttacttaacgcttttaattcagatgggtggacacctttacatttagcttgttattttgggcaggtggatagcgtcaagttattgttgtcgctaggggcggatattcatattaaggctaaaaattcgaatgaaaacatgcctcttcatgcagcagtagcaaataagcaaattcaagctgtagacttgttgcttacaaaaggcgcagatgtaaatgcaaaacaaagcggtggatggactagccttcatgaggcctcgttgctaggagatgaaaatatgattaaacttctcatcgaaaaaggcgccgatgccgatatcgagatacaaaaagatgatgggaaaacacctttagaggttgcagtagagaaaaaacaagagagcgcagttcatttgcttactcagtatttaaataataaagcttaatatagagtaggagattttatgttaactagaaacatatatagtatgcattttctatttttaatctttaattaattacttatcttttttcattttccataataagtttgcaatgaatgcgctaaaaaagccaatagaaattaaacaaaaaccaatttgatacaaaatgaaattccagttgtctccaaaagaaaaaagtgtaattcttcctgactctataatatcaacactaataaataaggaaacggtaataaaatatattaaaaagaactttttgtagaaatagcttttataatcactgctcaatttactcacctcaccttaatattacggcaagtttatctatatgtttattgttttaatagatattaataaaaatagaaagagaggaagaaatatgtttaatcaatatcctattgggaaatttaccgtgaaagaaaatattcagaaagaaaatattcaagggtggattcatgacattggagatgccccaaagcaattagctgatgctgtagaagggctgacaaaagaacaattagccacgccttaccgagaagggggttggaaattaagccaagttgtccatcatttagctgactcacacataaatgcttatactcgttttaaattaggcttaacagagcaagcgcctgctattaaagcatatgacgaagtggcttggtcgaatcttcctgataatgatttaccgatagaagtttctctccaacttttttcagctttacataagcgtcttcataaagtgttaaactcacttgatgaaatagatttaaagaaaacgatccaccaccctgaaaacggggaagtgacgattgagcaattaatagccacttacgcttggcatggcaagcatcatattgctcatattaccacattaagaactcaaaaaggatggtagaattgggttcaatatatgtgacttctgaaaagaggcggggacaaacgtattttagttgaagtaacaccagaacacttaatcaatagtattcattaagtgttctggtgttttattgttatggtgaatgtaggtgcttctagctgctgattggaaggcaaagccaagcccaagccctgtacggaaatcaacagcagcataacaagcgatccatacgagctcatttatccatttttttcgcctgcagatttcattgatttaattatgtctcaatctctttttttattagtaccaatagcggtgattatgctaactgcaggtatatatcgtataaagcttaaaaacagaaaaacttccccaatgcgttaaggaagttgcctctaatcctgaatagtaatttattcattctatatttcgctatcagatccaacttttgaaacacctaaggcaaggtttttccacaaagtttgttcaaccgcttcggcgtctgcagcatgacaatcaacaatgagtatgacttctgaatgttttccacgcaggagccgttgatttttcctgattactttaaatataaatagtttaattcctaatcctaagataaatccgataaaagcactaataattccccaataaatagggccccagcttaatttaaagccaatgcttgcaccaatgacggaaaaggctgtggctaaagccattcctaaatcaataagagaaactccatctgatcgatgaaggctatcaaaaatccggcgattttctgttcgattattaagaggaacaataaatatatcctctttctttatcccttttctctctagatccgaaacagctaattctatgtaactggagtattcaaatgtagaaaaaatctgcatattctcactccaccttttttcctttcacaatgcaaaagcttggatgttgatacgttttctcgaagaaatttttttgctctctttccacaagtttattattctcaacagtattcatataggaatcaaaaatagcaaaaccatatagagaagggaaaaataacaaccattctttatttaaaacggaagtagcctgttttatttctcctaaaaatagcagagaaatcccttcaagcaggtgagaataataaaagaaaatgactgcccaaatgataacaaagaaagcaccaatgatccgatgaatatagagttgtcctagacctggcatcaaaaaggaccaggcaatcgacaaaatgggattccttttatctaaatagtttatttccatggctcctatactaaaggagttgaaccgatgattttctctttcagctaacacgtatattttatttaaatcaacggttgttcggtaactatcccatatagcaaaaatataaacgggaatataaatgagaagccatcttgtattaagcacgtctttggccatatcaatgtttccttgaaaagaataaatcattgctaaatttacatgagatttaaggtttatgacgacctcccatataaataacacaaagccgcgaaggtatttagacagtagcaagtgtccaaacccaggaaaagctgctgaccaccaagcaacaatataagggtttcttaaatgaatttgagtcgttccaaatatactaacatgagcaatatagcgtcttgcagtattatcatttttataattattcatatacgatctcctatgattggaagaaaatacacttttatacctatcattcatatttaatatggtcttgtttacttattttatgcaatccattgatatacacttaatctttatcaaaatggaaaaattcgttgacgagaaaaagctctttatttttccatagagagcttctttacatgttatttttgaaagttggtattatattaataaagaagtagttagatgcttcacagcgccttgactcgtttgttcaagatctagcattatgttcactacgtttttatattctatacaacataaaaaccggaaaaactactgctcctgtgcagtagttttcctagtcgttgaaatatagatgttgtgttgataatcctctattgaatcttcagtagtgtgctcaagttatcaataactcatgtactaaaaagaaaaatacaccttaaatgagggtttccaaacaatgtttcgtagcatgttgtatggttcacttaaagtgaaatcttcacgttttatacgaattttatgattaacaatccgtggtttttgacttgtgaagaggtggtggaactaaccagcctttttctttgttaagtcgcaaaaactttccaccaagggctactttctgcatgtgaatttgaccaaacattgctgcaatatcttcacgaatagattggccaatcagttgactgcaagcaactagaccagcagctatatccagtgaaatagccgcagcaacttcggggtcttgaacacgtgcacctactggaatatcatctaaacaagcttctggacgttcaggcggagttggaggtaaagccactccattttcttttaatagcttttctacacctttcatttcctgctgacattgttcaatcgtttcttgtaccaacttatgtagatccttgtctcctacatgatttagaaacgtttgataaccagctactaatccttttgaagcagaaagaaatgaccatgttccaaacacttcaccgtaatgcatcggttcgtctgtaggatttccacttaaaatacccattgttatcctccttaacatattcataataatgtgccacctttcttactatgcacacacttaacttctccatatcatgttttattattcttctaaatataaaaaaagaattttatcagggaatacaatctactattttacgcatactatttaagatgcctataagggcatcagtcacaatacccttgttatacagagagctgccttctttggcagttttttgttttgtcatgctttatgtggctttctgcttatgacgataaatagaaattgtccataataaaaggaagagtggagacccactcttccttcagccatcaattataaagttgtcttagaagcgtccgccgccaagttgttgctcagctaattgcacaagacgctttgtaatttcgccacctactgatccgtttgcacgtgcagttgtatcagcaccaaggtttacaccaaattcgctagcgatttcatatttcatttgatcgattgcttgttcagcaccgtatactaataattcgttgttgttgctgcttttgttgtttgccatgtagtgtcacctccttgtttttcttaagtttcctatgagaaaagaaatgtatacgtggtaatttatggatttataggtccttttcattgaccatactaaagaatagaaacaatttacgctgtaaaaagtggaattgcatatttcatttccttgtgaagaaaactatatccttgccatgtgcaggaaaaagaatgacaacttatttttcattttttttatttcgtttatcgtatgtagaatagtgcaccgccacgaaagtgaaggagaagaaagccttcaacttcaccatcaaatttagtataaaaatatctggtatttgaaggagaggttaacgtaaccaacttcaacgaaccaattgaattatattaagttaggctactgtatttcccttagctaagtaaaaggggtgtacatgcagaaaaagctacctgcttatagagcaggcagctaaagccataaagggtattaagtttaattgtaagtctcaaaattaacgagaagtacctgattgtcctgaaacaccaccagctaattgttgttgagctgttgctacaagacgttttgtgatttccccacctactgaaccgtttgcgcgtgcagtcgcttcagcacctaggtttacaccgaactcgctagcgatttcatatttcatttgatcgattgcttgttcagcaccacgtactaataaatcgttgttattactactgttgtttgacatattctttcacctcccttgtgtgtatgcttttatcatctgtattaagtgaaaatagatacaaggaaagtattgactgaataaaaggtgtttgaactgtgataataaagaaagtgatggatatatttctctacgcaaataatcaaagtacctccttcatttccttgttatctaatatatagttgccatgtggaaagaggattgcaattgctattgcaatcctctttaggtaccgtatgaatggttgttcttatactaagtataaaattaaaaatgcaagagaggaagaggttatattgtcaaaaacacgtcagaaaaaagaatattgcaaaaagtgcagaaaagaaactatacataccctcacagaagatgctttagaaattaactgttattgccatgaatgtcattcacaacacgatatcataaaaacatttttttaaatcatttcctgcagtttcactctccaatagatgaataaataactattttttaggtatatcaataaccaaactccatattctcctgcgctattgaatctcattttgttcgattatagaagcagagaagaacagggaaagtaaccgggaagatttttagtggaggtgaacgaaaagtgagcagtagggaaagagaccttataaccattgaagatgaacaaggtattgaaaaacaatatgcagttgaggctttatttgatatgagagatcagacttatgcttctccagacaggtttcttttttggtgtagcagtaacttattataacgcagctctcattgcaagtatgagagctgatatttcaaaaagcagccttggatagcttgtggatctatagccgtattgggaaagatatgattgataatcagtggatggaacagcctcctcaagcaggtgaccgtaaaaggttagattattagaaaaacgttcttaataaattaatgtttaatcctccgagcatgctactaaaggtgatgtaaatcatcattccgtataaggttacgtgtaaacagacaagactactgttcaggagcaggagtctttttgtttttaggatgtatcttctatacactcttagttaacatagttaaactaagaatatttttctgtattatccattaaggattagagaatcttgtgactaatctctaataaatatataaaatatactcctactaattaaatattcgtgttaggaattataaccaa

SEQ ID NO: 22 - DNA, 86990 bp, Priestia aryabhattai
  source 1..86990: mol_type = genomic DNA
ttgactgaattacagataaagggaaaacaagcaaaacaggcatctcacatcctagcaaatataagtagtaaatgtaaacaagatgctctatttaaaatggctgattatttacttacatataaggaagatatcttaaaggcaaatcaaatagatttaaacaatgctttggaaaatggaacatcaaaaacaatgttagatcgtctattgctaaatgaaaatcgtattgaggaaatggcaaacggtttacgacaagtcgctactttaccagatcctattgatgaaataaagaatatgtctgtacgtccaaatggtttacaaattggacagcaaagcgtgccattaggagttgtaggaatcatttatgaagctcgtccaaatgtaacttgtgatgcagccggattgtgtttgaaatctggtaatgcagctatattacgaggtggaagtgaagcaatatactctaatatagctattgtaaatatattatcaaaagctatttctgatgcagatttaccgtcaggcgctcttcaactaatcgaagatactcgacgtgaaaccgccatagcattaatgcaacttaatgaatatgtagatgtgcttattcctcgtggaggttcagggttaattcagaacgtcgtgaagaatgcaacagtaccagtaatcgaaactggtactggtaactgtcacatttatgtagatgaatcttgtaatattgaaatggcgaaatcaattattattaatgcaaaaacgtctcgtccttctgcatgcaatgcagttgaaaaagtgcttatacataaaaatacagctgagaaattcttgccaatcatctttcaagcattaattgaagaaaatgttgagatacgtggagatgaaagggttgctgaaatctgtccaaatataaaattggcaacagaagaggactggaaacaagaattcttagactacatcttagctattaaagtggtagaagatattgatgaagctatttcacatattaataactatagctcaagccattcagaagcgattatcacaaacgattataatcatgctcaacactttctaaaacgtgtgaactcatcagctgtgtatgttaatgcatcaactcgttttactgatggagaagagttcgggtttggagctgagatcggtattagtactcaaaaaatacatgctagaggcccaatggggttaaaagaattaacaactacgaaatacattatttacgggaacgggcaaactcggtaacaagaagtttataaagagaaatatgtattgccggtttttccacatagtatatagacataaactattaaaaaaatatattctattgtttttttagggataatgataattcaaccagaattttcaaatagataaaaggtagctaagaactatttctaactgccttttatttatcttattaattccttaaataatttccgataacttacattacggtaagtaaaaaccaaaaacatttgaataatttaagaatttaattaactaaaatctggatcatttaaattattattattaataaccacatctgctctaaattgtggtttatgttcatctatatagatttttgatgctgcatgatatcttttaataaacattgcttcagatttttcataacttccaaaagcctgttcttctcgtttagcacctctttgtctagctaactcaaagtcagtatcaacgaatattttaaaatcatataggtcacataattgtttcttgaataaaaaagtcccatctacaattaaaatcatgtccttactcgccacttgcatatcgggtttaacatactgatctgttgctaactctaaagaagctgtttgataatgaaaggttcctcctggtcctaaaggaattaaaagcttttgcttaaaggattcataatcatgagcatcttgataatagccaagagccgactcctttccctgtctgtaacgaatacatttgggattatgaaaatgatctatgcttgttctaataacattcttttttctagtttgaagttccacagcgagttcattagcaagcgttgtctttccggaagctgtaattccactgatccctactcgaatgggatggcttgcttttaaactcaatattttatctactaatttagaaacaagttttcctcttaacatgtaatctctaatctcctctcaacacattagtttctacattagaaaaggttatacagctagataatccgttaaaacgagatttctctacacagacgattaacgagaaacgggtggtagatattacgtatatccctacggtaagagatggttggtgctatttggcgtctgtattagatttgcattctaattaaaacccttttcataaatacaccttcaattctctaataatcattttctacttattattctttgactactgttaataaaagatagaaactttgtatattttatcatgttttttgtattcatgaatatcactactacctaatcaaatgatcttattcttatacggactgaagttcttctttataggtaacaaaaaagcataaactcgttggtctccaacaaaatttatgctctatctttaataagacttttacgaattctcttttaatccagtcacaaatgatttctgtaaaaactataaggctataaacaaccttacacaatatctcgattcaacgatttatctttaatcactttaattctttccactttccctacaaggaagatataagaaagtgcccctaagagagccaatgccgctatgaatactagcgctggagcaaagtttcctccttttgctaagaaaccaataacaattggaacgatgatagaagctaaacctccgataaagttaaaaactccgcctgtcaaaccgactaaatgtttaggtgctagcgttgagacaaagacccatgtaatagaagctaggccatttccaaaaaacgcaatagccataaacatgataatgagagatgtgctatctacataattggcttcgataattgaagttgataaaagtagacctacgataataggtgtttttcttgcaatacctaaagatactccttttttcactaaggcgtcagatacaaagccagataataatacccctacaaatgctgctaaaaacggagcagatgctaggaagcctgattttaagaaatctaaccctctgtattccacaaggtacgttggaaaccaggtaaggaagaaccataaagtagagtttacggcaaactgacctaaatagatgccccatagcttccggtgagaaaaggcttctttaagatttccccattcgaattttgctctttctcctttcttatcaccagctttaactaagcctccaccttcttcaatatgctgtagctctgctttatttactttactatgctgagaaggatcgcgataaaagatataccatataatgccccacgctataccgataatcccggtagtaataaacagacctctccaccctaaaaagtgctgaatggtcaccaatgtaggggttaaaaatgctagccccgcaaactgtcctgaagtataaaaagcaatagctgatgctctttcctgattgggaaaccagctggtgactactttattattggtaggaaaagccggtgcttcgaatgctcctgtggctaaacgcagaccaaaaagactcacaaatcccttagtaaacccttgtaacagcgtaacaatagaccaagtaattaaactaaaggcatacgtgacacgagcgccaaaacggtcagccattacccctcctggtatttgcagagcagcataagcccatccaaaggctgaaaatataagacccagttctactgatgatagctttaaatctttggacatggccgtggcggctacagaaatattacttcgatccatatagttgatgacaacgcttatgaaaataaatgctaaaacacgaaatctaacgcgagtcggcttttcgctataccccttcattcccttatccccctgtatatgactagtttaagaaaagatctgactgacggtcatttgtcaatcagatctcccgtactaaaatggtttcccctttaccattccgctacagaaccatctctatgacgccatactggattacgccaattatggccgatatcagccatttttctaacatggtcttcgttaatctcaatacctaaaccaggtccatcaggaatttttacgaagccttcttcgtatttaaatacgtggttatccacaatataatctagtaaatcactgccttggttatagtgaatgcctaagctttgctcttgaataaatgcgttgtgacacgttgcatctacttgaagacaagcggctaatgcgattggtcctaacgggcaatgaggcgcagctgctacatcaaaggcttcagccattgaaataattttcttacattctgtaattccccctgcatgtgatagatcgggctgaataatatcaacgtatccgtctgttaagagctttttaaactcccattttgaaaacattctttctcctgtcgcaatagggatggatacgtgattggcaatttctcttaacgcctcattgttttcgggcaaaaccggctcctcgataaacattggacgatagacctctaattctttagctaaaatctttgccattggcttatgtactcgtccgtgaaaatcaatacctattcctacataaggtcccactgcttctctgacagcagcaatacgttctactacttgatcaattttttcatatgaatccacatattgaagctcttctgttccattcatttttactgctgtaaatccttttgaaacaacttctcttgctgcttcgcctacatccgaaggccggtctcccccaatccacgaatacactttgatggactctcttgcttttccgcctaatagttgatgtacaggagcatcgtaatattttccttttatgtcccacagagcttggtcaatccctgatatggcactcattaaaataggtccgcctcgatagaaaccgcctcggtacataacgttccaatgatcttcaatatttaatggatctttgccaataagatactccattagctcatctactgcagctttaacggtagaggctcttccttcaataacaggttctccccatccgacaattccttcgtctgtttctatttttaaaaataaccagcgtggcggcacttggaacaattcataattagtaattttcatgtactttttcccctttcgttatacgattcactgcggctacgtatgctttagccttttgtgttagctcctgcagatatgcatgagtaatttcacgatttgtatcaactaaagaacttccaataccaaaccctacagcacctgcttcttcaaattcttgaatattgtctaagctcactcctcctgttggaagaagtggaatatgtggaagcggccctcgaatatctttaatatagctagcccccagcctagcagggaatacttttataatatctcccccattttcatatgccgttaaaatttcagtaggtgaaaaagcacctggaatactaaccgcaccgtatctttttgttagtttaatcgtttccgtgttaacagttggagaaaggataaactttgcacctgctaaaatagctgaacgtgctgtttcagggtcaagcactgtacccgctcctactaatacttgatcacccagctctgtagaaacctctttaatggctgaaagtgcgtcaggcgaatttagagtaatctctatgttttttacaccgccgtcattaagcgcagaggcaattttcactacatcctgcggtttagctcctctaataatcgcaacgattttatgctctaatagatgtgataaaatatccgtcattggtaagcccctttcttttatcgtataacgtcttcttttgtaatcgcattcataaattcgtaaagctcttttttatcaggcaagccttcaatatcaccctctacggttacgaccatagctcctatagcacaccctcttttaaccgtttcttttaaagaagatttatctattaaccccgatagtatcccagcggcgaacccatcaccagctcctactggatctatcactctagcaactttaaaaccttccacgtaagcggattcatttttagtcgaataataagctccttcctcacctagcttaataacaactagttctgcacctaattgatgaaacgctgatgcaacatcttcaggattatccttctcaaataaaaactgaccttcgttcattcctggtaagacaatatccgcatatgtagccactttagttagtgtttgacgcgcagctgtttcatcccaaagcgtcttgcgtaaatttggatcaaacactatttttacaccattttttttagcagctttcatcgcttgaaaaacagcttcgtggcaggagtcgctcagcgcaggtgtaattcctgtcacgtataggtattttgcagacgagatatattcttcattcatatcatgcggattcataaagcttgctgctgaaccttgtctgtaataaaacactttactgttcatttcatttgttttttgctttaaaaaaagacctgtaggagcattatcatcaaatatcacatgtcttacatctattccttctccttttatacttgaaagaatacgctctcctagctcatcttttcctaatcggctaacccatcccgtttgataacctagttttgacagagcgattaatgtattactttctgctccagcaattttcgaagaaaaatctttagcatatctcatctttccattcgagtgtggggtaaacagaatcattgtttcccccatgcttatcacatccattttacccctcttttcatttatctcttcgcctcttcatatccagcaataaaagatatgttttttgacgtttgaagcagcctttctacaataaagtctttatgcttcagcattctttccttaggcccagctacactaatagcagcttgaatgcttccctttgctccaaatacaggtgcagcaaggcaaaataacccttcctcattttcttcatcatcaattgcatagcccatttgaataaaagagtctagattgtcattaagaacttttttatctgtaattgtataatccgtaataggcagtagttctatatgttcaagcagctgttctcgctgatctttaggaagaaaagctaaaaaggtttttcctaatcctgtacaatagagcggctttcggttaccaggctgagcagttgttctaatagaacggttattatcaatcttaacaacgtagactaattctccatctgacagcaaagccataaatacagtttcttgaacatcctccatcagtttctttaaatacggctttccctcagaagaaatatctaatgattccatagccgctgttccaatttgaattagctttggccctagcttatacctctttaatgagtcctgattcaaatacccttcattgtgaagtgttcccacaagattaaacgtactgctttgcggaagcgaaagtaaatcgctaacctcttttactgttaatccctcgggatgttgagcaatcaattcaaatactcttaatacacgttctgctgattttactgacatgaagaaaccctttctgaatcacatatgtgattttaaattttatatatgatttactgatttaaatattatcatagacagataattaattcaaaatatttttacaaattaaataaaaatatttatgacagttcctgaaaaaatggttactaaatagcaatataaaaaagtttctatgataaaatcatagaaactagaaaaaattgtaacgggagctaattatgaaaaataaagattttttattatctattgttttaaatatctttttagcttatctatgggtctttctcatttatttaatttttgattttgttcagttaaaggagaatgctttgttgcttggactagcacttgcatccataggtactctgctctttgcagaggtaataagaagagttaatccctttgtgacatataaaattactcaccctgtaaaaattgcgggatttatatcttttgggttgattgctagtgcgaatctatattggataagtttttgaaggttatgatactaattagaagaggtaaaattaatttggaaagaaattttgttgtagcgatattaatttgtgtattaagtattctactaagaattataatatttgttttaaattcgaatggtatttatgtgcaagatactaatttttctcaagacatgattaacctgactataaataccataatcctattatctggtaccaggattgttatgtataaactaaaagataaaactttaaaaacccttactgttatatgtgcgacctttctcatagtaagtaatttttgctggtggctaattatagatagtgatgctgcatacactgctttttattctcctaataggaatgaagagtttgtagttaaagaaacgcgtcatagtgaagtctatcgacttttgaaatttaaaatattatcaaaaaaactcgtggatattcgtggcgatgatggttacaaaatgttttacgaagatacatacaaattggaatggatggatcataacaaattaaaaattcattatctatttgatccaataagtcctagtgtttataaagatgtaactattacatacaaggaatattaaatacctagttatactaacagcctttagatttattaatctaaaggctgttttgattgttggaacaggtattatattagacccaacttattttttcagttcttccaaagcagctttaataatattaataatgacctgaggttgatcaacatgaagaagatgccctgctccctccacaataatatgtttactgttctttgacaaacgtgtcaggtctctttgaaatagattccaagctgcaaaggattcagcggtatgataagactgtagaccagcgctcacaactataaggggggtgtctcccaaagatggaacttgacttatttgctcaaagtttttttcaatgtcacctatagaaccttcgactgaaaactggctaaaataaatagacctcatttcttcagtaaataatggcggcataattttattttggtcttcatgacaggaatctaaaaggataattgccgctacttcttcaggatatttactagcatataaccttacattcgctcctccaattgagtgacctacaagtacgtatggtggtttaatattcgcgttttgtaaaagaatatgtaaattttcaacggaatggttactgtcttttgatctagcgtcttgttcacttttccccaagcctgatctatcgtagataaagaactgagcaaatgttgatatttcctctttaattggattccagtaatcacaagtgcatccatatccagattcaaatataattgttacgtcttcagtttgtctttcaaaaaactcataataaagtttaataccgccaatatcttgcatttttcctgttctaatgacttcttctatataaaaaccttcagatatattcacattttgataattcattcactttataaatcttattatttcgaaaaaagtattgccaaagatatcctagtgaaaaataagtttgatccataaatcaaaagaattagttagcattacaagagctccttttgatagcaatagcactcatgcactctattgtattcacgaacaactttttccttttcaggtcctgtataatgggcaaatgcctgaatgggctgtaggtattggactgaggtactaattgctttttttatttctgcagatgtttcaaggaagacatgcaaataagatatcattgctttgaaattgttttttaaataccatttatttacccagtcatcatcccgagtccacgcttcaagataagtaattcctagctttctaactcgcttttctgcttcacaaagtagttgagttgcaattcccttacggcgaaaatctggatgaacggcaaggttccagatcgtacctccaaacccactctctaaattggaacagactgctcctgtttgggattcacattcaacatcaataagtcccacgatttgcttatctgctacagctactagctcaacagctgaatttttatatttctctttcactctaagaacgttatcaaaataggcagtgtccaagaaagataatactctacactgaagccattcagtttcatctgtttctttataattccttatatacaaagaaatcctcctaaacttattaatcgcttaagaagactttttctcttatcactaataaaatcccttgttaataacaaaagttttaattagtcggataagaaggtattctcattatcatcagaaccatactgaattgcattagaaattaaattattaagaaccctttcaattgcactttcatctcctttaacaaacagtgattcttctggtatttcaatattttctttttataaaaattagaattttcttctttatattaagtagaataatagtcaagctcgaataaaacctgatcatctataataaaatttaggaaaaacctttttgctcatactaggtaggtttttatcaggttaattctatgaaatgtaatagattattcagatggaaaaaggagtgaatacaaatgagtttagccacctatataggttcgaatgtagaattacctattaatgatgaactggatgatgtagttactattggaagctgcttttcagatgaaatgcatcgattaaacataaaaaaaaatcattttactactccttatgtttatgaagtatcaagtgactggggaattgaaattacggaatatatgaataaaagcagactgaaagaatcaaaagagaaattacttgcactgtgtcaattgatggatcactatcttaaatcaggagatttttttgaattgtatagttgttggataggagaagaagctgaagagcgaaaaggagaactaactttaaacatccattattttgatatagatgctattgaaatgcctgaaaaaacattagttagaatcgaaaaataaacttcccctattatgctaacaattttttcgcatttataatacgaacgcaaaaaaagctatttcaatcgtattggcatcggagtgaaatagctttttctactttacattcaagagtgtgttagatccttatggatatcttcacatgtgaattgtatcacaaacttttctgcgtgtgaagataaaaagtaaaatttgtatgacaagtatcagaaaataaaaaagcaacctcgtttgtctgatattgctttttataagggttcattcgtgcatattcgagtacgaacgatagccgcattataacatctgctttattttaaactccaccattttataaaactcatcgttcaaatgttcttcttcaatccaaacttcattcatataaaacctccttcacttaatcattttgtgtattcattctaaaaaatttgtaatttgtaccattttatatagaaaaatagctggggtttacatctgtatgtctaaagcagccatacaaataacagcgagtttccaacgtaggttcataccttacaacaggagcttttccccaatacacttctttaaccgtatttttaatgaaagcaatatcttcttttgttacttcttcgcattctatcttaaactcttcttcctcttctggatcttgaagaacttctttcatgtctttttcttttctttgaatagtcttagaagcaagttcttcaatttcttgtgtttttgaaagcttccataacgaataaaaataagtcggaaagaattcttctgaataaaatccccaatctagctttgagtagattttaacaacctcttcgtaatcctctagaatgtaatatatctctgctatatcagcttctaattcctcttcctctttttcactcagcagcagtaattcttttgcagcttcttttgcttctgatttccttcccaaattcgctagacaaattccgtagctaaggagcggaaacaaactatagttgttagaagatcgcagtaagtgcgctttacgaaaacattccgctgcttcaggtaaccttccttttttgtagtaacataacccaagattatttagattttctagtgacggggttaaagtgatagcttcttctaatatgcctatcgcttcttcatacttttcttttttaatatacatttcacccattacgttatagggaaaataatgccttggtttgtttttcaataaatcttctactatatcaaatgcttctttatctgctatttcccatgtataagacatttcttcctcttctgcatcttcttcaaaacttcctaatcctatgtcttctataattggtttgccttctgcaaaataaaaatagcctaaattataaagggtttgaacagaaggttttatttcagcagcagtttgtagttgaaaaaaagcatcctcatactgatttatttccataaaaacgatagctagctcatttcttagctgtacgttgtttggatcttctttgacttgcttctgcatttggagcgcaattttttcaaaatctttttcatcatacttgctcatagtcatactccttttaaatagcaaacttaattttacatctaggattagtaaagccctttatgtaaaaaaaacaaacgtaaaagccacctcagattgtcagagaaggtagcttttaagaggaatttaatatagatttgtttcattatgaattatagtatattcttccgacaaaaactatattttcctgcaagaacacatccctaaaacctaagttatacattttgttagctgattctaccgattaaaattttaatctatcagcgatgtacagaaaactccatatcttagaaaatcggctctactctaaactctttttccatacaagctcgttttttgggtgttttccgaaaacgttaattatcgtaactagcatataaaatcttcaattgttaaattaaaggttcatttctatatattgtgttataattttaaacatgtattacggttgtagaggagttttaaattgaaacagaaagagattttttcgtggattaaatccattattattgcctgtattcttgcttttgtggtaagagagtacctattcacacctatagtagtagacggtgaatcgatgatgccgactttaaaagacagtgaacacattattcttaatgaagtaggtaaaaataaagtaaataatataaaaagatttgatattatcgtttttaatgctacaaaggaaaaagactatattaaaagagtaattggtttacctggtgatcatatagaatatcgcaatgacacgctatatataaacggtaaaaaatatgaagagccttatctagaccaatataaaaaagaaataacaacaggcccattaactgaggattttaaacttgaagattatacaggcagcaaaaccgttccaaagggtcaattatttgtcatgggagataatagaatgtacagcttagatagcagatcacctaaagtaggaacaatctccgtagacaaaatcgtaggaaaagccaaattagcttattggcctttaaaagaatttcaatggattaagtaaaatcttttaaagctcccttatgaaagggagctttttctatttctttaccagtccgtcacatgaaatgaagcattgttgctttaagccccacactaactgcagcccctgtttaaattcatttttccttatattttctgcgaaagtgagaaatagctgctgctcctacaccagcaatcaaaactgaaaaaatagtagatagcgtatcattggcaacaaacgtcttcaccaaaaatgcagatagaaaaatagctacaaaacctattcctaaatatgaaagattagtaattgattactccagctatagcattattcctatgtaaaaggctttacgattaaaaacataatgaacataataacggcaaataaagccccctgaagaacaaagttaattggtttatgagtatcttcattagcctttacaaacagctttgaccatcttatatacatcactaattttgtacaaagactaaacaaaacacctgcagtgattgaagcaattgctatttttaagatatgaattcactcctttctaacataacagaaggatgtccataacttagcataaacacctaaataatacaaaaatctaagaatcataggaagtagtctttccactttctatgccgctactggttaaccgtcctaccttatttttcaacgtaattttgattttttattattgctttgctgctaaatttaatgctgcggaagtgtaaccgcccgcccacggaaatcaaccgcggtgtaacaagctattctctcatctattccattcgttcatctgtagattgtattgattcatttatgtctcattctcttttcattttaatacatataaagcgtaatcctcttcattagaaaacccaagtttattggctaatactttcgatgctttattgttattatcgcaatcccacgcaggcataacattcttttctaaacatttatttataaacgcctgaccaactatctttcctaatccttgtcctctatagttaggattagtcacaatatcgatttcagctattgttccactatgaaaaatagatacacattcagcgatgatattttctttatggataagacaaactcctaatccgtttttcaaaaaattattctctgatccccagtactccactatatatgattcattgaaattctcactttcccttaaagaatcagcgttaaagtcttttaactcataaagattggacaggctgtacgtagaatgcacttttgaaggaagaaacctatacttagaacgcgtcattttctttacatacgttttgaaaggttcgtcaaaaaaagtttcccagtcagtggatggagtaaaaaccgtaaaccgcttctccttaccatacacgttctcaacaaaataacgatagagaaagttattaaataccatgtcattgccttgtccaaatacataatagtcacctgcacgtattctaagaaatcctgatgatggcctcatcatatcatttacgtacacagctccttgaataacatgattaacgacagaaaaagcaaatgtaggagtcttaaatgaggcttttaacatgttatttatcttgtaataatcttttggttctaaacaatgcattttatttcccccttaataaatatcactgtcttaattatataagtgcatgcacaaatttagttatcataatgtgctttatcgatacaaaaacagcccgacgaatagttaaaataaaggttaattactctttttcaggagagctaaatcaaaaaaattttatatataagtttgttataataaagattgttaaaagcaaggaggagtataagtgcacataagaaaacatgaaagacagtcattttatgccggatgtcaattcgtagatatagaagatcaagcaaatgaacacgccttgcctctccttattatgtatcctacatataaagaagaacaagttgaaaagatgggaccttacacggtaagcgctgcgcaaaatgctccactttcaaatggaccatttcctttagtcattatttctcatggcgatggaagcacgcctcttgcttatcgaaccattgctcagtttttagcacgtaatggttttattgtaggggtacttcaacatccgtttaataatcgagagaataatacgctgtctggaacaatagataacctaaaaaatcgtcctacccatatacgtactgtaatcgactggtttttaaaggaacattcattttcttcctacattaaatcaaataatatttctcttattggccattcaatgggaggatatacggctcttgctgtagcaggtggagttcccacttcttttccttctgaatctcttgatcaaaagccttattgtttatctgttgatcatgataagcgtgttcaatcatttattcttttagcgccagccaccggatggttcagggaaagaggagcccttgaagacgtgaatatacctattttaatgattacaggcgaaaaggatacgattactccttcttttcacggggaatttgtgttaaatggcgtttctgatgcggaaaaagttcagcatatagttgtagaaaatggagggcatttttcatttctcagtccatttcccgactttatgaaatctcctaccttccttccctctcaggatccggaagactttaatcgcaaggagtttcacgaggacctgcaaaacactatattggactttttattacgttctttttagctgtcattattctatatatttttgagacttccaaagatactagaaacattggtaaatcttctatcaagaaaagaaagtgatgttaagcaattccacttactatacctaaccacgtaaaaccaaaaaagaagtaaccatattggtaacttctttttttcctattcatacgtcagatgttcacctacaaaataatcatttatacttagtcttttaaaaacgacagcagcgcttcgttaaattcgtgtgcatgcgttgcatttaagccgtgtggaccgccttttattaaggctaacttggaatcagaaatggcttcatgcgttcgctttccgctatattcgaatggaacaatctcgtctgcatcaccgtgaataataagagtaggtattgtaaacttggctaggtcgtctctgaaatccgttttgctgaaggcagctatgcagtctagtgtccctttaggcgatgcggctgctgcaatatcccggttgtaaagtcgaaatggttcgctgactaagtcatttccgtcttcaactccaaaaaatgtctttgtaaaattatcaagaaaagctaagcgatcattttttacgccgttttcaaattcttgaattcctgcatcatctaatgctccttcaggatgatcttctgacttataaagaaatggtggtacagctcctgcaaatacagctttttctactctatcagttccgtaagttcctacatagcgagctacttctccgccgcccattgaaaacccgactagtgtcacatttgttaaatccaaatgttctagcaactgatgtaaatcagcagcgaatgtttcataatcatagccgtcccatggctgagaagactttccgaatcctcggcggtcatacgttatgactctgtatccagcctcaacaagagccggaacttgatattcccaagaccgtccgcttagtggccagccgtgaattaggacaaccggctgtcctgtcccatgatcctcatagtatagttcaataggtgcttcattttctgttcctacattaatttttgccatttcgctacctccattatatagtcgttctttatttggttaagtggtcgtaaacctagcgtagataataaaaaagatggctaactctcctatgatgagggtgctcgggacgactaaaagtaagttaataataaaaaacacagctaaaattcctaaaaacaagcctaaatgatacactttcaaacgatgttcttcgaatctatactggtgaaaaacaagagtcgttgccatgaagtaaagcagcacggatccgaatacaaaatataagctgaatgtgtactgaacttcgtgtaaaaacataagtttgatcgatgctgcaatcatgcttagagacatgaggataagtaagtgtccgtaaataatcgtttgtcccgctctttgaatggacttgttcactttcttttctacattttcaaagtactgccaccacatggcgatgatcaggacaaatgaaataaccgaaaataaaatggtattccagtcccctttttgtggctgtatcacagcaagaatgctgacaacggattctccaaacagaattaatgttagtaacgcaaagcgttctaacaaatgagccgtgttggttggtaatttcgccagtcgcttatgccctaaaataggtaaaatcatatccactgcaattcctgtatataacacggcgtagcggacccatgaatcaaaaaagagcgaaagaagtgagatgaaaatcccaattccaaaacatgttcctaaaaacacagcaactttttttctctcactctgttcaaatttttgaacaataagatactgaagagcggttaacgctcttagtccgatataaccaattagaaaagagacgtaatattggtcaaaatctacggacaagcttgagatcatgataagaacaaacagcatttgaagaatcataaagatgcgctgatgcaaaaaatcttgtccaaatcgattgataaacatcgtttgtcccgtccacgcccaccatatcggaataaagatcagtacaaactttaacaaatactctccatgaatatacccttgttcaacgtgaagcaaaacatgcgtagcagtcgcaacggctgccacaaacaacaaatcataaaaaagctccagccacgtaacttttttctcttccactactccgcatcccttcctatcatttatcaggctgtcgttaatgtactttattttatatacaagagatgcatacttcatgacaggtagcgtagtaaaagataggtgagccagctgttcatcagtcggctcacctatctaacaatttctcttatgtcgttacgttttctccgtcacataaataatccacagatgccattctactttcatgtcttatatgtaaagagaacgacctatagcaaaatgaagctccgctatgttagacactctgcttgctgaaatcgcgctgagctcctctatagctgcccattaagttttgataaccaggaagatgactagaaattaaattgccaaaaccttcaacgtcgttgcgccagtcgcgctgaagctcgcacgctacgctaaaccagttcataagctgtgcgcccccgtgagccatacgcgttaatgctgcatccgctacttgcttattgaacgtccctgaagcatctgtcacaacaaacacttcgtagcctgctttaatggcagaaagtgcaggaaaagcaacgcagacatctgtcactaccccggcgataatcagctgttttttcccagtcgctttaatggctttaacaaactcttcgttgtcccacgcgttaatttgtccaggacgagctatttttggcgcatcaggaaacagatcaacaagttcttgcatgagcgggccgttgggaccattttcaaaactagttgttaaaataaccggtaaatcaaagaatttagccgtatcgccaagagccaagacgttgtttttaaattcatcaacaccatagtcacgtacaaggccggaaataagccccgtttggtggtcaactaaaagcacggcagcatcatcttttgaaaggcgagagtaaagatcagacattttataatcctcctttaattaaggcaagtaaggatacacatacctcttccattacttacaagcggtctataatttgaacggttttttggatttcatttatgatctgttaggtaaaacatgtatagaaagaaaagctatttctgaggtgaatgttcgtgaggtgtgttctctttcttaatctagaacaggaacaggtgcttgatcaatccaatgaatgaactgctgtaggtagcgctgaagataacgttttgttgattcatcggttagtactttttgttgcgcatcaattttttcatgaacttgcgaaatcagcattttttgaaatggtaaaacgttgacttgcatagcttccagtacttctctcgtttgcatttgagcaaaagccgtaccgaagcctcctggagttgctccaatgagaccaaccggctttctgtttaaaacagaagaagtccgaggtcttgatgcccagtccaaggcattttttaatacccctggaattcctgaattgtactctggactaactataataacgccgtcaacatcttgaatcgcagctctaaaagatgcgacagactctggtgatccgtcagcttctaagtcttcattaaaaaaaggcaggctgcttatttcaatccagcgatattgagccgagtcatctaatgtagttaatgactcagcaatcattctattatacgaattctttcgtaaacttccacaaataagaccaatggttttcgtcatctattcacctccttacttggaattaatttcatattaccatggtgtttcaaatatagatattagttttatatatagataaattaattccttctttgtacctaatataggattgaactagcgctttactattactaaaagaattctttcgtcaagagttagtctaattctctcacttcaaaaggaatcaaagctctttcaatttgatctcgatgggtttcgtactgttcaggcagcatgagcttttctcccatggtttcaagtgattcatcatgtgcaaaacctggagggtctgttgcaatttcaaatagaatttctccgtgctctttaaagtaaattgcattaaagtaatttcgatctcgaacagccgtcactccgtattcgctatcggctacgtatttctgccattctaattgatcttcatcatctttcgctcgccatgcaatatggtgaaccgttccaacgcccatttgcccgcgtccaatggttgttaattttaaatcaatgatattaccaatgtcagctgatgattgaaaacgtataaaatctccttcttgccccactttttttagccccattacattttctaataactgagctgtttcatgaggcttaacagataataacgtagcgcctccgaatcctttaatagcaacatcaggtttaatttcaccagcttgccacgtattcttttctccttcttctctttccacaatctctagatgtaaaccatgagggtcgtcaaactctaaatactgttctccgaatcgctccatctttgtaacaggaactccaaacttagctaatcgctgttcccaaaagtccatcgcaccttttggaactgcatatgaagttacgccaacttgcccgtcaccaatctgtccttgtcgtgcatttgcccacgggaagaatgtgataatcgttccaggttttccgccttcgttcccaaagtaaaggtgatacgttcctggatcatcaaagtttaccgtttgtttgaccaagcgtaatcctaacacgcccgcatagaaatcaacattttcttgaggatgacctacaatcgccgtgatatgatgaatacccgctgtttttttaatcattactaccatctccttcgatacatttttcgtcatatgtttcgttatccctcttataattacaactatttatcgtaaatatctcgaattcgagatattaattaaaaaataaaagtgtctttcttattccaacccattttctcttttagaaaataaaagtgtctatcgcgtaataacctggtcctgcaattgctacaccgatcgctacaactaaaagcgtaaggttatattcatacccattttgtgttgtccagtatccattcggaccgtgtactttcacaatcgccatgaccattgttcctgcaatcaaaagcgctcctagcggtgtaagaagtcctgcagcaaataaagctcctcctactagctcggataatccagccattaacgccattctaacacctggcttcattccaatggattcaaaccagcctccggttccttttaagccgtggccgccaaaccatccaaataatttctgagttccatgtgccataaaagataatccaatgactaaacgtattaacaataaaccaatgctcaccattttttattcctcctattttttcatcaatttaaaatctcgaattaaaatatcttgaattaaggataattataaaatcatatggttccactgtcaatataaatttttatatttttttgtagctagttgaaacgcttaacgacgtattaaaaacatattcatgattttatatggatatgagcgtgggaacggaaaatataaaagctaaattgtattatttattgaataaaaacaggtcacaccctggtaacttcttttcctcttctactatgcatgtatagttcaacaactggatactgaagttatcacctcatttatacaagggatatctatatcacttgaattagtatcattttgcttttaatttatcaattaatttaagcgtatcattatatagacttaattgatgtcggtgggactctaattcaggtgggatgcggatttgtaaaggaatcgcagacaggttcagtaaatccaaagacgatttgtttatagcccgattttctaagttttgattagcttgtttggtgatgtattctcctaatacttgtagttgaacagcccacttttgccgatcaactgtgggtagagaattcgtttcggaccagtcattaaatgtagtgagtacacccgaaatataggtgtacccatgcttcagttgaaaaaggaattgttcgttttgttttaactgctgctttttatttctaccaaatgggttcaaccttaaactcttttctgctttttcgaattccttttcgacctgatgaagttcctgaagcaggttagttgtatcatctattaaattttctccctcaacgaattcgcagttattgtttacccaataagccacctttttaaataattgtccaaggtctattccaaattgggttaaggttctacgagcgtcttttacgtaatttggaggaacaattatgatatggatcataatagcgacaagagctcctatgatcgtgtctcttattcgatcagagacataataatttgttttatgaacgaatacaaaaactaataaaatggtaagagcaatttgatgaataatcgtcttatgtagccttagtacaacaggaagcaccattcctattgttaataataaccctattgtccacccgtttacttctaaatgtttaatgataaaaatcgtagcagcaattccaaaaagagtgccgataattcgataaaaagcatacacagcagaatgctggatggtttcttggatagaaagaatcacggttaaaggcgccaaataaggatgtttagagcctaacatttttgcaagctcccacgatacaccagaagctatagatattttagctataagtattaatccttttattatttcgagcttgtgctttcccttatttatatccataaaaactcctttatttaaaaagtgctcttctacacctatgtatgtaagtcaacttacagtcacttcctgccgttacttactattggctggagaacgtaactttattacaaacaaagctgttttcatatataagagttgattggattaatagagggtcgtatggtttttgatgaaaactttagggttgttgtacatacatagaaattttaagtttatctatatacattagctttcgatcattggggttatgtatgggcacaagttattttcacctattttttacagttcgagatccacccgctgatttatttaaccgttcaactaaagctgttccatagaccattctgctgtttggtaccggatgtaaagaaattattataatgttcgatctttaatctccctcccacttcaccacgaaaaagttggataagctctatcatttcgtaaattatttacgactaaagctacaagtacaataagtaaccataaaagtaattgtcacttattcatataaaaatgcatcctacaaatataacaggatgcatttcacttagttttctgtatcgttattatttttttctgctgagaaattccttcacatactcaaacgattagaaaatattcagcagtttctattggttcaatttctttaagtacataactttaaaatacctctaaattttaatactaagcagctgaaaaaaaaaagaagttggtttagctgaatactcctgaagactctaaaatagccataacgctttgtacagatttgattgaacgttttaacccttcattttccttttccgttaaaggcagttcaatgatatgttcaattccatcccctcctaggattgtgggtacacctaggtaaagattattacagccatattccccttctagataagctacagaagggagaattcgcttcttatcctttaggatcgcttctgccatttgaaccatagaagcagcaggagcataataggcacttccatttccaagcaggttaacgatttctcctccacctttgcgtgttcgctctacaatagcttctatacgttcaggtgaaatgattttatcaagtggaattcctccggcatacgaataacgaactaatggcaccatatcatctccgtggccccctaaaacaaatcctgatacatcttcaacagagatatttaattcttgagccacaaatgtattaaagcgggctgtatctaatacaccagattgacctattactctattcttagggaaccccgtggttttataacaaacgtatgtcattgcatcaactggattactcaatacaatgatataactatttggtgcatgcttttttacattttccgatacttctttcataatttttgcgtttgttgaaactagatcgtcacggctcattcccggttttcttggaagtcctgcagtaattaatactaaatctgcatcctgaatgtcctcatagctagatgttcccttaatattagcgtcaaatccttgaactgggcttgcctctaacatatcaagtgcttttcctttagtcgggttagtctgggagggaatatcaactaatactacgtctccaagttctttttgtgccatcattaatgctgctgtggctcctgtaaaccccgctccaattacagctatttttttacgcttaaatgccatgatttatcccccattcctcgtcgtttatatgcatgttattctactttttgatcttcttctacagcagcagaatctgcttttgctttatattgaatactggattttgttttagcagcagatgattttttagtcgctttattgtctttaggtgtctcctttaactgcgattctttattttcatcttttaataggctatttccaacctcttcatcaggatggggaattacatgcgctgacactaattctccaacgcgagccgcttcttcttttcccatatctacagctgcctgtactgcactaacatcaccttcaactaacactgttacaagggctgcatccactttttcttgcttcactaagcggacatcagctgattttaacatcgcatccgctgcgacgattgaacctattaagcctcttgtttcaatcatgccaagagctttagccattctctccacctctttctatatcaacagaatctataatcccgataataattgcatcaatgggtaatggagtgtcggatgccatatgtgctgcggcacttccttgagtaaccattaccttatcaccaatcccggctccaatacgatcgactgcaataaaagaagagtcgttattcgatttatttacacgttcaggttgaacaactaaaaactttaaaccgcgtaaattatcttcttttcttgttgcccagacgttgccaattactgtccctattttcataaaacatccgctccctctacgtctatcacgcaaatttcttttcctaattctcttgctgtatcgcgcgctaaaggagtgataatcgttttaggtgaaacagtaattttttcttcttctactaatttcacatgtctttgggttagcactcgttctgtaaatgataaagaatgtctgtttaagcctgattgcaaaaatctctcaaatgattggatttttaccccaaagctttctaatgtatttttataagcgattaaatgtgctgcatatttgttgtttactggttttttttgattactggatagcaaaacgtttcctaaagttacagaaggaatgagtgaaacagaaattccttctagcaaagcctcagccaaaagataactttctagtgtatctgtcataccaagagccccttttactagcaggtcctgctttgcttctgcaaataaaataccttgtatatcttttggaaggttttctttttggtcatcgccgtaaaccagtgtccagcttgtttctaactttttgatttgaatcggatcaattgctgccgactctttcacgattagcagctttggctttacgtttaggtgctgattgtctgatttatctaatcgtgttaaaacttctagtacaatttgttcaatcagagcataattgttcataaagcttcctcgtatagtgaaaggatccctgtagctccagtagaaattagcccagcattcgcttcatctgtatcaatgtgcatttcaagcttaaactttggtgaaactcgaattaatacacgttctagcgtagtaggtctttctccttgagatgtaatgcgaacacactgaccattttttacaccatatgcttcagcatcacctggcgtcatatgaatatgagctcgagcaatgattaagccttctttcttgtaaatgctcccctttggtccaactaatgtaatcgcttctgaattctttatatctccagactcacgtagtggaggaacagaaccaagtttaattgaatctgttttactgacctccacttgagttatactccttgctgggccaaggactcgcaccttttcgatgcttcctttaggccccacaatagtaactgtttcattagctgcaaattgcccaggctgagacaggtctgatttttttgttagctcataccctgctccaaaaagcgcttctacatcttctatacttaagtgacagtgtctagcagatacagccattgggactgtattgctttgcttggttgtttgacttaactgctgaacaacctctgctacaatcgattgaatggcctgcttattcatgcgctatgctcctaactttttaagcttatagttcactatcaatttttggtaaaatactttctaattcattgtgtgggcgtgggataacgtgaacggaaataagttctccaacgcgctgtgcagctgctgcaccagaatctgtcgctgcttttaccgcgcctacgtcaccgcgtaccaaaactgttacaattcctccacctacgtgaactttaccaactaaatgtacgtttgctgcttttaccattgcgtctgctgcctctactgatgctactaatccttttgtttcaatcattcctaatgctgttagttctcttgccatttttaactccccctaattagtttgtttgatatttttgaagtgcttgattaaccatttcagaaattgctgccgaatcaattggtccctgtggttttaattgattcataacttcgttgacaatttcctgtacgtcttgatgatcttttgtatctgacgaagcagaggtaaaagatacggatggtttcggaattgtcacctcttttgtaccataagccattcgcttaatatttaataaatgtcgagcggtcacattgtctgatgtaatgttacctccgaacgaaccgcatcctagtgtaaaggaaggcttaagtccagtggtaccacccacagctccaactgatgagagtgtgttaaccataagtcttgagacgggcatttcaagagcaaacgttttagctacagcatcatcgtttgtatgaagcgataagctgtgacctcttcctccaagatttaataaacttaaacataattcccttgcttgtttgtcgttcttagctgtatacaatgggaagataggtgctagcttttcaatcgaaaatggtacatccttggccacctttgtttcttcagcaactaagatgcgtgtaccagaaggtactgtaatacctgccatttcagcaattttcacagcactttgaccaacaatatttggattaagcttctttggaatcggtgaaatcactttttccatcttggctttctcttctgaatttaaaaaataggctccattattctttaattctctaatagccatttgttgaatattaagatcgacaacaatcgcttgctcggttgcacagatcgtgccgttgtcgaacgttttgctatcgacaatcatttttactgcttggtcaaccttcgcagtcttttcaatatatacaggtacatttcctggacctacaccataagctggtttcccagaactatacgctgcgcgaacgagaccacttccacctgttgctagaattaagttcacatctttatgcttcattaattcattggttgctgccatagaaggattagaaatccaaccaataatcccttctggagctcctgcttcaactgctgcacgggaacaaattttaagtgcttctactgtacagttcattgcccgaggatgagggctgaccactagagcatttctagtttttaaactaattaatgtcttgaagatagccgttgaagttgggttagttgtaggaataattccagcaacaactccaaaaggagcggcgacttctatcactttgttctctctatcttcgtgaacaatacctactgttttttcgtttttaattgattcataaacagctctagatcctacctcatttttgattttcttatgttctacaacacccattcgcgtttcttccactgccattttcgctaattccaatgctttagaataggctgcttcggcaacccgttcaacaatgcgatctacttgttcttgtgaaaaattcaagtatacctgctgtgcggcttttgccttttccactgcatctcgcatctcttgtaaagattgaagatcttgatcaaactgcatatcaaacaactcctttctattgtctataggctttttaataatgaactggatttcttgcaatgtctaaaacagcctggcgaaacgcatcagcagctgcttgacaggctgattgagatcctgttaaaaacccaccgccaaaatttgtttcagaaggagggccaaaaaatttcacaagttctacatcagctgctttaagcgctacatcaagtccatacatagcttctagtggaggggcaattaaataagctagtggttcgccaatatcgattcctgcttctttagaaagataagaacctgttcttgccaccacatgtgcatacagcgcgtgatttttctcttcatttaatgcttcaaaataggcatctgattttgtcacttgtaaaacagcctcaatgccagctttaacttcatctggacttggacccgctaataccccaatcatttcacctgatagcggacctgacgcatgggccgcgccagcataaaaggaacgggcataagcaacctcaacgtctgctcttttagtggcttcatctaaagctgtatagcctacgtcatcaacacttgatgtaaacatggctaaacttctatggtaaggctgcaagttaaactgttgaactaaggcgtcatccacatttggaatcacacgaacagctaaaatgtcagcatggatacgtgttaaagccactcttattcacctctattgttctttttgaacaagcgatactccgctagcttcatattttaaaattttttgaaccaatgtaccgagataagcacccgcttcaactggaggaataccgcctttatgaatattggaaaccaccattctctcagcttcgatcattccttttttcggttcatagcataaataggcacttaaagattctgcacttataagtcctgggcgttccccaatcagaagtaccaccacttttggcttcagaagttcaccaatatcatccattacagcaactcggcctttttctatgtaaaatggaacgcctacatctaaatctgcactttttaaggactgttgaagagataaataaacatcttcgacattttcctcaatagctttggagcttaaaccatcagaaacaataatttgaacagttggtgatttggtacatctttcttgaatgcacttctttgcttcgtctgatagctttcgtccataatccggtcggcgaatgtatacttctttatccgttacctgagtatttactttaaataaattcaaccgttttaaaaggtcgtcgttcacattgccatacacagcatcaacggctgctgcatggtcatagcggaatttcaaccatgtttctgttcgtggacgtaggcctgctctgccaattccgattcgggcaggtgttttctgaatcaatatgtctaattcttcttgattcactggatttttaataccagacacctgctgttttgattcaatatcttcttcctgttgaatagtcattttactttcaggcagagatgttgaatcactttcttgaatattcggaaatttaatcaatttctttgccgaattatcttctactacttcagctagaggaccatcaattactttcttatttgcactagatgtatgggcccagaaaattacactgctttgacgttcgtcagtaggagagctttgttcgaaactagattgtttttctagcttttcaacaatggatcgtgtaattttttcaatcaattcaggattcatcctcttcatcacctaccttgtaaaaatacttggatctcctgcgtatttacttaatttcccttgttcaaaaatccccattttctcaagccactctgcaaatagaggagaaggctgtttccccatcgtttgccttaaagtcgctacatcatggtagctcattgattggtagttaagcatacaatcatcacccattggtgttgcaatgataaaattaacccctgcagctgttagcaatacacctagatcttcaatatcgttttgatctgctttaatatgattggtgtaacaaatatctacacccatcggaattccatgcatctttgccataaaatgatcttctaagcctgcgcgaataacttgtttgttattatataagtactccggtccaataaagccaaccacggtatttacaatgtaagggtcgtaatgacgtgcaaacccatagttacgcgactctaacgttagctggtccattccaaagtgcgcttcagctgatagctcagaaccttgtcctgtttcgaaatataagcgttgaggccctgttcctgttccgtgactcttagctaattgatttgcctcttctaataaggcagcgctgattccaaatgaacggttagcggcttctgttccagcaatactttggaaaatcatatcagctggtgctccttgttcaatggctttcatctgagtcgtaacatgagctaagacacagttttgagttggaatctcccaatcattcataaaattttttgtggcttggagcagtcgttttacactttcaactgaatcatctacagggttaataccaataacggcgtctccaattccgtaagacagcccttcttttaacgaagcaatcataccctctacattatctgtaggatgattaggctgcagtctagaagctaagactcctttttggccaatagtaatgttgcattttgttaaaatttcaaccttatttgcggcgtgaactaaatcgaggtttgacattaattttgctactgcagcaataatttcactatttaaccctcgactaatcctctttaaatcctcacccgttgtttcatcacttaagatatactctctaagctctgctatggaccaatttttcattgcttgatagataggttcatttacttgactctcaataatttgagatacttcgtcttcttcaggtgggatcattgggttttcgcgaatatcagcaagtgttaattcactaagcacttcctttgcagcaattctttcttgaacggtttctgcagctaaacctgccagacggtcaccagacttttcttcatttgccttagcaaacaaatcttttaaatcagaaaattgatagacagcacctaaataatgtgtatgtaacttcaacagcgaagccccctttcttatgaatggaacgtaagggttttgactactactggtaccacacttgtttgtagcaattggccaatatctaagtagtcaccgtgttccaccttaatttgatcaatacaaataatgctttgcgacgaatcttgagcaacaagcgtttggcccaataccttggcataatcgctctcaagaacaataataagcggctgatctgttttgtttttctgtttcactgcttctagcagaccttttgctaattgttgaatatctcgaaatcctacgtacggaagcccagataagtacaaggcaaaattttgtccctcctgttgcgggtcatgtatctcaattgcatcttttacagcatcctttaagtgatgaacacttttttgaaactcatccttaaaagaaatttgataaacaggtacatttcgtacaggtaaatctttggtttctacttgaatcgtggctccactgatttcagtcgtttgtgtaccagcaccaagaacggttgcgcgaacggtttcatcaggctgaacccatgaccattctttcaaactctgactatctcttaaagagtccgcaagcatcattcctatgtcgtggtaaggagcttgttcaaaacctttagactcatattgatagaggcactcactgattccaccagaaaacataatgacatcaatttcttctttccaatttggttcatgacttaaaagtagtaccttgtcttctgctgtcatggtacgtgttagcattcgactaatcacgtcagccatataatttgttattttctttacctcttcttccaccagtacgtcaccttttacaagcgtactattccactctcttaatagatttctaaccggtggcgaaatgctgctgattttatcttccgaaaactctatcagcctacctcctatatgtagtgtgcaggttccacacagccttcccattcgataaactgctacattagcggtccctccaccaacatctatattggcaatagttttgctcgtttttttagagtattggtaagctcctgatccttttgcagcaataattccctctagatcaggtcctgcagttgctactaaaaactcaccggcatgatttgataggtggtgaatcatttcttcggcattttgcttagttgctgtttcacctgtaataatcacggcacctgttttaatatcttcagaaccaacgtttgctttatcatactcatttctaacaagcttctctattgcttcaatatcgattgttgttgatgtgagaagtggtgttcgataaatcgggctgcgatgaataatttctttatcaataatctcaatacgcggcaagtgtgttcctcctgccatattcatcagagaaaattggcttaacacaattttggttgtgcttgttcctatatcaattcctgcgctgataatctcctcttttagcggttcgtattgtttcatatccctccacctcatcaaccttcaatcagcaaaaggttttattcattactgattgctaattagtcttgttttagtcaaataaaaaaggcacctcatacgaactatctcctgaaagatagctgtataaggcgcctttgcctgtgatttttttgtatatttagaatataactgatttttcacaaaatgtaaaggttttcattaaaaaataatatatttcgatttccagttatcagtatactgtttcatctcttgtaaagactgacactgtaccaaagctcgaacctcttcaagcccttctttattgcgggaagaagtgacaacaataggaccatttacaactacttgccttgcttttttaatagctaagctcacatcagcatcttttgcatcactttttgtaatgaccccaatagctaacttattaatgcctgtactaaaattgggtggaaagactgtctttttctttgtggcgtcctgcaaatataacacatgtgtaacttcaagagcggttgccataatatttttataaaaaaaaggattttcaacatattctccaggtgtatcaacgatccaatcataatagattaaagcttgtgttttaactgcctcgaccggctttccaagcagagcatttgttaatgtcgatttgcctgcaccaattgaaccaatgagcatggctctgttttttttatgcataagtctcccctccctactatacaattaagattttgtaataatcgaaggtgtgtaacctaatgtttcggagagaaaacgattgatttctctcattgccatatctacttctgaaacgctccccacaataacaagacttcctgtaaaacgatctaaaaaacctaattgaacatgtgcagcttttgtagccaaatcacctgcaatgataaccgtctcacttggagtcaatgttagaatgcctagagctccttcttgctgtatacctaatttttcgaacatatccggatctggatttgcaattaaatggctcaatgtaatttgttttccgggcacaaactcttgaataaaacgctttttttcttcactcataaaaaattacctctcccttatcgtacaaattctatacaatgcttacatcacttgtgtcttactgcttttttcttctaccttttcattttgttcagctgctgaacttaagtactcgtcttttccaataatgcctgcttcgcgatccttcttttctagctctaaggcttttggaacagatagccaatatgctaaaccgatgcctattaaacctgctgagaacttcccgataataacggggagaattaatgtcggttggaaattggctgtaaaagataaatgatctcctaataagaatgccgagcaaactgcaaacgaaatattaataactttgtcttttggaggcatgctgcgaataagcttaaacatcgctaaaatattagcaattgtagctaaaatacctgcacttccttctttacttaatccgagttttttccctacagtttcaagcggctttcctgcatatttttgaagcaaataaaccattggaaatgcaccagcaagcatgatgccaatataacctgctgtttctagcgcacggaattgatccgctttatcagccatgatcggatgaaacccccagcttccaaatagatgagagaataggcccgtaaaaatttcaacaatggagaaaacaagaactagcttaattccagcatccatgatacgaccaaaccacataaatcctttaatcattaaatctggcaagaaatatagtcctaccgctaatagcacaacaaataataaaagtggagataaattcaaaataattttcaaataacttatcgtaaattcgtatgttgaatcacttgtagtggaaataattttacgcacatcagaattggttaccataattaaaacacttgaaataaaagccccaattggaatcgttaacacacctgacataacgccgagcgccatatatttgtggtcgcgtttatcaagcatggcaagtcctactggaatcgagaatacaatggttgctccggccataaatcctactatcatggccatgacccatccttcatacgactcttttaatacgtgtgctaattgatatcctcccatatccgttgctaagatagaggttgcagcgatagcaggatctgccccaatagctgagaaaaaaggaccgcataccgtactaataaaccacgaaagatatggagttgcagccatgataccagccgctggtataaaaatatacccgatagaatgtaacccttccatgaattgctttcctaatccttcatcactatttctaatcgcagcaatagccccacacactgcacaagtcatgataatataaatcacgattttcccaatgataaccacacccaattccccctatatgatgatttttatttaaatagataatagtttaactattcctatctatttaaagcgtatgaagtaacctgttaagagccttgctactacagaaagattaaaattgttcccttaaaaaagacaaaaaggtgccaggtggttttttatcacttaaaaccactaagcacctttgctcaaactatttacttgtacagtgaggttaagttccatatttctcaatgatgtgttttgctaacttctctagtgtaacctgctttttcatgctaatagtccgcatttttttgaaagcacgatcttctgttaaattatatttattcattaaaatcccttttgctttttcaacaatttttcgtttcttcagttcattattcatttcctgaactttttgctcatacatttttgcattttctgcttgctgtagagcgatttcaactgctggaattaaatttgattcagctatcggttttactaaatagcctactatattcgctttttttgctttatcaataaactccctttggctgtatgctgtcaacagcagaatgggaatattatatttatttgaaataatttcacttgcttttagtccatttaacttcggcatttttatatccataataatcaaatctggctttagtgcaaaagctaattcaaccgctttttctccatctccagcttctcctactatttcataaccattatcagagagcatcattgataaatctagtcgtacaattgactcatcttcaacaatcataattcgtttagtcacggtgtccgcctctttctaatgggaacctagctgatgccatggtgccatttgcagttctctcaatcgaaaattgaccagataaatcgtgagtgaccatcatggcaactatatctaatcctaaagatggtttggcttcttttgaatacccaacaccattatctttaattgtaacctctatctcacagttattctgttgaaaagaaacgtgaaccttaccttcttctcgccccttaaacgcatgtttcatacagttttgaataagctcattaataattaatgctatggagacagctttatccgactttgtaaaaagctgagtgcccgaatattcaattgaaatatttttattttcatctgtagagctatacactagcatattaccaattttctcaatcaaactaagaatatctacattgtctacgctagaattggaaagaataatctcgtacacagaagcgatacttaaaatccggttaagactctcgacaaaatgacccttgctttcttcaggaagaccccttctcatctgaagccttaataaactcgcaatagtctgtaaattatttttaacgcgatgatgaatttcttgaatcatgactgacttgacaacaagttctctttctcgctctctaagttcagtcatatctcgaaatgtaataaaagcaccattcgttgggttttcttgttttaaactaacttttttgacttgaaacaccttatttaaaatagtcacttcgtgcataaacaacttttctggatgataaaataactcttctaaacaagggaaatattcgatgatttgattccctaccttacattctgaggaacagacttcagaaaccaaattaaaagcagcagaattaaaatatagaatgtttaaattagggtcaataaagaaaagtgcctctccaataaactctggaataagcgaagcattttctgtcatctccattaaaatttcgcttaacgtatcatttgtatttgataacgttttcattttttcttgacgttcaactacttcactgatatctttctccataatcaatgtagcaattacacgattattaaatcctttaataggaaccacactttgttctaccgtttttccttcttgtgttaaggcacgatttaaagacatcggttttccattttgcagcgtgtagaatactgctggttcaaacgcttggtacacaaatttacctgcgactggacgttcataaactgacggtgcagtttctggtgccgcttctgccactacaactgcatgctgtccttcttttgttaaacaatcgataaacacatttgctcggtttaaatcagcaataagcggcaaatttttagcaacttcatcaatcttttgaatatcgacttctgctagatttgtatgaagcctgcataaagaatttaaggataatgtatgagtcatatgtaaactcctagctgcttttaaacatttaagcattaaaatattagaatataataagtattatatttttctgaactttctttgtcaatgacccattttgatgcgaaaatatttactttatgaaggaaaccttatttcttctatgacttatcacttctttttctaaaggtaaaagtggacgatcctggtctatctgccagttgaattcgcatagatatagtccctgggctttaaagctttttacataaaaattagtattctgttattttgttagtaatagcttatatagtgagttttggattttttaaaaagataaaatcaactaaagagctgcttaataaaaagaaacacttaataaaatcatgtagcaaaggggcgttttaatacgatgtcagtgtggataggaatatggattgttatgtttattcctatattttaggacactcactccggatataggttaaataagaaaaggaaagaagcagagaaaaaaagagatcatacagtttgctatcgtactgtatgatctctttttttagccttttttacatctatatagacgaataaggttttatttttacacgcgggtaggcactttgcaaagctacatcatagtttaactcttacctctgtaccgtcagtagctttgacatctactagtaccattcccttatgtttcttcagttccttaacaataggctttagcatggttttatctattatcggaaaagtgaaattcagcccttttcttttaaaatgttcttttgtccatttatcggcatgcttctggataaatttcgaaaaagcaacgctaatagcaatgtttaaaagagcatatggaactggaatgctaaatcgaacatcttttgttttcacttttacatgaatcataagcaaaccattactcaatgatgactgaaacggtatccccgttcgccgatttaatatcaacaatttggccatctaactcgttttcgattgcttcaacaatcaggtttatgtctatatcttttacatatttttctgattgaggaatacttgctgcgatgctgtgtcccgccattaataccagcttgacaagctttatcggcaaattaacctttacattatcgttttcagttgacacaactcgaatttttaacattttatctagatacgcatttggctttttcaaaagcttattgcctgtttcttctttctcttttaatacttgaatcagttctgatcccttttccgcatcaattttgccttcttgaaccattgttaacactcttgtaatttcctctttcataaaaattccctccctattcttcttttaagagcttgatggcttcttctgctgtaatttcaccattttctaacatagacacaacttttttctcgtctacttcatttttcttcttttctacatatccaagagatgaaatgatgtctgttaacttgcctcgaaccgttggatatgaaacgcccagttctttctcaacttctttgatatttcctctgcatgttaaaaacacttctacaaaatgaagctgatcacttgataaggatgccaacttagataattcaaactcattttcaatcgtcgtgtgacaatggctgcactgcagctttgtaatttttaacgtttcactgcagacaggacaatttgtaattactttataagccataatcaaatctccttcttttagttagtttgattatacaacaaatatttaatattaaaaacaataaaattaaatatttttaagaaataaattaaaaatataaatttatattttaataatattaattaactcttttaaaacacatgcaatgagatctcggatgcttaaaatccaaaaaaagtaaaaaagataaaataagatgtttatttttggaaaaacatcttgtaaaatacacttggtactacaaaaatattcctggtaccaaatggaggttttttatgaaagagcgaattacaaatgaagcaatttttttaattcaacaaaaaggactttcttttactattagcgatttagctaagagcttaggaactagcaaacgaaccatgtaccaacatttcagctccaaagacgacatcattgactcgataattgaaaatctcatcctacagatcaagaacaaagaagaagaaatcttccatgatgaaagtctaagtttacttgaaaagattactcaactccttatatgtgttcctggagagtttaatacaatggatattcgtctattagcagatttaaggcggcttcactataatcaatgggttaagatagatgactttttaaagcaagagtgggatctagtggtaaaactgatggaagaaggaatagaaacaggcgttttacgtgaaattgactcacaactatttatagagctatacctgggcgcaatcaatcaaatttatcagtcaagcttcttgctaaacactaaactcacaatgggtgaaatattaaaatctgttattgatattcttttgaatggtatttctataaaaaaataaggtggcgaagaattttgtattggatctatctatgtttagctattctttttgaagtggctggtactacatctatgaaattatcagacggttttactaaagttataccaagtgtgtggctcatatttttttatatttgtagtttgtgttttttgacgttaactttaaaaagtttagaggtctcaattgcttatgctatttggtcaggtatgggaattataattattacactaattggatttatgtattttaatgaaagtgtaagcctgctaaaaattgttgctatcgctctcattattatcggcgtagggcgtagtaacattaaatataactggggaaaaagaagctaatactagtaaatccactttggaaaaacacatgaggtaaaaagatgaaatatttaaaacctttttttcttgttacagatatcggatttattatctattggattgttacttactttgaattaatacccgaaagtgcagcttttaaggtttacgataaccctatagtcatggcttggaactggtcgttcttccctctagatattcttatttcattcactggattgtttagcctatatttatacaagctgcatagagaatcatggaaaggctacgctttaatttctctagtgttaacattttgctcagggctacaagccattgcgtattgggcatttattaaagatttcgatttcacatggtgggcttttaatttgtacttgatgatttaccctctattctttataaaactacttataaaagataatggcaatcaaaaaagtaaacttttcatttaatgaacgttttaaaatcagtttaaagcaataactaaagaattattaaaacctcttgaggaggggtaacaaataaataagaaaatcgctaataatgtcatcttttttgtgtggttcctgttcttgtcccttctatggatcatcttctctttttctaacgggcaagatagccaatggtggtccatgtatcatttgaacgtgaatcaatatggtccttgggctttagagctttcctacataaagattagtattgctgctgttatttcgttagtaatagcttatatcgcaggttttagatttaaaagaaaaggataagattaacttcatcttttcaccttttcaaataaatactgcactccatataataaatatgctttgtaatgaaggtagataaaaaattgaaaatgcgttaaccgttctagacttacaattttccaccttttaagaacatcaataaagtaaaaagcaaagattccatcaactataatattcagtaataaaaacttcttaaagtttccatacgaagatttaagcagtcacattgaaagaggcatataaggcccaatactaaaaggaagttcatcttttataaacgaatcttttttatcataaaacttccaccacttcctctgatgtccatacaaatgattaataatctcaaagataacaataaaaatccctgctactgaataacgttttatgctgcgttttcctataaacaacaatgataaccatggaattgctattatagataagttaaaccctaagtattttcttgatatcataagtgaactcacctcaatgtactttaatctagttcttcttatagtgtcctcctattacaaaaaacacgtcttttaagcaatcaatttctatttagcagtcttcactttttggttaaaatgtttggagatgagttgcagcatgataaattaaacgcttcagattttcaaaaataacatggccaatggagaactttaaaaccttctcctagacctaaaaaaacacaaaccataaaatggtctgtgtttttttattaatgcgccttctgttcaacattaactctcttaataaagaacgagataactaacccaacaatggaaacaatgatcgcaaagacaaacgcgtgttgaacaccgttggtaaaggcaagaatttgatttagtggatccattttatctgataccgtctcaaggaagcttcttgaacccgatgacagaatggagattccaaccgctgttccaattgcgccagaaacctgttgtaaagtgttcataatcgccgttccatgcgggtacagctcaggtggaagctggtttaatccgtttgtttgagccggcatcataatcatcgaaatggctatcataagcgcaatgtgcaatccaacgataaacccagttgacgtttccagcgttacggttgagaaaccatacatggtgccggctacaatcacaagtccagggataactagccatttaggaccaaaacggtcaaataatccgcccataaccggtgaaagaattccattaatcactcctccaggaagaagcattagaccagcggcaaaggttgataaagctaatgatgtttgtaagtataaaggtaaaatcatcatcgcagacagcagtaccatcatgcagactagaattaataaaagaccaattgtaaacattggatacttaaaggctttaaggtctaacattggctctttcatcttcgtttgacgaatagagaatgcaactaaagcaatggttccaatcacaagagttagaataacctgtagacttccccagcctccgccttctccagcgctgctaaatccaaacacaattcctccaaaaccgattgttgaaagaacaacagaaagcatatcgatttttggcttcgttggtgtggtaacgttctgcataaagaaagctccaaacactaaggcaacaaataacagcggaagtgaaatccagaaaatccagtgccacgttaatgtttttaagattaagcctgatacggttggtccaacagctggcgcaaacataataacaaggccgatgatccccattgactttccacgcttatgcggcgggataataacaagaatcgtgttaaacataagcggtaaaagtaaagcagttccaacggcttgcacgacacgggcaatcatgagtaccccaaatgttggtgcaatagcggcaataaatgttccaataattgagcaaattagagatgctataaaaagctgtctggttgtaaagcgttgaagaataaaacctgaaataggtaccaaaattcctaacgttaacagataccctgttgtcagccactgcgcggttgtttcgtgaatgccaaagccagaaattagctcctttaacgccatatttaaagctgtttcactaaataaaccgataaatccagcaataagaaacgacgttataatcggcagcactttgatgttagagctttcggctactgtttgttgattactcatattaaattgtcttcctctcttttacatactctttttggtgaacgtttttctatctcaatgataagttgattagcagacaaacaatgcatattgatataaagatgagtgataggtttaaggcattatgttgactaagctttttctttctcttctcttttgaccgaagtgctttttgtcttctaaattcgtttctttccacagatacctctccatttcatttctaaatcaactttagaaaccttcctatgtaaactaaattccattcataatatggaatttttaataagtaagttaaaacgaaatagaactataaaatgaatttcactttatataacaggaatattgtaacacagctataagtactgtttctatctaaaatatactaaataacaacagctatatacctaactcagtgccctgtgacaattaaaatttgtttctgttgtatactttttgttctgtttgccctaatagaacacaactaactttttaatcatcagtcaaaagaaatagtatcagaaattaagtaatagtaaaaattgatactatggaggtgttttcttatgaaaaaatatgaagtaacgtttcatctaattaatggtgaaataagtcatttagtggaagctaaatcacttattcgtgcaaagaactacatacagtacaggtttgaagataaaagtaaaatattggatctagcaaatgatttggtcattgttaaaagaaacgtccaatactttacggtagctgaaaaagaataattagctatgtaaaaggacgttatctacaaaagtaatgtccttttatatccatacaatatcttatagggtattctcttttttcccattctggtcactaaaatttttctccaaatcgaattcacatactaaatttatctaactaaaaagatattcctctaagcagaagaatattatagttaaaaatttatgtggataatggttagttctgaacagaattattgaattcagtgtctccactttaataaatgaaggagtacatgtagaaatgaaaaaagcaaactccctgacatgtgagtttgctctttctattctttactcaaattccttgagttcaacttttaacttattgtcctatatctttcattcttttaagagcttttctatattcttgatctctcatatgcagcattttattaggagaaggttgaggctgaccaaactttttcaaagctgctctatactcgctgtcaccaatgacttgattcgaaacagtctctttaggcgaacgctcaaaaacgggagtatcttttttactgtgaacctcttcggtactcagcttttctttatttttttctttatcatgcggcttatgagccagcttgtggcctttacctgttaggaacatcaaaaacgagagaattaatactacaatgctcaatacacacgaaaacgtagaaaatgtatgataagtaatgatttcagtttttacatgtagagattgcgtgaaattttctttactagcaacctgactctctgcacttaccgttgcaaggtgatctttatacacctttgcaaagacgatactgctgattacagggatgactgcagatactgtaactcttataaattgaaccgtgaccatcctagggactaaacttggtagcggtccgcctaaagcagcacccataagacctgcagcgactgtgaaccctactcctgcgattaaagcggcaaagctgctaacaaagaggactgcagaaacatgaccgtctaaatacatccactgtatgttcactcccataataatgaccgctcctataatacctaatacgcccggtccaactttatcatataatacggcacttaatatggccgcaatcgctattcccgcaaaaagcccgatatagatcagtgaagtatctcctttatcaaaacttgatccgcttttaagcaatccttgtagggacaaaagagttaaactcatactaatattgcctataacagcgatcagaatagcgagagctgcttttcgagaagccactaatctaaagggaattaacggatttttaagatgccattctgctacgaataaaaagcatagaaaaatgatgcttcccactatgcctatccatacataagtagatgcccatcctgatttttggagattaagtaatgtaaacgtaataaatgcggtaaccataaacattaacgctacaccaatgatgtcaaatggttcatgatgtttgtgctgttgcttggcgtgatcattcgttaaaaatttgtagctgaagcatattcccagtaaggaaagtacggcagctatatagaataaccctctccaatggccatagctgttcactaacactccgagaaaaataccgacaacgctagatccataaaatccgccaataagaattagtaatgccaagttccgtttatgaatcggaaaagaaagaaccagcattggaatcatcatcataagtgctaaacccgttcctgtcccttgtaaaaaacgaccaatgcccattcctaagaagccgttagaagcaatgcttacaatagcccctataagaaacaaacacatcgaaagaacataagtccttctctcccctatcttatgtcgaaggataggtccaaatggaatacaaaatgcaaagctcataacccctattaaaaccggtgttatcgaaatataagattgatcgttaaacgtttgttggagaatttcacgtatggaatttaatgaagtgttcaacattaaaccaggaccaatagctaaaactgccagtaaggaaatcccccagtgtttttctattttcatactacaattcctttctgcccttcatgattgtaaaaagctaaaaatgcggcgttcacgtttcttccaaccatcacagtagctatggtaaagaagaaagatatttatccgcatttgaacaaactaaaaaataaagcttcagtaaggaagctttattttattttctaaacctgccactcgaattggccctaaaagtgttagcctggttaatttttcagccataaatgcagggctaaatttcatatcactttctagccaagaacaaatgacacctatatgagctgatgtgatataactaatcaggatatctttagggatatcaagtccatcctctgcttctccaatcgaagagattagctctccatacactctcttctttacaatttccgtcatatgacttctaaattgaggtaatcctcggtcacttagcataactttaaaataatcggcatgttcataaataaattcaaaaagctttaagaaagaaacggattcatcgttttcttctactgctgcggagtcctcattattttgttttggttttactttctctattagctcttctagaacttcattcatactctgcataagaaagtcttgcttatcttgataatgcaaataaaaggttccccgcgttaattctgctttttccgtaatttcttgaatcgtaatggatgtaacgtctttctctttaagaagttcgactaaagcgtctcttaagtatttatttgttctttttatcctaggatctactttttcttttttagtcatagttactctccttgtatcactgttattaagtattagacatatgattatgacttgtatagatgtagccatttaggccttttctgatgattgactatttaaattaaactaccctgtatcaacaacacacattctgcacacgatgtaaactaatgaacattatgtatattaagtctcacaaaatataatcaatctgtcaatatcaaaaactgattaagaacgaatcatttggttgttagatatggatggcgcgaacgcaagagcgaaatcttttgtaatgaaagaaaaagaactgaaagatataaccggcgatgtaaaaagtgctgggtttttatatgccggagattggactattgaggcagcttttacatagcaaactaatcaaataaatgatgattttgcacaatgaatgtttgaaactttccgatatatgaatctgcttgtttaaataccataatctcaattggatcaagcaggttttcaaataaaacagcatgtccaagctgatcttccagccataaatccattaagttgactaagctaagaggaaccggctccttactgttagtgataggatagaaggttaaataaaaaagaagtcaccttttggtaacttctttttttactatgcatatgtgattaaaacaaaaaacatataagttttttatttttcactatctttatcagcaggttttcgtttatgtttctcactaataatttttttgttcagtatccttacctcacccaccatcagcagcctcatatcttttacaatatatttagccaattcttcatcagagatatcatcatcaatatcaagacgaaattcctgcccttgtattccaccgccattagtaaaatcgacttcaaagtcaaaaattactcttttatccatgtctaatccaccttaacttgttttaatcatctaatatatattcggtttaagaaaacaaatgccctatccaacaactatctaatgaagcttattatctgataagtcccggtaaaaggacttttaagttctagattggtattaaaaaaggaataatcctgtggtaaaggagattctttagaaccttagacacctgtttacaccaataaaataaatataattaaaaaagacaatgggttgaataagctacgctctattaactcatcttaacaatgtaactaaatttgaagggagatttaaaaatgagtcagaaacgcgataaaggcaatagtcagaaaggaaaaccaaatagcaatacggtagattcggtaattgcagcagaagacgtggaaaaagcaatttttccaactaataagcctcctggcaacgcaaaaccttaaaagaaattagagttgtattattagctgcctgtttggcagcttcttcttaagaaaagaacttaattaataaatatgaatatgctcagacttttacgttttttatacgatttttagtacaaatgttgggacttagatgatgtaaaatcctctctcatttctacttaaatactcttcttcagcccgcattctcaacattcctataagaatacgcgaccctttacagaacttttgaagtaagatgaattgcagttgtcaaatcgtcctcttaacttattattaagattaatttttagagagtttttaacttagaacgctttaaggtatctaactgttacttaccttcattgcatataaataagcaacatagtcagtcataactccaggatatcccatttggcgtaacatagctgttatatttccacgatgatatgttccatgattaactacatgttggattaattcaaatagattagtttctagctggccaaaattaggatgtgcgcagaaaacgagttgatcaaggttatcttggtggtcaaaaaatgctttaaattgctcagataagttaagaaacatcatctccatttccccgatgcttttgccttttatattctctcttagttgttttcctgatttgataatttcatcaaaactataacctgacatgacacttaaccatgtagtatcagtagcataaatatgtcctaacacctccgatacagaagaaaaaacattcttaacctccttgtggtaaatatcctgaggcaagccttttaagtgactaaaaatcctttgatttgcccatacatggtagttataaaactgtaattcttgacccttcacttgagattcctccctattctaaaatccacgaccaatattaggtattcctcattgttttcaaaacaccttcaaatgattgttgaaaaaagtattgattctttacgttttatttaggtaccgaagtaaggttgcacgtgtactcatgagattcaaaaaatgaactgtagtaggctatatggagacaattatctagtatctcttctttaaattattttatcttgacactattctaaaggcgtgattagatataattgttaactataaataaaaataagttaacatatttttattttcggtggtgaaagtgtattgtattgggaagaagatattaaaagagaacttgcctatttagatgaaatttttcaaaaaaggcaccttgttgctacagaattcgctgaacaaccatggcttacagtcaatggacataagatgttaaaccttgcctctaataactatttaggctacgcaggagataaggggctgaagaaaacaatgagtgatgctgtgatggcatatggaataggagcaacagcttcacgcttaatagtaggaaatcactctctttatgagaaagcagaaaaagcacttgttaattggaaaaaagctgaggcaggacttattatcaatagtggttataatgcaaacctaggaatcatctcagccttggttccgcgtaatggcttcatcttcagcgataagttaaatcatgcaagtatcattgatggagccctactgagccgtgcaaaacttcaacgctatcgccataacgatatgaaccacctagaaaatttattaaaaaaagttcccttggagtcacggaagttaattgtaacagatactgttttcagcatggatggtgactttgccaagctcgaggatcttgttaaattaaaagagcagtataacgccctactaatggttgatgaagctcacgcaagcggtgtatacggaaaaaatggtgaaggatatgcgcattttcttgatctgcaagataaaattgatattcaaatgggaacatttagtaaagctctagggtcatttggagcttatgttaccggaaaacagtggctcatagattatttaaaaaatagaatgcgaggactcatttattcaactgctcttccccctgctatactcggtgcaataacggctgcgattgaaaaggtgcaacaagacacagagcgtcgcaaacttcttcaacaacatgcactatttttcagaaaagcacttacatacgaaggatttaacacatgcaaaagtcaatctcaaatcattccaattttgacgggagaaaacaaaagaacaatgcagtttgcagagcgtttacagaaagaaggaattgctgctattgcagttaggcctcctactgttcctgagaataaagcaagaattcgttttactgtaacagccgatcatactcgagaagatttagattgggccataaagagaatttctctaattggaaaagaaatgagtgtgattcaatgaaaccatcgactattataatatttcccggatggggaatggaaaaagcagcgtttcacccaatcataaaatcattgtctactatatgtaacgttttgtgtacagactggagaggtgtaaaagaactaagtgactttagagaacgagcaattcaattgcttacttccactcaaggtactgtttatttaatgggttggtcattaggttcccttgtaacgcttgaacttgcaagtttataccctaacaagatagaaggactcatattaattagcggaactagtcgctttacgagcgacgtgcataatacatttggatgggagcaacgcatcgttgaacgtatgaaaaaacaactacagcgtaataaggaaaaaacccttacttcattttataacgctatgttcactaaatctgaaaaagaagaagaatttcatcatcaatttattgaagttgttcagcgtcattatcaaggagacagtacgcactccctccttacagggctggattatttactccaaaaagatgttagaatgcaactcaatcaaattcaaactccttgtttgttgatccatggaagagatgatcaaatatgtttacctgagtcttcttctttcatagctgaaaggattggtggaaatgcccagctgtgcatcctagaaaaagctggccacattcctttttttacgaagcctcagcaatgtacgcaacttatagaaaaatttctcgaaaaggagctcatttatgattaataagcaacttttaaagaaaaggttcaataatcatgctaaaacttatgatgcttatgccgatgtacaaaaaagtatggcaaaccaattaatagaccagctttccactaatttctttaaccagaaaataactattcttgaaattggctgcggcacgggttatttaacacaattattgtgcaaaaaattccctaaggctactattacagcagttgatttgtcatcagaaatgatggagctagcaaagaaaaaagtaacggaagatcgagtttctttcatatgcggagatatcgaggaactaagtatagaaagacattatgaccttattatttcgaatgcaacatttcaatggtttaatagtctttatacgacaataaaaaaattgtataaacaacttaagcctacaggcagcctgctattttcaacctttggtaatcgtacatttcaagagcttcattcatgctacagtcatgcgaaaaaaaagcttgatctttccagtaacagttcacctggccaatcgtttttttctcttgaagagttgtctcaaatttgtgaacaagcattagttccattgaaagagcatccatttaaactatcaaaaatggagaaactagaggctcaatactttccaacggttcaggcattttttacttcaataaaaaaaattggagcaagtaacagtaacgaggaaagctattgtcaacgcccttcgttttttcgtgaattaatcaatctatatgaaaatgattatcgtaatgagaacggaataaaagtaacctatcattgtttaatatttaatgttacaaaaacgaaccaatagttaatatacacgtatgaaaaaaaatcctaatttgaaaaaattaggatttttgtttcaccaataacggtgactataataagtaattttattattaatgtatatgcattaatactggctatttaatcaaacctaattttgctgctacgctataacctgatgagttaaatttaaatcgattacgaagttcaataaggttcggtccaaagcttgactctaggatctctcgatgttttttcatcatttcatagatatacaagtcgtgaatgataacttccgtaattggcataactaatcccggatgcatcgtccaggcagcacggctgtccttaccaagtgatagtatacctgcaactacctctcgatcgtcagcacttagaacaatccatcgtcccccatattcattggttatttcttcgcttgcatcatgctgatgaacctgcgcaaaatcaaatactaaatctccataagaaacaattaaaatttctacgtctctttttgctgctgcttgcaattcttcttttagttcctgggcatcttctgcccatatttccaatagaatacgccctgtagcttcttttatagcttcctttgtacgatttagtataggctcataacctgtaatgttccagatgttttctctgtttaaagatacataagaataattttcgagagcttcttcagctacttcaaacgaggattcagctttacgttttttcaagttgattaattcattaggaggtaacggtgtatatagagcgggattttcatgactgatcatgacttctcctcgatccactagtccccctaatacttcataaattttagatcttggcactccagaatttaacgaaatagcataccctgaaagaggagatttttctagtaaagctaaatatgcttttgcctcatattcagtaaaatttacatctttcaaaatttttattatatctagtgtcatgattggtcctccttgataatacccggataaagtcaataattttaaactaagtataccattagtgcccttgacagtttggattaaaaattataatttaattatagttgctacaaaagtagctactatatagcttttaatcctacttggaggtgtaataatggatacaatgatagcgaaacaacaagaaagcttaaaaataagaaaggttagaagaggaaatggtttatacataagtgcttcggtaatagccgtccttttatggagtacatcgtttgttgggacaaaaatagcctatacctcttttccaccccttacattaggagcggctcgttttgttatagctgctgttattttaggacttattctcttaatcaggaaagataaaataaagccttcattcaaagatatagggttaatgtctataagtggtgtactaggtactaccctttatttttctctggagaacataggagttgaactaacaacagcatctaatgccgctattattgtagcgtcgtatcctgctataacggttttaatggaatttctcttttttagaaaaaagacatcatgggtaaaggccctaggaattggagtagcgatgataggtgtatatcaaatatcctatagtcctgaaattcagacagatgataaacaattaattggtaatattatattaattgtggcaggttttatttttgctctctacaacttcacaactcgtaaagttgtcaaaaaatattccatgattactatctctttttatcaaactttggccggagctatcacgtttattccattagcctttatagagaagtcaagttggcaaacaccagatataagatcatctctaaccttattgtacctaggtgttttctgctcggttatcgcttttttattatataattttggattacgcaaattatcttctagttctgcgatgacgctaatgaatcttgttcctatttttggtgtgttattttctgttctgctccttaatgaagtggtaggcataaaccaatttattggtggaatcattgtccttttaggtgtagttttgagcatgagggaaacgagtaaaaagcatgttttagaaaataagtaaaaagtataaacccaaaaaaagtcctcagtcaaagtagggcttttttatttccaataatataataagagttaatgaatacaatgcaaatctccaatcttcttttattatcacaaacggttttaccttaactttacatggaataaacggagattataacccttcttttcggttctatttactacctggcctatttgttatattgattgggactaatttaggacttcgatggtttgagcatctgccacgtacacttattaaaaagttagtatgtattattatcctgatttctggagtacttttgctgattaacaaataaagaagtgaaagatatgaaaaaagaatataaaccattaagagagcgatgataaaaaaacacctaaaaagaatcctttgctgataaaaacaaaggattttcaaatttaaggaagtataggaaatacgttattagtctggccagatttatagattcctatacatacaactttaaaaataaatattgtaatcgattctaattatataaaaatctatcttttccttaattcctatagtttgataagtaaacgctaaagtattttatatagtactaccttctatttcctcaatacttggaagtgcttcaattgcacctatttttgtacacacaagcgccccaatccgatttgcaaatgtgataatgtcgagtaactgctcaaaatctttttcaatgaatttgatatcatgtatatttgataatttaaataaagttgcacctacaaaagcatcccctgcccctgtagagtcaattgacataacaggaatactttttactagtttctttttgctactgttagatattaatgttcctcttttcccaagcgtaaccgctacaattctagctccaatatgatgaagaatatcaacacctaactcatgattcttagtgcctgtgataatttctaattcctcctcacttactttcacaaaatcacttaaagaaatagccttcttagctattgagatgaaatcaaccaatctttccttccataaatcccttcgataattagggtcaaaagaaataaatttccctttttctctagcactggatataaggcttaaataagcttcacggaatggagaagttaacatcgccgtggctgaaccaaaatgaaatattttagctttatttatttcattttggtcaatgtcatccattgtcataaaagcgtcagctcccctatgaaacacaaagtctcgcccacccttttcttgcagtgacacaaaggctagagtagttgctgttttctcatcccaagcaagcatagaagtatctacgtttaatgaatttaaggtttcttctaaaaagtaaccgaatgggtccctgcctactttcccactaaatgatgcattccctcctagttttgctatggttgcgcatacatttgctggtgctccaccggcactttttaaaaatttgcgtccttctattaaattagaatcaatttcgctacaaaaaaaatcaatcaataattctcctacacaaacaactggagcattttcacttatactattttgcacttatatcacactcatttacttaattttaaaattcaattaactacttagattttttctctaaatccacaatcattttcttgtatgttttttcagttaaaggataaaagcatattattaatacggaaagtaaaatgaaagttcctggtactaacgcattcatatttttaatagcatttagggaagctgcggtttgttctgcattagctacataacctgctatacccaaatagatagctgaaaatgatccagcaagtgcaacccctaacttattagtaaaactcattaaggaaataacaacgccatctgctcgaactccagttttccattcagcataatctacacaatcggcaaccattccccaagctagtgtgtttaatggggttgtaaagaaccctgaagcaaacagccaaaataaaattaaactaactgaatcaaacgaagtaaattggagtcctatatatgaaataagcgatacgctagctgatacaatcattacactttttctaccccatttatcggagaataaaggaataaataagttactgattagtgcagctccaaaaaataaaacagtgccccagaatactaattctttttgatgaacattgtaagtaaaatagtaaaccattgtactaagcttaatattaaaaccgatagcaaatgccaagaaagctgaaactaatactagtagcggcttgtttttaaacaaaacggataaagttactttaaatccatgttttttactctttttaggaacaatgcgctctcgtaccgtaaagaagctaaatagatttaaaattatacttgcaacggcatagactatcgcagtcatttggaatccaagttcttggtttcctccaccaagagctgtcacaagaggtgttgcgcatgaaatggagagtagtattcctacataaaccaatatcatacgagtagtcgttaaaaccgtacgttcctgaacattattggtaatccgccctgttaagctattaactggaatcgtttgcatactaaaagtcatccccagtaagatgtaggtaatgtacatatatataacattgcccgttaatcctaagttagggttagtaaaacaaagaatagtgaataaagcaaaaggaagtgagacccataataagtatggtctcgcttttccccagcgggtattagttttatctaaaataatacccattataggatcgcaaatagcatccaagactcgtactactaaaaacaaggtcgcaacaactgcaggatggatacctccaacatcagtgtaatagaaaagtagataggcattaacaaattgaaaaacaatattatatgacatatctcccaatccgtatccaaaccgttctaaccaggacaacctagtagtcgaactagatttgtctttattttcattctctaatatttgtgattgttctgcgtttaacataggtaatacccccagaatgcgttttcaaaaatatgttaagaaagacagtaaaaagtccatattatcaacattaatcttaaagaaaaaaacagatgcggtttagttgcaattgtcctattttaactccgcatctgaaaattaaaagttcaagaatctcgtcataaatatcaactagaaacctagctttcaagtctaatgttttttattcgtttggatacactataacttttaaacattcgtttttaaaattcagcgctctctccatcgcttcgcgtgtgtcagctaacgcatatctatctgttacaagatgttttgtatcaattgcaccagaagcaagaaacttaattccctttggataagtgttggcataacggaaaataccatatatatcaacctcattatcagcaataaatggtatatcgagtgcaatgtcactttgaggaggcaaacctacaattgctaattttccaccacgacgaagtgaagctaatgaagattgtaatgcttttgggtttcctgctgtctcccacgcaatgtcaacgcctatgttatcagtaatatttttaatttcattaagaggatcttgctctctaatattaataacatgagttgcccccatttgcttagctgcctcaaggcgtagtggttctaagtctgttgctattattgtacttgctccaaatgctttcgctgccgccactgccattagacctaccgggcccattcccataatagcaattgttgaccccggctgaagttttgttctagtcgctgcgtgaatgccaactgaaaaaggttctattaaggcagcatcttcataggagagggaatctgggattgaaaagacaaaatcctgacgcatttttatatattgaacgaaagcaccatctaccggcggtgttgctaaaaattgtacatcaggacaaaggttatatcgtccttccttgcatgcttcacaatgtccacaggttactcctggttcaacagctacgcggtcccctactttaaacctttcaacagatgatccaatagctacaatttcacctgagcactcatgtccaaggataaatggtttttctactttgtatttaccaattctaccatgggtataataatgtaagtctgagccacaaattcctacagccattactttaattaaaacttcattttcatcaatttgtggtataggcaatgtttcaatactaatttctcttgttccgtgcatgacagctgctttcatagttttaggtaagttgttattcatcaataatttccctttctttaatagaatttctatataaatccacaatgtaaaaataagtatgaatttacttttaactcataaatttctaatgtacttgattgtgccttaaacatatttctattaatatgtaagtgcatacattttagagttttttattacataagctaattttacctgctaacatcacactattaatagccttttatactgtctaaaagtacagtgctactgtacttttctttttatatacaaacaaagatatagcgttaaaataaagctaataggaggtgtaggattcttatggctgaaattgaagatcagaaaacatttgcagaactgttatctctgggtgttaaagaactaaaacttcaccctgattataagattaaaagaaaaaaaggcgaagatagctcactgggacaatcttatatagctaacatcgcaaatgaactaggtgtatctcccaatacaattaaaagttggataggtcagatgggattaaaatatattcctggtcgtattgacgatgggaagcttttcggcatcatatggataatactaaaaaaaacggatatagatataagttggttcttagaactattggaaacaacttctatacccattcttaaacctgctttacctgcttgggtgtcttcgtgtctggagaaggcgaaaatattaggagtagacaactcatttggtggaccccttaataaagacattgaggaagtagtaaaaaaaatatttcataataaacttcagactgaagttgctactccaaagaaacattttacaatacataacttaccaacacgctggtcaggcatttttattggaagacacattgacctagaggcaattcgtcagtgggtaatttccccttctccattatgtttaattgccggatgggctggtattggaaaaacaaccgttgctcttgaagtagcatacgcatgtgttcaggagcattataaggaaatagaaaaccttgaaatggattggccaaaattcaactctataatatggtttagtgccgattggaaaggactaacctttagtgactttctaaatacaattgcttaccaacttggacggatagaacaaataaaccgatcaattgatgaaaaacgttttgtggtgcgtaatgcactggctaattatgcaaaagaagaatccgtattacttgtgattgatagcatcgatacagctgaaagtgaaatttatgaatttattactaatcttccacaaggcgttaaagtattactcacatctcgtgagaatctacaacaaaaatatagaaacaactttagagatatggtaaccattcaactaaagggtctggaaaaagatgacgctcttaactatctttcttatgaagtgcagcaacatatgaaaatgtctaattcttcaaataaacaagaacaaatgaaacagctattaaacagccctcgtgaaattcgcgaagagctaatttcagctactgctggaaatcctaaagctatcgctctcagtatagcttatattgcagatgatgacattcctgctcagcaactcattgaggaactaggtaaagcaggttactctctgttagagttatttgattttcttttcggacgcacgtgggagcgatgtaatgagaacactttacttttatggaaagtgctatgttttttcagtaaacctcctgatgaagagagttgggcgacagtggctggactagatgctcgaagattccattttgctgttgatcaaatgaaactatttgcacttattcaaggagaacgtatagaaggaaaaatccattatctaggtcatcaaaccgtagtaacatatggtgaacaacgattgttagaagataaacagttcgaaaatatagcacgtaagcgttggagccaatactatatcgagtatttagacaaccatttaaaacgagatcttcctgattctatttattggagttatttgcttggtcgtgatttagaggaaatcaagaaagaatggccaaatatactcaaggttataaaatgggcaaacgaatccgatcaaaaagagcttttaattgaacttgtatttcgcataagccattttctaagtcgaattaatttacctttaaggattaaatatggaaaaatagcagctgattatgcaaaacaacttagaaaacatacccatgaagcattttttcgaatcgacacattagggtgggccctgatggaggtcaataacctagatgattccctactacaaatagattccggtttaaagacactagatcagttaagctcagacaattctgatgtttacgatttgaaagcttggggacttgccttaaaagcaaggctttttttaaagaagaataatcctaagaaagcagaacgtattcttaaagaagttagggagatttctactacaccagttattcagcatagaatcttgctagtacgcggtgatttgtttatgctgtataaaaattatgaagcagccatccggttatatgaagaagctaatgaaatcagtttaatctatggaggagaaaagaccattgaagcttacttcaatttaggagtagcttacgtcatttgcggtaagcttaaggaagcagaaaaatgctttaatagccttctttatcaaaaagataaagccaaccaaattgaattaatatattaccactatgggatggcccaattgctattacgaaacggagagaatatggaggctttacaatcaagccaaaaagctatcaaccttatcgattcttggggaccaaccattagtattcgaaaagaagtagaagaattcaatgacgtcattaaacataatatttgaaagaattaaatagcaaaaagccacttgaatgaaacgagtggccttttgtttgtatatgatattttatttcctgcttttatctttttatagcggttcatcttcaaaactaataggacatctgctctgttgaatttcactttattccttattacatattttttataagttaaagtttaatcactttatatgtaaaagataagcaacactgtggtagctaattatgtatgaaatatacatacgtcttcataagaattttaatatataattgaggttaaaaagaattatttcaggaagaggaaaatgtgtgaaacgtagtcgattgttgcttttatcgttaattagtagtttattagttattttagtatcgttgtttcagtgggatctggttgatatgataacagaatttttaatgttacctgtttggttatgtgtatatgctttctttatcataataactgtatggacattgattcatctttttaaaaatagaaagtggcagccgtttgttattcagctcattactgtggcattatggttcttctttccctttaatcaagtcaacttggatttgaactttaaaatccatcaagataaaagagaagaggttacagctaaaatagaaaatggtgtaattaaacctaatgtatctgatagtccatcacttattcaattacctaaagagtatactcaattgtctaaaggtggaggcgacatcttagtagaaacaagaggaaagactaaatccattcttttctttacataccgtgggatgctagacaatttttctggatttgtatatgacccaaacgatcataaaccttcaaaaggcgattttgatggagattttaaacaaatagaaaaggtacacaaaaactggtattatgtatcttcttattaaaaatagttaaagcttttgtttataaattggcccccaatcgttagacacagcctaacaatttggggccagtatttaatctttatccttattcattgatttaagcaattaaatccattttcttattttttcatagtaagtggagacccactcttagtccctcttcttctattaattcaagctctctacacggttaaagtaagcttgttcaagaatttgcatataatcagtctcggtaattaaacggacgttacttgatgttgagttattttgcatggccaaccttacaatgctcggaaagtcttctttctttacaccctctaaatctttcaatttaggaatgtttaatgattctgttaattctataattccttgaattaatttttcaacagctatttcatctgaatctgaatccttggcaaagctcatataccttgctaatgtcgcatgtagttgcttattctccatagaattgaaccttaatacatatggtaaaaatactgcattggcaactccatgcggggtatcataaagtcctccaagcgcttctgctaagcagtgtactgaggcaacatctgcagatccaaaacaaaggcctgctaagagacttccttccagcatatcttgacgagccgcttcatttttaccatcacggaaaacgataggcaatgccgaaacaatggttctcattgcttgagctccgagcgcttgtgaaataggatttgttactttacatgtataaccttcaatcgcatgaacgagtgcatcaataccagtagcagcagtaacagaaggaggaagacttaatgttagttcaggatcaagaatcgccaagacaggtcttaatgaactatgtttgagtgtcatttttcgatgtgtagacgcctcggtaattacagcagaacgagtaacttctgatcctgtacctgaagtagttggaatacaaataactggtgcaatgtttgaatacaggagttggccgtctgcatagtcagatggtatcccgccgtttggcccgcatagtgcaatagcttttcctgtatccattgcacttccgccaccaatggcaacaactgcatctgcaccaaagtcacgaaataattttgcaccttccaagcaattcttatctcgaggattttgttcaatggaatcgaataacaatactcgataaccagaagcctccagggccgttataattggtgaaactagtcctgtacggaccacacctggatcactcacaattaaaatggatgaaccaatatttagggattttagcatttctggtaattctttagcttttcccatccctacctcaatttgagtagaacaaaaatagttataggatttcatttatacccctcccattgtctaaaatcaaatacatatcttaattaaattttaaccttctctacaattagtagattcaactgttaggctgcaggtaacttatacttatggtggtttaggcaatacacatacagtatagtaatgtagtagagaacataaataaactatatgtatatccaacaaacttcttatcatatataatacaagtccggccccaatcattacagatgaatatttagattgttattatctaaaaaactgattagtaatctctataatatgtaatcaatttatttatgcaaaccaatcttgttgttcagtaaaaatagatccaaatactaattcccttaattatctagtattacttctctagttacatctaaaaaagcactcaaagctggagatacccatttgtctttatgccagaccagctgagttacgattggaaactctggacctttccatcttaatacacccatactaccttcctctatttccttctccactgctagcttaggtagtgctgctattccaattccagctattacacattttttgatggcttctatatcaccaagttcaagagcacataacggttgaacggctgcatcaacaagtgatgcttcaaatatatttcgataatcgcatttctcagtaaaaagcagcgactgaccatctaggtccgcgggtcttacttcagatttatcggctaaaggatgattcggcggacttactataacaataggttccgagacaagctgctcggcaatcagcttgtctgagttaatccgagtcatagatattaaaacagcatctatgagaccttgagcaagtaaatcctcaaaatcattttcagaaattccaggtcgaaatatcagttttacctttggaaaacgagcttgaaatagtttcagcaaagctggtaagcgataggtgcattgggtttctgaagcacatattgttaacgtcccactaggctcttcactcccacctacagtctcctttgcctcttcggttaaatcaagcaccttgtccgtatatagcttaaagcgcttgccagcttcagttaagataactcgttttcctaaccggtcaaaaagttgtacagcaagttcttcctcaagagatttaatctgagctgttacacttgattgagcatagtgaaggatttcagctgttcgagtaaagtttaattctcgagcagcaatttgaaaaatttttaactgtttgagttccatagttttctctcctaaatcattttcaccaataataataatattctaaatatatcatttcgctcatgctgcttgtaagcgtaatgtctttcattactcgcttctcagaggaacgtttgcatatcaagaatgtatgatgcaaagctgcttattccggaaaaagaacccttgacagtgaacaagactgatctaagggttcttctacttgattggttcctttaaaagtgattatagtaactaagattggacacgatatacagagtgaaaacagaaaagacctacctctttccagtcaaaaaaggtaggtttttctgtttcacgactttatctaatgataccttatggcagcttgaatagtttgctcaaattataaaaacatattcaattctgaaaagcaaaaaacaggatccatttttctctaatctaaggtgattccttctgataaaccctattacgttattccgatgtaatagaagaaggattttactttttaagatagaataacattcttagttaaggtactgcaggaataaaaaagaacaaccataacggttgctcttttaaagtattgtttttatagctagatacactgcagcaatcgatgcaagaacgataagtacatttaaaatacgatgttgagtagctaagtggcctcgcttcatttctgcacgagtcaatggtttcttttcatcgtgatttccactcactatgttacatctcccatcttatttagttattggttccactaatttaagcaataagctgatctttattagctgcttcttctttttttgttttccctctgcataagatataaaaaacactaaaagtaatgatcgtccaaataaggttcgctcctggttcagtgttagctaccttaaacaaacttggaatagatccgaaaacagaatcgtccgttgtaaggaacaaagccagaaacatattatttgctgcatgtgctccaatggtaatttctaaactttttgtttgaatggcgatatatgtaagagcaaaaccagctacaatataatccagtccgactaatataatggatttattcatttcaggattagcaaaatgtcctattgaaaacattaatccaacaatcatagcaagtaaaatagggcgtttcactttcttgctcacccattggagaagaagccccctaaaaaacagctcctccgttgttgtttgaataggtactaataaaagcgtaataagaattaagaaaacatactctttcaaacttacatgattccatgaataatccgaatggttaaacacgacatcaattacttgcccaaccattaataacaggctgaaagctccaaaggaccaaattattttcttccagttcacacgtttgttagaggttattaatgatttcatttttcttttatgaatgaaacgaattccgatccacaaaccaaaaatccaacatatgtatacaatatgagataacagaaaatcaagattagcattgattcctacagcaactccgctatcaaaatcaaagtatgattttccactttcatcagctgataccataaccatgtcagcgataatataaataatcgaccctaatagcatgaacgcagaagccagtatcgttgtgctcaaataacgcttccagccattttttccttcttccacatctagatagttcttcattttattcttactccctcagcgttctcttctcaatcaaatatttcttctctacttcgctttcgtccaaacaatgtataaacttattagaacgagaagccctgtacatattttaaataccgcttgtttttgctttttaccgctaaggtagctcttttcaactgacgctgcctttagagataaatccaaagagaatgccaaagccagtaaagcatcaccgtatttatcccttgattcttcacacagaattccttctaattttcttacttagcgtcataaaagccgttaaaaaacagctttttctgaaagaagactagacagcaaatcctcttgaaccgttatatgttgctcatatgtacccgcatacacataattttgaagaaagtacttgctactcaagaatatatatcctaaaacaactaaaataaatatttttttcaacattttcctcacctttttattcaaacttttaccctcatggctgttaccacaacacctaagagtttatccataaacaactttttcagtttttaaattagcattcaactcatataacaccataaaaatgtatataagttacaacaatattacattatcattacaaatgtaacaacaatattataactaagaaaaataggataatcaatatgaagtgtctagtaaaacagataaaattgctagattcgtatcatacgtgtaaataaatcgaaaacttttggaaaaagggtggtagttgtcctgcagaaatatttatagaaactaaaaagcaaactccctatcgttaggagtttgcttcttttatttaaatctcagatagagtttttataacctttttcatctcatttagtatagagataatacgttttaagaaaataattaaggtacaatatccccttaatgaatgcgcctctttaagaagtatctatccaaagtatggtttctctttttcttttaaagggaactaaaccgtaaaattcaaccttaaaaggagacaatcatggttacaattgaatcaattataataggcattgtatttatcctcattcaactatacgcattaacgattgtcgaacgttctccaatcggggagcaaaagctgctctcattatcaggtggtgtagctattgcttatgtgtttatttatatcttaccgacgcttcataaaaaacaagaagaatttggaggatcgctggcccttgatactgaactatattttcttggtcttctcggcttactcatctatttttccgtttattcattcgctcaaacgaaggcagccacacacctaacagaactgaccgtttatatggtacaggcgagtttctttatggtttattcttttatcatttcttatgttgtgttctcaaccgatgtcaagcgagttgaatcactattctatggattggctatcagccttcactttatcgggtggtcttaccatctaggaaaaaaacatcatcgcttacacaaaaacagaggtcgctatatgcttgccggggcaacttttcttggatcaatcatgggcgtcttcgggccctcatccggcctgcttattgagtcgatgattgcatttagttcaggtgcaatgttatttaacgttatcagcaaagaactcccttttgaaaaacacgcgcacttgccaacttttttaatctcatctcttatctacgccgctacaatgattgcgttaaaagctttttttgattggtaattaagtggcaatagggcaatagatttttcctctaatacattaggttttccattttttcaacagttgggatataaaaataaccactttactgaaatcaagaaagaaggcctttgaacatcttggttgtatctagggggacataatagactgggtctctggctccctagaaattttccttcgttagaagaaataaagcaagttgataacactgacttatgaaacttatttttctttctccgaactcctcacttaaactttacacccaaaaagttgtatgaactctatcacttcgtaaattatctacgtttaaaacaataagtaaagatctaaacagtttaaaaataaaaaagcgactaattagggattttccctctaattagtcgctttttctttcctcgtaaggagtggagagctattttatgatgccctcacggcgtcttggctagtttgctcaagagataaatctttattcatttacataaaaagaaaaaaattcataataggtagtaaaaacgtataaatatagtaagagataaattgactaaaaaggtgattattattttccgaaaaataccggttgtttttgtgggaagcttattgctaagcatcggaattaatggatttttagttcctcattatttgttggatggaggaacaattggaattgctctcatccttcactattattttgaattccctacaggcgtgatgataattcttttgggtctcccattatgttggtttgcttggatttatgagcggcattatttttataatagtttttatgggctaattatttcttctttattgattgattggctagaacctattaaaaaccagttccaattttctgtttttcctagtgtggtccttggaggaatatttattgggacgggggttggtcttatgcttcggtatgagacaagcactggaggaacagatttactagctcaactactatcaaaagctttttctttgaacatagggatggttattttaagtatagacggtttgattataacagcaggtcttcctttattaggacctaaaacgtttcttttttcatgttcaacaatttttatagggggaatgacgacttcgttaattactaaaaaagagtaatatacaagaaattatagttcatcgttatcatgcatttaggaaagcagtaaaaagaaccctgcagtacggaatttctactccacctgagggctcatagtactagcttgtcgatttaaataatttccatcaagaaagaaagtctttaatagccagaatcctctgatgtaagattatcgagcattgtgtaatcatatttctgcaggggcttttctgctggaccttctataacttctcctgtataagaaaatctagatccgtggcaagggcaatcccaggaacgttctccgctgttccattcgacttcgcagccaatgtgagtacaggttgtatctacaatgtggagttttccttcttgatctttataagctccctttcgatggcctcgaaccgtaattacagccccttcatcattagataaatcttcagctcttacatcagagatttcaagtttccctttgataaggtggcttaccacatcagcattttctactaagaaatttttcaagctggggtttgcgtaaaaacgcgatggcgaatataaatcttgataagcattctctttgcctagaattatatctctgaataaaagtgctgctgctgttccatttgtcattccccattttctataaccagtagcaactagtatattaggttgactagaggtgatttctccaatataaggaagtttatcaagcgtgactaaatcttgtgctgaccagcgatatacaatattttctatatcgaaaacttgttcaccaaaatcctttaacgctttataatgttccattgtatcttttccttgaccggtttgatggctttcccccgccacaagaatcatttcctcaccgttaatgactgcagaacgcagggaacgtgtcggttgatcagcactaatatacattccacctggataagcttttttggctttaacagcaaggatataggagcggtcagcatgcattctggcagaataaagtccaagcccttcataaaaaggaaaatgcgagcaagaaagaacgtagcttcctgtaacacgtataccttgtcgggtaagaactgtttgcttatccccagattcaacattcactgccgttgtatgttcaaaaataagcccgcctttttgcttaatagcttgaatgaggtgaactaaatatttaatgggatggaactgtgcctgctccttcataacaagggcttttttaacttccacgttaaaaggaatatgatccgccaattcaccatcaatattaagttccttataagcttctgcctctttttcaagctttagagcatactcgtcagtagtagcatatatgtaagcatcttgcatgatgaaatcacaattaatttgatgatcttcaactgtttgcttaataaagttcaaggcatctgtattagcctcatagtataatcttgccttacttcttccaaaattccgaataaactcatcgtagatcaaatcgtgctgggcagtaacttttgctgtcgtatgtcctgtggtgccattcaatagtcttcctgcttctaaaacggcaacctttagaccttcattgaccaaaagataagcagaagtaagacctgtaatccctccgcctacaatcacaatatctacgtccatgtcattatctaaaccaggaaactccggcaaatcaatcaaatctctccagtatggttcaggcgcctgcggaagctgttctcccttgcgttcattatgggtcacattaagacctccactcaatattttgatagtagcgttattaggttttccatttattgagagttcatacttacatgaggaatacagccttcgctatgtaaacttatattattttataacctccattcaaaaagtctttagtttcaaatcttatatagataaaaaagagagagtctatttgaattagactctctcttctttatagaaaatatatatctacgaatattgattttaacctttggctaattctaacgctttatctgccttttttaaatcgtgatttacttgctcttcaatatcgtaagcatgatacatttcattatcaatcatatattgagcgatcttttcatgaagctcaatagcttcgtctaattgtttttttaatactttgcgtacttctggtgttgctgtttctgtaagtgctaccgcatatgttcgtacaccatttttcgctgataataataaatcagttgcaatagcaagatcatccaatgttttgttaagcgtacttttagcagccattccttaatccctcctatttattgagctttctttaagatttttttcaattcattaattgcttcagtagacgtttggacgtcttcttctagaatcttttttaatttttcgtcctctaccaattccagcattgctgtgccttttgttacacacgacgttttaagcgttaagatttcatgaacttctagcgtctcgtgcatagctaatttttttgacatgtctcaattcctccttataatcgtatatatttaaagactttaagcgcgtaatttagcgcctgcgcaggctgtttttctagttttttaaccgttagaatttttattgctagcttttccgcctttttcacctatttctcgaaaaaaatctttgttttgattcttagatgtggcttttccacccttttcaccaatctcttggaaaaactccttatcatgatttttggacgtagtttctccaccttttcgtccagcttcttctctgctcattttttcattttctttattcttggccatctttaattcctccttaaaattttttggcttgtgaactatattcccagctcatttccatttaaacaataattgtctaattttttaaatgtttcagaaaaaggcgtcagggtattacaagtagcatatatgaattcatttatataaaccattttctatactaaaaggaggaactgctcatgacaaaaaatgtgataggcacatatgataatgaagaagcaatcgtaacggctgttcagcatttaaaaatacaggggtttcaagagaaggacctctctctggtcaccagcaaagatatcaataaagaagactattcagaagtggaaagaaaagaaggaattgacgtaaagaagattgaaaccacagatcaaactcatcaagatgagtcgattatagataaaattaaacatatgttttcatccaatcaccctaaagagactcttagggataaaccaggagcagaaaagcatttaattaacttaggtgttccccttacagaagcaggaccctatgcagatgatttgcaaaaaggaaaagtattattgttagtaagagcccatagagaaacaaaaacaaacccgttcttagaaaatagagaggattctccttttgcgaaaggtgactctgtttatgataaatcattatacggagaacaccgtgatcatgaatagaatgttcccaaaactgaagagcatattgagttgtgagggaagaaggaaatattaaaaatcaagtttgtgagcacactaagaatataggaatcttagtttcttatattcctttaagtatgtgttttaaaaaagctactcaaacgagtagctttttcttttttaaacagcgaacatccatcagcctaattaacctcagcctatgttttaatttaaatactctagcatattagcgttacctcttacagatccaagatgcttcataaataagtagaagttttttatgtaagtaaaccgggaaaccgaacgttagataacagtaaaggagaacatgttatgcatgaaatgacagaaaagctacatgactttttaatagaacatattgatgaaatgtctcaagaatggctagactcgcgggaagtagaaaaggattcgatctacacagctgatgcctcttccgaaacaaccgaatatctcagggtacaaaatcaatatttcactcgtaaaattgtaaaagttcttataggagagtcattagatacccttagtgattgggcacagaaagttgccacaaaaagggctgagagaggtgattatctttatcatagtatccatcattttaaaaagtttcgtttaatttttcttaaacgaattgaatcatttttttatctttattcgtctagcattacatacgaagagctttttttatggaataaaatagtcaatgaagcgtttgatcagatgatagaactttttaccctttattatggacaagtttcagaagcgcagtctcaagctcaaaaaatgctgatttctgagcttagcacgcctgtcattagtatttccgatacagtgggtgtgctgcctctcattggtcaggttgatgattataagaatagtgattttgcgaggagattagaaaattgttaagaaaaaaaggaatctaccttttacacaggaatatacagaacacgatatcgtgcatattgctttaaacagactaatgagtgaattaatctctagatactaaatatatatgcaggagcgcattcaacaagcagttgaataactaatgttaaagaagtctggatattactagactgcttttcccctttctgaaatccgttttatgtttatatcatatatcttgaaaaacagaaaaaactacaggttcataaggaatcagtagttttttccgcgatataattaaaagttagttttgatgcttttacatatcttgagtagttcacccaagttaccaataacttatgtattaaaaagaaaatttatttctctttcaaaagacgcttattttctattttacatacccttaatgcttataccttaccatcgtaaacctgttgtaagaaatgtttttttatgacttgttaagggaattaaagaaggaattcaaaaaaagagggagttacaatgtcaaaaatggaaagaaaagaagactacggggagatttacataggtaaatatgaattcttctttaaaaagagttataaagttataaatacgattaatgacttcttgataggtatctggtttttaattggcagtattttattcttctatgatcacttaaaaaatataggggtttggctatttattattggaagcgtgcaattgctcatccgtccaacgattaaattagtacacgattttcacttacgcaaatatttaaagaaaggctatcataatgaataatctttcttgcaaaaatgtcatttgtaaattctatgtatcaaaagggtttgaaagctaatgcctacaaacccttttaattctacttttaaattaaatatatcactcggagtctaaccctttttcattcaatttatgcgaagtcacggcaattacaaactttccatcatctaaatcttttttatgagaggttagctcctctataggaatacctaaattcgctgcacggtcttcggcattcgagtagttttgtactacaaaaaatttctttaatttatctaaaaaagaatccggctgcgctcccccagtcatatcttcatgagtgacttcatcgtgatcaacagcagatagttgatcaacgttgacattcgttctataggctagattgcccgctgaggtcttttgattagttagaactgtaatttcattatcctcataccctatcatttgtaatttctcaattttagttaatgtttcttctggcgactcatatacacctataacacttttactcatatagctttcctccttaattgagattttttatccttacttttcatttacccgttattctatgcttattaacaatagacccgttgctaaaagcgtaaacaaaatggttttccctttttaggaaaaaagattacctcccctcggactgcgtatattacatcaggtcaagaaagagataatcttaaaaagggttacccttctgccgtacttattgggcgaatagtcttgtattctggtttccacatagctttttctattaatttttctacatcctgttcttgaactctagatacgccgtctttaatagcggcttttgcgacagctatcgccactcttttggatacgttttgaagatctttaatatgagggagcagcgtatcgcctttggtttgagtttcagccatatgggcgactgcgtttgcagcttcagcgaacatggtgtctgtaaattttcccgcttttacagcaatggctcctaaaccaagacccggaaatacaaatgcattgttagcttggccaatttcatatgtttttcctttatactccactggatcaaatggacttcctgttgcaattaatgctttaccatctgtccaatttataatatcttttgggatagcctcagctaacttagtaggattagataaaggcataatcacaggtcgttctacataacgagccatttctctaataatttcttccttaaacgctcctgttatccccgatgttccaattaaaatagtaggctttacttgtttgaccacttctaacagaggcactttatgttctttatcttttttccaattctttatttcctctaacttacgagcataaggctgctgaaatggggctaaatcgttcatctcttccgttaacagtcctctatagtcataggcccaaaatcgatcatacgcttcttctactgaaagaccttcaaggaccatagcgctgtggattcgatcagcgttaccaatacctgcagaacctggtccaaagacaacgatacgatggtcttttagagaagtttttgtaatctttaaagcagtcaatatcgcacctaacgtaatcacacccgtaccctggatatcatcattaaatgttaaaagaaaattcccatactcttctataatgcgtctggcatttttattccctaagtcttcccaatgtaacaatgcttttgggaacttatttattattttatttataaattgatcgataaactgattgtaagcctcgcctttcaaccgctcatggcgattacctaaataaagcggatcgttaagtaattctttattattagtccccacatctaacacaataggaagaacacgacttggatcaataccggcagcagctgtatatactgctaatttacccactgcaatgttaattccacctactccccagtcacctattccaagaatgctttcagagtctgtaaccacgattaaatcaatatcttctgagctcagttctacattttctatcgctttgtccattttatctgcttcatcaatcgacaaataaagaccatcaggacgatgatattgatggctgtattcttgaatagattctccgacggttggtgtgtagataataggtagcatttcacttaaatgatcttttaataatcgataaaacaataccacatttcgattatgtagatcgtttaataaattatttttttgtaaatcatttgatgcattcttaaactgctgataagcacgttgtacttgctcttctaaagtcagtacggtgggtggcaataatccatctaacttgagttcttctctttctctttttgtaaatgcagaccctttgtttagataaggtctcgataaaatgtttttcccttgtaatggtgtttgaacaaaactcttttgtgcttcagtagaagatctcatatgttatcccctttccgtttttaaatgaatgtaaaaaacaatgtttttcttatgccatcggtatcatgaggtttaacaaagatgttttcttgctacatacaatacttttaaacggagaagctcttgcttaaacatagaatatcctgaaggtggcaattcagaatggtatctatttctttagtgatggcttaaaaaaatgtatttgagttctcttctgctgtgagatagcttttaggactactgatattgacaggtagaaatataaaaaagcagtatttggtgcatttcttttaagctagtcatattcatcatgattctcgtcaaaaagaagcccttgctaatcatagcaaaggcttctttttggtgagcttcttctataagttatgtaaatgatggcagcaaccttaacatatataaatggtttgcatatttttcattgagaattttccgttcttataacccgcttgatagtaagcaaatagtaaagtatctcctacaaataattcatttatctacttattcttcgtatggacaaatgattggatattttaaatttaaattactaataataacgttatatgtcttttacgtaaaaggagctaaacagagatggaacttaaaaaagtagcaggcatcacctttttatcaagcgttatcttattttcgggacctttatcattggtcaatgcatcggtaaatgattctaaaatgactgtaaaaaattcagtgaaagaatatcagcccaatataaagattttggccactggaggtacgattgcaggctcttctgaaagtagcacagacacaactggatatgaatcaggagctcttaacattaaaacgattatcaaagctgttcctcagttgaaaaaaatagcgaatgtaagcggagaacaggtcgtaaatatcggaagtcaaaatataaataacagcattttgttaaagttagcgaaacgaattaatacactattagcttctaaggatgttgatggaattgtagtgacacacggatctgatacgatggaggaaacggcttattttctaaatttagtagtaaagagtgacaaacctgtggttgtggttggttcaatgagaccagctaccgctataagtgcagatggaccgctaaacttatataatgcagtgaaaattgcttctacaaaagaagcacgaaataccggcgttttagtagcgcttaacgatcgaattggtgcagctcgttatataacaaaaacacatacaacggcagtagatacgtttaaatcccctgaacaaggatatgtaggagaaatagctggagataaggtaatattttataacaaaccaactcgcaagcatacaacacaatcaatattcgatgtatcaaaattagataagcttcctgaggtagacatcatatatgggtatcaaaacgactctaggtacttttatgacacagcggtaaaagctggagcaaaaggaatagtcgttgcaggagcaggaaatgggctgctatccgatgctgctctaacaggtgctagagatgcggtaaaaaaaggcggagttattgttagatctagccgggtaggaagcggagttgtgacacatgaagaatcagatgataaagataagtttgttacatccgattcgctaaatccacaaaaagcccgtattcttttaatgcttgctttaacgaaaacaaaggatcctaaaaagattcaagaatattttaatgagtattaatcaaaaatatctttcatcctctgttttgactaaattttttaagaacaatcgttaacgacagcttataagaaggacataaagaggttgagacatcactaacatacttttatctcagcctcttttaattaagaaagaaaccatcagcaggttccttattcatttccccagttcttactttctataattacatgatttgatgtgtcgtctagtacacgccatatcaaagtcttaccttctatatcttttaactcgataatgccctctagcttattggtatttacatggacccgtctctcatctattctttgcgcactttttaatcttgtcccgaatgttgcaggactttcttccgttagctttccaattacatctatcatacgcttgtcagaaacatagttttctttgctctcatagtttttatcagcaggtttaatagcgtgttctaacccattttcatactggcgccaatcatcaattaaaaaaatcgcaaatactaaagacactgtgagtaacaaaccgtaggcaacatttcgtttcatttatttttgctcctttcgcaggaataggttgtatcagaaaatagtatcgtatcactttaaaaaatattcctttttcagcataaaagaaggtatattttttaaagttttctgcttacggagagtaaatgcctaggttaatttatgtaacttataatcagcttaatgtaagtccagtgctaaaaattcgttcattaggaaagacaaaaataaaccatgttagaaaactgaagaaattgaccttctctatcacaaacttctcatcgcattataagagcccgtaaacataggtttacgggctcttgtttcgcgttcataagatataaatataattagtccagtatacatgttttatttaacctaagttatttttcaatatgttctccagttattcgaataaagccttcatttctatctaatggaacaggaggacgctcgcctaaaggaaccttccagtgccaccatttgaagattctagcgatgacgaaacatagaatagatatgcctgcaaaaatcccaacaaacgtccagtgctgtccgcttaacagcataacaggccccgctgaccacgcaaataattctaacggcgtattaagcggtccaactactgctgtatctgtaagtgtttttgatttattattagggtcaataattcttaataatgtaagtccgatagcaaatacacctgttgaatagccatacacaaatatggaacgttcaaaccaactttcatagttcatagcgggtccaattatgattagcatcaccactactattgctatgccagaaagcattaataaaccaagtggaagtgcatattccacaacgataggtaatttaattgaagctaccccaaaaaacacaagaaaatcggttgctgcactgcccaaacggtcgactatcttactatcgacgtatttataaacccctttttctcctttgcctagcaatatgtacataagcagcgctatcaaaaatgctattgtaaacgttggaaattccagtccccaagtagtcgcaatataattatttaataagtatcccaaacctgatggtaccactaataatgctaaatgaaaggctaatggatccatcgcaattggtgaaatagtatcatttcccattgccgttctattttgaggttgaactaaccctgtttttaaatcctccgaaatttccgagaagtcttttacataatgagtgtatcccttttgagttgcccattttataaaaataaggcctccgaaaatacctgctaaaataccgccagtagcagctgtcattcctaagtccgttgcattttcccagcctaagttttcgaaggttgtacctaccgctgccgctgttccatgtcctccataaaatcctgctgctaaaagtaaaccaaatccgttattaatttctggagcaaactttgaaataactaaaatagaaaaaataatcggaatagacatttgaaggcctatacaaagaattttataagtggcatatgcgcccattcgattaatatcctttttcatattgccgggtgaaaaagaaaacccgtttatcccaactgccgcaaatacaaaaatggtgatgattcctgcataggagctaatatcttcagaaaaaggtagaacatttaaaaagctaggtcccaatgctaaacctaaaaaacccgccaataagcttgctggaataaaacttctttggataaatttaaattttgcacgaagcagcatacctattaaaatcagaacactggcacaagcaaaatctactagtatcgtatatacagtcattcatatcctccttccgtaacgttaaatgcttaacaaattattggattttgttgatgtagctggtggtgctgggtctagtctttcctcttgtatatgtaatacgtcttccggtttgatccagggtctattttgtatagcacttgtttcttcatgtgtaaggtatcctttgtaagctgttaagcttcttcttaaaaatccgtctttaatacaggctgacttcacacctgaattcaggatggactgaatatgcggcagcacggacgctgcataagctacagaagtagaattagcaatagctccaggaatattgctgacacaataatgaacgacaccattttcgatatatgtaggatgttcatgagttgtttcacggaaggactcaattgcaccgtcagtgtcattgctaatatctacaataactgatcctttttccattaaattgagcatatcgcgctctattaaataatccttgcgttcctttggccatttcacacagttaattaccatatcagtttcaggaagcagttttttaatattttgcttagttgatagctgagtattcactttttcattatacgttttgccaatatctcttaatgttccgtaatttacatccataaccgtacaccacgcgcctaatgaatgtaacacctggagcgccgaccttcctactaatcctcctccaaggatcagtaccttcataccaggggctccagctaaaccgctaacaaattttcctttcccaccgttaatcgtcagcatggcttgcagacccattaatgcaccttgttttcccgctgcttcacagtttactgaaccaaatcgatgtgaatcttccgcagtgaatgcaatacatttgctatcgagtatagcctgtacctgctctttatgtgcagctggatgtatacacgtatagataatttgattttccttgagcaacttatactcattctcttcaatctctttaacttttgctataaagtcacatctttcatacatctcttctgttgtttctactatttccgccccttctttttcatactgttcattcgtaaatcccgctaaggcgcccgcatctttttgaacaagaaccgtatggccatcgtctttaatagcagcaacctctaaaggcgtcataatgactcgatattctcccactttcttatcttttaatatgccaaataccatgttgatccccctaagttagttttgtaaatgcctctctttcatgcgtaatgttaaggttaaataaactattaaaaatattcagattaaaataaatacaccttaccttgctacacccaaactatagagagattgttctagtagaaccttattctgcatttacgtaccaaattataaattaaaatgaataataattcaaaataatttgaaatcatcacctttttacacgtgtcatgacaagctgttaccgtattaaccttgcatagaaaaaagggttccactcatcaacgttcaatgagtgaaacccttttttgattatctgcggctagctgtgtctctgctttttggcagatgagctttgtgccgtatagctaacaggttactttattactgaaatactgccgttgtgagtggctagtttaaccgtattctttccttttccaataacagcgtccccatcatatttattcaagatatctactttcccgttgtcgacagaaacgttgaattgaacgtcacttggttcttttttcgttgtaatcttaatttttccattgtgcgttttaaagtcaatatctcgatcaagttcttttgtttcaagagcgatgcttccgttatgcgtttcgccttctaaactaccttccacgttactcagcgttattttcccgttatttccttttgcttgaaccgcttttgctgcagcattttttatgcttgtaagtccattgtgtacgctggtgttcaggttttgtgaatcaatgttctctaattctacacgtccattgtttgcgcgaatggagacatctgctgcgcgtaattttttaacggacacatatccgttgttgctggaaatccccaatgaattatactgtttttcaggcagataaacgttgatggatagcggttttaatacactaacaatgtcaaaattgacccagctgcgctgttgttcattataggagatgaaaagcgttgaatctctaacgtcagtagtgaaggctctttttatattaggagatgtttcgccttttaatgttactttgatgttatcgcctttgatagggtacacatgaacacgggtattatccgtatcgatgtttaccttggatacttgattgctgttgatcgttttttcttttgaaataggttcaggatcaatagcacgataagtaaggagacttcctataatcccaacaaggacgagaatacctgcaagaatggagagtttctttttattcagcacgttttaaaccgcctttcaccagtgatacattgtattttagataacgtacaaagccttttataactagctttgtcacaactaacatacctaacataataaaatagccaagtccgcaaaatgctaaagaaataaaaagattaaagagaaaaaagccgctcgaatgtacaatagcctcacccagaactagaataggagatagcaagaagcatagacctatggcccaagctgacagaatgaagccagctagtgcaacggcaggaccaagaacaattactacattaaaaaaagctaaaccaattacggcccaagtggctctcaaaatattttgagttgttgcctttgctgttgcttgctcaacgtgataatctgccagcaattctttggctatttgattcggagaacctaaggaggtcacaatttcttcttctgtttttccttcttctaagccaatagaaaaatgctcttcataatcttgtaaaatatctgcccgttcttttgaggacaatggttttaaagattcacttagttgctgtaaaaatttactcttcgacattgttcacaccttctttaattaattgattaacacctcttgaaaactcgttccactcatcgacaagcttgtataaataatctcttcctttatcggtaagctgataatacttccttgaaggaccttctgtagattcttttaaatacgttgtaaaatattcttctttggttaaccggcgcagaagaggatatactgatccttccgatatttcaatttgatcggagattttttgaactaattcatatccatagcggtctttcttatcaagtaacacaaggacacaaagctctaaaactccttttttaaattgtacgttcactgttcttcacccttttcttttcacagttcactactgtttattgtatagtactgattcataatgatttcctaataattacaatatatcaccagctattgtttattacaaggtactgtttaatatttttttcaaattttagccatctttacagtggtaaggtattttttataaagcaaggttcaaccttctttttctaattagcttatatatggaattatttttaacgcggccaaaagaaaaagcagcctataactatagactacacagcagcgatcaagccaggctatttttcttttgcttgtttgataaataaaaagaaaaccgttattaagataaaaatcacaattgatagaaatgtcttaagtaaatttgattttttgtaatacgttgaagaaaaaagtaaccgtttttttacattttttaatcataaaaaacagtcaattttatgactgttttaagtagagagctgtaaaatttttgaattttcaggtagttcagtatctgtataaaagatacattttttatacattagcttgtcattcgcctactgagaaaacgttgataaatcaatgctggctttcaagatgttatcacctcaaaacagtgaacattcacaaaccgaaggtgcactgcctcttttatagcctgcttagaacataaaacgaatatgtacttaattatatttttgctgattttaaaaccgccgcctcttaatatcagtacttttaatgatccaccccctcacccacttaattatgaatacaatcacttgtggccttagactatagggttatctcagggttgatatataatcgtatttattttttactttgagtaggccttttttgctcaaacttcttctcctgatagcgttgataaaaccaaatagcaatagctagccagcaaccgctagcaaaataccctccaataacgtcgctaggataatgtacacctaagtaaatacgactaatacctattgctagaatcatcgtaatgctaataacgattaaaagtgtacgtccccagcgagtaggaatatgacgccagagcaagaatgaaaggacgccgtaaacagcaaaggcactcatggcatgtccacttggaaaactataaccattgatttcaattaatcgatggaaatcaggacgtgcacgatgaaaaattagttttagcagctcattgaggattggagaacctacaataatcgagataaataaaataagctcggttcgatgttttaatactttataaagaaaaaataaactaaagagagaaataactgtcacggatggtgtagagcctatgaaagtaaagcacttcataataaccgttaacccaggagactcgaccccttgaataaacgatataatatagttatcaaatgccacaatctttgatccactaattaaaatagctatcccactaaaacaaataagggacagtacgcttaacataaaagcaagtgtaaattgaaatttcaacttcatactagacacctctattttctattctttatcaagctatttttgatgaaaggtgataaggtctttttatttttagattttaatatttctttacttttgaaattaggagtattaaaaataaaagagcttgtttgatattcacacttataaagagttattaaacagaggcaatacaaccgttacatttgttcctttgctttctttactctcgatgttaatggtaccgtggtacttctcaacccatcgtttggctatagccagtcctaagccaagtcctccttgctttctgctccttgccttatcaactcgataaaatctatttaaaatataggggatatcttcttctgggattccaattcctttatccattactttaaggtatactttttcattgattagagaacagtctataactacttctttctcttcctttttggaatatttgactgcattatctaacaaaatgattaatatttgttctagatgccgagaagaaatattcacatacagactttcatgagaatgtcttattttaaactcatagttgctatacagtacttcaaaattccttacaacatgttgtacagccgtccatacgttgataggttcaacatctacagggtttatcaggctattttcggcacgggataactctaataattcttgcacaagattcgttaaacggtctacttctttcaggctggattttaaggatttatctagtactgccgcatcatttttgccccagcgatttaacaacatcaaatgtccttggataatggctaacggagttcttaattcatgtgaagcatcctctacaaactgtttttgctgtaagaaagagtcttcgaggctattcattaactcattaaataaactgcctaattgggcaaattcatcgtttttttcattaactggaacccgttcttcaaggccatttatttttatttttttcatcgtcaatgttaacgcttgaatgttagatagtattttctttgctaaaattgttccaccgagaatactaaagactagtgaa

SEQ ID NO: 23 - DNA, 77843 bp, Priestia aryabhattai
  source 1..77843: mol_type = genomic DNA
tagtaataggctttccaggtgaagggcatgtgaacccttctttaggaattgtaaaagaattgatggctcaaggggaaaaggtcgtctattacggcattgaagactatgctgaaaaaattcgaaaatcaggcgcggaatttcgtgaatacgaagattttcgtccaagtcttgatatgagcaaccggatgaccaaagaggagtcttatgaccgctatgaaataatgaatttgtttttaaatgaatctgaaaatattattactaaaattatgagtgaaacgaaacatgaaatatatgattatgtactttatgattatcaccttttagcagggtccgctgtggctgaccttcttcagcttccaaaggtttctctttgtacgacatttgcgttaaataaggagttagcaacttgtatgatgccaagtggtcaaacagaacctgaccaatcttccttttatcctcaattcgaaaaatcattaaataagtttaacaatcaatataatactgagttaaaagattccatggacattatgtcgaatccaggggatattacgttagtatttacgtcagaattctttcagccaaacgtatctgaatttacgagtgagtacaagtttattggcccttcaattgttaaacgactagatgttgaagatccttcttacttacagaatgaaaatgaaaaaattatttttgtttctatgggaactatttttaatcagcagctagaaatctataacttatgtgtagaagcattaaaagattttgagggtaaagttattttatctattggtaaaaatacaaaaactgaagaattagcacacattccagaaaacttcgttgtgaaacaatacgtaccgcagctagaaattttaaaacgtgctgatttatttattactcacggcggaatgaacagcagcagtgaaggtttatattacgatacgccgcttgtcgttattccaatggcagtggatcaatttatggttggcgatcgtgtgcagaagttaggagcaggtgtaaaattagataaaaataatgtatctgctgagctaatcaaaaatacagttaacgacgttttaactactcacacatataaacagcatgcacaacaaattggagaatcacttcgctcagcgggaggatacaagcaaggagtgaaagaaattttcaagatggtgcctgttaaagcgtaatagatgtaaggcagctagataactaacagagaggagtaaataatatgcagactataaaaaaagcagttataccagcagcagggttaggtactcgttttttacctgttacaaaatctatcccaaaagaaatgcttccaattgtaaataagcccgtcattcaattcattgtagaagaagccttaaaatcaggaattgaagatattttaattgttacaggaaacgggaaacaagcaattgaaaatcattttgaccataatattcaactggaacacttacttcatcaaaaaggaaagaccgaactattagaagaaatggagcatatctctgaactagcgaatattcattacgttcgtcaaaaagaaatgaagggccttggccatgcgattggctgtgctcgacagtttattggaaacgaaccgtttgcagttttacttggagatgacttaacagatccagaccagccttgcttaaaacagctggttgaccagtataaccaaacgggatcatcagttatcggcgtgcagcgcgtagaggaagaatccgttcaccgttacgggattatagatccaaaagcaaataaaaaccggttatacgaagtgaatggttttgtagaaaagccatcagctgaagaagcaccgtctaatttggggattattggacgctatgtatttacacctgacatttttgattatctggaaacgcaggaagttggaaaaggcggggaaattcagctaacggatgctattcagcgcatgaatatagaccgttctatttacgcttacgaattcgaaggcgaacgttatgatgcaggggaaaaattagattttatttttacgactcttgcttttgcattaaaagatgaagaattaaaagcacctcttttaactaaattcaaagaatttatcagcaaagaagaacaaaaagaaaaaattgctgtacaaattggaaaataaccttcatttacacacctttcttctaatttttcttgaagaaaggtgcatttttttgcggaaattgaacgtttgacagctggatagaaagggttgaaatgagtttatgtcgaaaacagaaaattcgtttgtatcaggcataaagattgtatttacagaccgggattttcgaacgatttttatttcattatttattattggattatctgttggcggctttatgccttatgtaacggtttgggcaacaaatacattgcatgccacttcttttcaagcaggatttttatttgtgccaatgagcattattggtttaatcgtatcgttttatttagcttcgttatcagacaaatgggggaaacgaaagccatttattatttgggcgttactgattggaagcatttcaagagtgccgttagcgtttacgcattcttacacaatagcactcatttcacttgctataggagggtttaatgcgttttcttttttctttgccctgctgaatgattttattgttaaaaagcaagaaagcaaatcgcaggcaggtacgattactggtaccgtgcgaatggctttttcacaaggctatatttttggaccgatgcttggcgctttaattattgaccacggagggtatactcttttatttttattatcagggttgttatcgctagcaactttagggtgggttctttttgcgcttaaagaagacagtatgcctcaaacttcagctcatgcatcttcaaaagcgccagctggtataccttctgtattaatagctgtattcgtagcagctcttttcatttttgcgggggattccggtcgttctatgtatttgccgctgtatgtaacagatacgttaaagcaatccgtttcaattgtaggtattctctttaccgtaacatctgtttttgagctagtatttatgccattaggaggctatttttctgataagattggagttaaacgattctttgttattggaatagcttgccaagttctttattttattttaacgagtcttcatttaccgctgagtgggttaattgtgcttcaagtattttatgcttttattctgtccgctacaatgggagtgggaatggtgtatgctcagtcactggctccgcgtcaaattggactagccacaacggcatatatgacggctatacaaacttcagcagttgtcagcagcttagctatggggtcgctagtcagcgtgattccgctgccttctactttttacattttagctgttttcgcggttatttcaggtgtgatgttcctgtttatgaagcaaaaatcagctgaggaaatgagttgaaaagaaaagttaagaagagggtgaaaaaaaagtagtttcattaaattaaaacacgaactatctatcgaaaatggataaatagttcgtgtttttaatcatgatgaacgcaggtgcttttagctgttggttggagggcaaggcgaagactcctgcggaaacagcggaacagatgagcctccgcaggagcgcaagcgacgaggaggctcatcggccgcccgcggaaagtgaagccttgcacggaaagcaacagcggtcgagcaagcagtccagatcatgtatccagattgttcgtctttgggggagattcatttcggtatgtccagcctctttttttatgatgctgtttcttgaatttgttcgctgcgatttttatttaaaattttgcggtagcggtaattaacaaaagctgccgctgccatacctactactgaaagcatcgcatcaaaaataaagataattgaaatatgtcccgttttagacatgagccctgttgctaaaggcaataaaatagcagctaatccagcagctgtcgctacaattccagtaaccgttccttttttgttccagaaaagctcggtcataacagtaatcgctaattgaaagaccccagccgtagaaaatcccatgaaaaaagcagctgcaattgcaatagcaggtactttaacaaaaagaagcgtaagtacggctataagggtaatcatcgggtaaacgagaataaccgttacaggacgaagcactttgcttaataatacagctaatactaaaacagagattaaagctccgatgctgtagtagcttaaaaggcggacggagctgctttcagccatacctaatacttgttgaccataagtagggagccaaatttgagccaccgtaaaaagcgctgtagaagtaaatccaatcacaataagagcaattccttcttgtttcattttaggagcagagataaatttattctctcctgtattttgctgttgaactgtactctgttcgcgtttatgattgggaaaaggcagtttgaacataaagatcatatttagtaaataaataagagcaggaagaaaaaaagcatacccataaaaaaaatcatgatctgcaaaaaaggcaatcataaacggtagaagcgctgctcctgctgaaataaatgcttttacaagaacactggctgaacctgaagatttaggaaagacctcaatcaaagcaggatacgttccagcatccatagcagagtttgcaataccagcgataatagcaaagataaaggctgtttgataatttggcgataatggaatgccaattaaaaaaatagccatcgtcagagatgaaacaataatcaaaggctttcgtccgaatttatcagacaagatgcctgatacagaatatgaaagcaattttccaattccgatagcagaaatgatatagctgattccagcaccgtcggtatttaattgttttgtcaaaaatgacatatttgatgcaagcatgatattgaccatgccaagtagaaagtagttaatatacatacctgaagctgacagcatgtacttatttttcatcatttacacatccttacgtaaaaaagcttatatgaactggataaaagtaatcacccgttcctccttttttcttcgttatttataaatctacttccatgataagtttatgaagacattacctttaccttttatcattaaatttatttagtcttttttagtatgtgactaaatgtgtgcacctagtgcttcaaatcaatatgaaatctattctaacatgtttttagcgctttaaaccaaaaaagtgatattttataaaaaaatcctgtcttctttcgcggcttcacaaaagaaaccccacaaaaaatgtttgctttaaagccaggctgcataagaagtgcctcctaacggtgattattaaaaaggagaaaagggtatttataaactaagaaaaaagaaacaaagaaagaaaggtggaaacaatgaagcacaaagtattttttgatgcggaatgtcctttatgttacaacgtaaaaaaaataattaaagcgctggactggacgaagcaaatccagtggattccagttcaatacattgaacgaacggagtatagttatttaaaagaagagggaagagacttatatgatcaaattcatatggtgaccaaaaaaggggaagttctagcaggatttgaaacggtcagacgacttttagctgttttgcctcttacattcccaataggtgtgcttctgcatttaccattgatgaaaaaagcgtttagtccgctatacaaatggatctccacaaaccgatacgactggtttggacgctacgattccccgcgaaccacataaacatacaaaagggacaagctttgaagaagcttgtcccttttgttttgaagacattatactttatacataccttaatttttaaaaaacgttaatttagtgtgactgagacgcgtaaattctagaaaaacagctatagctgaaagggagaacttatatgataacaaaatggacagctgaacgaatgcccgatgtaacgggaaaaacagcccttataacgggaggaaacagcgggattgggtttgaagcagcaagggctctagcagctcgcggagcagaaatcattcttgctgtgcgtaatgaagaaaaagggaaagaagctaagaagagaattaaagcggataacggaaatgctaaagtgactattatgtcattagatctcagtgacttgagctctattcggcatttcgccaatcaatttcttcaacaatactcgtctttggatcttctcattaataatgcaggcgtgatggttccgcctcacagcaaaacgaaagacggatttgaactgcagtttggctgtaatcatttagggcattttgcgcttacgggtttgctgcttcctttactaatggcaactccacattcaagagtcgtaacggtaagcagtatagctgctaattctggagaaatctattttgataatctagacggggaaaaaggctacagtccaatgaagttctataggcaaagtaaactcgccaacctattgtttgctaaagaactgcaaaaccgcttagaagcagccggatcaacgataattagtgctgctgtacatccaggtatttcaaacacaaacctattatcacggggttcaggtaaagaaccaaagggcttgttgaaatttttagtcaagctatttagtcaatctgcagaaatgggcgcgctgcctactctttatgcagccactgaatcaatagaaggcggtacatatattgggccagacggaaaagatgctaaaaaaggatatcctgtaaaagataggatgggagatgttttatttaaagcggacgtagcggaaaggctatggagcatatcggaagaattaacaaaagtgacatatatattcaagaaaagataaaaaccagcggctattggtcgctttttatcttttttaaaccaaaacattataacgttatatttacttatttatttctttatgttattctacatttgtaaaagcagaaaaataattaatattagtgtaagcgccaccataagaggagtgaacgaaatgaagaatcggtttctattaaggaatgtcaaatcggtcactgaaaaagagtttgatattgttatagaaaatggaaaaatctctgagatagcaaaagctggtgaaggaaaagcaccgcttgtttatgattactcaggaacctacatatccagcggatggattgatttacatgttcatgcgtttccagatttcgaaccatatggagatgagatagacgagataggagtgaagcaaggagtaacaacactagtggatgcaggaagctgcggtgctgatcaaatagcagatttaattcaaagccaatatgcagcaaaaactaatttgttagcgtttttaaacatttcacatattggtttaaaacgcacagatgagctttcaaatatggaaaggctaaaagcggaaaagatttttgaagccatgaaggcatatagaaacaatattgtaggtttaaaagcccgtataagcaaaagtgtagtaggtaaaagcggtattgagcctttatattttgctcgaaaaatgtctagtaaaatttcacttccattaatggttcatatcgggtctggtcctcctgctattgaggaagttgtttcgattctagaaaaaggagacattattactcactatttgaatggaaaagccaataatctatttgatgatgaaggaaagccgcttccactcctaatggaggccatccaacgaggtgttcatttagatgtagggcacggaaatgcaagcttttcgtttcaagtagcagaagctgccaaaaaacataatgttaaattcaatacaattagcacagatatttatcggaagaatcgactaaatgggcctgtatacagcttagctcatgtattatctaaatttctttatttaggatacagccttgaagaagtagtaaatggcgttactgttaatgcggcaaagtggcttaatagacccgagctaggaaggatacaagttggagaccgtgccaatttaactctttttactatagaagacaagcctgttctgtttgttgattcagaaggagagaagagagaaggtaagcaaataattaaagcaaaaggagtagttgtaaatggaacgttcattgaatgctaaatatggcttgaaacgagtaattaacgcgagcggtcgaatgagtattttaggtgtatcagcaccgactgatacagtaatggatgcaatgaaaaaaggaggacaaaattacgttgaaatcgctgatttagttgataaagcaggcgattatattgctgagatcttaggagcagaagcaggtgtggttgttaactcagcttcaagtggaattgctctctctgtagctgctcttgttacacagggaaatcgccgcaagagcgagcgtcttcatcaagaagaaattcccaaaagagaaattattattctgaaaggtcataacgtacaatacggggcaccagttgaaacaatggtttatttaggtggaggaaagcttattgaagttggctacgctaatgaaggaagagcaactcatattgaagaagcgatttctgaaaacacagccgccattctttatgtgaaatctcatcatacagttcaaaaaaatatgatctctgtggaagaaacgtgggaaattgcacagaaaaacaatgttccgttaattgtggatgctgccgcagaagaaaaccttcaaaaatatgtaaagtactcagaccttgcaatctacagtggctcaaaagcaattgaaggaccaacttctggaattgttggaggtgaacgtaaatatatcgaatggctgaaagttcaactacattgtattggaagaagtatgaaagtaggaaaggaaacaatatttgggttacttcaagcacttgatgagtatggagaaaagaaagataaaagtacaaaagaaaaagagagtttacaagcgctactgtcattaaaagacatagaaggcgttaacgtaacaattgttcaagatgaggcaggccgagctatattccgtgctagaattcaaatcattccagaacaggctaatataactgcagaagaagttgtaaaagagttgggtgaaggtgaaattgctatttatacacgtgattacgggataagacaaggatattttgacatcgacccaagacctttaaagggcgatgatatacatgtaattgagtctagaatacgcgaaattgtaggaggaaactgacatgtcaaacattacaaaacgtttttataaagagcgtgcagcattaaacgtattagcaaacagtgtcgaaaatgccaaagaagtatttgaggctgcagaagggcatgtattagtaggcgtgttatccaaggattattctactgtcgaagaagcagtaaaagcaatgaaagaatacggaaaggaaattgatgaagcagtatcaattggtttaggcgctggagacaatcgtcaagcagctgtagtagcagaaatttcaaagagttatgctggcagtcatattaatcaagtatttcctgctgttggagcaacgcgtgctaatctaggtgaaaaggatagctggattaatagtttagtatccccaaccggcaaagtcggctacgtaaatatttcgactggcccagttagtgcagcgcatgatgaacaagctattgtaccggtcaaaacagctattgccctagtacgtgacatgggaggaaacgcgctcaagtattttcctatgaaagggttaagctatgaagaggaattccgagctgtggcacacgcttgcggggaagaaggattcgctttagagccaactggaggaattgataaagaaaactttgaaacaattttgcgtattgctttggaagcggacgtcccaaaaattattccgcatgtttattcgtcaatcattgatcagaaaacaggaaagacaaaagtaaatgatgtacgtgagctcctcgaaaagatgaaaaagttagttgatcagcatggctaagaattttgcagcatttggagaggtaatgatgcgtttacaagtaccaggatatgaattcctttctcaagctcatacattaagctattcgttttctggtacggggataaatgtagcggcgggattggcgaacttcggatatacgggatatttgatcactactttaccggataacgctgtgggagatgcggctgtatcttatcttaaaaagttaggtatttcgcagtcatttattaaacgcagcggaaaacatgtcggtatgtatttttaagaaaatggatttggatcccgatctagccgagttacatataccaaccgttcagaaagcagcttcaacagagctcctgaaggcatatatgattttgagaatattgcggagaaagtagatgtggtgcatttttgtggaatctctctagcaatgaatgattccgtccgatcctatatgaaatcatttgccaaagcggtaaaagaacgcggtggtatggtcgtatttgactgtaactaccgtccgtctctatggggagatgaaggatatgaaagcgcaaaacctcattatgaagatatgctgtaccttgcagatatcgtaatgatgaatgaacaagatgctatgcacattcttaagatggaaacagaagaaataagcagaagagagcagctgatgaaactaattccaaaggtagcaaagaagtacggtctttctgtcgtagctggtacgcaccgatctattaataagaacaataagcactctttatgcggttttatatataaaaatcatacatttacattttctgatacgattactttttctgtctatgatagaataggcgcaggagatgcctatacaagcggcattttatatggcgagttagagagcttttcagcagaaaagactgtggcattcgctgtaacagcgggaatgcttgctcatacaatcgtaggcgatactcctatgtcatcccagtacgatatacaaaaagcgatgacagaatcagtaggcgatgtagaaaggtagaggatgtaatagtgaacgtatctcgaaaaaaaggaccactgtatttacaaataaaaaatatcttaaaagatcgaattttgcatggcgtgtatcccattcaaacaaatattccttctgaaccgcagctggaagaggaatttcaggtaagtaaaattacggttcgaaatgctatcaaagaacttgtgaaagatggatatttagaaacaaaaagcgggaaaggaacaaaagttattcgaaatacatccatttcaaggctctcaaaaggaaaacgctttaccgaagtgctggtggaaaaagggcatatcattcagaaaaagttgcttggggcggagacaattgaaaatgcaccagaaacaactttatatacgctgtttggtaagcaatgcattcgaatagagcgtctttattatttagataatgaaccttatattcattacacgcattatttaaccatgcaacatatggaagggatagaattaacacacttaaatgcacagtcgttatacgatttgattgaagaacaagatattacattggagaaatttcgagatcagtttgctgttgcaaaagctgattcttatgtaggcgaaagactgaatgtgcaggccggagaagcgctattaaagagatcaaggtattcatatgatgaagaaggaaatatcattgaatacagtgagggctattataatacagagatgcagcaatacattgtgaattacgatatttaagaagtgcgagaagaatgcatattcttttcgcctgaaaaatgagagcgtttactaaatgggggaaaagaggaatttagtatggatatgtatctattgcttgtgacatgcctagcaattgttattgttgtattaggagtctcttggtggaagtggcacgcttttatcagcttaaccgttgccagtttatttctggctattatgtcagggctttcaatggacaaaattgtgggagcttatgaaacaggagtcggcagtgttttaggtcaccttgttggaatcttggcgcttggcacgattttaggaaaaatgatgtcagactcaggtgctggtatgcaggtcgcggagttttttattaggttttttggaattaaaaagttgccgtgggcgatgctctttgctggttttataataggcattccggttttttttgaagtcggaattgttattttactgccgttagtaatttctattcataaaacaacaagacagaatattctactaattgcactgcctgtaattgcaggactatcgattgtacacggtctggtgccccccccacccaggagcgatgacagctattggaatatataatgcagacttaggaagagttttgctctattcattggttatcgctcttccagcagcaatagtagcaggtcctgtattcgcaaaatgggtgcataaacgtgtgattcctgaaggggaacctgaattaattcgtgtcagcacttcatctgaaaaattacctaacacaggtatttcatttttcattatcttattacctgtgttattaatggtgttatctgttatagctccgtatataccgctttctagctttttaactaaattttttgtatttatcggcagccctgtcatcgcacttttaatttcttgctttgccgcattttatcttttgggcatgcgtcagggaatgaagaaagatatgattaaaagattagtggaagaatcattgcttccggttggatctattattttaattattggagctggagggggatttaaacaaattttaattgatagcggtgtaggtacatcaattgctcaaatgtctgagcaattatcgctttctcctattgtcttagcatttatggtagcaggattaattcgtattgctaccggatcggcaaccgttgcattaacaacagctgccggcattgtttcaccaatcattgtgcatatgtctggagtcaatctggaactgctggttattgcgacaggagcaggatcactaatgttctctcatgtaaatgacgcaggcttttggctagtaaaagaatatctaggtctaacagtaaaagagacgtttaaaacatggacggtactagaaacactgctttcgtttattgcttttggaggcgttctattatttgatgtttttatttaaaaatttcctccttctgattattttagaaggaggtttactagttgacttgatatatagtatttgtagaataaggaggcaatgtatatgacctggttaaaagaaatacttggaacagaaaaagctattattgctatgtgtcacttgttaccgctgcctggagatccatattttaatagtgaaaaaggtatggattatgtagtagaaatggcaagaaaggatttgcatgctcttcaagaaggcgaagtagatgctattatgttttcgaatgaatttagcatgccgtatttaacggatgttaaaacggaaactgtagctgcgatggcccgaattataggtgaattgatgtcggaaattaaagtgccctttggagtaaatgtattgtgggatgctaagaaatctttggatttagcggctgctactggtgctaaatttgttagagaaattttcacaggcgtatatgcaagtgattttggtacttggaataccaacgttggagaaacaattagacatcagcatcgaattggggccaaaaacgttaaattattatataatgttgttcctgaatctgctgcgtatttggctgagcgggaaattgaaagtattactgcatctacggtatttaacaatcgaccagatgcgctatgtgtatctggattaacagcaggggccaagacggatgtgcagttattaatgcgcgtaaaggaggctgttcctaatacaattttacttgctaatacaggagttaatttcactaatttcaaagaacagttatctattgctgatggggcagttgtaggtacaacatttaaatacgacggtaaatttgaaaaccatgtggatgttgaccgtgtaaaaagatttatggacaaagtaaaagtttttcgtgacaatctttaaacggaaaaagaggtaaaagtgaatcagttagctttcatttttgatatggatagcttaattgttgacagtgaacctgtataccgtagccgtaataaagacatatttaaaaagctggagagagaagtagataaggatacacagctttctttcattagaggaacagctaaaagaaaatggacaatattaacaagggaatttttactgacccctacctaagccggaaaatacaaactctttggtcaattaacttttattgtagcagcaatttaatgaaaaacgagtcttttcatattaaatagaattttaactatacaaattaaacataaaaaacagttctgtaatcagagctgtttttttgttgctcaaaaagctgtttgtcagagggttaaataaaaaaaagaatgttggatagcataatgataagtaaatgtacaatgagtatgctctcttttcaaagaagcagacgtactcaaaaaagctgaagaagcggagggaagtaacagtgcctgacaaacctagtattacctcaagcgaaattgggacgctgtggatgacatatcagcagaaaacgttaatcatttgcttgttggattatatgattgaacatacggatgatgaagatgctaaaactattatgacagacttgcgtgagcagctaattatatacatacgaaaaataaaaacaatatttgaaaaagaaggggccgtagtgccaacggggctttcatctcaagacgtaaatgtacaagccccaaaactatttactaacggatttgatattatgtttcttcgtgtcatcaaagaaattagcatggggatgtatacattaagtttaggcaaggcctacagagaagatgtggtgaaattttatcaagatttaacaaagattacgcaacattgttacgattcttgtacgcagtatttactgaaaaaaggaattttatcacgtccaccttatattccaatgccaactaccgttgagtttgtttcggatagaaaatatctaagcggcttaaatgtatttgcggataaaagagtattaaatacgatggagctagcgcagatttatcatggagtcgaaacaaacattgtcgggatgaaattaatgaaggctttttctcaaacagctaaagataccgaagtcaaaaagcattttttgaaaggaaaagagctcagtaaaaagattattacgcgtctagaagaaataattatacaagacgatatttcaccttctgttgcctcaacaggaagcataacgacttctgaaacgcctgctttttcggatcgtttgatgctgacatgcgatattttactaagtaattttagtattggaagtcaggcatttggagcagcatttagttttcgaagagatattgtggctaaaatgatgctgataggagaagatgcgtttcaatatgcaagcgaagcaacagaaattatgatcaaaaaagctggcttgaagttccgccaagcattaattagctaaaagaaaagtctctttcatgcattgtaaatggaagtttatatatctttacacacctttaaccttttatttaagttgatttaacagactgcgtgtacagttaagttatgtcaataataaacagtaaagggtgtaaaaaatgaaaaaacgtgcaattggagcggcagtattatcagcggtaactgtagcagcgctggcatttggaacaaattcaccaacagatgctaaagcagctaaaggcgtaaataaccaaaaagctaaaaatgttattctttttgttggagacggtatgggtaccgatcatcgtgatgcgatccgattggccgccgtaggtgcaaatggaaagttagcaatggatgatatgccggcagtagggagagtccatacagcttcaggaaattcatttgttacggattccgcagcagctgctacagccatggcttcaggagttaaaagctataatggcgctattggcgtaaatatgaaaggaaagccagttcaaacagttttagaaaaagcaaaattagctgggaagacgacggggcttgtgacaacaagtcaagtaacagacgcaactccagctgcttttggcgcacatgttaaagatcgtagtgctcaaagtgacatcgcgaagcagtatcttgaaaacagtaaagtagatgtgattctaggtggcggagaagattattggtacccaaaaggaaatgaaggtgcacactcagatgccccgccagaagataaaactgaaggaagcaaaggaacgcaaggaaacttagtaaacaaagcacaaaaacttgggtatacgtacgttaataacgaaaatgaattaaaatatgctaaaggaacaaaattgcttggtctgtttgctaatgaagaaatgtttcaacaagctcctgaaggccaaggtgatgtgtacaaccctcaagtatctctaaaagacatgacaaaaaaagcaatgaatacgctatcacaaaataaaaaagggttctttcttgtagtagaagaggaagccattgatgaaatggctcataataataatgctgaactcatgattaaagcaggtaagcagcttgatgatacggtgaagatggctaaagcttatgctaaaacacacccagacactctcgtattagtaacagctgaccatgcaaccggaggtttagcacttgaaaaagtagacaataaagataacggtggagatgaagcatcaaaagaagatgggccatttgcaatcgctcattcaaaagagcagttcgttgcggattggacaactgaagagcatacgtcatcagacgttcctttaaatgcgatgggtgccggctcagaaagatttactggagtatacgaaaatacgtatttacatgatgctcttctaaaagcaatgaatttaaaataagtgagataaaaacacggtgttgatttaatacacttagtatgtaaatcaacaccgtgttttttgttttgtgtgagcaagttatgatggagtttcttcaaaggtatgctacgataagaattatcttgaattgaagaggtgtcacgatgaaaatagaagtatggtcagattttgtctgtcctttttgttatattggaaagcgccgattagagcaagcgcttcagcaatttgcacacaaagatgatgtgcaggttgaatttaaaagcttcgagctagatccaaacgccccagttaatactggcaaaacgattaatgaagctcttgctgctaaatatggaatgacgattgaacaagcgaagcaagcaaatgaaggaatcggacagcaggcagctagtgtgggcttatcctttaattttgacgatatgaagccaactaatacatttgatgctcaccgcttagctaaatttgcaaaagctcaaggaaaagaagcagccattacagaaaaattcttatatgcatactttactgaatcaaaacatctaggtgaagaagagacgctggttgctgttgcagaagatgcaggtcttgaccgagaagaagcacgtcaaattctcgcggataaaaacgcatacgcaaatgaagtgcgcagtgatgaagcaacggctcagcaatatggcattagcggtgttccatattttgttgttaatcaaaaatatgcgatttcaggtgcacagccagtcgaaacatttgtaggagctctccaacaagtatgggaagaagaaaatccgactcccgctttgaagagcctttctccagaaggcgcagatgatgccttttgtgcagatggtcaatgtgccgttcctgattcctctaaaaaccaacaataaataaaaagcagaagcggaaatttcgcttctgctttttatttatttgcaaaaaaatttacaaaaacaaacatgtgttctgtttttgtgttataataagttgagaagcaacaaacctcgatgagtaagctccaaaaataagcgattaaaagtgatcccaccatgacctagcttccatttaatcctgcagggggaatctgaatgaagagcaaagtgcacattatcccatttcaagtagttgaacaattgaatcaatttaatgaagtcccagaaggagtcgctctaattggagcagagcaagtatggaagcaaacaaagggacggggaataaccatagcggttttggatactggctgtgatgttacacatccagatttgcaggagcgaattattggaggaaaaaactttacacaagatgatcaacaaaatccagatatttttcaagattataatggtcacggcactcacgtagcaggcacaattgcagcagcgcataatggaacgggtgttgtaggagtggctcctgaagtgggcttacttatcctaaaagtacttgatggaaatggttcaggtcaatacgagtggattattcaaggtattaactacgccatcgagcaaaaagtagatatcatttcgatgtcgcttggaggtccgtcggatgtgcctgagctacatgaagcgattcaagatgctgttgatcagaatattttagttgtctgcgcagcgggaaatgaaggagatggagaaggctccacagatgagtttgcgtacccaggctcatataatgaagtgattagcgtaggagctgttgatttagagaaacgatcttcggtattttccaactcaaacaacgaagtagatgtagtggctccgggagagaagatcgtatcaacttacttgaatggaaagtatgccgcactgagcggaacctctatggcaacacctcacgtagcaggggccttaggattgataaaagttctttcaaatgaaatgtttggaagagaacttacagaaccagagctttatgcacagttaatcagaagaacccttccattaaatgaatctccaagagaagtaggaaacggatttgtgcacttgaccgttgttgaaaaactgttgcgtgaaattcaaagtcaaatgacttcagaggtgatcggatgagaagcagtctagatatgttaatgatggaaaagcagcaggcaaaagctctttatcacgaatacgcaaacaatcgaagttattatgatgaaaagacagatgaagaaaataaaaatctttattatcaagatacgctctttgaaagagaagccatgcaaactttgttaaaggaaacgcatcagcatttgctaagttattcgccgcataaatatgtatatccatgggtggatctacaggagaatggggagctgaaaagtctatactcagggaaagggatggatccgttagaaactatacagcaagatattgatcaacttcagtcgcttagtaactcctctctttcaagcaatgatatactgctaaactgtgagcacgttgtcccgcaatcttggtttgggaaacaagagcctatgagaggcgatttgcatcatttatttgcgtgtgaaccttcttgtaacagtcgaagaggtaattcttcttatattgacttcccggattatacgccggaagtaaagcaatcagatgtgaaagaaggatgtggcaaagcagaaaaaggtaagtttgaacctgaatatggaaaaggaattgtggctcgatcaactctttattttttaattcgctatcataataaaattgactcttcgcgagtagatcttcctcttttactaaaatggcatgaagaatttactgtttcactttatgaaaaacatcgcaatgcagcaatctttgagttgcaaggcaaccgaaatccttttatcgattttcctgacaaagcatgtgcgttaatgagttctgctttctaaaatagcgaagagctccgcttcgaattgaagcggagctcttttggataatctaatatgaaaatccatatttatcacttaaaagggcatccattttatttaataagcgaaaatattcttcctgttcttctacagttagagctgacagcatatcttttaaaaatccatttcgcttctctgtaatcattgaaacaagtttctttgattcatcggtcaatgaaacccatacgactctccggtctttttcgtctcgcacgcgctgaatgagaaattcttcttccaattgatttaataagctcgttgtagcgcccgaggttaagtgaagtttatttgaaatatctgctaccatgtactttgtgccgctggcaatgtagtttaagatataaaatttagtgggtgttaagtgataaggctgtgtttttaatgtttcttcgactaaatgtcgcatatattgaaaaaaagatgtgttaatttgataaaggtgctcaatttttgactctaaattgttatccatgctagcttccatctccttgtacactacggacatatataaactaactctaaaataaaatgaaacaattgtaaaggatggcaatgattatctttaaccaccattattatttttaaattaatatctttacgaaaaaatatctttatgataaagttatttaggtagttaatcaaatagatgattgtaaagaaacatatctcataatagatggagataatatctttatgaaaaagctatatcgaaaagtaatttcattagtgaattattaaggaggagtaatgaatgtctagaagtcgcttaatggtaacaaattttattggaattatcgttattttagctttattaattggaggaggatattattacgttcaaaaatcgaactatattacaacggataacgctaaagtatccggagatgtatacaatgtagttgcacctgcagcaggtaaagtagcaagctggacagtagaagaaggaaatgatgtatcaaaagatgctgaaattgctaaaattcaagctgaaaaagggtctgtagctgctaaagtgccagcagatggaaaaattattcaaacaaacgtaaaagaaaatcaaatggttcaagctggacagcaaattgcaacggaagtagatatgaaagacctatttatcgtagcaaatattaaagaagatcagcttaaggatattaaagaaggcgacgatgtagatgtaacggtagacggagacagcagtgcaaaaatcgacggaaaagtcgaagaaattggatatgcaaccaattcactttcatctttaacatcgaactcaagctcagatggaaactacacaaaagtgtctcaaacggttcctgtgaaaatttctatttctaattattcagagcatgtactgccaggtatgaacgccgaagtgaaaatttcgaaagactaattcttactacaacagttcgagaagggaggaaatatgatgacagccagtatagaaaacacaagtgatggatccatcaaaaagcatattccgctattgattgttttaatgcttggtttgtttcttgcgatattaaaccaaactttactaaacgtagccatcccgcatttgattactgagtttggcgtaacggcaaatacagcccagtggttgttaactggatatatgcttgtgaacggggcattaattccgctttcagcttttttaattgaacgatttggtgtgcgtcgcttgttcttatttgcaatgttttgttttacagtagggtcattgatttgcggaattgcacctacgttttcgattatgcttaccggccgtttaattcaagctattggcggaggtgtcttatcgcctcttgttatgaccattattgtgtttattttccctcctcacatgcgaggaaaagggatggggatttttggtttagccatgatgttcgcaccggctattggaccaacgttatctggatgggttattcaaaactatgattggcacatcctttttaacggcatggtgccattaggtgccattgtattaattattgctttctttcaattaaaagacattcagcctccaaaggatgtaaaagttcacatgccttctgttgtgacatcacttgcaggtatgggattattgctttatggattcagtgaagctggaaatgacggctggacggattcagttgttctttctacaatcattggcgggacagttcttttaattatatttgttcttcaacaaattaaatctgaaaagccgctattggatatgcgtgtgtttaaatataatattttttcactatcaaacattattagtattgcgattacaatcagtatgtacgcaggcatgttcttgcttccaatttacttgcaaaatatccgcggatattctgcttttgattcaggactgctgttgcttcctggcgcacttgttatgctggttatgtcgccgatttcaggtacattgtttgataaagtgggacctcgtccgctagcaatcgttggtatgctcattacatctatttcaacgtttgaatttacgaagctgacgatggatacaccgtttaatcatattttagcgatttatattatccgctcgtttggtatgtcacttttaatgatgccaattatgacagccggtttgaatcagcttccgcagcgactaagcagtcacggaacgtcaatgtctaacacgcttcgtcaagtaagtggttcaattggtattagtttaatgacgaccatttttacgaaccgtacaacgtatcatgtaaatgaaatcagcagttctatgaatacgtctgatccattctttatgaacagctttcatttatttgtacaaaaagtagctgctactttgcatttatcacaagatcaggctcagcagcaggcgctgacgattttatctggaaaaatgacgcagcaaggtacgatccaaggtattaacgatgccttttactgggcaacagcaatttctgttattggtttaattttaagtttcttccttcgtgacgtacgtaaagataaagtagtcgaagaaaagaaatcaaaagctcaagaggaagatattcgtatgcttccagctcccaaaagtataaattcataaggagctatagaaatctaaagttcatcataaaacatgttggagagaaaggggcagtgaggtggatggattcattgatatttggtaaagaaattcaaagaatttcaatatcgttaaacaaaaaagtaatgacaaatgtaaaaagccttttacagcattacggaattaccccttttcaatatcatattttactgattgttgaacgtgcacgtacaatgcctgtcaccaaagtggcagatgagataaaggcgagcccaagcgttattacagcatcgattacacgtttgtatgaactgaatcttgtggagcgctaccattcaaaaagagatcggcgtaaagtgatggtcgagcttacaaacaaagggaaacaagtgattcaagctgctgagaaagatatgcagcaaggggttgaaaaactgtttgcttgctataaagaagaagaacagcagcaatttctcacgctctgtcgacagctagatgaacatgtgacttgagcttgagtagaaaaaagtatattgagttaagcggagtgagtgtaaatgaataaagaaacggtaaaaaacattcggaaaaactacaatatgaatcagcgaaacttcgctcaagcagtgaactgcagtttttctttaattgcactggttgaagtgggtaagcgaagagtaacaaaaaacttggaagacaaaattaagcaagcatttcaattgaacgatcatgatttaaaaacactgcaagggtaatacaaaaagtaggtgtgaaacgagcgcacctactttttttcatcttgtttttttgtaagcggatctaccgtatgtttgtaatcataagctttcgaagtggtagctacgcacagcagtaaaataacaaatacaatgataatagagagcgtaataatgatgatcatataaaacgtcctttctttttcttattacgtatgctttcggtcttattggtaaaattccttctttctccacatagtgcagaaacgacaaacgcatactagtaacagtctagaataaaggagtgttcataatgaatgaaaaagagttgaaaaaacaattaaaaaaggtagcggattatcctgcatctaaagcagatggagtagatgaagagttttctcgtgaattagcagatcaagacgacttagaagcacaggctagagcgaacgctgcagatgaaagacaaaaaaagcaaaactgaagctaagataaaagtattttagctcaagtgaaaaacgaaccactaatcaaaatgtttgattagcggttcgttatttttgttatggtgtaacgagcggcttagctcatgtattcaattgatttgtctttagattggattgatgttgttatttctcagcctcgtttattattttttcaaaagtaaataaacaaagtaaggagcaccgattacggcggcaataattcctgctggtatgccgttaggatcggcaatgttatgtcctattgtatctgcaatcagcaagagccagccgccaagtaaaatggcaacaggaataaaaagctggtttcgcggtcccactaagcctttggcaatatgaggagcaagaagcccaataaaggctacgccgcctgtaactgaaactgcggctgccgctaatgcaaccgcggctagaagcaatgttatacgctctttctccatagcgataccgactccaatagctgcagcttcatttaaattaaaaatgtttaatgaatttgctttatacaatataaaaggaatcaagacaagaagccaaggtagaagtgccaatataaaaggccagtctgacccccaaatgtttcctgcgatccatttagcaataaaatcaactttgccacgatcagctgatgacataatcaccaccatcattccagaaagagccatcgaaaaacctacgcctgttaaaataagcttcacaggctgcagcccttggcttttactatatgcacaaaggtagataagaccagctgtaaacaaggcgccgatgaaccctactaacggaagagcatacacgaaagagccagcttcaattggaaaaaataaaaagaatacggcaattgcgacgcctgctcccgaattaattcctataattccaggttccgctaaatcattgcgcgtaacaccttgtaagatagcgcctgataaagctagagccattcctgctaaaagagtaatgataattcgcggaagtcgaattgaaaaaagaacgaactcatctgcaaaattcccttggccaaaaagagtaggaaacactttattataaggaagggaagcatcaccgagccccattcctatcacaatcgttccaagaatcaaaacagtgagcagcatcataattattcgttgttttctaataagcgctgggtgaatcatgagaatgcttttcctcctttacgaacaatgactaaaaagaaaggtaaaccaatcatcgatacaactgctgctatcggtgtttcataaggtgcacttacggttcgggccaacgtatcagcgagcagcataaacgctccgccagtgacagcggacatagggataatataacgatagtccgtgcctacgattcctcgtacaatatgaggaatcatcaagccgataaacaccatgtttccgactagcgccacagaagcgccggcaagaagaatcatgacgataaataaaatggttttgacttttgttgtttgctgccctaaacttacagcgacttgttcatttaggctcaaaatagtaagctgccgagaaagcagaagggcaatgaatatacctccaacaataaaaggaacaatgatttgaagctgttcccaagaagtgcctacaattccgccagcagtccacatcgatacatcttttgaaattttaaaataaataccgacgccttctcccatcgcataaagaaacgctgaaacggcagccccggctagtacaattcgaagcggagaaaaaccgcctctttttatagcagcaattccaaataccaaaattgcgccaaccgcagctccgataaagcaagcaatcgtaatacctaaataatttacagaagggataaaggaaatggttacagctaaagctgcatttgcgccagaagttaaccctaaaagccctggatctgcaagaggatttcttgtcataccttgcataatcgcccctgatactgataaagcagcgccaacaaaaacagcggcgatttcacgaggtaaacgaatatcccggataatcgaaatctgttcgtttacactgcttgatgaaagtgctagccacacatcttttatcgatatatcagcagcgccaaaaaccattgaagaaacaaacattatgatgaatacgagcatcatacctattaatttatataaaaaaggaatgaaacgctgattgtctattttcataaaacacccatcttttcatgtaagaataaatttagtaaaacaaagcaagaggaattctaaaaagaattcctcttgaatgaattacttgccaagaaatttttgagtaaagaaatctagttgataatctaatgtgattggatcattaaaataaaattcttttgcatttgcttcaaatacgtgattattctttacagcaggaatatttttgtacgtatctgttttctcaaatgatgtatctccatcttggtttttgctgaagattaaataatctccggcatattcaggaagaacttctggtgaaattgcatagtaaccatctttcaaagccatgtcctttactttctctggcatttttaatttcatttcttgataaagaatctccgttccgcgtccccagttatcgccaaatacataaagctgcttgtcaaagttctcaataactgaaaccgtggtatcttcgccaattttagctttgatgtcagaaccagcttttgccgcacgctttttaaaatcgtttacccatgattgtgcttctttttctttatttaatagttttccgatttctacatgctgagtaaggtagtctactttatcgtatgtatacgtgacggtaggagcaatttttttcaatttatcaatgttttttgtagtagataagccaataattaggtcaggctttaatttaacgatcttttctaaattttcatctgatacttcttcaacgccttttaatttcttttcaaagcggggattcattttagaccatgaatcaactccaacaatattgacacctaacgacatgacgttacctgcgtaggaacctaacactacaacacgtttcgggttagccggaacttttacaggaccgtcttcagattgatatgtgattgtcttggatccgctgtttccttcgcttttgctttcagttgaaccgctgctgcaggcactaataagtagtacgaatatgagcatgaatggaatcagtaattttttcatttagttatctcctcttagtaagttatacgtgatgcacattggtttatttgttcttgggtctcgtccgatttcagcgtcgatatgaaacactttttttagaacgtcatgcgtaatgacttcttcacattttccggctttgacaatttcaccatcttttaaagcaataatataatctgcaaagcgagcggcttgatttaggtcatgaagtaccattacaactgtacgtttctgctctttgtttagtttttgcaggagttcaagcacttctaactgatgagccatgtctaagtaggtagtcggctcatcgaggaatataatatccgtttcttgagctaaagccattgcaatccacactcgctgacgctgaccgcctgaaagagagtcaacgagacgaaatttgtaatcttttgttccggttgcttcaagcgcccagtcaatcgtttgatagtcttgtttcgacagacgcccaaaccctttttgatagggaaatcgtccataagatacgagttctcctacagttaggcctttagcactttcaggggtttgagggagaatggccatttttttagcgagtgcttttgtatgttctgttgaaatattttcgccatctaaaatgacggaaccggattgatgagaaataatgcgggtgatggcttttaaaagcgttgatttgccgcatccgtttgaaccaataatcgtggtaatctttttgtctggaatgttaacgcttaaattctttactattagacgttcaccataactaatatgtaatttctctgtatataggcgaaccatatctgaccctccgtttacttttaatataacaaattcttgataatgattatcaatatcgtttactttacatactataattcgaacatttccggatgtcaatagttatttttattgtcaaaatggtgaagaagatgtatattcaaatgataatgataatcaataacaattaattgcaaggagtgggtgttcatgacacataacgaactgtttgacgtgacgattataggcgggggaccggctggcctttattctgccttttatagtggactaagagaaatgaaaacaaagctgattgaatatcagccaaaattaggcggtaaacttcacgtttatcctgaaaaaatgatctgggatgtaggagggcaaacgcctatttcgggtgcgaagcttattgaacagcttgttgaacaagggctgacgtttgatccaactgttgttttaaatgagaagattgaatcgatttctcgcttagaagatggtattttccagctgacgagttcttcaggtgaacatcattactctaaaaccattatccttgctgtcggaggaggtattttaaatccgcaaaagctcaaaattgaaggggcagaacgatttgaaatatcaaacttaaactatacggttaaatctctgcagcattttaaaaataaaacggtgattgtttccgggggaggcaattcagccattgattgggcaaatgagctagagtccgttgctaaaaaagtatatattacgtaccgaaacagtgaactaaacggtcatgaagcacaagtgagacaattaataaacagttcagctcggtgtctgcttaacacatctattacaaaattagtggctgatgcgacgcatgaatttattgaaaaagttgagctgactaatcatcaaaccggtgaaatttcttatttgccgattgacgaagttattattaatcacggttatgaaagagacaccgagctgttaaaaaacagtgaattacatattaaaaccattgatgactgctatattgcaggtaacgcagcaagcgaaacgtcggtagaaggcgtatatgcagctggagacattctcatgcacgaaggaaaagtccatttaattacaggtgcttttcaagaagctgctaatgctgtaaacaaagcaaaacaattcgttcagccctctgctgctaaggcggctatggtttcttctcacaatgaagtattcaaaaagcgcaattcagcactaattaaacaaatgatgaagtaaagcgaggtgcagtgtgcatgtcgcttctttctctacggtggaattatctacatggagaggcagggaacgaaaaaagaaaagagaaatataataaaagaaaacgcttacatttttttaaaaaaatgacatagttcttgtgtgcataagggggaagccgtatgaacgaaaaagagaaatatcagtttgaaacaaaagccattcacgcagggtatgaatcaaaacatcattttgatagcttagctccgcctatttatcaaacgtctacatttacattttcatctctagaacaaggtgcaaaccggtttagcggagcagaagatggttatgtatattcccggttatcgaatccaacggtcaccattttagaagagcgtatggcacagcttgaagaaggagaagccgctttggcatttggatcgggaatggctgcagtatcggctgtattgattggacttacaaaagcaggcgatcatattttatgttctaaaggagtgtatggatgcacgtttggtctcttagaaatgcttgaggaaaaatatcaaatccatcattctttctccaacttggaaactgaggaagaaattcttgctgctatcagaaaagatacagcatgtatttatattgaaacaccgattaacccgactatgactttagtagatttagagttagttacttctatcgccaaacaaaaaggaattcccgtggtagtagacaataccttttcaactccttatttgcaacagccgctgaagcttggatgcgacttagtcattcatagcgcaacaaaatttattggtggacacggagatgttgtcgcgggaattgtagtagggaacgaagaggttatttccgtactgcgcaaaacgacgcaaaaagatatcggaggcattctttcaccgtttgatgcttggctgttacttcgtggattaaaaacgctggccgttcgaatggatcgtcactgtgaaaatgctgaacatatcgcaaaacaactaagtctccatcccaaggtgaaagccgtttattatccaggtgataagaagagcactgcttattctctcatgcaaaagcaaatgaaaaaaggaggagggcttctctcttttgaagtggaaggcggttatgaagaaaccgtaaaagtggtcaatcagcttaagctcatttccattgcagtaagtcttggagacgctgaaacacttattcagcatcctgcctctatgacgcatgcagttgtgccggaagaagctcggaaagaaatgggaatttcaaacgaactccttcgtttatcagttggactggaagcttgggaagatattatgagagatttacagcaggcattggacagtatataaaaaatgttcaaacagcgcttgaaatatcttaaagatatttcaagcgctgtttttttgaatatcagccgtatgtcatcgctcatacatccatcttttacacggggaactttatctgcatctctagacaaatgtcctagacataagagatgcctttcaatagactaaaggttatctgtgaaaatacaatatttaggtaaggaaggtgctctgctattatgcttcataatccaactggaaaaaaacgtctaggattggcgtttcttctcagcacgcttgcgatattaggtccgcttaatatcgatatgtatttgccaagttttcctgctattgctgatcatttagatgcgcgagcttcacttgtacagcttagcttaacatcatgtttactagggcttgccattggtcaaatcgtgatcggtccaatcagtgatgccaagggacgaaaacgacctttactcatttccatctttttatttatgatatcgtcattgctctgtgctttggctcctactattacagctttagtcatcgcacgctttttacaaggttttaccgcttcagcaggagttgttctttctcgcgccattgtcagagatgtttttagtggaagagagcttacaaagttttttgctttgttaatggttataaatgcctttgcaccaatgatagcaccaatggccggaggtgctattttacttcttccttttgcaagctggcatactatttttctgtttttaagtttaataggtcttttaattgtcttaacaatctcaatgcgtttaaaagaaactttgccaattgaaaatagaacgccaagctcaattgctcattccgttcgtacgatgggcagtttattacaagatcgttcttttattgggtatgccctgattgtcgggcttgtccacgggggaagctttgcttatgtatcaggcactccatttgtctatcaagggatataccatgtttctccgcaagtttttagcattttgtttggcattaatggcttggccattgtgactggaagctttattattgggcgctttagcggaattcttcatgaaagaagtctgcttcgcattgccgtgattacggctgtaagtgctactggcgtacttcttatcatgaccatgcttaaagggccgctggctacgattgttattcccatttttatttacatgatctctataggaatgacgatcacaggctcggtgacattggcaatgaaaaatcaaggacatagagcgggaagtgcgagtgccgtattagggatgcttccattaactttagggtcaattgtttctcctttagtaggtattaacgaaaccacagcgattccgatggctgccattttatttagtacggcgcttttaggttttgtagctttctttacgctaactaaaaataagaaggaaatagaaaagtgcgacgttaacgaattaaaaacggaggtttctccgtaatcacttttttgattgtttgaaaacaccactctttttaagaaaagagtggtgcgaatttattcaagtattggataatatatgctaaccttagggcatgatcgaaaggagtggataataatgagtaaagtaattcctgaaataacccttcatgacggggtaaccttgcctgctataggttttggtacatacaaacttaatggaaatgaaggagtcaacgctataacgagtgcgattgatgtagggtatcgtctaattgatacggcttataattacgaaaatgaaggcaccgtgggccaagctcttcgaagaacaccggtttctagacaagaactattcgttacgtctaaactcccagggcgataccatacgtatgacaaagcacttcctactatccaagaatctttatatcgcgcgaatttagactattacgatttgtatcttattcattggcctaatcctaaacaagatcattatgtagaagcttggcaagcattgattgatgcgaagcgctggggcttaattcgttcaattggtgtttgtaattttcttccccagcatattgagcgcttggaaaaagagaccggcattttaccaagtatcaatcaaatagaactgcatcctttttttaatcaacatcaatatcgaaattggtatcaagagaaaaacattcaaattgaatcctggagtccactagggcgagcaagtgctgttttagaaaatgaaacaattaaacaaattgccgaccgtcataataaaacagtttcacaagtaattttgcgatggcattatcagctaggggcgatttcaattccaaaatcgtcatctcgcaagcggcagcttgaaaacatatccattttttcgttttctttagatgaaactgagatgaatatgatttcagaattaaatcgcgaggatggaagacttaataatcaagaccccgctgcttatgaagaattttaactataaagcctcacttattttttaagtgaggcttttcttctataatttttcattatctaagcttgaaaatagtccgtttagttctaacgattgtaggagaaaatgtgttaaaatattccgaaaaaaggagtggagaatcatggaaaaagtaattaaagcgattcaagacgagtatctggatgattttgcatggtgttacggctgcggccgattaaatcaagaaggctatcattttaggacagggtggctaggagaaaaaaccattaccctttatatacctaagcctgaacatacagctataccaggattcgtttatggcggacttcttgcatcactgattgattgccatggaacaggctctgcatctcttgctctataccgtaaaaatggctacgaaataggagattcagcagagccgccgcggtttgttaccggttctctccacgtagattttaaaaaaccaacgccacagggtgaagtactaaaagcgataggaacggttgaagaaattcatccgaagaaatggagagttaaaacagaagtatacgcgagtgacatcattgttgcgaccggagaagttgtggcagttgttatgccaagtacgtttaaacgaaaagaagattaaaaaatgcaaaacagttacataaaaagggaggaaaaggtatgggtaaatgtaatttagaccactcggtagaagatgtacaacagaagtttaactcgcagtcacaatggctgccagaagatattcgctcgttatttcatgagtttctcgtacgaaatccttcgcaaacaacattaaacgagatgtttcatttgctgaagaaatatgatttggttgatgaacaagaaagaaaagagcgagatcgaaaaatcaaatggctgatattaaataaagaagagacgaacaactagaagcaactacatacagtaaacctacgtttacgaccacaatgaaaaaatccgaacgagttggattctccatcaagaatctccattcttcgttcggatctttcttcaaataaaatgcttttactccagcctctttttaacgagattaaaagtaatcaccaccacttaaacccgtcgtcttctaacaattgatttgaagccgctggtcccattgtacccgcaggataaaaatgaagaggaaagcgttcatcattaaaaacttctaaaataggttgcacccatttccaagataattcaacttcttcccaatgagcaaaaaatgtggagtctccctgtaaagcatcaaataacagcagttcataagcttcgggtacttcttgttgatttgttgagaaattgataaaaataggttcgattttattgtcattcaaagggtttttgctgtttaattgcagtgagataccttcatttgggctgatttcgacaactaaaaggttaggaataacttcttcatctgtataaacatcctttaaaggatgtttaaattcaatgacgatacgcgtgcattttttactcattctttttcctgtgcgaagatagaagggcactcctttccaaagctcatgatcaatccatacccggactgctataaatgtgtcattaacggaagcagcattgatgccgggctcatctttatatcctataacggaacgattttggatttttcccgcttcgtattgacctcttatgacgttcgaatggataaaatctttttgtagagggcgaaggcttttcataatttttatcttttgttggcgagtttttgcgatgttaagtgtctttgggagctgcatggcagtcatcataagcatttgaagcatatggttttggaacatatccctaattgcaccggactgatcatagtaatgcgctctttcttctacaccaactgtttcactagctgtaatttggacatttgcaacgtagtgatgattccatagtgcttgtaaaatagggtttgcagatgctagagcctccaaattttgaatcattggttttcccagatagtggtcgatacgataaatctcttcttcattgaacgtttcagtaagcttttgatttaacacttgagcagattgtaaatcgtgtccgaaaggcttttcgataataagacgtttccagccttttgtagatcccaatccgccgctatttatatttgaagcaataacgtctacgaattcaggagccactgataaatagaaaagacgattttcaggaatatttaattctgcttcgccttcttgaatagcatgcagcaactggtcatatccatcactattggtaacatccattttatgatagccaactgtcttaagaaattcttttatcttggattcaccttggctaaagcgccttgaaaaagtctttactgattcttctacatatatttgaaaggcatcatcagaccagttgcttctacccgtaccaacaatagaaaaggaagaaggcagctttttatctaaaaataaattatataacgcaggaaaaatttttcttttagctaaatctcctgttgctccaaataagataaaggtcatggaatccacttctaacgcttgtggtgaatgagacttgagacaattatcacgtgaacgagctacactgcccaattaatctcctcctttattttaacggtctattgcagtgaatatagtcttttaccacctttacagattacagtatagcaggtacaattttcctttataagtagacactttattttcatatagtgtctaaaactatactattactcataaaaagggaggaaaaaggattgagcagactttttagcaaaacgtttaactgtgaaaaggaattaacgttaacgattattggaggcaagtggaaaatgttgattatgtggcacctaggaaaagaagggacgaaacgatttggggagttaaagtccatgatgccgggaattactcagcgaatgttagtaagtcagctgcgagaattagaagaagatcaaatcgttcaccgaaaagtctatccggttgtccctccaaaagttgaatattccttgactgaacacgggagaagcttgatgcccatccttgagagcatggatgagtggggaaaaaattatatggaaaccgttatagagcctgaaataaataattccagccatatgggttaaaatcttttgttgaaaaaggataaaaccaccctaattattcagaattttctaaaataaatacgaatgataagctgcactgaagcgtccatagtatatttttagtgactatatgttttaaaagtgcctactttttttttgaaagtaacggttttacaatgaattcatgctagacaaccccatttaatgaaggagtgaagtaggtatggaacttcaattagcattggatcttgtaaatatttcagaggcaaaagaagtagtgcaggaggttcaagagtatatcgatattgtagaaattggaactccagttgtgattaacgaagggctaaaagcagtcaaagaaatcaaggaagcctttccgtctttaaaggtattagctgatttgaaaattatggatgcaggtgcttatgaagtaatgaaagcttctgaagcgggggctagtattattaccattcttggcgctactgatgattcgactataaaaggcgctgtagaagaggccaaaaaacaaggaacacaaattcttgttgatatgattaatgtaaaaaaccttgaacaacgtgcaaaagaagtcgatgcactcggtgttgactatatttgtgtacacacagggtatgatcttcaagctgaaggagaaaccccgttcgagcagcttcaaacgattaaacgagttgtgaaaaatgccaaaacagcggtggcaggaggcattaaactgaatacacttcctgaatttgtgcagtcacagcctgatcttgtgattgtaggcgggggcattacaagtgaaaaagacaaaagaaacgttgcagaagaaatgaaaaaagtagtcagacaagcaactttggtctaaaaataagcacaagtatttaagccttcaaaatcaattaatcggtaaatggtttaaaaagaagatagctaagttattttagctatcttctttccgtcatttttagtataaccattcattgataagagtcattttgacagatagatagtttctttaaaattcgttatttgaaagaaaaagacggcggtttttctgggattttaaagttaagaaagcgttatccgaacattagagggagaaagtgcaaaaaaatctatgtcacactttttaacaaaatacttttaaaattatgaatattaaaaatataattaactatcgacaatatttaacatctttaaaccaaaaaaggagggagatatgaagtgatggaacataagagaatagtagtgataggagctggaattgtcgggtgcagcattgcctactatttaagtaaaatggggcgaagaaacataacagtgattgagcaaggccctttgtttgaaacgggaggatctacttctcacgctccggggcttgtatttcagcttagcttttcaaaaatcctgacaacactagcttctcaaacagttgagatctttaaagagttgagtacagatgaacagcgctctttttacccggtcggcagtttagaagttgcccgaacatccgagcgattagaagacctaaagagaaaggctggtgttgccagctcatggggaatcgaagcttttcttctttcaccgcaggaatgcgcgaaaaaaaattcgctgatttgtcctgatcgtatttgcggaggtctctatgttccgtcagacggtattgccaaacctttgcatgccattgataaaatgactcgtttttctaaagagtgtggagtagaattttacggtcatacagaagtgacgaatatcgaagtgacaaatggtcaagtaaaagcagtttacacgagcgctggaaaatttgaagcagatgtaatcgtgtgctgtgccgggttttggggacctcgcataggagaaatggtcggtgtaacgattcctcttcagccaatggctcatcaatatgtgtttacaaatgatttacttgaattaaacggagaaacggaagaagccgcgactcctcttattcgagatcaggataatgcaatttattttcgtcaggtagagaaagggcttgggattggatcatatcagcatgagccgtttccagtcgaactcagtgacattacaaaatatggagaaacaaaagaaatgccttctgttaaaccttttacaccaaaagattttgaaaaaccgtgggaagatgcattggaattaattccggcattaaaacaagcaggaataaaaaaaggaatgaacggcattttttccttcacacctgatgggatgccgctgcttggcgaatcacaagcagtagggggattttgggtagccgaagccatatgggtaacgcactctgcaggtgtcgctaggcaaatggctgaatggatgatgaatggtgccccgactgtggatttggagttatgcgatattaatcgtttcgatacgtatgcatgcagccctgtttattacaaacagcggtctattgaagagtatgaagaggtttatagcattcatcatccatttatgcagcgaaaagtatcgcgaaacatgcgcttaagtccattttatatgcgtcagcaagaactaaaagcgtattttaacgaaaaagcagggtgggagcagccgcagtggtatgaagctaactatccccttatatccacatatgaaaagagaatggtaataagaaaggggtggtccgctgaatattggtcaccgattatcgaggctgaacagttgcatactcgtcagtacgcagcgatttacgatacaacggcagcaaagaaaaggttggaaattaaagggaaaggagctctcgagtttttacagaagctaacgacaggaaatatagacattacagtaggtcaaagcatacgtacgtgtatgttgcatgagcgaggcggcataaaagatcaaataacggttattcgcaaaaatatatccactttcttgattgtttgtacgggagctgtagaagcaagctggattcaaaaacgcgtgcctcaaaacggtcaagttgtttttcaagatgtaacgtcagggacatgcagtatagcattaattggtcctaaagctacaggagtaatgaagtccgtggttcaacgctcagaccttagcagcacttggattgaagggcaagcgaaaaccctgtttattgaaaatagttcagttcttgctctgcgtgattcctacggtggaatggagagctgggagttgattacgacttctgatcaaggcctgaatttatgggatttattaattgaacaaggacagccttatcagctgattgccgcgggagaccgagctcttgaaaaccttcgaattgaatctttttcgttaaaaagcgggaaagacttttggagcgagcatcatccatatgaagttaaccttcatgaaatggttgatttaacaaaaccagtttttattggaaaagaggcattgcttgatcgtcagcgaaaagattctgaaatagtattagcgacgctcatattagatgatccttcagcgatagtaatgggatatgaaccggtcttttatgggaaaacagccctcggatttgtgacaagtgccggctattcatacagcttaggaaaaggaattgtacacactatattatttcaagccgtaaatgaagaaatggttttagaagttgaatactttggtcagcgttataaagcaacaatgatgacacactccccagcggtagtctaattgatcaatcgaaagacaggaggaatgcagatgtcaacacattatgatgtcattattattggattaggagctatggggagtacggctgcttatcagctcgccaaaaaaggtcagcgggtattggggttagaacaatacggtcccgctcatgacctaggatcgagtcacggcggttctagaatcattcgacagtcgtattttgaagaccctgcttacgttccattattgcttcgcgcatacgaattatggaatgaaattgaaagagaaagcggtcaagaaattcttacggttaccggtggacttatggtgggacctcctgatagcttgacggtttctggaagcatcgaaagctctaaacagtggaatcttgcgtatgagattctagaagcaaaggatatttacaaacggtttccggcgtttacaccttcacctgctacggttgctctatatgaagaaagagctggattcgttaggccggaagcgagcgtatatactcaccttcttcaggcagaaaagtacggagctgagcttcatttttttgaggaagtggtgtcgtgggaagctcatccttctggtgaaggcgtgcgcgttgtaacagctaatggaatatatgaagctggaaaaatcattatttctgcaggcgcttgggcacccgatttattacgggatttaggtgttagtttacaagtagagcgtcatgtgcaaatgttttttgaaccaacacaaggaatagatgttttttcagtgggaaaacagccgatttatatttgggaagcagatgattatgtacagttgtatggtttcccttcttttggattaaaggctgaaggagcaaaagtggcgttttttcgaaaaggaacagcgtgtacgccggaaacgattgaccgaaatatatatgaagacgaagtgaacatgatgcggcactatctagctcaaggtattccacagcttaacggtcgatttttacaagggaaaacgtgcatgtataccaatacaccagatgagcattttgtcatttcactgcatcctgaatatcctcaagtggcgattgcagctggattttctggacatggttttaagtttgcaagcgtagtaggagagattttagcagatttagtgatagagggaaaaaccaaccacccaattgatttgtttactccgcagcgatttgcggcgaataaaatagtataaatcgtcgtcagctcttgcgaatggttctatttaaatgtttctaaagaagcgaaggaggaatagtagatggttatggaacatggtttagtgaatgataatgggagacttgagcccacgttgaaaggagagctgtatacatcttcggacatttttaagttagaaaaagatcatatattttctaaatcatggagtttagtcgcatttgaatacgaaatagcagagccgggacaatatattacgacgagagttgaaggcgaaaatattttaattactagaggaaaagatcacgtgctgcgtggattcttgaacgtatgtcggcatcgaggagctaagctgtgcagccaagcatccggtaaagcaggtgtcattcgctgtccatatcattcgtggagctatagcttagatggtgatttagtaggtgttcctaacacaagccactgtcgagaagaactcgtgcataatgaaaattacggactaacatccgttcacattgaagtgaggcacggcatggtttgggttaatttatctgacaatcctatgtctgttgaatatcagctagacgcacaaatttttgatcgttttggagaactttatacgtttgctagatatgaaattcaaaacttgaaatccgctcatcgtgaagaatatgaagtcgaggcaaactggaagcttattgtagaaaactttcaagagtgctatcactgttcctctattcatcctgaacttacggcaacgctgcctgaatttcgttcgggagtcggcactcaaagttccgtgggaggcggagctaagtttgggaatgaattagaagctttttcaatcagcggaaaaggaagccgtcctatgttaaaaggattgcttccggaagatgaccgcacgtattttggcattaccgttctgccgcttgtatttatcaatttaacaccggatcacgttattattcatcgtattattccaattagtgctgaaaagtctaaagtgatttgtgaatggttattcgacccggaagaaatggctaagcctgattttgacccaaaagatgccgtggaattatttcaccgcgttaatttacaagactttgaagcgtgtgagtggtgtcaagaaaatatgagctcaaaatcttataaagaaggaggtattttagtacctatcgaacagcacgtttctcatttttacaattatgtattggaagcaatcggtatgaaggtcgaatagtaagtagaagtggtctgacaagttaccttgaggtgtcagaccacctctaacaatctactttaaaaaaagggggaaataaattgagtacaagctctaaactaacagaacccattatccgcgttaccgatgtttcaaaagtatttggtcgccaaaaagaacaggctcttaagctacgagaagctggagaaagtaaatatgaagtcgaacaagctactaagacaaccgttgctatttacaatgctcatttcgaagtgaaaaagggagaaacctttgtgttaattggattatcaggaagcgggaaatctactttacttcgatgcttgaacgggcttgtagaaccgacagaagggacggtatatctagaaaacacagatatttctcatatgccaaaaagacagcttcaggaagtccggagaaataaaattgggatggtttttcaaaatgtgggcctccttccaaaccgcaccgtgattgacaacattacgttcggtctagagatacaaggtgtatcagcaaacgaaagagaaaagcgagggaaaaaggcccttgaaatggtgggcttaaatggacaagcttataaaagaatttatgaattatcaggaggtatgcagcagcgggttggactagcgagagctcttgcttctgaacaggagattttgctgatggatgagcctttttcagctttagatcctcttattcgaagagatatgcaaaagctatttcttgatattcagggagaagtacaaaaaacagttatttttgtgacgcatgatttggatgaagcattaactttaggccagcgggctgccgtgatgaaagacggggaaattgtacagcttggaaccgctgaagatattttaagtcaaccggcaactgattatgtaaagctgcttgttcaagacgttaattacggaaaaattcgccttgctaaagacgcggtggttccggtagaaacggctgcctatgagtatgaatcaccgcaagtcgtattaagaagaatgagaaccaatcatttatctactatttttgttcttgatagcgctgaccgcttattgggcttaatgagcatttatacagtgatggagctgatagaagctcataagcatgatttaaaagggaaaaaaatgatacagccgcattgtgttaatcctgatatgtctttacaagaaatgattcctttatttacagacagtcattcgcctgtagtcatcgttgataatcatcatcgcctacaaggtatgatttccccaaacactcttattgcaaacctcactgaacgtactgcagtgaccgagcaacaagaagttaagtcatatcaaatggaggtccgataaatatgatggtaaattccgcgacgattcctcgtatccctttagataaatgggcaaactcatttgttgattacatgattgatagtttttcaggtgtatttactggaatcaaccagataatgaccagcttaataagcagtctcgaatgggtattgaccgcttctcctccgctagtaacggtcgttgtttttgttctattagcgctatggttaacagattggaagatagctgtatttacgtgttttggtttacttcttattattagcttgaatttatgggaagcatcgatgctgaccttatctctcgttttagcttctactattatctcacttctatttggcgttcctttaggcatattatcacaccgctttagcaaagttggagcagtgataaagcccattcttgatattatgcaaacaatgcctgcttttgtttacttaattccgtccgtacttttatttggattagggaatgttacagctcttattgctacttttattttcgcaatgccgcctgccgttcgtctgacgctgcttgggcttcagcaagttccccaaaccactttagaagctgcagaagcttttggagcgacggaatggcaaaaattaattaaagtccaggtgccgctcgctttgcctatgattatgtcgggtgtaaaccaggttattatgctatctctttcgatggttgttatttcttcaatggtcggtgcagggggcttgggtgctgaggtattaagaagcatcagtatgttggatgtaggcttaggatttatcggtgggattgcggttgtcattattgccgttattttagatcgtctgacgcacctttctactcaaaaaagaaaaggtattcaatcaagtaaataaaatgaataaaggtgggagtatatgaaacaatcaaaaaaattttcttttattatgctaacaattgtcattatgctgcttgtctccgcatgtggcaatagcaatacggcaagcagcacgacgactaaaaaagaaattacaattggatacataccatgggacgaagccgtagctgttacgtttctatggaaggaattattagaggaaaaaggttataaagttaaagcagttcaaagcgacgtagctccgcttttctcaggagttgctcaaggaaacattgatttatttttggatgtatggatgccgaccacccatagttcttacatgaaaagatttggaaaacaagttgacgtgctcggtacttggtatgatcaagcagatagcggactggccgttcccgactacgtagacgcgcagtcactagctgatttaaaaaataagaaagatgagtttaacggaaagattattagtattgaagcaggatctggaataaacggtcttactaaagatcatgcgatgccaagctatgggttaacagactggaatttagtagaaagcagcacagccgccatgttatcggaattagataaagccattgctaataaagaacccattgttgttacgttatggcgcccgcactgggcttttgaaaagtataatctcagatacttaaaagatcccaaacatacgatgaatccaactggacctgaaaaaatacagtcgattagcaaaaagacatttaaagaagattatccagaagcagcaaagtggctgaaagatttttctattagtgccgatcaactagcatctttagaatcagaaattaacagtgcaaaagacgaaacaaaaggtgtgaaaaactggatttctaaaaataaaaaagtgacggaaagctgggtaaagtaataaaagggctgtctcttaggcaagttattgactaagaggcatttttttgtggtgatatacctatttttgtataaagcttatctcttttatggaaatgggcatcctacattaaaaggatggtgaaaggcattggcaatcgatagaatctgtacaattggacctgctagtaataaaaaagatgtactagagagactgttggaaaaaggaatgacaattgctcggctgaatttatctcatgggtcgcatgaaagtcataaaacaattatagatacgttaaggtctttaaattcctctattcaaattttaggagatttacaaggtcctaaaattagacttggagtgacaaagtcaaaagaagtagtgttaaaagaaggcgcatcgtttattttatatacagagcagatgtcaggaaatgaaaaaggagccagcgttgactataaggatatcgtgaaggatgttcaaacaggaagcaaaatcttaatgaatgacggtcaagtagaactggttgttgaaagagtagaagaagatacacttgtcacaaaggtaaaaaagggcggatctatttcgtctcataaaggagtaaatttgccaggtgcgcgcgtccgtttaccagccattactgacaaagataaaaaagacatcgtattcttattgaaagaaaaagtagattttcttgcttgttcgttcgtaagaacccctgaacatttaaaagacattaaagattttatccatttaaaacatctaaatacaccaaagctgattgcgaaagtggaaacaatggaagctatagaaaatttcaagaaaatatgtgaagaaggcgatggaattatgattgcacgaggagatttaggagtagagctgccttatgaatggattcctttgctccaaaaaacattaatccatgaatgccggatgcaaaacaagtatgtgatcacagcgacacaaatgcttcaatcaatggtgagcagcgcaattcctacaagggctgaggtgacagatgtgtttcaggcagtacttgatggcacgaatgcagtgatgctttctgctgaaactgctgctggaaaatatccgatcgaaagtatagaagcgctttataaaatatcgcattttgctgaaacgcttcaaaataaaaatgtttcgagtctctcagagattttcgcaatgttaaagagctcgagataaaaagtacagcaagtagatatgtaagtttaaaaaatatatttaaattaaaaaaagtggcaccgttttctactatccaagtacaatttaattaataaatgctttacgtttcatatgtaagtatttatttatacctatgttgtcatgatttatgtgattccccaaagcataaattacttttcattaccttattgtgtacaaaaatattgtaagataggctcatgcttttaacagcatgggcctatttttatagacagcttgaaaatagatatttgcaaactggaaaattaatcttttcctcttgtacaataaatattcttctgtacaaaaatagagtgtataataggaatgttgaaatgataggaaaaagagagaagccctatcaagtaaaggaagatggagtggagagtgtgtactgaaagtaaaattgtccagcggcaaaaataaacatgtttttcgaatgcttctagaagaatatctagaatgaaagtaggaacattatggaaaagaaaatgaggtttggcatcaaatccaaaattattattggatatttaattgttattgtctgtttatttattgcatttattgttttaaacagtcaaatttcatctttgcaaaaagaacgaaattttatcattgatcatgatattgaagtgcatgatttgaccaatcgaattgaaaaacacctgcttgatatggaaaccggacaaagaggctatattattacaggagaagcgagttacttagaaccttataacagcgcagcatcaagttgggaaaaagattataatgcactgtatcagcttctaaataataatccaaatcagcaggagaaactggagaagattaaaggaagcattgaagactggattgaagctgctggtgaaccgaccattgcattaaaaaaagaaaataatacaaaagagcttcagcagttttttgagaaagatcctggacgccagtatatggacgatatacgcagccagtttagctcctttagaaacgtagagaaaaaatcgaccgaaacaagagcaacagagttagatcaaaaaaaccaaaaaattaaaattggactttacggcttgctgttatttgttacgcttatttcacttgctatcgctattgttttgtctaattccattgtgaatacgattaaagaagttacgcaaacgatcaaacgaattacggcttcaaaaggcgagttaaaaggaagaattaaagttcgatctaatgatgaaattaaagatttagggatagccacgaacgcgttgttagaaaatattgaagagcgaaactggcttcaaacgaacattgctcatgctgtaacgatgtaccaaggcatagcatctgtagacaagcttgcggaaaaatttctctttacagtttcagaaatgacaggagcttctttcggagcattttatgttcgagaggaaaatgataaaggagatctattcgttaaacaagctgcttttgcagatagaaaaggcgacgcgggaagagagagctttttgataggcgaagggctcattggacaagctgctttagaaaaaagaacccttgtcataaacgatgtacctgacacgtaccagctcattgcttcaggattaggagacgtaaaacctaagagtatctttattgtacccgtcttgtttgaagatgaagtaattgcagttatcgagctggcatcgctgcacgaatttacagttttagagcaagaacttattagtcaagtgattgaaacgtttggtctcactatcaatggtgtaatcagacgtatggaaattgcccgtctattaaaagaatctcaggcgatgacagaagagctccaggctcagtctgaagaacttcaaacacaatcagaagaactgcaaatgcagtctgaagagctgcgtatgattaatgaacagctagaagaaagaacaaaagatgcagaagaaaaatcgtttgaattagaggctgcaaaagaagatttagaagaaaaagcgcatcagctggaattgaattctcaatacaaatctgaattccttgctaatatgtcgcacgagcttcgaacaccgcttaacagcattcttattttgtctgaaatgcttgaggaaaacgcggctaaaacgctatctgaagatgaagaagaatatgctcgtattattcattcttcaggaaaagacttgttggcattaatcaacgacatcttggatttatcaaaagtagagtctggaaaactagatgtcttgcttgctgagatgaatatgagtgagcttccagatcaaattgaacgtaatttcagccacgttgctgaacagaaaaaagtacaattaaacattaataaagcacaagatgtaccggacatcattcacacagatgaaaagaggttccagcaaattgtgaaaaatcttttatcaaatgcatttaaatttacggaatcgggatctgtcacagtatccattcaacgagtagctgaccatcgtcttacaacagctatgcgtacagtggatacggattgctggctagaaatagctgtagctgatacagggattggtataccaaaagaaaagcatcagcttatttttgaagcgtttcagcaggcggatggagctacggttcgcaagtacggaggaacgggacttggcttatctatttgcagtgagtttgcaaaattattgggcggctggatttctctaagcagtgaagtaggaaaaggaagtacgtttacactctatcttcctagtctctctaacggtcttgttgactatgaaaaagtaaattttgcatatgaagaagtagcagtatctgtagaagaagctaaacctgaagcagaaataactgaaattgaccatcctgtacaaccagttgaaccttcattgcaagatgatgaaaatgtgtttcaggataagcgagtgctcatcgtagatgatgaccagcgcaacatctttgccttaaaaactgcgctagctaaacaaggtatgaccattatgacagctcataacggaatagagtgtcttgaaatgatgaagaatagtgaaccatttgatctcattttaatggatattatgatgccgcaaatggacggatatgaagcgatgcagaaaattagagaagagctcaagcttgttgatttgcctattattgcattaaccgctaaagcgatgaaaaatgaccgtgaaaaatgcttggaagccggagcatcagattatatcagcaaacctttagatttaaatcagctgttctccgttatgcgtgtatggctagtaaattaagcggggtatgaaacataaatggatatgaagcacctagatttaagtgaagacttagttatgaataaaaaaacagatttagagattgatttactgctgacggctatttatcgattaacaggattcgatttcagacagtacgctaaatcttctatctgtcgccgggtctataatcgaatgaaaattgaacgtattccaaccgtctctcgattgttagaaaaagcgattcatgaagaagaatttatgaatcagcttttaaatgatttttcgataaatgtaacagagatgtttcgcgatccaagcttttttaaagcatttcgcacaaaagtgattccggtattaaaggattatccggaaattcgcatttggcacgctggctgtgcaacgggcgaagaggtattttctatggcgattcttttagaagaagaagggttaatggataaaacggtcatttacgcaaccgatatgaacgaagatgtattagaaaaagcaaaacaaggtgccttttctttacgtaaaatgaagtcatatacaaaaaattatattcaagccggtggaaagaacgccttctcagaatattatcagacggatcatcactatgcatattttcatccgtcgctgttaaaaaatattatctttgctcagcataatttagtcacggatcagtcatttaatgaatttcacgtcatcatttgccgaaacgtccttatttattttacagcccagctgcaaaatcaagtgtataatttattttcagaaagcctgtgtgcaaaaggatttcttgggcttggcgataaagaaacgcttcgctttgctgaaggagcagcttcttatatcgagtttgcagggaacgagcgcatttatcaaaagcaataaaaaaagacctcatttgtgaggtctctttttattgtgcttgtgcttgaatcataagcacgcacatgtcatcaggctgatttaatttttgttcttctgaaaaaatttcattcataaatgcctgcggatttgtccatttttgttcagtaagcttttgaagacgaagagcagattcattttcgcaagggcccattgattcaagagctccgtctgtaaacagcaaaatttgcacatcgttctcaaagctgacaactgatttctgaacgtccatttcttcaaaaaaccctacagggcagcttcctcgttgaagaggaacaagcgtatgttcatccactaacatataaccttctggatgcccggcattcacatattctactgtcttagcttccgtatcaatcactaaataaatagcagtgaaatagtaaggaatttcatctttttcgctgtgcaataattccatgtagcgattcaactctgtaataacctgctcagggtctatgagagacttgatagcttctctgagcacagacgaaataaacatacaaacaagcgaggcagagatgccgtgccccatcatatcaaaaagaataattccgtaccgatgctcgtcaattttgtgccaatagtacatatcacccgctaatttaaaagaaggataatatgaaacttccatttgaatatctttctctcgtaaagggggactgagtaagttttgctgtacgtgcgtagctaaatccaactcagtttgaattttcttttcatgttccgtgtgccagtcaatttctgctttaaggcgtaaagctacccgcatacgagccagcagttccactttattgatcggctttgtgacgtaatctgttccgccggcatctagagcttctactaatttgctgctgtcttctagagctgtgacaaagataattggaatatgttttaagcgttctacctgttgaattcgcctgcaggcttcgattccatcaatttcgggcatcataatatcaagtaagatcaaatcgaccgaattcgtttttgagttctcatcgtccaggttaagatagtcgaaaagggcatgggcagacataagagacacacagttatcgtagccagcgccttttaaaattttttcaatcacaaatagattgacttgattgtcatctactagaagaatggtcatgctttatttccccttattatgtttgaagactaatcattgagtatgtagttttcaagcatttttatactttttctgtttttctatttatctattatacagaaaagacagcgtttagggtattttttaagattattcttttctattaaaaagtaattatacactataaaaggaaacgaattactttttatagcagcttgtataacgcaaatatcccgaaagtcagtacaaccgctcctgaaatacgatttacccagatcaagctgttattcgtaaacttcgaccgggcaagactaatagcaaaactgagcgaaagccaccagcaggccgatcctaaaaatacgcctgcaaccattgtcaaagcagaaacagcatcaaatgctgatttactaatgcctacaccagaaaatacgccaataaaaaataagatcgtcattggattcgtaaccgttaaaaaaagaacggatgtataagaacgaagcaacccccctcctttagcagcggcagcgtgctctgcaggttgagaacgaaaggtttgtacacctaaataacataaaaataatcccccaatcagctgaagccaaatcttttgggttagtaaaaaggttgtaatgaacgttaggccaaacgcagcgatgcatccataaagagcatctgctgtagctgctcccagcccggatacaaatccgtgtaatcgccctttagataacgtgcgattaatacataaaataccaatgggaccgacgggagcagcaacggaaaaaccgatcactaacccctttagaaaataaaataagttcatcttttacgttgctcctatgaagtttttctttagtatagtacaaaagcaatcatgaatgaagccaattttgagaaagttgttaacacatgtttttagtctgttcgggtacatcatgatggtgttataaaaaaacatcactagtaaatttgttttaatcattaaaaagttaaaaaactaaattattttacacagaaatttaaatgtagtaaaataattcactgttacatatatagaaagatctaccactaaaaagtagtcattcgtaatgagataaagagaggttagtcatcatgagtaatctgtttgcaaaaaaagatgttaacaagctgttagaggaaaatgcagcaaaagaatcaactaagacactagggttatttgatgtgattttgatgggagtaggagcaactattgggacaggagttctggttatagcagggttagttgccgccagggatgcagggccctcggtctccatttcctttgttatttctgcagtagcctgtattcttgttgcgctgtgttatgcagaatttggttcagctattccaagttcgggaggcgcatatacttacatatatgtttcactaggaaaatttgtagcgcatttaatagggtggtccatcgtgggctgttatacggtatctttagcatctgtagcgggcggatggtcatcttatgtgaataatgtgcttactgaatttggtattagacttcctgaatcgttcacggccataccaagcgatggaggtattattaatcttccggcagtatttattgtgctgtgcatgtcgtttttattaacaagaggggtaaaagaaagtaaaaaaataaataacttaatggttttaatcaagataggtattgttcttttatttgtagccgtcggcgtcttttttattcatacaaataactggcacccatttaccccttttggtgtgaaaggaatctttgcaggcgcagcttccgtcttttttgcttataacggatttgatgccatttctacttcggcagaagaagtgaaaaatccgcaaagaaacttgccgctaggcattttgattgcactaagtgtttgtgcagtcatttacgtagtaattgcattagtattaacaggaatggtttcttataaagagctaaacgtaggcgatgcgttgtcatatgcgctcaatagtgtaggacaagaatgggcagcgctcattgtatctataggagcggttattggtattatggccgtcgtatttgcttatttgtttgtcgtgcctcgcatactgatgtcaatgagccatgatggattattgccgtctctttttgcgaaagtaaaccgaaaaaacagcgaacctgtcatatccacatggcttgtgggcgcgttaggcgctgttgtagctggttttgttgatttaaaacagctggcagatttagcgaatatgctagcgattgtcacgtttgctgccgtttcattttcgattttggctctgcgaaaaactcagcctaacctaaagcgcggtttcaaagtaccttttgtaccatttattccgattattgctattctttgctgtatctttcttatgttcaacttatcaatgaaaacgtggatgtattcaatcggctggatgctgattggcgtctttatttacgttggatacggtagaaataaaaagagcgtttagcaaaaaaagactctaagcgaacaagctagagtcttttttgtgtatatatttatcttgaaagtgagctatgaacataacgtaaaaattaaaaatttatttgagacatatgtcctttttattttaggaaatgttattgtttaataaaagaaaccgttatgatggagaggaaaacatgagggaaattacgagtgagaaacagctgatggagtatataaatacttataaattagagtcggttttcaaaaaagagttactaccgcatttgtcactgtatgatgtggaggcaggggaacgtctttgttctcaaggagatgcgtctcattgtttgtacatattgatgaaaggcaaggttaaagtttataccatatcgcccgaaggcaagacgcttgttctttcctttaaacagccccttgaagtaataggcgatattgagtatgtacaagatgttgatattatgaatacggttgaagccgtttcacctttagttgttatcggtataccatacaaacgattaaaacagcatgcgagcaatgatccacagctgctgacgtttttactggaaatgctcacaaaaaagttttgtgcaaaatcgaactcgctaagctttaatttaatgtacccagttgaagtgcggctggctagttacttactctctattttttgtgaagaatcgcatttggttatgaatcaaaaaacagaaagcttaaaagatatagctaatttaatcggaacgacttaccggcatttaaatcgtgttcttcagaaatttgtagcgcaaggagttattgaaaaaaagaaaggctccattattctcaaagataaggaaaaactgagctgtctagcaaacgacaatatatacgagtagaaaaagtaatagattagttgaaggggagagagaagaatgaaaacataccgaacgctgctatttgacattgataatacgcttttagatttcaatgcagccgaagagcaggctttacagcttctttttgctaaccacaatattccgctgactgaggaaagcaaaaaacgttatcgtttgataaaccaggggttgtggacagcttttgaagaaaataaaataagccgtgagcaagttgtaaatactcgcttttctactctatgtaaaaaatatggaatagagaaggacggaaagctacttgaagcggagtaccgaacgtatttgaataatggccatcagctaattgacggagcaattgaggtaattaaaaacctgagctgtcactatgagttatatgttgttacaaatggcgtatcggctacgcaatataagcgccttcaggactcaggtctatatccttattttaaagcagtatttgtttcagaagatacgggctttcaaaaacctatgaaggaatattttgattatgttttttcacgtataacagagttatccgtacatgaaacattaattattggagattctttgagtgcagacattcaaggcgggcagctagcgggtattgacacgtgctggtttaatcctcagagaaaaaagaatgatacaaattggaattcaacctatgaaataggaaggcttctagagatttatgacctgctgaacgtaaataatgaagtagcttcggtacaagtgtaaaagtatataaacgttagaaaacgcaaaaagtgctaacctttttttaaaacaaaaagggttggcgctttttctattttacggctttcaaaggcttaaaatactctagggatattggtctataaataggatggctaaagtaatcaatacaaatttaaacagttttatcccaaaagcaatagggtattttaccaatatcccagataaagtaagtaactaggaggtcgtaaaagatgattaatggcaaaagtttatctcgttcaggaaagagttcatataaaagagaaacagcggttggaaaaactggaatggtagtcagtgctcatccaattgcaacagacgccggagaacaggtgctaagagctggtggcaatgcaattgatgcagcaattgccgttcagtttgggctcaacgttggagaaccgatgatgaccggtattggaggcagcggcttttttatggtataccacaatgaaagcaaaacaactaaaatttttgacgggcattctcaggctccgaaagcagcttatcctaaaatgtttcttgatgaaaataaagaagttattccgtttagaaagcgttctactcatgcaacggcaattggaattccagggattttaaaggcgatggaagcagctcgaaaagagtatggaacaaaaacccttgctgaattgattgaaccggctgccaaagcagcagaagcaggtgtggaaacaaactgggttcttggagatattttaaaaacatatgcctaccgactaggagaacatgctaagcagctatattctccaaacggcaagcctatgcaagaaggagatatgattaataaaaaagatcttgctaaaaccttccgcattcttcaagaaaaaggtatcgaggctttttatgaaggtgaaattgcagaagccattatttcaacgatcaaagagcacggcggttttatggagctgtcggatttgaaagaataccagattaagatcgatgagcccgtgtggggagattataaaggataccgaattgcttcttccaacatgcctagtgccggaggagccaccgtgctgcaaatcttaaagctattagaggactttgaggtgtctcagtacgacgtgaaatcttgggaaaagtattatttgtttgcagaagccatgcgcattgcattttcagataaaattgcattctctggagatccagcctacagtgacattccattaaaaggacttttaaatgaagaatatataaaggaacgtcaaaaattaattaattggaagcataaaaatgagaaagttgattttggcaacccgtgggattatgagaaaggccaaaaagtgaacgttgtgcgtcagccttatgaacctgaacgtgagcttagtgaaacaactcacttcacggtagttgaccgctggggcaatattgtcgcttgtacatcaacggtggaacatccttttggtacaggaattatggttaaagaccatggatttttactcaacaacgagcttactgattttgatgctattcctggagggttaaatcaagcggatgcaggaaagcgtccggttagctgtaaaagtccaaccattgtttttaaagacagcgaacctgtactcactttaggatctccaggcggaccaacgattgtagggtctgtgtttcaaacgcttataaatgtcttagactatggaatggatataaaagaagcgattgaagaaccaagaatttttaatagtacaggatcacttattggttgggaagccggagtggatatgaatgccaaaggagagctagaagccatgggatttaattttggagatgagccattcccaatcggaaatgttcaaggtattcaaattgataaagaaaacggccgtttatttggagcagctgattccagccgtgaaggaaaagcaaccggcttagactcttaatatttaaaaaatgcattctacgctctctcttttgtaaaaagggagagcgtagaatgcattaaaaaagataaaaatgagtaggtaaaaagaaggaatatttttttctgaaaacatactttagacctttattattatcatcctaatcttcagaaaggaaaaagaatagaacgttttcatgcccggctaataaaaaaaatactgatttttcaagagattgatgaaaacagaatggtcggaaagtataaaaaacggaatagcgctttcaatgccggaaagataaagtgtttaatcatgtagaaagtataaaacgcaacggctggaaatcgtggtttggaatgtaaaaaaagccatacatttttttcggaaaaacggttacatgaaaaaggcccttacacgtaaactttggtcctagttacagctcaacgaaaaagatgaaaatgagaaatagctacatttggcatgtttgactttcgtcatttatccaagtaatcttttggttgaacggaaccggttctgttttcgaatttttaatagctaattgaattaataaatttatattctttactaacacaaaaggagaaaacatatgaaaatgaaacgagttgctaagcatacaactgctgctacattggctgcagccctactagtaggcgggggatatcaaacatttgcaaaaggaaatgacagcaaagattttaataatagctacggaatttcgcatattactcgcgataatatggtgaaaattccacagcagcaaaacagtgatcagtttaaagttcctgcttttgatgaatcaactattaaaaacattgcttctgctaaaggtaaagatgcatcaggagatacaattgacttagatgtatgggacagctggccactacaaaatgctgatggaacagtggcaacttataagggatatcaaattgtgtttgccctagcaggtgacccaaaagattcaaatgacacgtctgtttatcttttctataaaaaagctggagacaaatcaattgacagctggaaaaacgctggaagagtgtttaaagacagcgataaattcgttccaaatgacccgcatcttaaaaatcaaacacaagaatggtctggttctgccacgttaacaaaagatggtaaagttcgtttattctacacggattattcaggtaaacaatacggaaaacaaacgttaacgacagctcaagtgaacatgtctcagccaaacgataatacgttaaaagttgaaggagtagaagattacaagtcaatctttgacggtgacggaaagatttatcaaacggttcagcagtttattgatgaaggcggttatgatacaggggataaccatacgctaagagatcctcattacatagaagacaacggacataagtaccttgttttcgaagctaacactggaacagaagatggctaccaaggcgaagactctctatataacagagcatactacggaggaaacaatcctttcttccaatctgaaaagaaaaagcttcttgaaggatctaataaagaaaaagcttctttagcaaacggggctttgggcattattgagttaaatgatgactatacgctcaaaaaagtaatgaagccgcttattacatcaaacacagttacagacgaaattgaacgtgcaaacattttcaaaaaagatggaaaatggtacttgttcaccgattctcgcggatctaaaatgacgattgatggaatcggacaagatgatgtatatatgctaggctatgtttcaaatacgttaacaggaaaatataagcctttaaatgatacaggattagttcttcatatggatttagatcctaatgataaaacatttacgtattctcactttgctgtaccgcaaacaaaaggtaataatgtcgttattacaagctacatgacaaatagaggcttttatgaagacaaccactctacatttgcaccaagcttcttagtaaatattgacggttcaaaaacatctgttgtaaaagatagtgttcttgagcaaggtcagttaacagtagatgaagactgagcactttgcaatagcaacaaaagaaaatggtgattgtaatcaccattttcttttgttttattcgatgtagacaaaaaagagaaaggtggggtttgtttgaagaaaaaaggtgcttataaatggataacgcttgccgttcttttagttgtaatagccggactcattatagcagccgtatccaaaaaagaggatacaaaagaccaaggaaaagaaaaagagaataaaagtgaattcacttatcgcccagtgtatcactttagtacgcctgataaatggaaaaatgatccccaaaagcccatttattttgacgggaaatatcattactattacttatacaatcatgattatcctaaagggaacgggacggaatggcgacatgcaacgtctaaagatttggttcattggaaagatgaaggagtagctattccaaagtatacaaataaaaatggcgatatatggtccggatccgttgtagaggataaagataacacagcaggctttggtaatgacgcaattgtagcgattatgacccagccttctgccgatggacaaaagcaagaacagtatctatggtatagtaccgatagaggaaaaacctttaaatcatatagcaaaaatcctatcatgcctaatccaggcaccaaagattttagagatcccaaagtcatatgggataatgaacatgacaagtgggctctcgtcatgtcagaaggtgaaaaaatcggattttatgaatcttctaatctaaaggattggacgtatacgggaggatttgtaactaaagatattggcattacagaatgtccagatctttttcaaatgaaggcagatgacgggacagttaagtgggttctcgggacaagtgcaaatggaaaagaaagcggaaagccaaacacctatgcttattggacaggaaattacgatggaacaacattcactcccgatatggatgagccgcaatggctcgatcatggtttcgattggtacggagcagtcacgtttgaagacggtaaaaatgaaggttccttagaaaaacgctacgcttttgcatggatgaacaactgggattatccagataagacgccaacgatgaaagaagggtttaacggcttcgattcagtaacccgtgaaattacgctttcaaaacaagacgacgatcagtacagcctgttatcaaagcctgtcgaagaattaaatcagctaactgattcaacaaactctcttgaacaagtagaagtaaacggagagaaaaagttaaagataaaaggtgaagcttatcagcttgatacagatatttcatggtcagatgcagagaatgtaggcttacgacttcgagagtccgcagatcaaaagcggcacattgatgtgggcatttttgcaaaagataacgtctcatatgtgaacagaagctatagcaatcagcctgatcacagcaaaaagtatgtggaaagccgtgattactttgatgcaggcaagaaaaatgttcatttgaagatattggtagataaaacaagcattgaagtctttgttgatgatggaaaaaccgttcattctagcgaggtgtttccgcgtcacaacgaccaagaaattacgcttttctctcaaggaggaaggtctctgtttaaaaatatagaaatcaaacattttcgttccattcagtaatttccctacttttaaaaagaaggagtagaatatcgcctttttgtggtttaggactaggcagaaagggtacatgtctactaacagtaaatgaaagggtgtttattcaaatggaagagaaaatgagacaactaatagagggacttaataccgatttagcgggtgaatattcggcggttattcagtacacttactatgcgtctacagtaaccggcctagaatatcaaattttaaaacctttctttgaaggagaaattcctgacgagcaaggacatgccctttatttatcagaaaaaatcaaaaaccttggcggtgagccaacaacaaagccggctgaggtgaagcacgtttcaaacgtgacggaaatgcttaaagaagcgagcaaggctgaaaaagaaactatccagcgctatgaagagcgtaaaaagcaagcagaagagttagggttaacagagcttgttgtaaagcttgaagatatgattgcagatgaaacaaatcatatggaagaaatggaacgtttattaaaagatccccgattaagttgatcatacaaaatacgtaaaagcatcccgtaccaggtgttacggggtgcttttttgcaatttaaaaaggaaataaaacatcatgtacgcatgtttctatcaatgagaggaaagtcatatttttgaaattatctatcgctttgaaaaaatttatagtaaaataattatttggctgcatatggcagcaactatatgcggggcatcacatacatataaaggctaaaagggtatccgtatattgaaaccgcttttatcttctataagaaaaaccatggtatgcccgcagttgcaaggagagagaaagatgaggaaacgaatcatgacagcgctgctgcttgtcactgttttagctgcaatggaaggaaccattgtcagtacggctgttccaagaattacaagtgatttgtcgggcattgagctagttagctgggtatatgccatttatatgctgacaactgctgtatctacacctatatacggaaagttagcggatctattcggccgcaaaaaagttatgcttgttggaatcattattttcttaatcggatcgatactttgtggacttagcttttcgatgcagcaattaattgtctatagagctatccaagggctgggcgcaggggtcgttatgccgcttacaatgattattattggcgacttgtatgaagaagcaaaagaaagagccaaagcgcaagggtggattagcgcagtttggggagttgcgggagttctcggtcctcttcttgggggattcttagtggatacgctgtcttggcgctatattttctttttaaatataccgtttggactaatggctttttttgttcttttagtaaactataaagaagaagtggtaaaagaaaaacgctatatcgattatattggagcggtgacgttttcagtgggaacaattgcgtttttatatgcgcttttaactggaagtcagcatcaaaactggggagatccgaccattatagggttatttgttctagctgttctaacattcattggctttatttatatagaaaagaaatctcccgaacctcttatcccgcttgaactgttttccattcgaagtgtatctgttataaacttattaacacttcttgtgggatcagtagttattagtattacggtctaccttccaatttggagtcaaggagtgctggggaaaagtgcaaccgctgctggttttgtattaatgcctatgccagtatgctggacgattggttcactgctttcagggaatttagtagggcgtcttaaaacacactccatccttacgctgggcacggcaattgtaagtacagcttgttttatgctgtttttagtttccacccactcacccgtatttttaatttatgtagccgttggggtccttgggttaggaatgggtattattacgcctatttttatgctagttattcaatcagcggtcccggctagcaaaagaggagtagcggtggctcttaatacgtttacaaatacatttagtcaaacgctaggttctgcggtgtttggtacaatctttaacttagtgacactttcacaagcaaagaaattagggcaagaaaatttaaatgcttcgtttgagacaggcggagtaccagcagaagaactgtcaaagctccatgaaattcttgcatcaggtgttcacattatttacagtggaacgtttttagctgcattactaagctttgctgtttcatgcttattagtaaaaaacgaacataaagaaataaagaccatgcctatgcaaaagtaacgaaagaggctgttacaaaaccattttagttgaaggataatccgaacgagtttgattaggaatcaaactcgttcggattttttataggtatggtgaatgtagctttcacatatctagctgttgattggattgacttcgttatatatcagtctcttccttaaaagaattatcaaagaaagaaaataaaaaagatattgtctgataacgttcccgtaaactcattcataataagaaggattcttatcaatgcagaaaattttttattttttgtttttttagtatggacatttacctagttgtttattattatgaattctataagcattgaattttaagcgctttcaaaagaaacatttgtctttctcgggaatacacttgatttttaactcatatactgtaagtgcttagattaatcttttaatggggaaaagagaagtttataagacgtgttgaacaacaatgagggggtatggaagatgacaagcagacgtttaaaagaattcttgaataataatttagaagatttaaaagataaaggattatacaatgtcattaatccggtagaggggccaaacggacctgtgattcaaattgagggaaagcaattaattaatttatcatccaacaattatttgggtcttgctacagacgaaaggcttattaacgcgtgcaacgaagccactgaaaaatacggagtgggggctggagctgtccgaacgattaatggaactctagatattcatattaagctagaggaaaagcttgccgagtttaagcatacagaagcagctatagcttaccagtctggctttaactgtaatatggcagccatctccgcggttatggataaacatgatgcgattttatcagatgagctgaatcacgcttcaattattgacggatgccggctatcaaaagcaaaaattattccttttaagcattcggatatggaagatcttcgtgcaaaagcaggcgaagcacaaaaatccggtttatataataaaataatggtaattaccgatggtgtattctcaatggatggagacattgctaagcttccggaaattgtagaaatcgcagaggaatttgacttgatcacatacgtagatgatgctcacgggtcgggtgtattaggtaacggcatgggcacagtcaaacattttggcttatctgaaaaagtagacttccagattggaacattgtcaaaagcgattggagctgtaggtgggtacgtagccggaaaaaaagatttaatcgactggttaaaagtaagaagccgtccgtttttgttttcgactgctattacaccaggcacggctgctgcctgtattaaagcaattgaaatcctaagtacaagtacagagctacagcagcaaatgtgggaaaacagtcattatttaaagcaaggattaaaagaactaggctttaacattggagaaagtgaaacgcctatcactccatgcatcataggagatgaaaaccaaacgcagatttttagtgagaaattaatagaagaaggggtatacgctaaatcaattgttttcccaaccgttccaagagggacaggacgcgttcgcaatatgccgacggctgctcatacaaaagaaatgttagatgaagcacttcgtatctacaaaaaagtaggcaaggaaatgaaattaatctaaacgttgaatctaggcagtacacgaggaggatattgacatgaaaaaagtattaataacgggttctttagggcaaatcggttctgagttaacggcgaaaatgagagagatatatggttcagaaaatattattgccaccgatattcgcaaaacgacgagcgatgtcgtgacttcaggtccattcgagattttagatgtaacagatcaggctgcgttatttacgatcgctaaaaagcataaagttgatacgattattcacttggctgcgctgttatcagcgacagccgagcaaaaaccgcttctagcttggaatctaaatatgggcggattagtaaactcgctcgaagtagcgcgtgagcttcagtgtcaatttttcactccaagttcaattggcgcatttggtccaacgactccaaaagactggacgccgcaggataccattcaacgtcctaccacgatgtatggtgttaataaagtagcgggtgaattactttgcgattactaccaccataaattcggagtagatacacgagggctacgttttccaggcttaatttcatatgtaacgcctccaggtggaggaacaacggactacgctgttgaaatttattatgaagccgttaagcataagcgatatacgtcctatattgacaaaggaacatatatggatatgatgtatatgcctgatgcattaaatgctgttatccaactaatggaagcagacggttctaagctgaagcaccgaaattcatttaacgtttctgccatgagctttgatccagaacaaatggcgactgaaatcagaaaaacgattccggaatttgttctggattaccaagtagatcctgttcgacaagcaattgctgaaagctggcctaaccatatagattccagctgtgcgatagaagagtggggatttaaagcagaatataacctagaaaaaatgacgagagagatgctgggaaagttaaaagttgaatcacagcttgtcttaacgtaagtagagaaaatgatttcttccttgaaattaaagtaagcgcttactaaaaggtaggttacttgtttatgcaagttctacttcgtaacagtggtggacagtacacatagatctccttaccctttaagtgagcgctcgttcgttgaataatcagcacccttttaggtactgtctgttaaaataataaggggatagaagggagggaatgacagttgaacaataaatttcagcaagttaatgatttttcaatgggaagattagcatctttactcgttcttttacataatacagaactagctgaaggtattgaaaaggaactcaatgaaagaggatacagctacacagtaggaaaagtgggagcgatggagctgtctaaagtcgtggcggcaattgaaacgagcgccaagacaaacaaaattattaatgcccagtcgtaccgggaagttcacgctctttatcatgctatacttgaagccattcaaggagttagtcgaggaacgctgcagctgggtgatattttacggacggtaggactcacattttcaatcgtgcgcggaaaaattgagttttcaggatcaagcgacgaatggattagcgtttgtgtgtatggaacgataggtgcgcctaaaaaaggctttgaacatgatacattaggctttggttttaaccatatttaaaaaataatgaacaaaatagtatgaatgtaaaaagtgagagatgtacatagctgctttaaagaagatatttttcttattgaaaggttctgtgcggcgtgttaacattatgattaatataataactgcctttaagacggtccagagaggccgaaaaggacggattactcatttactgcttctatgcctatctgtgcccttttgccctctgcgacaaaagggcttttatgtgttacttacctcttttaaacgaagtccagagaggcttcaaaagagaatggagatatgttatttatccattccttcaaaaaagaaagagcgttgatacagaaagaatacactggagggtggaacaacatgaattatcgtaacaagacagttgtagcatcagtagcaggtttgacgttagaagggatggacatcatgtttatctcgtttgctatgtcaatgattattgctgaatttcacattgatttagcaacaggtggacttatttcttctattacgaatataggaatgctgataggtggagtcatcttcggaattttagcagataaatttggaagagtgcgggtttttacctacacggttcttctatttgcagtcggaacggcattgacaggttttgcagcaaatgttgaacaagtgtatgcttcacgatttattgccggaattggggctggaggagagtacgggatcggtatggctcttgtagcagaagcgtggccgaaacataagcagggacgagcttcatcctatgttagtattggcgcacaatttggagtgatccttgcggcgcttttaagttctctgatcctgccgattttcggatggagagcgctgttttttgtcggaattatccccgtcatttttgcttttctcgtacgaaaaaatttaaatgaatcccctgagtggctaaaagctcaaaaagagaaaacagccgttgttaaaaatactggcaagcttcgtcaattatttgctacgcctaggacggcgatgacgactatttcgctggcagtgatggctacagttcaaattgcaggctataacggactcatgatatggcttccgtctatgcttcagcaatcacaaggcctctctgtttcaagttcagctctttggacaatcagtacagccgttggaatgattgtaggcatgctaacatttggtcaatttatggatcgttttggatcgaaacgtacttttggaatctttcttctcgcttcagcttgtgcggtatttttatactcttatgccgaaggaagtgcagggctgcttataggaggagctgtggtcggatttttctcaaacggaatgttcgcgggatacggagcattgatcagcagccactattcagtagaaattcgcagcactgcaacgaacaccatttttaactttgggcgagcgctcggagggttatcaccgattcttgtcggctatcttttgcaaagctatgatatgacagtagcgatgacgtacttggcgggcctgtactgtatttcgtttatttttatggtgggtcttaaaaaaacgggagaaaagaaagtgaaacaaatgaacgctcaatctgttctttaaaataaaagatagattctatgcttttctggaaaaaccgcgcttactcaaaagggcggttttttttgagtgtataaaaaaataagttcagctgcgaaaagccgatcggaagaggggtaagacagtgaaagaaacaaaaaataatagaagctgtgtttgagaagcagacaggcgggtaggtaaaaactagatgacatagttcaacaattaacaaactaaaaggagagatcaaatcaatgcgtacaaatttaaaacactttattaacggagaatgggttgaatcaacaggaaacgaaacgtcagatgtgatcaatcctgctactgaaaaatcaattggtaaaattagcttaggtacaaaagaagatctagataaagccgtggcagcagctaaagcagctcttcccacattttcaagaacaacaaaagaagagcgaatcaaaatgcttcgcaatattgcaaaagggtatgaaaaacgtaaacaggagcttattgaagttatgactgaagagcttggcgctcctttaaagatttcggaagaagttcactatgaaatgggacttagccactttaaagaagcagctaatgcacttgaagattacacatttgaaaaagatcatggaagctacaaggtcgtgaaagagtctattggagtaagcggacttattacaccatggaacttcccaacaaatcagacgtctactaaaattgcaggagctatcgcagcaggaagtccaatggtattaaaaccatcagaacttacaccgtatgcagcgatgatattagcagagattattgatgaagctggtgtaccaaaaggtgcctttaaccttgtaaatggaacgggaagcacaatcggtgacggtattagttctcacccggacattgattttgtatcatttacaggatcaggtgctgtaggcgagaaaattatgcaaaatgcggctaaaacaattaaaaaagtagcgcttgagctaggcgggaaatcaccgctagttgtattagaggatgcggatgtagaagaagcggctaaaatagcagtttcacacattgcaatgaatacagggcaagtatgtacggcagcaacgcgcattatcattcctgcctctatgaaagaaaaatttgaagaagcagtgaagaaggttctaccatcattcccagttggtgatccattaaataaagacaacgtaactggaccgcttgtagcggaaaaacagtgggatcgcgtacaggattatattaaaaaaggaatggacgaaggtgcaaaacttcttactggcggaacgggcaaaccagacggcttagagacaggatactttgttaaaccgacagtctttactgacgtttcaaatgatatggttattgcacaagaagaaattttcggacctgtaacaactattattacgtatgatgatctagagcaagctcttgaaattgcaaatgatacaatttatggacttgcaggctatgcggtcggaaaagaccaagaaacacttgactatgttgctaaaaatattagagctggtcaaatcatcgtcaacgatgccgagcaagacagagctgcaccattcggtggatttaagcaatctggtattggacgcgagtggggagcatttggtattgaagaatatctagagccaaaagcgatcatgggcgttaaagttccggcaaaagtataattgatgtaaaaaaagaaaggagtttttctcctttcttttttatggatacataaaagagagccagttaaagaaagaataacgaaagcaaaggtggatagcataaacgtgtatcacgtatatgaagtgacacgttaaaggagggaattataaattgaatagagagatgcacggaagttcatcaacggaaagcttcattcccatgagctctatagccagtggaaaaggggtcgaagtgacgccggatatctacagctacactacacagattgttaacgtatgttttataggaaatccagacaaagaaaatagttttgtacttgtggatgcgggaatgcctaattcggcttctatgattatcaaagaggtagaagaaaggtttggaaaagaaaaaaaaccaaaagcaattattcttacacatgcacattttgatcatattggatctattattgaactagtggagaagtggaacataccggtatatgcacatccacttgaacttccatatgtgacgggtaaaaaaaattatcctacaccggatggtacagtggaaggcgggctcgtggcaaagctttctccactatttccaacggaagccattgatttaggctctcatgtgcaagctttaccagccgacggctctgtacctcatatgccggaatgggaatggattcacacccctggtcattctccaggacatatttctctttttagaaagcaggatcttgcgcttatcgcaggagatgcttttgttaccactaagcaagaatatttactggatgtactagagcaagaattggaaattagcggtcctcctcgttatttaactacggactgggcatctgccaaaagatcagttgaagtgcttcagtcacttcatccgtctgtggcggtgaccggacatggaaaaccagtttccggcgaatggctttcaactaatttattgaagcttacgaagaatttcaatgaaattgctcgtcctgattacggaaagtatgtataaggctaaagaaaaatgttactctttgcagctcttaaaagctgcaggtgaagatcaaaagctctacgaactcactgagttcgtagagcttttttagttctttcttataaaagtgaaaagagagctgttattactttcattaaaaattttgttgaatagcctgctgtgcttcgcgtaaatgtcttaagtgttcttccattcgttttaattctttatgatcagacgcctgttttttttgttcgttaatttgctgctgaaccatagtcaaatgcatttgagcattttgaaaattagctccattcaaattcatctgtccttgataaacagcctgttcagctaattgtaatgcttctttaatatgagtgtatgaattcatgcttctcatccttctgtatagtatttacagttaacatgcgctggtttttcgcagctatacaaacggatttagaaataaaataaaaattacgtagtacaacctaagcaggctgcatacatttatcatagttcaatttataaaacctcagaaacagggagggatgcatgtgggagcttttttcagctatatgttattagggctatccttagccgcaccaatcggtccaattaacgccgctcagcttgataaaggaattaaaaatggttttttacatgcttggttcttagggataggggcaacatcggttgacgctctttatatgcttgtagtttattttgggtccgttcattttttaagcagcgattttatgaaaacgtttcttttttcgtttgggtgctttgtattaatttataccggtattgaagggttaatgagtgcagggaaaattacacagcatagaagcgcaaaaggagattctgtattaaagtgttttttttcaggctttttaatttcgttaacaaacccgcttaccattcttttttggttgggcatttatggctctgttttagccaaaacagcaaatacatatgaaacagaacagcttatcttatacagctgcactatttttacagggattttatgctgggatattgcgatggcagctttagcaagcacttttcgaaggtacttagcagcgacgtttttgactgcagtttccgttatatccggtctgtctctaatagggtttggtatgtatttcggctggcaagctgtacagcaattaggctaaaagaagtgctaaatctaaagtgttttcagtacgttgaaaaataatagaaaaggtgcttctttttacgcataaatttttcaaactatcacacactacatcgaagtgtgaggagtgatagagtgaaaaagaaaataggctgcggaagtcaagttgaagggaaattaaaatggtggcagctgtctttaatcggagtaggatgcataatcggtacaggctattttttaggatcaagtattgcaataaaagcagccggccccgctgtattaatcgcctttttattagcggcagtgtgtacatttattgtgtttgatgcgcttgctaaaatgagtgctcaagatcctcaaaaaggttcttttcgttcctatgcaaagaaagcttatggaagatgggcaggctttagcagcggatgggtgtactggagttcagagatgttgattatgggaagtcagctcacagcgctgtctctttttacgcggttttggtttgaagatattccactgtgggtgtttgccgctgtttatgctgttttaggtattgttgttgtattaattggaacaaaaggctttgaacgaatggaaaatgtatttgctgtgacaaaagtggctgctattttaatgtttattgtattagctagtctcgctttatttggatttctagatgaaggtgcccaacaaggagtgcctcgaacgataaacgaattatttccccgcggttttttgggtttatggggtgctttgctttatgcattttatgcttttggaggcatcgaagttatgggaattatgacggttcgtttagaaaacaaagaagatgcgcccaaagcagggagaagcatgcttattttgcttgcgattatttatatcgcttcattgagcttagctatttcaattgtacctttttatgattttcatgcaaatcaaagtccattcataacggctttagaaacataccagcttccattttttcctcatgtcttcaatggagcgatgattatcgctggtttttcaacgatgtcagcgtcttttttttccgtaacaacgatgattgtcactctttcagaagatggggatgctccggcattattttcaaaacaaaaaaagaaaaagcggcaatttcctttcccggctttgcttttaacaacgtcgggattagttatttctattgttttgtccttgctattgcccgggaaaatttatgagtacattacaacagcagcgggactgatgctgatttataactggttctttattttaatttcttttcatcgtttaatggaacaaaccgtgtgggataaagtaaaacaagctattggtatcttgttaatcttactagcagtaagcggcacgctgttagaatcagcaagcagaccgggcttttttgcaagcttaggctttttaattgttataagtcttgttattttgaaactgcgccataagtggaaagaagaagaagcggctagctaacatatatttaatccttatgaggtacactatgcacgttatactattacaaagataaaaggtggttttaaatatgccaaaaaacaagcagactccttcttcacaagtagatcaaaagcaagtggtagatgataaagcaaaagcgctaagagaaaataactatgaagacggccacattcgtaaagtgacacaaagcggggcagacggtcaataacaaaaaaagacgcgttcgcgtctttttttgttgaagcgtatccttaccaacgatgagcttttgcattacttcgcaggatgatgttcgtttgagacatctctgtatgtccatttacttgggactttgaacgcttcggtctcgtccagttgtggcggaatagttctgaatgctgatctacatgatttttatcattcatcataatcacctcaaggataggatactttcacaagatatttgtggtgaaatatctctcttatagaatggggtaaaaaagaagaaatacacctaacacttttaaccatacatataaaagcagtgcctattcataaactacagaaggcaacttctaactttaggttaagcttcggatttataaggtttataaggcaaaaactgccttagtggggactaaggcagtttttgctggagggattaaacttcaataatgatgggaagaatcataggtcttctttttgtttggttatataagaactgtccaagggtggtcttaatttcttttttcataatgttccattggtgaacgtgcgctttttgtaattggtttacgattttagtcacttgtcgattaacgtcttttagtagctgatctgagtctcttgtataaacaaaacctctcgaaattgtatctggaccagacacaatttttccttccgttttatttaaagtaatcacaataaccagcatgccatcttctgaaagttgtttacggtcacgcaaaaccgcgtttccaacatcgccaatgccaaaaccgtctacatatacattgcctgcaggaatttttcttgtttgaaaagctgttccgcccttgatgtcaacaatatcaccgttatttataataaaaatgttctctttttccaccccgacggattctgctaataagctgtggtgatgaagcattcgaaactcaccgtgaatcgggataaaatacttcggcttcatcaacgtagccattaattttagttcttcttgatagccgtgtcctgatacgtgcatacctgttgcgcttcctgaaccgtaaatcacatgagccccgagtgtgaaaagactgtctacaatacgagagatattacgttcattgccaggaataggccctgctgataaaatgactgtgtcttcaggaagaatctctacttgtcggtgatttccactggctaacctagataaagcggccatcggctcgccttgacttccagtgcagaggatagccacttgttcaggggcaagtgaatgtacttcataaggttcaattaacatcccttcaggaatggttaaataccctttctctaaggcaactgatacaacgttaaccatgcttcttccaagaagcgcaagctttctattcgttttaattgctgcatctacaatttgctgtacgcggttaacattggaggcgaaagtagaaataatcacttttcgctttgctttacgaaaagcttcttctacatgtttgccaactagcttttctgaaggcgtaaatccagggcgttcagcatttgtgctttctgatattaaagccagtacaccttcactgccgattttcgccattttatgaagatctggatattggtcgttaacaggagttaaatcaaacttaaaatctcccgtatgcacaacagctccttcaggggtatgaaagacaatgccgagacaatctggaatgctgtgattcgttttaaaaaacgaaagcggaatattgcctaatataatttcggactcttcgttgatttcaataagctccgtctctgcacataattgatgttcctggagtttgatgtcaattaatccaagggtaagacttgttgcataaattggcaggctcagctgttttaaaagataaggaataccgccaatatgatcttcatgaccatgcgtaacaaccagtgctcgaactttttctcgattctcttgcaagtatgtaatatcaggtataatcaaatcaattcctaataaactttcgtcaggaaatttagagccacagtcaattacaatgatgtcatcatcatattgaacggcatacatattttttcctatttcattaatgccgcctaaagcaaaaatggatagtgtgtttttgtttgtactcacacttatttcctcctatattttcaaaatgaatatgcagaatttctactcttagtatgaacatttatttctggtgcattctgttaaatatggagattttatttttattcaatatgaagatgcgagcaaaaagaaaagaagagcattttcctaatactacctcttattttctttttataactccataaaatatagacgtcacacatggaggtggatggaatgagtaaacaaaataaaagcacaaaccgaggagtcagaagcagtgcagctgctgtcgataatgtgaataaaagtattttatcaaacgatattcatacagatgagcttcaaaaagcaaaagtgagtcgtcataacaaataaaagaatgacaaccaaaagagcagctttgagctgctctggataaaatagagatagggaagtgaaaaacgtgtcagaaaacaaaaattctcaatataaagaagaaaataagtcaactcctagtcgtcctcttgaatataaagaacgcacaaatgaatcacagagtacacgtcaaatgctgcgcagcattctcgaatattcgagtcgataccgttaatgaaattttacatataaaactgtaaggacaagcgggcaatataaaagttgaagcatcgctttaatacataaaaaagcaagcagctatgcttgctttttttatgtatagctatgtacatattgaaaaaaaaccatacatacgttattgtagataaacgtatgtataatggtaaacttgtacatgtatttttggggaaaatttaaagtttggagaaaagaagtgggggattttatgaatttacatgattttgttcatggagtagatccaacaataaagctagttattgaagatgagtttcctggaacgcggtgtgtaggcggaaagtacgttcctagcacgcattctatttttttatatgaaagagatattgaagtgcagtgtcggcacttgtttggttcaaatgagtgtttagaatcttatcaatggattattttagctcacgaattaggtcatgcgctagatgaagaccttttatctttgagtgcaaagtttgatcaaacagaagatataggacttttgtatcaaattgaatgtaatgcttggaagataggaaagaaattgattccttttattaattcagagctattctcattcataaaagatgaatcgttagcccattatcataaagagatggataagattagttagaagaagaaaagttcctggggcttgtactatctataaggaacttttctacttcgagttgtttatatacttcaaatactagttaattattacgctgactgctgctggatctgccgcctttttttccaatttcctcgtaaaattctttaccttgatttttggaagtagcttctccgcctttttcaccaatttcttgataaaactctttgtcatgatttttggaagtagcttttccaccttttcttcctgcttcttcacgactcattttttcattctttttattagttgccatcttgcatccctcctaataaatttgaattcatagtctgtcttcccggtcaaaaaaggattaaactggttattttataatttt

SEQ ID NO: 24 - DNA, 70084 bp, Priestia aryabhattai
  source 1..70084: mol_type = genomic DNA
acaggtaaaagtacccttttaagaggtatattatggattttttatctttatatctaactctttttaccataataaagatcctcttacattttattaaaaaaatgcgtgagaggttttttagatttgtatataatagtagtaaagaaagaggggaaagcatgagcaatttacaaacagaatcacagcaagaacttgaagagacgatggaaacatcagaacctaatgtcacagctgaaacagagagaactcttgatcacgtttcatatttcggatacagccttttgcgtgacgtgttaattccagagcttcttggagacgaaacgaataccatttcatactgggcaggaaaacaccttgcgcggaaatacccattaaatacaatggatgaaatcgtcgctttttttaaagcggcttcctggggaacgctgacgcttgcaaaaaaagataaatattcactagagcttgagttatcaggtgatgtggtcagaaaaagatttcagcaggaaacttgttcgtttcatcttgagtcaggatttgtggctgaacagattcagcgtcaaaacaactgcctaacagaagcctacttaacacataaagaaaagaacggaaaagtgctgatttccgtgcagtgggaccgaaaagatattttacctaccgaaacacgcgcggagcgttataaaaagtaggaaatacgtatatataaaagacgtggagataccacgtcttttttctcttctttatacttgcactgcttgctgctcttctaattcaaatgctacgtgaagcgtctcaacagcttttaccatatcagcgtgcggtataactgtagatactttaatttcagacgtgctgaccatcttcacttcaattttctctcctgccagcacttcaaacatttcggctgcaacgcctggattagaaatcatgccagagccgacaattgatactttagctagaccgctttcatgttcaatacgcgtatatcctaaagtagatttatactcttttaagacggcaagagcggtgtctacgtctacggttttaatagaaaatgagatagagagacgattattagccgttacgttttgaataataatgtccacatttaactgttcttttgctaatgctgtaaaaatagtagaaagagtttgcaactcgttgtttaacccttcaattgtcacccgtgaaatattatcttcaaacgcaattcctcttacgactaagttttgttccattgaaacttcctcctcaacaatcgttccattctcgttttctaagcttgaacgcacttctagcggtacctgataattttttgcaaactcaacagcgcgcggatgcagcacccctgctcccaaattggctaattctaacatttcgtcatatgaaatagagtgaagcttacgagcatcttctacatagcgcggatctgtcgtaaacactcctgttacgtctgtataaatatcacattttgcagcttttaacgctgcggcaagagctactgccgtcgtgtcagagccgcctcgacctaatgttgtaatgcttccatcttctgaacagccttggaatccagctactaccacgatttgacctctatctaattggctttgaatacgagtcgtgtcaatgtgctggattcgtgcattgctgtgaactgcttccgtctggataccagcttgccaacctgttagcgaagttgcttcatgccctttgcattgaagagccattgttaacagggaaatcgtcacttgttctccagttgtaagaagcatatccatttcgcgtttgcttggactgtccgtaatatcacttgctaatttcaccagtgcatctgtagttttgcccattgccgatacaacaacaactacttggttaccgcgctctgcttcttggataacacggtttgctacatgttggatacgttcaacagaaccaacagatgttccaccaaatttttgaacgattaatgccataattttgttcattccttttcaataaatttgcatatgcaggatgatgagaagctaaatttttttactcagacaataaaaaaagcaatgagatgagctctcattgcttaacgaacgaaaattataaaacataaccgtccactgccgtgagatagctctccaagaatctacatcttgacaatcctacgtttattcaacgcagaaccagcaatcattactatgaggtaatgttcacttcggcaaatttccctttccgcatcattcataagagctcatacccttcctgatacgtactgattaaatttgcacctctatcttcacttcatttgatgaagtgtcgtatgaaattagttaatagcttatcaaatattttctattatttcaagactatttttgcaatgtttcataaattttttcagcaatgttttgaggaacacctgaatttcgaatatcttcaaccgttgcttctttcaattttttcaccgaaccaaaatactttaacaaggcttttttacgcttttctccaactcccggaatgtcgtccagaacggactggaaagcggacttagagcgcacttgacggtggaaggtaatcgcaaagcggtgaacttcatcttgaattcgctgaagcaaataaaattcttgactattgcgttcaagcggtatgatttgaggaggctcaccaatcatcaggttggaggttctgtgcttatcatctttgacaagacctgctgtaggcactaaaagtcccaattcattttcgagaacgtcctgtactgcagctaaatgcccttttcctccatctacaacaattaaatctggaagcggaagaccttcttttaacgctctggaataccgtctgcgaactacttctctcatggaactgtaatcatctggtccctttacggtcttaattttatatttgcgatattctttcttttccggtttcccatcaacaaaaacaatcatcgcagaaactgggtccgttccttgaatatttgaattatcaaatgcttcaatccgataaggagcggcaattccaagctcttctcctaaccgttcaactgcgccaaccgtgcgctcttcatctcgttcaattaaatagaatttttcaccgagcgcaatttttgcatttttacacgcaagttctactaattctttctttttgcctcgctttggatgctgaacctctacttctactaatttctcagccaattctgcatcaatcgttgctggaaccatcacttcttttggcttaatatttttggcataaaactgaccgataaaagttaagaaatcttcttctggctctttataaaaaggaaacatagaaacttctcgctcaattaatttcccttggcgaataaagaaaacttgaacacacatccagcctttatcataagaatagccaaacacatctcgattaacaaaatcattaaacgttactttttgcttttccattgtcgcttcgatatgagcaatttgatctcgatattctttagcccgttcaaagtcaagttcttctgaagcttttaacattttttcagttaactctgttttgacatgctcatatccaccatttaaaaaccgcgcgatattttcaataatttgtttgttttgctcttcttttacttcttttacgcaaggagctagacattgcccgatatggtaatacaaacaaggcctgtctggcatggtagagcactttcttagtggataaatgcgatcaagaagccgctttgtctcatttgcagcttgaacgttaggataaggaccgaagtatttccctttatctttttttatttttcttgtaataacaagccggggctgtttttcagctgtaatcttaataaagggatagcccttatcatctttaagcatgatattatattttggatcatgctttttaattaaattcatttctaaaataagcgcttctaaattagaagatgtgacgatatattcaaaatcgacaatgtcgtttacaagtcgcagcgtctttccgtcatgagatccggtaaagtaggagcgcactcgattttttaatacttttgcttttcctacgtaaatgaccgttccatatttatctttcatcaagtaacagccgggctgatccggtaaaatagccagcttttcttttaaataatcgttcatatttttctccttcctcttctcttactctgtccatctatacattcgcttatgaagcgtaacctacattctttcctgccttacaatacatgcacataagccggatttatggcggtgttccttacatctagtataaaacaaacgaacgcatattcgctaaataaaagtattcccaaaagagaaaacgtggagaaaaagaaaaaacctagcctgagctaggttttgacttacgcgtgtttattaattaattctgttaatgcttcttttggttggaaaccaactacttggtcaactttctctccatctttaaataatactaaagttgggatactcataacaccaaattttccagccgtttcttggttttcatcaacgtctactttcacgattttaactttatcgttaagttcgccatcgatttcttcaagaactggagcaatcattttacaagggccacaccatggggcccaaaagtcaacaagcactaggcctgatttaatttcatctgtaaagtttttatctgtagcatgtgcaatagccattttaattcctcctaaatatatgcaatatccaaattctactcacagtatatcaccttcaaataaggtttgctaactttttgcttacatttatactgtttattctccgctctagtttgtacaattcacataaaaacatacgtagaaaatttcgttttccgtgaggttgagacataacgaaatgaatcccatctaaagaagaacaaatagtatacaagggctgaaccgcttgtgacaccgcagttgatttctgtgcaagacttcgctttccgcgggagtcttcgccttgccctccaatcaactgctagaacgacccgacccacacacatgaaacttacgtttacctcaacaaaaaaacgaaccactaatcaaacatcttgatcaatggttcgtttttcacttcgtctaaaatacttttgtcccagcctcttacgcagactgtactttcagctttttaaattcttctgttagaagaggcaccacttcaaataaatctccaacgattccgtaatcagctactttaaaaatattcgcctcaggatctttgttaatggcaacaataatttttgaatttgacatgccagccaaatgctgaatggctcctgagattccgcaggcaatgtataaatctggtgtgactactttgcccgtctgaccgatctgaagagaatagtcgcagtaatctgcatcgcacgctccgcgagatgctccaacagctccatttaacacgtccgctagttcttggagaggtccaaagccttctgtgctttttacacctcgaccacctgcaatcacgacttttgcttcggataaatcaaccccttgcgttgctttccgtacaacttcttttacaactgtacgcaggtttttgatttcaacatttaaatcctctacatcgcctgtacgtccctcgtcttttgcaagcggtgaaatattatttggacgaatggtgacaaacgtaaaagcatcggtcatgattttcttttcaaatgctttaccagaataaattgggcgggtgaagactacttgatcgcctccaacttctacatccgtcacatcggagataagtcctttgtctaagcgagctgccagttttggcgctaggtctttgccaagagccgtatggccaaatacgatagcttcaggctgttcactttcaatgatggctaataacgcctgagcataaccatccgatgtgtaagcagctaaatcttcatgctccgtcacaacaactttattcgctccgtacgcaataagctcttcacttaaagcttttacgtcctttcctactaacgctgcaacaatttccccaccgtcagctacagtagacgccgcggaaatcgcttcaaacgatacgtttcgtaatcccccatcacgtgcttctcctagaactaacactttgcgtcccattgcaatacccccattgttttgacttttaacttattaaatgacttttgcttctttatgcagtaaattgaccagttctgtcacttgatcttttatatctccttgtaatacgcgtcctgtgtcttttttcggaggcaaataaatttcaattgtctttgtttttgcttctacatcatcttcatctaaatctaaatcatccaattccacttcaaccaacggtttcttcttcgctttcataatccctggaagagatggatagcgaggttcgttaagtccctgctgagctgttactaaaagaggaagcgacgtttcgataacctcagaatcgccttccacatcgcgtacaacagtcactttttcaccttcgatatccaattttgtaatcgtcgtaatataagggatttctaactgttctgctacgcgcggtcccacttggcccgaacctccgtcaatcgctacgtttcctgccaaaatcaagtcaggagattgttcttttaagtactgtgccagcagcctagaagtcgtgtactgatcgccatcttctatgtcatcttccgtattgattaaaaccgctttatctgctcccatagccaaagctgttcggagttctttttctgactcttcccctcctacactcacgaccgtaatctccccgccatgcttttcctttagctgaatagcttcttcaactgcatactcatcgtaaggattaataataaattcagccccatcttcaacaatttgaccattttttaaggaaagtttctcctctgtatcgaatgttctttttactaacacgtaaatattcattcaattcccctcctaagcttattttcctaaaaatttaggctggcgcttttcaataaaagcggctacgccttcttgagcatcccggcttttgaatacgcttccaaaaaactgcgcttcttttttaatgccgctgtagtaagcatctgtttttacatgctgaagcagctgcaaggtagctttaacagagattgggctttttttggcaatttttctagcaagtaaaaatgtttcattgataagctgactttcttcaaaagctgcatttgccaatcctaactccactgcctcgattccggatattggatcacttgtcagcatcatctcacaagccttatgaactcctacataacgaggcaatcgctgagttcctccaaaccctggtataattcctagctgaagctcaggcaagcccagcttagcattttccgttaccaaacggatatggcagctcatagcaagctccaatcctccgcctaaagcagcgccatgaatagctgcaataactggttttgggtaattttcaatatactcaaagagcccttgaccgttaacagcaagcttctcatattctttttcctgctgaagtgatgttaattcttttatatcagccccggcacaaaagaatttcccttcacctttaatgacgataacccttgtctctttactatcttctaaatgttttaaaacacttgaaagatcttttaataaatcttgagacaaagcgttagcaggttgtctattcaacgtaatgaagcttattgcatcaacagtttcaacctggataatctccatttgtttacgccaccctttctttctattttcattaccttgcgcttttcccctcgcaggggagcagcaggctcacttacgattatgagccgctgcagccgtttaacagcagggaatggactttatctaccgattctattagaccatatcgatgatcgttcattacccatgttgtgacagtttcatcaatcgttccaaaaatcatctgtcgcgcaagacgaatatctatattttcagaaaactcacccgtttcgattcctgtctgcaaaatagaatcaatgagagtcagataatcttttaatacatcgttaattttcaatcttaaatctttgttcgattgacgcagttcgagctgtgtcactgtagctaaatgatgatcctccgctagaaacgaaaaatgtttgtcaattaacacatgaagtttttctgccgcggtttcaattcccgccagttcttcataaattttttctacaaattgtcccatcttctcttgaaacaaggaaatcaagacatcttctttgtttttaaaatataaatatatcgtaccgtctgcaactccagcctgcttagcaattttagaaacctgagcattgtggtatccgttttctgctattactactacagctgcatcgataatctgtttatactttggcttatttcttctcaatcttatacgctcctttaaaatatgaatgattattcattcatatctttataataaagaaaccgcaagtatctgtcaattatgtttcagtaaaaaaatcaaaggcgacgatcgattacgtcgcctttttatgcttttcattttcttcatcaatcagcgctcgtcgcagaatcttaccgaccgctgttttgggaagctcatttcgaaattcataaaggcgcggaactttataagcagctaaatactttctagaaaactcatttaactcttcttcagtacatcttacaccattttttaatacaatgtaagccttcaccgtttctcctctgtaggggtcaggaacacccaccactacagcttcttgaattttttcatgctcatataatacttcttcaacttctcgagggtagatattatatcccccggcaataataatatctttcttccgatctactacataaaaataacctttatcatccatatagccaacatcacctgttagcaaccatccgtctcgcataacagcctccgtttcttcaggctgcttccaatatcctttcattacctgaggacctttaaccgcaatttcgcctacttcgcttacagcagcttctttacctgtttcaaacgagagaattttggcatctgtgtctggccaaggcactccaatgcttcctggtattctctctttccaaagaaaattagcatgagtaacaggagaggtttccgttaatccatatccttccactagtttacctccggtgagcttttcaaactgctcctgcacttccacaggaagtggagccgaaccgctcatacatgaatcaatagaagataggttgtattttgctaaatcaggatggtttaataatgcaatgtaaattgtcggagcacctggaaataaagtaggctgctgcttatgaatggttttgagcgtcgtttttgcatcaaatttaggcaaaagaaccatctcatagttttgcaaaaccgatagaacaagaaccgttgttaaaccatacacatgaaaaaatgggataattccaagcactttttcttctccatgcctgcagcggtataaccaatgtgaacacatcgttgcattggctaccaagtttttatgagtaagcatgactccttttggaaaacctgttgttcccccggtgtattgtaaaatcgcgatatcttcgtctgaaattcgctcagctttacatactgcgggagaggattcatttataatacgtttaaataaatgagtagtctccgtatgactcacatccacgtttatcttctgctgcttgcgctgaataaatggatagattatgtttttgggaaatgggagataatcttgaatagaggtgatgactacgtgccttattcttgttaacgctttcatttttactacacgcggatatagcaaatcgagtgcaataatcatggtcgcttctgaatcattaagctgatactctaactctctttccgtatacaaagggtttgtttgaacgactactcctccggcaagaagaacagcataaaaggaaatgacagcttgagggcaatttggaagcataatggctactctatcccctctttttaatcccagttcaataaggtaagacgacagcttcagagaatcttgatgcagctgggaaaacgtcatttttttccctagaaaatagattgcgctttttttaggatccttttgaactgcttcttcaaaaagctgtgctaaatttttttgttcataatgaagcctagcaggtatttcatccggatattgagaaagccatatcttttcggtggattccacacgcatcctctccctcaaaaaaataaaaaattagaattttctaattaaaattatagttcattctttttttagatgcaatcgttattgaatgttctctttcctacctaatcactctttcatcctgcagcgtaataaataaaaattggattttcctcctgtacattatccgaattttttgtatataataaaaattggatttttttaaggagctgtatgaattgacaacaacattgactaaaggaccgttcaaagcagatcacgttggaagctttttgcgtcccgagcgtatcaagcaagcacgattacaagtggaaaacggggaaatgacaaagaaacagcttcgagcaattgaagatgaagaaattcgtaagctcgtagaaaagcaaaaacaaattgaattaaaagccgtcacagacggtgagcttcgccgtgcgtggtggcactttgattttctgtcagagcttgttggcgtagaactttacgaagcagagtcgggaattcagtttcacggggtcgaaacaaaagctcacggtataaaagtgactggaaaactagattttaatcaccaccctatgattgaagattataaatttgttcatcaagctgctggaaaggaacacgtagctaagttcaccattccaagtcctaatatgctgtttttcagaggtcatattgaagagtctgcttactcggatacctatgtattttttgctgatttagttaacacatatcaaaaagccattcaagcattttatgatgccggatgccgctatttacagttagatgatactgcgtgggcagtctttttttcagaaaaaggacaagaacaaatcgcttcaaaaggtttcacgccccaagaattactgaaactttttacggatgctatcaatgaatccattgcgcataagccagacgatatggtcattacaatgcatatttgcagagggaatttccagtctacttatacagcaagcggcggttatgaaaatgcgtcaaaagctattttcagtcagttaaacgtagatggactatttttagaatttgatgatgaacgctcagaaggattcgaacctcttcgacatgtaaagcgagatgatcttcagattgtccttggtcttatcacatcaaaatttggagatttagaagatcctgaagcagtgaaaaaacgaattgctgaagcggcagaatttgtttctcttgatcaaatttgtttaagtccccagtgcggatttgcttctacagaagaaggaaatttacttactgaagagcagcagtgggataaagtaaagcacgtgatttcaattgctgaagacgtatggaagtaatcattaaaaaagctgacccgctttaaggtcagcttttttgctgtcatcataatgttaggaaaagctatatagataaatagataagaccaataagcataaacactccgcataaaacgagtaaaattttcgctaacttctccatcactctctcctatcctatccctgctcctattacataggacataccgattgaaataacaagtgaaataaacccaacggctctgttatcttgttcaatttcatcatcgattcgaaattttggcgtcaaaaattcgaaaataaaatagctgactagtaaaagaacgaacccatatattccccatccgagcattcttaacaaattgtcgttatgctcaatcgaatagcgaaaaatattagctaatccaaatattttcccacctgttgccatcgcaacagccatatttcctttttgaatctcttcccaattcttatacttagtaacgagctcaaacacaacaagaaagacgacaatgctcaagacaaccacgctgtaataagcggcagattcaatatacgggtctttccaaaaatccctcatttttgcatcactcctaatttatattacacttcacgtaatgaactgacaggtctctttcctttacttgtatcgttcttaaaagagatagaaaacccagcatagtcaatgagccatgtcggattttctatcttcatatatgcttgttcagcccatcgactgacacctttgtttcagcgttcttttatttaaattccacaaccgtaacgccagaacctccttcagaagcctctccgaaacgaatatttttaacagaacgatgatttttcaaatattcctgtacgcctttacgaagagctccagttcctttaccgtggataatcgaaacgcgcggatagttggctaacaaagcatcatcaatatatttttcaactcgaatcagcgcattttcatagcgctctcctcttaaatccagttctagatttacatgataatcttttccctttaccgtagcaagcggcttcgtttctacaggttttggggaactgatatattcgagatctttttctttcaccttcattttcatgattcccatttgtacttgccattcattattgcttactcgttctacaagcgttcctttttgtccccagctcaagactttcacttcatctccagcttgaagagtgcgctcttgttttttcggcgcagccggtttctttttacttttttcaagagttggaactgcatcttctagacgcttacgcgcttcaatcaattcatgctcttttacaagcgcatgatttttttgactcattttacgcaaattgctaatgattttctctgcttcttcagatgctgctttaactgtggcttgagctttttcttcagctttttcgtacagcttatctcgtttttcattaaactcaataatctgactctgtaattctttatgaagtttctgagcctcttttcttagctcttcagcttcttctagctcttgttcagactgacggcggctatcttcaagggaggcaatcatattttctactttatttgtttctgagccaatatagcctttggcacgttcaattacttcagcacttaaacctaaacgtcttgaaatctcaaaagcattgcttcggcccggtacaccaatcagcagcttgtaagtagggctcaatgtttcaatatcgaactctacgctagcattgaccactccttcacggttatagccgtacgcctttaattcaggatagtgagtagtcgcaactacgcgagcgcctttttcatatacttgatctaaaatcgaaatcgcaagcgctgcaccttcttgaggatccgttcctgctcccaattcatcgaacaaaaccagactttcgtgatctactttttgtaaaatatccacaatgttgaccatatgagatgaaaaggtactcaaactttgttcaatcgactgctcatctccaatatcagcaaatacgtgcttaaacacagccatttccgatccatccagcgcaggaatctgcaaacctgcttgagccattaacgtaaataatccaagtgtttttaacgttacggttttaccgccggtatttggccctgtaataacgatagacgtatattgatcacctagctcaatatcattagcaacgacgtcttcctgtgcgataagaggatgttttgccttcactaacttaatatagcctcggtcgttcattttaggttttgaagcttttagctcatggctatagcgccctttagcaaacatgaagtccagctcacctaacagatacacgttttgacggagttcatttgccacttccgctacctgaacggttaaagcaatgagaatacgctcaatttcttgtttttcttttacttttgcttcttgaagctcattgtttaacgtcacaatcgcctgcggctcaataaataaagttgctccggatgaagactgatcgtgcacaatgcctccatacgcactgcgatattcttgcttaacaggaataacaaaacgttcgtttcgaatggtaacaattgcatctgacaacattttttgagcagacgaggagcgaataagactttctagcttttcgcgaatacgagactccgttgagcgaagtttttgacgaatgcctcttagctggtcgcttgcaccgtctagcactgtaccattctcatcaatactcattttaattgtttgttctacctcaggaagaggcattagtttttcgatatgttcagttataattgaaagctgtaaatcttcgtcttccactacttgctcgataaattgcttgacttgtcttgcagcataaatagtgcttgctacatcaagaagttcattagagcttagcgttcccccaatttcagcgcgcttcacgctaggtcgaacgtcaaaaatgccccctagcggtacgttgccacgcaatcgcagcacggttgtagcttcatctgttgcttcctgccatttgactacttcttcatactgagtcgagggaatcaaattcgctactttttctcggcctaaagaagaagctacttttttctgaagctgttccttaactttattaaactctagtacatgaaaaatacgtgattgcaaaactgattcctcctgttgcttatttatgtcgatttaaaaagacggttaattctttgagactatacgtatttaataccgtttctggtttaagccagcctttaattcccgtagatattccaattcccatatgctctagcatgtctagattgtgagcatctgtattaatagcaattttaactcctgcctcttgggctttttttatgtgctcagcggctaaatctaaacggtttggattcgcgtttagttcaagagccgtttttgtttctttagctaattcaatcagcatatcaatatctacatcatatccgttgcggcgaccaatcaaacgacccgtcggatgagcgattaaatccacatgaacattgtttaacgcttgttttaagcgattcataatttcttcgcgtgattgcgaaaaactagagtgaatggacgcaataacaaaatctagctcagctagcatttcatcattataatcaagtgttgcatcaggcaaaatatccatttcaattcctgctagtattgtaaaatcatcgaactgtgcgtttaaacgattaatttcttcacgctgtttacgaatgcgttcaggcgttagaccgttagctacttttaaatactgagaatgatctgtaatcgccatgtactcatagcctcgcgcgcgacatgcttccgccatttcttcaatcgaatacgccccgtcgctccacgtggagtgcatatgcaaatcaccttttacggcaccgtaggtcacaagcgtttgaggctttataaatacatctacttccgttccatcttcacgaagttccggcggaataaaagacagcccaaaatgttcatagaatgcttgttcagactcaaaagtcatgacttcgcctgtctccgcattttcaacgccatactcgctaattttttcaccgcgttcttttgctaattgacgcatacgcacattatgatcttttgatcctgtaaaatggtgcagcgttgtggcaaacgctttatcttctacaagacgaaaatccacagacacatcgtactcataggctaacgttaccgatacttttgtatctccatttgcaataatatccttcacatttggcagcgatactagctgttcacggacagcatgaggctcagctgttgaaataataaaatcaagatcttttacggtttccctcatgcggcgaatgctccctgcttgagaaaaacgctcaatgctatgcatctgtttaagagcttctaaaatttcttcggctattggaagcataaaagcaagaggcaaacgatcaggacgcttcccaaactcttcaatagcagcgataattttttcttctgtctttttaccaaaaccgcttagtccctgcactcgattttccatacaggcctgatgcagtgattccatatctcgaatatctagctctttatataatttagcgatttttttacctccaagccccggcagcttaagcaaaggaataagtccttcaggaacttcttgctttagttcttctaatacgcttgactcatttgtttccatatactctgtaatgactgcagccgttccttttccaatcccttggagctttgtaaaatcctcaagctctgtcagcgttctttcgtccgtttctagcgctgcagctgcttttcgaaaagcagaaattttaaaagggttatctccttttaattccatatatgtagcaattgtttctaacaatttaataatatcctttttattcatctcttttcaccagcctattatcataataacgaaactttcaaaaacatgatgagtgacatatgtactctctcaaattttcatctagacatacttttatcctcgtgaaaaccgcaggtcagactgcgataaaaaaagagggtatctcaaaagtattatgacactttcgacacaccctctcaacaagctattgtaatttcattacattacaccatactgagtccacaaatcttgaatcgcagacgataagtatggagtattttgtacgatattgattgcaattgaagactgttgaattggcgtttgaatttcacttacaggaatcacggctccaatgtataacaaaataaaaacgatgatatacacttcaacgaatccaagtgcacctccgccccatttatttaactggcgcagaattggcagttcggttaaagccgttaaaacagagcctgcaaggcgaagtacaatgtgagtagcaaaaaataaaatcgcaaatgcaatcattcgataaaaagcgtcttctatcgttccagaatcaaatacaaacgatgcgacactttgctgctgaatattgtcaggaaacgggatcaacaagcgaagtcggcttgccaaatctccactaaacatataagcgacgataaacgaaaccgcaaaactgacaatacgaatgagctgcaaaataaatcctcttttaagacctgttacaaagcctaaaagaagcaatataattaaaatgatattaagcattgactcagtcattcctcttttccataaagtttttgttcaagtctctcataatcttctttcagttttatatattcgtgtacagcattcacagctgttaatactgctaatttattgatatctaaagaagggtttttagtactgatttcacgcattttttcatccactatagaggcgacaagtcgaatatggcttgtactttcgctaccgacgatgctgtactgctgaccaaagatgtcaactgtcgcacgtgttttatcttgtcttgacacgagaaaatcctccgttccacgaaaaatcctaatccctatcataccacgaagaagacttcaatggaaacatatctatatttaagctatcataagggatagtgcttataaagtaaactaaaataccccgaaaggagtgaagcattatgtcacatgctgttattaaggtatcagctaatcaaatagctaaaatgaagcttcattacacatcctatctacagcccaaactgccgcagggaagtattttttcggctaaaactcccggctgttctatcactgcgtaccgctctggaaaagtactttttcaaggaaaagaagctgaaacagaagcggctaagtggggaggctctttagatgctgcgaaaaagtctcctgtctcacacctcccatcaaacttcagctcactatcggtcatcggttctgacgaagtagggacgggagattattttggtcctatgaccgtagttgctgcctatgttcaaaaagagcagcttcctttgttaaaagaattaggagtacgagattcaaaagagttaacggatgctaaaattattgaaattgccaagcagcttgtttcgtttattccctatagtttgcttgttttacataatgaaaagtataatgcatttcaagaaaaaggcatgtcacaaggtaaaatgaaagctctgttacacaacaaagctttatccaacgtgttaaaaaaattggatcctgaaaaacccgatgccattttaattgaccagtttgtcgaaaaaaacacctattataaacacgtggtaaaggaaaaagaaattatcaaagaaaatgtctttttcagcacaaaaggagaaagcgttcatttatctgtagctgctgcttccattattgccagatacgcatttttaaaacaaatggatttgctgacggaaaagaccgggatggttattcctcgcggagctggcgcacaagttgatatcgccgctgctaaaatcattaagaaacatggcgtgaatgcgctgaactctttagctaaaattcattttgctaatacagaaaaagctttaaaattagctaaaaaataagagatgcggaaatccacatctcttttcttattcttatgaacgaagcgttgcaccaaattctttttctacagcctctaacactgcaccatgtgcttttgctacttcttcatcagttaatgtacgttcaggatctaagtaacgtaaagagaaagctacagatttcttgccttcttccatacgctctccttcatatagatcaaataccgtcacgtcttttaaaagttctccgcccgccgcatagatgacgcgctgaacttctcctgcaagaacatttttatctacaacaagtgcaatatcacgtgtaatagatgggaatcttggaatggctgaataacgaacttcttcgacatctgcagctaatagctcttgaaggtgtaattcaaatacgtatgtttcacgaagaccatactgtttctgagcaacaggatgaacttgacctacgtatccaatttctttttcatctaaccatacagccgctgtacgtccagggtgcataccgtcttttttaacgggagcatatgagattcgtttctctaaaccaagctgtgcaaataacccttctagtacacctttaatcacatagaaatcaacgactttcttttcaccttgccagccgtgagcatgccatagacccgtgattgcaccagctgcgcgctcctgctcatccggtaattctccttcacctttagataagaacactgagcctgtttcgtatagcgcaatagaatccgactgacgagcattattatgcttcactgcttctagcaaatgaggcactaagctttgacgaaggatgctgcgatcttcactcatcggcattgctaaaccaatcgtacttgttgcatttagtgcaaactgagtagctttttcagcgctcgttaacgaatatgttgttgtttgtgctagtcccgcaccttctaagaaacggcgaactttacggcgtccaagctgatactctgttagttttcctggagttgccactgttacaggaagcgttgtaggaaggttgtcatagccatacatacgcgctatttcctcgacgatatcttcttcaattgtaatatcgcctctacgagttggcactgttacaacaatggtttcgtcttccactttgttttcaaattgaagacggttcataatgtcttgtacttcttccattgatagctctgtaccaagcacatcgttaatacgtccaagtgacacagctacaacagcaggttccacagttagtgtatctacttctacagtaccgcttaccacttcacctgaagcgtattcagccattaattctgctgcgcggtcagcagctacacgcgtacggttaggatcaattcctttttcaaaacgagcgcttgcctcactgcgaagaccgtggtcttttgaagcttggcgaaccgttaagcctttgaagtaagctgattcaatgagaacatttaccgtatcgtcttttacttcggagttcgctccgcccattacacctgcaagagctaccggctcacttccgtttgtaatgacaagctgattgccttttaatacgcgctcttggtcatcaagtgttacaaacttctctccttctgacgcgtgacgtacaacaatttcttttgaagcaagacgatcatagtcaaaagcatgcagcggctggccgtattcaagcaaaatatagttggtaatatcaacaacgttgttatgaggtcgaataccagctgccattaaacgcgtttgcatccataatggtgacggagcaatttttacgtttttcacaacgcgcgctacgtaaagcggattgtcttcttttgcctctactttaacggaaatataatcagctgcttgctcatcagacgtttgcacgtttactgacggatacttcacttcacgacgtaaaatagcagccacttcatgtgctacacctaacatacttaagcagtctgaacggtttggtgttagccctagttctaatacttcatcgtttaagtttaatgcatctagtgcatccgctcctacttcagcatcgcttgggaacacgaagatgccttcttgataatcttttgccacaagcttgctttcaatgccaagctcttgaagagaacaaatcataccgttcgattcttcaccgcgaagcttagcacgcttgattttaaagttacctggaagtacagctcccacttttgcaaccgctactttttgaccttgtgccacgttcggtgctccgcacacgatttgaacgatttctcctccgccaagatctacttgacagcggcttaatttatcagcatttggatgctgttcacgttctacaacgtgaccaattaccactccgctgatgcctttatttaagttttctacaccttcaacttcaattccactttttgtgattttatctgctaactcttctgccgttacgcctgataagtcaacatactcttgtaaccaacgataagatacaaacatcgtagtccctcctttatacttgtttaaattgatctaagaaacgaacatcatttgtatagaaatgacgaatatcatccacgccgtgttttaacatagcaatacgctctacaccgattccaaaagcaaacccacgatatttagttgaatcgtatccagccatttcaaggacatttggatgaaccatgcctgctcctaaaatttcaatccagcctgtttgtttacatacattacagcctttacctccacattttgcacatgatacgtctacttctacagacggctcagtgaatgggaagaaacttggacgaagacgaatttcacggtctgcaccgaacatctttttcacaaatacttcgagcgtgccttttaaatcgctcatacgaatgttttcgtctactacaagaccttcaatttgcatgaattgatgagaatgcgtagcatcatcgtcatcgcggcggtacactttacctgggcaaataattttaacaggtcctttgccttcattcttgttcataacacgagcttgaacagttgatgtatgcgtacgaagaagcgtttcttccgtaatatagaacgtatcttgcatatcacgcgcggggtgaccttttggcaagttcagcgcttcgaaattatagtagtcctgctctacttccggtccttctgctacttcatagcccattcctaagaataaatcttctacttcttcaaccacgcttgttagcgggtgatgcgtacctgctttaacagggcgtcctggcagcgttacgtcgattgtttctgaagcaagtttacgctctacctcagctgcttctaacgccgtttgtttttcttcaattttggatgcaatagcttcacgcacttcatttgcaagtgctcccattccaggacgctcttcagctgaaagttttcccataccgcgaagtacttctgttatagggcctttctttcctaaataagctacgcgcacgtcgtttaattcttttaaagcacttgctgcttcgacttttgcaattgcttcttgttgaagttcttgtaaacgttctttcatcacttattcctccttttaacgtaaaaaatgacaaataaaaaaacctcctcccaaaaaagggacgaggattagtcgcgttaccacccttgttaactatatacacagacgtatacagttcacttcattcaagttaacggaatctccggaacacctttacatctatataagatggtctaagtgtcaactcaagaggtgaattcacttattacatttataaaaatgctttcagtcgaggcattttctccctgcataaacggacataagctactgctctctttcatcgttttttacatatgtaactattgtattattatagtgaaaacacgttctcgatgcaactacattccgcgtaaataataaagtaagattccagaagcgatggcaacatttagcgactcgctctttccatagatgggaatgtatagattctgatccgtttgttccagcactttctcgcttacgccgtttccttcattccctacaatcagcgcaaattcgtttgaaggttttacgcatgtgtagacctttccattttgtagcgacgtgccgtgaactgctattcctctttcttttaacagtgaaatcatttcgagtaaatcaccttttacaattggaaggtgaaaaatagctccttgcgttgaacgcacgacttttgggttgtacacatccacgctgccctctccaacgataatagcctccactccggcagcatcagcggttcgaataatcgtacctaggttacctggatcttgcaccgcatctaaaagcaatactttctgtgctgtatgaatgatttctgcatgcttcgtttgaaaacacacagcgataattccttgaggtgtttctgtgtcagataataatttgattattgcttcgtttacaacggttatttcgataccatctatgttccactgtgctggcacttcgatcgattcgcgtataattagttcctttacgcaatccttatttttgatagcttcttcgactaaatgaaagccttctaccataaaaaggccctgcttatcacggtcttttttattatgcagctttttccacgcttttacctgcggatttttaactgaatcaatttgtttcacaaacataactcctttatctatacaaaaataaatagttcgattacattttgctcaataatcattagataagtttcactttattgtacatagaaatcgcaaagaaaacaaaaactattggtaactttacgatagctgaggtgaaaatgatggatcttaatttacgaaatgctgttattgcaaacgtttcaggaaactcaaaagaagaacttgaagctacaatttctgacgctattcaaagcggtgaagaaaaaatgctccctggacttggtgttttatttgaagtgctttgggaaaagtctccagaatcagaaaaagaagaaattctgacaacacttgaaaacggtttaaaataaatagccttttcctatgtacaacaaaaagctcattctcctaggagaatgagctttttttaactatacgtaattgcgttcaccgtatttcggtctaagcgtttaattacttcggcaattaatttaactgcattttcataatcatcacgatgaagcatcgctgcatgagaatggatataacgagttgcgatcgtaatcgaaagtgctggcaccccgttagctgaaatatggatagaacctgagtccgtaccgcctccagcgattgcatcaaattgatatggaatatttaattcatctgccacatctaccactgtatctcgaagtcctttatgagaaaccatggaagcatcatataaaatgatttgcggaccatctcccattttagaagatgcttctttatcagaaacaccaggtgtatctccagcgataccgacatcaacagcaaatgcaatatccggttcaataaagttagcggatgtttttgcacctctaagtccaacttcttcttgcaccgttcctacaccatacacaacattttcatgtgtttcattttttaaagcttttaatacatcgatagcgattgcacagccaatacggttatcccatgctttcgctagcagcatcttttcgttgttcataaccgtaaattcgaaataaggcacaacctgatcaccaggtttcactccccactccgctacttcttctctgctagaggcaccaatatcgatgaacatatctttaatgtcaactggctttttacgaacttctggaggcaggatatgaggaggctttgagccaataatccccgttacctctcctttagatgtaacgatggttacgcgttgagcaagcataacttgagaccaccatccgcctaccgtttgaaaacgaataaagccgcgttcatcaatttgagtcaccataaagcctacttcatctaagtgaccggctaccataattttaggcccttgttcgttgcccactttttttgcaatcaaactgcctagcccatcggtcgttacttcatctgcataaggtgcaatatatttcttcataacctcacgcggttcacgctcattgccaggaattccttttgcatctgttagtgctttaagcatcatcaatgtttcatctaactttgtcatatggattacccctttcatatgtatacctctattatagctaaaaagaggttgaagtaaaatttcccatccctttatttctagtatccttgttcttggcgtttaaaattcacttcattttttgagatgtacgccttttcaatatgttcagcggaaaaaccaaacatatcgccaagcgtcatgtaagatacaaacatgtccacatagttttctttcgactgatcctgctcgaaagcagcaacttgtgcaaatacctgtaaaaattgtgctgtttttgaatcacttgcttttgcatttggtaactcagttaaatcatcgtatcctttttcaatccctaaagaaaggataaaatgtacgccgtccacaaattcttctaaaataacagcgtcttcagccggaggtttgacgctccaaaatttgaagcatcgcgtttcgtttgccagttctcccatttcgacaagcagtgctaaaagctttctcggaatcaaatcttccttatgaagctcatgcttatcctctatatgctgatccagctggcgctgcatagtaaatagctgttgtaaattcaatgtaatcactcctgtaattatgtatatcttcttctttttaaaccaataaagaaattatatcaaaaatcatgaaactttttagaaactcgaacgtaaagtaagaaaactgtgccttgtaaaggagggagcgttatgtttgttattgttatcgttcgcgtgttcattttcgcgcttgttgcttacacactattaaagctggttcagcattttcgcagtccaaagcggaagcttgtagcagctcaggaacatcagcaattttttgtcgttgacgaaaaaacgaatatccgcaaaaattttctactaacgtataaaggtattttatttgaaggagaaaaatacagcaatcccaatgaaccagaatctttgtcaattacaatggtgttaacagatccatctcgattacatgaactgcaaaaacaagatttcaagctgctggaaagccacgtacacgacatgtatccaaatgctcctattcgctggaaaagccccgttcgagaatttttacactgagcacaaaatcatttgtgctcagctgataacaaaaaagaaaagtaaatcaagagcagcaagaataggaaaacctactgtaaacgatgtgtgcttcgttttatgacgatagcaatacataccaatcagtcctccaagagctcctccgatagcagctaccgtccacaatgtgctttcggcaattctccactcatgtcttttcgctttttgtttatctctatacatcattcctacccctactatattaataacaataaaataggtaagcagcagttcattcatgatatgtcctccgatagcaaaaaagcctcatcatctaaagatgacgagactttatattcattacttatctaagccttttttagcagcagttgctaattcagcaaatgctttttcatcagctacagctaagtcagcaagcattttgcggttaacttcaatacctgctaattttaaaccgtgcattaaacggctgtaagaaagaccgttcatacgagcagctgcattaatacgtgtgatccataatttacggaagtcacgttttttctgacgacggtcacgataagcatacatatgagatttcataacttgctgattagcaactttatataatctatgcttcgaaccgaagaaacctttagctaattttaaaacttttttacgacgtttgcgtgttactgtaccgccttttacgcgtggcataattgtttacctcctgtattgtttctatctcaacccaaattacttaatgttatctaataagtgacggatacgtttgaagtcacctttgcttactaaagaacctttacgtaatttacgcttttgttttgtagatttgttagcgaataaatggcttgtgtaagcacgagcacgttttaatttaccgcttccagtctttttgaaacgctttgcagcgccacgatgtgttttcatttttggcatggggtgttcctcctcgttctattacttttcgtttttaggtgccaagactaagaacatgctgcggccttccattttaggagccgattcaactgaacttacatcttcgcaagcttgtgaaaaacgttcaagtactttttggccaatccctttatgagtaatggcacgacctttaaagcgaatagacgctttcactttgtcacctttttcaaggaacttgcgtgcgttacgaagtttagtgttaaaatcatgttcatcaattgttggacttaaacgaacttcttttaagtttacaactttttggtttttacgagcttctctttctttacgttgttgctcatagcggaatttaccgtagtccataatacgacataccggcggtttcgcatttgcagcaaccattactaagtcaagatttactcgtgaagcaatttctaatgcttcattttttgatttaattcctaattgttcaccgttttgatcaattagacgaacttcgcgagctcgaatgccctcgtttaccatcatgtccttgctaataagtagccacctccaaggtttaatgagcgaatacgcttgcttagaccgattattaactcacacaaaaaagtgtgagtacatactgcacccacacttctatcgttttaattaagatacgatgtacctgctaactgctctatgcgtcactcaggtgagaagcgggtgcttcttcttctgtataaacaagtattcaattacttaagctattatagtatcaacaaagacaaaagtcaatgatttcgttcttttttcacaacaaaaattattgtatcaaaggaaaaacatttatgcaacagttttttataaatgttgcataaaaaagcagagaatttcaattctctgcttttttcattagcgagatgcttctgcttttacattttgtaaaaaggcttggaagtccactgtttctgaattctgctcaccgtatttacgtacgtttactgctttatcctctacttctttatcccctacaacaagcatataaggaattttttgcatttgagcctcacggattttatagccgattttctcatcgcgagaatcaagttccactcgaatacccgccagctgaagctgttcttgcacttcttttgcatactcaaggtgaaccgtaggtgataccggaatcacttgaacttgtacaggtgctaaccacgttgggaaagctcctttgtattcttcgattaagaaagctacaaaacgttccattgttgacaccacgccgcggtgaataacaaccggtcgatgttgttttccgtcttctcctacatacgttaaatcaaatcgttcaggaagtaagaaatccaattgaaccgtagatagcgtctcttctttaccaagagctgttttaacttgaacgtctagttttggaccgtagaatgccgcttcgccttcagcttcataataatcaaggtcaagctcatccattgcgtcttttaacatgctttgtgctttttcccacattgcatcatcatcaaagtatttttctgtatctgcagggtcacggtaagatagacggaatgaataattttcaaatccaaaatctttataaaccgcttcaactaagcgaactacacgaataaattcttctttgatttggtcgggacgtacaaagatatgcgcatcatttagcgtcatgcctcgaacacgctgaagtcctgataatgctcctgacatttcgtagcggtgcatcgttccaagctcagcaatacggattggaagctcacgatagctgtgaataccttgtttgtaaaccatcatgtgatgaggacagttcatcggacgaagaaccaggtcttcgttatccatttccattgcagggaacatgtcatcttggtagtgctcccagtgaccagacgttttgtaaagttctacacttccgagcactggagtgtaaacgtgctgataaccaaggcttacttctttatctacgatataacgctcgataatacggcggatcgtcgcaccttttggaagccataaaggcagaccttgtcctactttttgagaatttgtaaataagtttagctctttaccaagtttacggtgatcacgttcttttgcttcttcaagaagacgaagatgctcatctaaatctgcttttgtaaagaatgctgtaccgtaaatacgctgcagcatttgattatcgctgtctccgcgccaataagcacccgccacgcttaatagtttaaattctttaattttgcctgttgacggcacgtgcacgcctcggcaaaggtcaaagaattcgccttgttggtaaatcgtaaccttttcacctgctggaatcgcatcgatcaattcaagctttagttcatcgccaacttctttaaaaagttgaatggcttcttcacgagaaacttcttttcgttcaatttcaatatttgaattaacgatttttttcatttctttttcaattttacctaaatcttcaggagtaattgattcttccatatcgatgtcatagtaaaaaccgttttcgataaccggccctacacctagctgtacttttgtatctttgtataaacgtttgattgcttgagccattaaatgcgctgtactgtgacgcataatttcaagtgcttcaggagcatcttgcgtaatgatttcaagactgccatcttgctcgattggcgtacgtaaatcctgcagctcgccgtttactttgcctgctaatgctttcttctttaatcccgggctaatagaagccgcaatatcttctgttgatgatccttttggatactctttaacagctccatcaggaaatgtcattttgattacttctgacacaactttccactcctttaacataactgaataaactttttgtaaaaataaaaaactcgtcccttatcaaaagggacgagttgtgtatacacgcggtaccacccttgtttcctcttcgtatcttggataacccaaagaacccgaagcggctcgaggttttataacggaaattccgtcagtaattactagaggctctgctcgtttactactgaagtttagaggtggtaagaatatattccgtgttaggagattttcagcctagatctccctctctacaaaccgtaaatatacactcatgtcctcatcataacttgtaacatatagctgtttttcaatatgcatttattatattcattttcaaaatagaaatcaacctttcacgttatattttgcttttgatcaaacggaaattcatttttttcgtataacataactttttcttggaagatattttgaatggtataaacaaaatcatgatcatgctggtcgctatacagatgaatagcagctggagataaacttagcaaaggcgcgataatagttgagtctatgtataatgattcttgttcagataaaaaggcctctgctagagctgcacattcacgttcaggaacatatctactgctgtggtcgtacaatacaaatttgtttttattcaagtgcattacataaacatcgcctgtagatgactgtctttcattagctgtttgacgcagctgatgaataagaatttgatagtcttgttcaagcttatattcatcaatcgccagctcggcataatagcgcagccgctcttgatattcttttaaacggaattggagaaaagactcaaaggtgaatgttacattatgaatgaagaagtcttgaagagcctggcggataagtaattctcttggaagaaaaaatgttttttgcggaatttcgcctctctctccttccataatcccccccataatttgaagcagcaaatcttgctcttcctcttctgaatagaaaaattgttcttttaatatgtttaccatcatctttttttctttcttttttaaaattacgtgggttaataccggtatcaccatgtcttgtaaaatggcctctctattgtatgtctcatcaatgactaaaagctgattattcaccagcttcaagcactgtgaaccatatgataaagcgcttcgcttcgcgcataaagactcatatacaacgactgcgtcttctacatatttaaagaatattttcattcctcatagcccccctttggacacgctttattaatgtatatggggcaacatgcaaaaaaatgagcaagtcgttacaagaaatgtaaaacgacctgctcatctatttcgtttattctctccattcatttcaacaggaatggctagagacttaattcgttccatgacacgagcggctttgagctcttccttctcgcctctttgggtataagtcaaatgatgttgaagctctttaaaatttaaattcgagctgaaaaatgtcggcaaattttcgagcatacggaattgtaaaatggttccgagcacatcgtctcgcatccagcttgttacggattctgctccgagatcatcaagcataagaaccggtacttttttgacatactctattttctcattgaaactttgatcttgaaacgaaccttttaactcacgcaaaaactccggaacatacagaatggtagatttcactttcttttcggctaacgcattggcaattgctccaagaaaatacgttttccccacaccaaacgaaccgtgtaaatataaagctttcattttcttatttggttcatattctcgcacaaaatctcttactagtttaatggcttcaaatcttccctgctcaatttcgatatcagacattgttgcctgtaaaatttctttcggcacgtacatacactgaataaaagattcttgttcttttcgctcatcttcttgtacttttctaggacagcgttcatactgtaaatcaatgttacggccttttacaaccagctgagggtggtatcctttcaccatgttgacacagctttgcagagaaggacacttgtcacagcatttgctttggtcgataaattcatgcatcttcatcagacctcggtcgaccatttgctcatctaactcacggcgatgctcttgcaaaaatgttttaacttcgggattagacaggatactgtttcttaatgcttctaagcgtgctttaaaatcttttttgttcactaactgatttagtgaatcattgataggcttcatctttttcacctcatctctatcatacctgctttttattctttatgcttttgttttagctcttgatctaactgcttgagctcttcttgtagctttcgtttttcttcttcaaatccgtccacttcttttgaaggctgctttttctcttctttttcttcatcgctcagccactctggcaccatttctttacgcacaatctttcgtccagctgtttttttattttgctttgcttcggtccagttctgatattctttctgttcatttttagctaaattcatggcatcttgaacagtttgtacctttttgcgcgcccagtgtccagcaattttctctacatagctcttagataatttcatatcggatcttagcataacatagtaaatcagaacatttactacccctggtgaaagcttttggttaaacatcacttcttcaatcatttgcaaatctgcttttgagggctctgctcccccggaaaactcgatcaaaagctgtcgaggagaagtcacttcaagctgttgaatgagctgctcttcttttgtctgcggctgcttttcctgcatggtacgaagcataggcggctgaatttgttcgcttagatttggaagtgcttctccattttcaaattggtaaaaggactgtgctgcttttctaagcaattcaatatcaacttgatcgttctcatttagcgaatcgagcaccacatttttcatttgaagaggatcgataccatataaaaaggctagcttttcaatcgcttgttttactttagatgtaatggaccttttcgaaatcattgaatctgttagacctgctaaaaataaatcaaaatcaaaggaatccgggctcatctcaatagaagcgcgtttggaggaatccacaaagtcggtttgagcatcaggagaaaatacatccttgctttcagactgaaaacttggagccagctctgttgctttaactgatttaaatacatcgttaaatgaatgcgtcacatccttgaacgattggtcatcgacgagtgaatcagaaaaataatttttcactttttgaaagatggattttccaagtcggttatataaatatacatttaacacgccatcgttaaaaaactgatggggcgtaagaggaggaatgagctcataaatgaacacacgaacatcatcttcttccttaatatatgtttttaacaaaccaatgccttctaattttaaccgctcatggtaaatagctttcaaattaatttgcatcattgacattagatgatgatgcgtagattctttcccccataaacgatcttgttccagctcgctccatagcgtcatatacagaccaaagcacgttgtacccaccaacggctgatagagcatggttaaaatctttcggtcatattcctgcagtatgccgttcgaacgaacaacataacgatcgaccggtatcatttctttccaatgttgttctttcatgtcgttccctacctacttttaaagtaatagaaatgacaaaaaaagagcctaaagaatacttcaatagctcttttacagtcgttccttcttaattaaatcttttaattcatcaataaatacattgatgtctttaaattgtcggtatacagaagcaaatcgaacataagagacttcatcgatagcagctaatcgctccatcaccatttctcctaccacatctgactgcacctctgatgtaccctgactgcgcagctctgtttcaatatcgtgtacggtatcttctaattgttttaagcttacttggcgtttttcacacgccttaattaaccctcgaaggattttgtctttgctgaactcttctctcgctccatctttttttacaacaattaacggaagttcttctactttttcaaaagttgtaaaacgatagtgacactcttcgcattcacgtcttctacgaatagagcggccttcttctacagggcgcgagtccagcactctcgttccattgtaatgacaggatgggcacttcatattctcagctccaataataaaccttgtttttctttttattttctcttatataagttaatttccatctatgttagccggctattcgccatttattatgatttttatcatcatttcctttaacaaacacgatgctgtattaaaggatttgctttattccatcttatagaaaacaaggcttgaatacaagtaaaggaaaaggaatttccccattttatttcctgaaattcaaaaatgataaggaacctacgaagaaagaggaataagtttttggtcaaaactcttataaagcgtacgtacaagttctttgctaaaaccaaaatcaaccggcaccacttttgattctgttgtagcagaaaaatcgatagcggtttcaagaggacgtacgttaataatggtaatcacaacaaaagcttttcttccttttacaacgtttaagctaatttctcctcgctcttcatacgcagcaagtatctctatcccttgcatgtgcttcaacatttcatgaacttgcttaaatgcattcccggccgttgttttgtaataatgcgtttttagagtcggatctgaatggtgatcgcttgtttctacatgattagaaaataaagatttaactgcttgtactacccccatgttgttatcccctttgtttttgcgtattaaaaatttatatactaaaaagaggtgtgtaatacacctcttaacttacgtaatcaatcgacactattaaagtgcattcgctttagtttgttttacctgaacaggacccattccacgtggtaattcaattgtttcacgtgtctgtgcacttagagcatctgcaatataatctgctgcgattgtaggatctaaatgaccacaagtataaacatcgatacttgcataaccatgctctgggaagctgtgaatcgttaaatgtgattctgaaataataacaacgccacttacaccttgaggtgcaaatttatggaacgctacttcgcgaacttccgcaccagattttaaagctgcatcaacaaacgttttttcaatataatcaatatcatttaacttatcgaaatcgcatccccataattctgagatgacatgacgacccattgtttccataatgatatttccccctttaacaatttttaatcgttaaacatgaagttctttcgccatatagcatgttaactaccacgggggaaagttagtccaaagaggtcctaaccctttaagtagccacatcaccgaaaggtacacaagaagttcacgaaacatagtatactttgtttacatttattttgcaatacgtgttttgattttattaaagattgttcttgcagatagacctatacaaattacccctgtattctcgtgagacagtgtgtaaaagctgctaaacgactattaattttttattaaaattgaggaaaataaacacccctttgcatgcttatcttattgcttttccctattcttttgaataaaaacaaaaaaaacagggcgatatcgccctgtttttttaaaagcaatcaatagctttcttagcttactcttatttttgatccattacgcatttctgcagcaatatatcttaccaaatcgactacgcgctgagagtagccccactcgttatcgtaccaagctaacactttaattttatgatcttccattacgatcgtggatagtccatctacaatagctgaatgaggatttgtattaaagtcaattgatacgagtggttccattgttaaatttaaaatattctttaatggtccttcagcagctttaataaacgctaagttaacatcttccatcgtcacaggtttccttacatccacaactaaatcgacaagcgatacgttcggcgttggcacacgaagcgccatcccatgaagctttccttttaaatgaggaagaactaatgaaagtgccttggctgctccagttgttgtaggaataattgattgagcacacgcacgggctcttcgcaaatctttatgcggattatcgatatttttttgatcattcgtatatgcgtgaacggtcgtcattaaaccgttttcaattgtgaacgcttcgtctaacaccttgacaactggagctagacaatttgtcgtacaagaggcattagaaataatgttatgctgattcacatcaaactctcgttcgtttacgcccatcacaatggtaatatcttcttgtttacccggtgccgttaacacaactttttttgcacctgcttcaatatgtaactgcgctttttctcttgaattaaatttccccgttgcttcaacaactaaatcaatcccaagctctttccaaggcaaattcagcggatcacgtgaatttaatagctgaattcttttaccgttaacaattagcgcatcatcatcacatttgacatctccattaaatggtccgtgtatagagtcatatttgattaaatgtgctaacgtttctgctggataagatgcatttattgcaataatatctaaattttcctctataatcgctgtgcgaaacaccattcttcctattctcccaaaaccattaatggcaatacgtgctttcatggctatacccctctctatatgtgttatactatttaactttttatattgaatagtataacataaatatttaaaaagtgaataatattatttttttaaaatgaattattttaattaagttttactatatgtatatagcgagaacagatatttaacacattcttttttagaagcccttaaatattccaaaaaaaaaaagagtgaatgcaaccattcactctttaatctagccatagggctaatatacttaaaagctgttgttttgtttcctctacaggaccgttgttattgatcaccgcatcggctaaggctactttttgaatcaaaggcagctgtgcatggatacgcgcataggcatcctcggccgagaggttattacgcgactttaacctttctagctgcacagactcatcgacatatacaaccactactttatcgactaagtgtgtcaaatcgctttcaaacagcagcggaatatctaatacaacggcttcgtaaccttcctctatatagctttccttttgagaaagcatttcttttcttacggcaggatgtacaattgcattcaactttttacgttcttcctcttgataaaacacaattccccctaaagccgctcgattgatctccgcattctcgtgaagaatagaacggccgaaggtctcgacaatttgtttgtatgcttcttttcctggttctacgacttcttttgcaatgtgatcagcatcaattactggaatattgatatctctcagcattccggttaccgtgctttttccgcttgcaattccgcccgttaatccaattacaattgacattggtctctcctttatctctttatttaaaatctaaaaatacctaaaataataagcagaactcctggtacaaacgagaacattttcatccatgataaacgtgaaaaaaccttgccaaactgtatgcccgcacttaaaaaaagagaactcataagagctacagcaattgctagagcatacggcgaataacctaataaagccgctccaaaccctgctccaaatgcatcaagagataatgcaattccaagtataaatgcttcaattccattgatggaacctgaattatctaaatctgctgcaattggctttttcaatacgttgatgactaggccaattgacttaatttcaattttcactaatgttttttcttctttcactcgagatgaatctgccggacaaaaaaactggtataaaatccacatcccaagcagaacaagaatacctccgcctactttatttagtacatccactgaaaatagatgcgtaagtacttttcctaaaaacatagaaaacattaaagaaaatgctgagcaacatgaaataataaaaatggatttcagcgggattttcacctttcgaagtccgtatgtcaggccaacgctaaagctgtcaagacttacggcaaaagcaagaataagtaaagaaaatgttatcatgatgagaggactcctttcctttttgtctatacgtagtatatgaaaggagcccatccattgttattttttagccggctgacaatttgggcagatatgtgttcctctaccgcctacaacaaatttttcaattggggtaccgcacattttacagaattcgccttttcttccgtacacataaagctgctgctgaaacatgcctatttgcccctgtgtgtttacatacgtgcgaattgtgctgcctccttgtttcacagcttcttgaagagtcgctacaatttcttcgtacaatttttcatactcttcgtctgttaattggctggccactcgttcaggatgaatccctgcgcgaaacagtgcttcatctacataaatatttccgagcccaaccacgacattttgatcgagtaaaaccggcttgatttttcgagaggttttgccgattctcatttttaattgactaggattaaatgtttcgtcaaacggttcaggtccaaggccaataagaggaggaaacagatcttcctctccctttttaaataagtgcatagtaccaaacttccttacatcgcggtatcgcaattccgttccatccgtgaagtgaaaaaagacgtgtacatgcttatccggttcttctgcattcccatggagagcatatttcccttccatacgcaaatgagaaaccatcgtataatcatcgagcacaatttttaaaaatttacctctgcgttcaacatctcgaatggtttgtccaacaagcgcatcacaaaactgttcaacttgttcaggacgtttgataatattaggccatttaactgttacccgctcaatggtctttccactggctaattcaattaacgtacgtctgacggtttcaacttctggtaattctggcacgtttgtcacatcctttttccactactttgcttcgtaccaagtctttccgtaagaataatctactttcaacggaacttctagctctaaagcgttctccattacttctggtacgattttctctaaaattttaatttcttcttctggagcctcaaaaatcagctcatcgtgtacttgaagcagcagcttagcctgaagattttcatcttttaagcgcttatccatttcaatcattgcttttttaataatatcagctgctgtcccttggataggcgtattcatagccgtacgctcagcgaagctccggaggttaaagtttcggctcgtgatttcaggcaagtaacgtcggcggtgcaagagcgttgttacatatcccttttcttttgcatcgtgtacgatcgtatccatatactcctgtacacccgggaagctttttaaatagcgttcaataaaagtagccgctgcttttcttgtaattcctaaactttgcgataaaccgtaatcactgatgccatagacgattccaaaattaactgctttagcctggcggcgcatattcgacgttacttcttctcttttgacgtggaacacatccatcgctgttttcgtatgaatatctaagtcatgcttaaacgcatcaattagcttttcatcatctgcaatatgagccagtacgcgcagctcaatttgtgaataatccgccgcaaatattaaccaatcaggctgtgaaggcacaaacgcacctcttatttttttaccttcttcaagacgaatcgggatgttttgcaagttaggatctactgagcttaaccttcccgtttgagttaacgtttgattaaagcgggtatgaacttttccatcgctttcatgaataaccttttttaatccttcaatatacgtagactgtaattttcctagctgacggtattgtaaaatctctgggataatatcatggatactagctaattgctctaatacatcggctgatgtggaatagcctgtttttgttttctttatgactggaagctgcattttttcaaaaagaacaactcctagctgctttggcgaattaatattgaattcttgtccagcgtattcgtagattttcgcttcaattttttcaagctgctctcgaagatcttcgcccatttcatccaaacgcgcgcggtcaattttcaccccttgatattccatatcagcaaggacaatggcaagaggcatttcaagcttctcaaacagctcaaactgttcattttcaaccaattctttttctaacacttcttttaaataagctacggcggctgcttttcttataacatgctcagctagctgatcagcttccgcaatgcttcgcttagctccttttccatacacagcttcatctgattgcacttggtggtatccttttaattttgcaattgtcgctaggtcatcatttgcctcagcaggattcaagatgtaagaagcaatcattacatcatgttcaattcctttaatttcatgccccgcccattttaacgatacgatcgtacgcttcccattaaacaccgtcttttttacacgtccatcttctaaccatgctttaaatttagaagatgaaagagctgtatctttatcaataaaatagtggccatttttgttgctgattccaaaaccgagcagctgattgtgatggtagttttcttcatacccttctacgatcagagctgcttcgcttgttaacatatcatcgtgaacttcctgcgctatttcaaacgtcagttcttcaaaatctgcttcctcttctgctgattcaccaaatttagcaagcagagaattaaacccaagctctttaaataaagagacgacctttgaagattcaaacccgtcatactttgcatcttctactgatacttcaagaggcgcttcgcaataaatagttgcaagctttttactcatgatggctgattcacgattatcttccagcttttcttttaattttttaccgctgacttgatcgatagattccaatacattttcaaccgtttcaaactcttttaatagctttaaggctgttttttcgccgactcccggcacgcctgggatattatccgagctgtcccccataaggcctttcatatcaataatttgtgcagccgtaataccatatttttcatcaatggctgcaggcgtataggaatcgacatctgtaatcccttttctcgtaatatctacggttacatgttctgacacaagctgaagtaaatctttgtccccggaaatgacttttacggccattcctttttgttcagcttgttttgaaagtgtaccgataatatcatctgcttcataatcaggcagttcatagcgcttaatcccatatgcatctaataactcacgaataaagggaaactgctctgaaagttcaggaggcgtcttttgtctgcctcctttgtattctgtaaatgttttgtggcgaaacgttgttttccctgcatcaaatgccacaagtaaatgcgttggcttctcttcctctaagatacgtgtcagcattgtagtaaagccatatatggcatttgtatgtattcctttatcattgtttaaaagcggcaaagcaaaaaatgcacggtaggcaatactattcccgtcaattaatactagtttttgtgtcattcatgttcctccatttcgctctcttcttatcttacctttattttagcaaacaataagctttaaggacaaaaagtactcttgaattcaacgttttattttcatgtggtgataagatctgtacatcataaaataaaaacaccgcctagttattttaggcggtgtagcatgtgaatggatagaaattgtcaaaaagaatcggcgaaaatagcacggttaaagctattttcgccttacacattggctccttggatgaaggggtttccatgaaaaattgtatcaattaattattaagctacattaaataaattgtaaaaggaacgtaaacattttacatctgcggcaaatacttgtgcagcttcaccgaaaaagttgtccctttattgacttcacttttcacttcaatttcccctttatgagcttcaacaagatgtttaacaattgctaatccaagacctgttcctccggaattacggcttcttgctttatctactcgataaaagcgctcaaaaatacgtgaaatttcatgagaatcaataccgatacccgtatcttgaacatgaactgtaatcgtttcttcttcctcttcaagcgaaacgtgaacagttcctccaggcattgtatacataagcgcattgccgattaagttaacaaacacttgcataaggcgctgactgtcaccatcaatccacgcttcttcaggaagcgtatctaacgttagcgtgatttctttttcagtcgctcggtttgatagcactgtcgtcacttcgtaaagaagcgtattcaaatctactgaatgaatgcttagtttaaacccttgctgttcaactttagacaaatctaaaagatcttgaatcaagctctccatgcgctgactttccgttaaaatgatagatagaaactgccggcgcagctgtggatcttccatggcaccgtctaacaatgtctcactaaacccttttatagacgtaataggagtttttagttcatgagacacattcgctacaaagtcacggcgaacttgttctagtttttttagctcggtaatatcatggaaaacaagcacaatccctttccattcatcgtttaagccaataatcggcgcgccgtaaacatcaaaatatcttcgttcaatatttaaaggcagaaccacttgttttcgaacctttacttccgtcatgaatattttttccacaagcttaatgatttctttatgttcaaatacctcgtaatacaaatgataaaggaagtcatccggatgtatatgaaactgctctttataagctcgattcactaagtttatatagcctcgactatcgataagaagcatgccgcttcccatattttcaattagcgtgcgcagcctgtcctgctgcatttcttgattagtgatagactcttgcagattacgagcaagtgcgttaatagactgactcagcatccctgtttcatctacataatcttcatatgtacgagctttataattcccttttgcaagttccatagccaccttggttgccgattcaataggacgggtatagcgtcccataatctttacacctaagagtaagattacaatcaaagctagacctaagcttccaataagaaggccccaaatttgctgatttacttgttttaatgaatcaaacgatgtactcagcacaacaaatccctcttgcttaccttctataataagcgggataccatagtaatataagtcgtaatcttctttaatttgatcaaagctttttttactgtttaactgcttttttaatacttgttgaattacgatacttttttcgattctttgctgcttgctgcctggatttgagtcaactaatatttttccgtctttttgaacgatagtcgttcgtacacttaacgaatggctgattttatcaactttagattttaaagcaggacttgtgataccttcttcgctaatgtacatttctacaagctttgcctctttttccattcgctcttgaaacgtctgaaaataaaagtttttaaacaactgtcccagcagcaggccaagacctactaatacaataataataagtattaatagagccaaaagtagccttgaacgaaatttattcatctacctttggttcctccagcttatatcctaatcctctaatcgtttttatataaacaggttttcgcgtattgtgttcaattttctcacgcaaatggctgatgtgcacatctacaattcgcgtatctccggcaaaatcataattccacactgcacttagcagctgatcacgagttaatacccgtcctttgtattttgccaaatataataataactcaaattcttttggagtaagctcaagctgctctttattaaagtaggcctcataatgatctggaagaattttcaaatctccaatcatgatgcgctcgccatcttcctcttgttcattttcctgagcaataatttgtgttctgcgtaaaatggcttttacacgcgctactacttctcgaggactaaatggttttgtcatgtagtcatctgcgccaagctctaaccctaatactttgtcaaactcatcgtcttttgcagttaacattaaaataggcgtcatcactttttgctgacgaagctttttacaaacttcaattccatccatcttaggaagcatcaagtctaacacaattaaatccggttttccttctagtgccttgttgtatccttcttccccgtcttcagctgtttctactgtgaagccagcttgttgtaaattatattgtaataatgttgaaattgattgttcatcatctacgactaataatttcttactcatattaacgatataagcctccatctagttaaattaaaccgcagcttcatccaaatgatattattttctatttatcttctcttatcatacaatgttttagcctcgttctccaatacatttcaacattttcagaaaatatgaccaaacagtttcttctatatttataaatatttaaggcgttttaaaaattttcaaagtcgtgtgtctctactgatggaagtctaaacggcggatacacaagaaaccgcgccgttactactttctctttttgctcattgaccgcttccacctcaatcgtaacagttctagaagaaacatctacctctgtcacttcaaataaaaattcaatcgtgctataatgatgaatctttttggggaaggctaccgtatgttctgcaacgtggcttccaggtccgggcaaatactttgaaatggctgctgtcataataccggtaatcataatacttggcacaataggttttttaaaaggtgtctgagatgcgtaatcatgctgaatatataaagggttcgaatcatttgtcagtcctaagtacaataagatatctttatcttcaattcgttccgttagcgttaacttttctccaacttttatatcttcaatacttcggcctattttttgttttttacctaataccatcatcattccaccttttgtataaagtaatagcttttctttctccatatacaagaaaaattcgaggtttcccccgaattttccttgtgactattgtttgaatattgataaaaacctatactcaaacctattttattgtattaagctaatacacccatgacagttttgactgattttgctgattgatctaacgcagctttttcagaatcagtcagttctaattcaattacttgctcaattcctccagctcctaatacggttggaacacctaagtagatgccgttataaccatattcaccctctaagtaagcaatcgctggtaaaatacgacgctgatcttttaagatcgcttctgtcatttccactaaagaagcagcaggagcatagtacgcacttccgttgcctaataagttaacgatctcgccgccgcctttgcgtgttcgttcaacaattgcttcaaggcgcgcttttggaataagcgtttcaagaggaataccgccagcatatgagtagcgtacaagaggtaccatatcatcgccatgtccaccaagtacaaaacctgtgatatcttttactgaaatgtttaactcctgcgctacgaacgtacggaaacgtgcagaatctaatacgcctgattgaccgattacgcggtttttaggaaagccagattctttaaatactgtgtacgtcatagcatctaccgggtttgtcaacacgataatatgacagtttggcgagtatttaacaacttcttgagtaacagacttcatgattttttggttcgttgttactaaatcatcgcgactcatacctggcttacgcgcgataccagctgtaataatgacaatgtcagaatcagctgtgtcttcgtagttggctgttcctgtaatgttagcgtcaaagccttgtacaggacttgcttctaacatatccagcgctttacctttagctgggttttctaattgcggaatatcaactaatacaacatcagctaattctttttgaccaattaaaaaagcagttgtagctcccgtaaagcccgctccgataacagatacttttttacgcatatttgccattataattcctcccctaaatgaatagctattaaactgttacttgttttcctagattgctaattaattcatcagcaaactctgaacacttcacttctgttgcgccgtccattaaacgtgcgaaatcatatgttactacttttgaagcaattgttttttccattgatttcatgattaaatccgctgcttcattccagccaaggtgttcaagcattaacacacctgataataatacagaagatgggtttactttatctaaaccagcatatttaggtgctgtaccgtgagttgcttcaaagatagcatgtccagtttcgtagttgatatttgcccctggagcaattccgataccaccaacttgtgctgctaatgcatctgaaatgtaatctccatttaaattcattgttgctactacatcgaattcacgtggacgagttaaaatttgttgtaagaagatatctgcaattgaatctttcacaataatttttcctgctgcttccgcttctgcttgagctttgtttgcagcctgtgcaccttctttttcaacgatgcggtcatattgagcccaagtaaatactttatcgccgaattctttttcagctagctcatagccccaatttttaaatgcgccttctgtatatttcataatgttacctttgtgtacaagcgtcacagatttgcggccttgttcaattgcatagttgattgctgcacgcacaagacgctctgttccttcagaagaaataggcttaatacctaatccagaagtttcagggaaacggattttatttacgcctaattccgtttgtaggaatgaaacaagcttttgtacttcttcagaacccttcgcatattcaataccagcataaatatcttcagtattttcacggaagataaccatatctgtatcttcggggcgcttaattggagaaggtacgccgtcaaagtagcgaacaggacgtaagcatgtgaataagtctaattcttgacgcaatgccacgtttagagaacgaattccaccgcctactggtgttgttaatggtcctttgattgcaattatgtattcgcgaattgcatctaacgtttcttccggtaaccattcgccagtttgattaaatgctttttcacctgctaatacttctttccaaacgatttctttttcaccattgtatgcttttgcaaccgctgcttctaatacgcgagaagctgctgcccagatatccggaccaattccgtcaccttcgataaatggaataattgggttatttggtacgtttaacacgccgtttgctacagaaatttgttcaccttttgtcatgagaatgacctccttaaaaaatttgtctactttcacttatggaaaagtgctcaacgaacgtgagcaccttcgtcacattgtttagctgcgctcttcaagcggaatgtacgtttgttttccaggaccgatataatcagctcttggacgaatcaaacgattgtttgaatactgctctaaaatgtgagcaatccatcctgatacgcggcttacggcaaagatcggagtaaatagatcgtgatcaatccctaagctgtggtatacagaagctgaatagaaatcaacgtttggcggaagctttttctcgccggttacgatctcttcaattttcactgacatatcgtatagcgttgtatctcctgcttgtttggtaagtttttcagacatttctttcaagtgcttggcacgaggatcaccctgctgatacacacgatgtccaaatcccataatcttttcttttttcgcgagcttttcgcgaatataaggttccgcgttttcaactgtttgaatgtcagacaacattttcataacagcttcattcgctcccccgtgaagaggaccctttaacgctccaatagcggctgtaattcctgaataaatatcggataacgttgccacacagacacgagctgtaaaagttgaagcatttagctcatggtcagcgtgtaagacaagtgctttatcaaatgcctctacttggatatcagttggctcttcgccggttaacatatataaaaagttagcggcaatgctatagttttcgtttggttcaattggctctaatccgttacggactcttgaaaaagccgttaccaccgttggtaattgtgcttgcaaacgaacagctttgcgataatttgcttcttcatccattaaatcagcttcaggatcgtacaaccccaatagtgatacgactgttcttaaagctgccattggatgaacatctttaattggataagttttgaaatgatctaagacttcttggggtaatttagcgttttctgctagtaatctagaaaacacagataattcttctttgttaggtaattttccgtgccatagtaaatacaccacttcttcaaatgttgcataattcgctaaatcatcaatattgtagccttgatatgttaaagtgtcatcaataattgaacttactgctgacgttgtagcgactaccccttctagacctcgagttgctgtcataaatctccactcctttacagaaaaaattccccatacctttctgtgtaaaacgtgaaaaacaaaattgagcctatgctcaactagacattaaatgatatacgaagcgcctcttttgaatatatatcttggaagaacatttcttcaccccacgtaaagaaaatgcttacatttccatttgtttcaataacacacaaaatcaaaacatctgcatgtgtcattgctttgttacagccctataggtaaaacatacaattgtatgtaaaaagatgcggcctcaaaatatattataaacaattatctgacttttgtgaatcaaaagagagaagaaatttcaaaaaaattattattatacaaaaatttctacgaaaaaagttcagttaatttcataaataaataagcgattccagcaccgattaaaggacctactgctaccccttgaaacagcgccacagcaagaattgtgccaaaaactaaagcggtcgtaatatgcggatcatcttccaagagtgtaagtccatatttggcaataattgctacagcaattccggctcctagagcaatccaggcataagaagatttcacggcctctcctaattgtttgaatcctatgtctcctgttgcaattggcacaagaacggcaattgtaataaccgttactccaatattaattccttttgattgtagaaacggaaaaaccttaccgtctaacccgattaattttaaaataagtaaaaatgcaactgcaatgattaatgattgatttttagccactaatccaattacgagtaaaacagctaaaaaaagcatgggttgtgagaacattttactcatcctttcttttttcattgtgataaatctaaagcttattacgtaaatattttatgagtagctttttcttttgttgactatcgtttacaaggaggcctctatttattgtgtacaagcttcatttacatcgactatttcgcttagcttgtgtgttggtaattattgcagcatctatatttcttagttattatgtctcttctctcatatatccatttattatcgcctgctgcatcgctttttttataaatcctatggttaatctatttgaattgaagctgcgtttaccccgctacttagctgttatactgtcaatggttcttatcttctctcttttggccggacttattacgttacttatcacagaaatcattgcaggaagtacgtatttagcgaaagttgttcccacaaatttcaaagaagtggtcatatttattgaaaatattgctacagaacaaatacttccgttttatgaacgcattacttctatgtttaataacttaaataccggtcagcaagcaactattttatcgaacattaaaggggtaggcaaccatatcgctcaaacggtgggcgattttctgcaaaatgtattgcaaagcatcccagtacttttatccgtgttgcctaatgcagctactgtgattattttttcattactggctactttttttattagtaaagattggtacaagctgatggctaaaagcagcgtgtttattcctaaaaaagtaagggaaaatggacagacagttgttgtggagcttaaaaatgcactgtttggttttattaaagctcagcttacgcttatttcgattaccacaatcatcgttctttttggtttacttgttcttagggttgattatgctattacagtcgctttattgattggcttagtagatattcttccttacctcggaacaggactggtttttgttccttggatgatttatgcctttgcaacaaataacgtgtcatttgctgtagggctttcggtactatatgctgtagtacttgtgcagcgacaaattatggaaccaaaaattttgtcatcaagcattggtcttgatcctctcgctacattaattgctttatttgtaggatatcaattgattggatttttcggattaatagttggccctgttattcttgttattctaaaaacacttcatacaacgggggtttttaaagaaacgtggcagtttattataggaaaatgaaaaagtgtgtgaaagaagcttctttcacacactttctagttaacgaataatcgtcattcgattacgtccttgaaaaaatcttcttagccacgttaaaagaaaaggcttaacgattctgcgtgtaaacggcagtaaaaagataaagcctacaacatctgtcaaaaagcctggaaacagcagaaacagtccgccaaatagtacacacataccatcaaggatttcaccgcttggaacatgtccctggctcatctgacgctgtgccttttgaaaaagagatgttccttgttttttcgctagaaacgcaccaataaaactggtagcaataatgagtaaaaatgttgacattacaccaatgagatgacttgaataaatcaaaatcattacctcaacagcaggtacaataagaaggagcggaaggagcttcctcaccatcatcacctcttcgcttattgaattgcctaaacaaaaagagaaggattccccttctcttttttctatcatctacgtgttcttacagtacgcttgcgtgtccgttgtatacgacaccacgtgaagcatcaactgtaatatcttgatcttctgagaatacgcttgttgcgttttctacgcctacaatgacaggaatgcttaagtttaaccctactacagctgcatggcttgttagaccgccttcttctgtaataagagctcctgctttttcgattgcactgatcatatcgcgatctgtgctgtttgtaacaaggatagcaccttcagtcatttttgcatttgcttcttcagcagttttagcaataactactttgccaactgctgctttacgaccaattccttgtcctttagcaagaacgtcacctacaacttgaactttcattaagttcgttgcacctgattctccaactggaacaccagctgtaataaccactaagtcgccgtgtgctacaacgcctgtttttactgcgtcatttacagcgtgatctaacatatcgtcaattgtatttacgcgctcaccaacaactggtgtaacaccccatactagagacagacgacgtgcaacagaatcgtttgctgcaacagctacgattggagattgcggacgatatttagaaacgattttcgctgtataaccactttctgttggcgctacgatcgcactagcgtttaagttaagcgctgtgtgtacaacagattgtccaattgcatctgtaatagatgggccaacttgcttgctgcgctgttgtaaaatctcagagtagtttagagcttgctcagcacgagaagcgattgaatgcattgtttgtacagcttcaactgggtaagaacctgcagctgtttcaccagataacataattgcatctgtaccatcaaagatagcattggcaacgtcacttgcttccgcacgagtcgggcgcgggttgcgttgcattgaatcaagcatttgtgtagctgtaataactggtttgccaagcgcattacattgtttgattagatctttttgtactaatggtacttcttcagcaggaatttctactcctaagtcaccacgagcaaccattaaaccgtctgaaacttcaagaatttccttgatgttatctacgccttcttggttttcgatttttgagatgatttgaatgtgagctgcattgtgtttttctagtagttcacgaatttctaatacatcagatgctcgacgcacaaaagaagcggcgataaaatcaatgccttgttcgataccgaatacaatatcgcttgcatctttttcagtgataccaggaaggtttacacttacgtttggcacgtttacaccttttttattttttaatgtaccagggttaagtacttttgttttgatttcaccatcaattttattgatgtctagtacttcaagaccgattaaaccgtcatctaaaaggatttttgatcctacgtgtacgtcatcgattagacctggatatgtaattgagaatttttcagttgttcccactacttctgtcatagaaacaatgatttcagagccttcttctaactcaattgcaccattttccattgtgtttgtacgaatttcaggtccttttgtatcaagtaagatacctactgttttacctgtttgtttcgcagcttcacgaatgttaacaatacgtgcaccgtgctcttcaaagtcaccgtgagagaagtttagacgacaaacgtttaagcctgagttaattagttcaactaatttttctacactttcactcgctggtccaatagtacatacaattttagttttacgcattcaaatttcctcctatatatttactatttactctttagatagggcaaatagctatttcttttactaaccttgtactagcaggctgtgaacaaatattttgttgccctgacttgttcaccttgctttacgtgtaacttatgaaatacctacgtagcgttgaatcaaatagcaaacaaatacacagcactttaacgatgaatttcttcatcgtttgcttcttgttttactattccctgcaattcatacagcaatacttgctgcctaacttgtcttatgtatctcacgttttggagaaaagacaaacgctcgcacagctgctaataaccataggaaatttttaaaaaacactctttttctacttttacttaaaggtttttgctgtctataaaataccacgaagaacttgtaaacacaatagagaagggctatacaaaccgcacaaaaacgcgcacccttatttttcaagagtgcacgtttctttattttatagtaatggcatcgttttcagctgcaaattgtccgatttttttgtattttaaataacgctcttccactagctcttcttttgataaattcatcagctcttttaatgatttcttgataatgccctccatgtatccagcttgtgcatcgatatctcggtgagctccgccttttacctctgaaaccatttcatctacaatacccagttctttcaaatctggtgctgtaatcttcatcgtttcagcagcttttttcgcaagagaagaatctttccaaagaatggctgccgctccttctggagaaataactgaatacgtcgagttctcaagcatatgaaggtgatttcctaaacctaatgccaaggctcccccgcttcctccttctccaattacaatgcaaataacaggtacagttaagccagccatttcgaaaaggtttttcgcaatagcttcgctttgtccgcgctcttctgccgcttttcctggataagctccttttgtatcaataaagcaaataattgggcggttaaatttctccgcttgcttcattagacgcagtgctttacggtagccttcaggatgaggcataccaaaattacggcgaatattttcttttgtatctttacctctctgatgtccaatcacggtaacaggcacgccattaaacttggcaattcctcctacgattgcttcatcatctccataaaaacgatctccatgacactctaaaaagtttgtaaacaagcgagaaatataatcgagtgttgtaggacgctcaggatgacgagcaatttgaacacggttccatgggcttagatgattgtaaatatcgttttctactttttctaagcgattttctaacttatcaatttcgctagataaatccacttctgtatttttagcaaactctttaagctctgcaatcttgtttcgcaactcaacaactggacgttcaaattctaattcgcttaccactcgatgtcacctcctgctacgtgtatatctaaaatagttgttaacgtttcttttaaatcatgacggtcaataactccgtctagctgaccatgcttcaacagaaattccgacgtctgaaaatcttctggaagctcttctctaattgtttgttcaataatacgtcttccagcaaagccaattaacgcgcccggctcggctaaattataatcacctaacgaagcaaagcttgctgacacgcctcctgtagtaggatgtgtcataatcgaaatgattaatccgccttcatcactgaacattttaagagctgcgctagttttagccatttgcatcaagctcagaacaccttcttgcatacgtgcaccgcctgaagctgtgaaaataaggaatggaacatgcatttccttcgctttttcaatggcgcgagtaattttctcgccgactacagatcccatgcttcccatacggaagtgtgaatccataacagcaactactactttaattccttcaatatctccttcacccgtaacaatcgcttcacttaaattagttttctcacgatctttttcgagtttttcaagataatcagggaacccaagaggattttctgacgtcatatctttgtcgtattcaacaaacgttccgctgtcgattaaactttcgatacgctctggtgctgccatttgatgatgatatccacagtttaagcatacttttaagtttttatttaactctttcgtatacattatttttttacactttttacacttggtcataattccttcaggtacatcttgtctcatatgctcagaaggaatcgtagcatattttcgtttttttggagtttttgtgttttttgtaaataaatctcgtaacaaggtgtaacctccttttggttctttctttatcataagaacctttattcttcctcttcttctactatttacaagttgtgaaaatccgcctcaaatacaaatcaagtgacggatagacaaaaattggacgaattgttcgcttcactttattagttgctatttactttactagatgactgtttgattttgtgtagaaagatggcatgtctctttcgacaaattccttctttcacacttgtttgtagcactgatggtgaagatttaatacagctgcttcatcttttttagctaacgcctctactaattcacttatcagagtgtcgcttggcgctgagttttgttgaaaagtttgagaaaagcggcaaataatcagccagattcggtgtaatagccgattaggctgcaaagaaaacaaatagtcaaacaagttcttcaaacaatcgtcattctgcttttgaattgctttcgaaacattgatttcgtcctgttccgctaaaacaaaatacaaacagctcttttcaagaatatatctcgtctgaattaaatctgattttgttttaccgtcttgtactaaaaaagtagctaataaatcaataaattgatgatcccctacttctttaataaacgtaccttcacctcttctagtttcaatcaacccaattagctctaacgctctgagcgcttctcgaacggaagaacgtcctgcgtctaaccgttcagaaagctctcgttctgacgggattttatcccccgtagttaaacgatcggcttccattagctggcgaatttgttttagaacttctacatatacttttgaacgttcattcttcaagtttactaccactcactttacattactttaacaggcatgcttgaagcatcatgcctgtcaaagaacagttgatgtaaccttattcaataatcgctaagcgacgtgtattttcagctacggcttctggctttacttttattcgggcaacgcctgtttccatagctgcttttgcaacagcggcggctactgccggagccactcgtgcatcaaatggacctggaatcacatagtctgtattcaagtcctcttccgtaattaaattagcaatggcctcaactgcagccattttcattttttcattaatatgagtagcacgtacatctagtgcacctcggaatatccccggaaacgctaagacattgttcacttgattaggaaaatcagaacgtccggtgccgattactttcgcgccagcctttttagcttcttctggcataatttcaggcaccggatttgccattgcaaaaatgattgggtctggattcatctttccaatcatctccggtgtgagtgctccttcaaccgaaactccaataaatacgtcagcttcttctaacgcatcagctaacgtaccttctactttgcttcgatttgtataggctgcaacttcatcttttatacggttcatgccgtgaggacgcttgtcataaatcgttcctttggaatcacacataatgatatcgcgcactccatagctgtataataatttaataatagcaatgccagcagctcctgctccattcgctaccactttgatttgtgacatttttcttcctgtcagctttagggcattaagaaggcccgctaccgtaacaatagccgtcccatgctgatcatcatgaaaaaccgggatatttgtttcctttttcaaccgctcttcaatttcaaaacagttaggagccgcaatatcttctaaattaacgcctccaaaagtaggttctagcaatttaacagtttctataattttgtccacatctgtcgtgtttaaacaaattgggaatgcatctacgccggcaaaacttttaaaaaggacagctttcccttccattactggcagagcagcttcaggacctatattgcccaagcccaatacggcagtgccatcagatacaacagctaccatatttcctttcatcgtatattcatatacattgtttacatcatcatatatttctttgcaaggttctgctacaccaggggaataagcaaggcttaaatcctctgcgtttcgaacaggaattttggactttgattctagtttacctttgttaatgcggtgcatatgcaatgcttcttcacgtaaagacaatgaatttcactcccaataaacaaaatgataacaaatactgcgcctgaaccatgttctttctcacactcatatgatgttataaatccaattgcatttcatttcaagaaaaacgcatctaattcgtatatttcataaaaaaaggtggtcagaccacttttttaactattttaccatataacatcacatgaaatctgtaaagactatatcttcttgaacacaacgtgcttctctcctagcattgcttttaaagtttttattaactcgtcgcttcgttcaatagaatagtgaacgggaagcttgaccaattgacgttctgcctcataataaattttcacggggattttccctctatgagactgaaaatgctggtaaatagtatgaagcagcttttctgtaccttgctttgtttctatacgtaagtataattcttctgacggtagtttttgaaccgcctcgctagcagcttcagcacgttgacaaacaatttgctgctgcccatttctttcatctatctttccttgtatcagtaaaaccttaccttgttcaaacagcagatgattctgctcaaatacgcggggaaacgcaacaacttctccttctccactttcatccgtgatgcgtaaaaaggccatttgctctccttttttcgttcgaatgacgcgaattcccaacacaaatactaaaagagagatcgcttttcctgaagcgtattctttcatatcgtgaagagaaacaacagaataaaaggaattcagtgcttcatactgagaagcagggtggcttgataaataaaaacctagcatatctttttcatactgaagccgatcttctattttcagttcctctttttccatatatttaggctttaacgaaaattcagctccaaatccaaaatcatcatctgggagtaccaagcttgcatgttcaaatgctacatcaatcgtcgctaataaagtagctcgattttctccaaactcatcaaagcctccagacagaatcaaagcttcaagcgcctttttattcacggctttttgtgaaacacgggcacaaaaatcaaataagtcttcaaatctttttttctttcgctcttctgttatttcctgcatagctgctgcgccaatatgtttaatcgctgcaaggctataccttatactttcaccttctacgttaaacgaatacatgctcttgttaatagaaggtgggagaacttgtattttttttctttttagttcattaatatattgagcaattttcccttcgtttccaataacgctcgttagtaaagctgaaaagaactgtagcgggtaatgtgctttcaaataagctaactgataggctaccatactgtaagcaacggcatgacttcggttgaagccataatcagcaaaacgcacaataaggtcatacactcgattagcaacggataggtcatatcctttcttcttgcttccttggataaaatgagctcgttcacgatccagcactgctcgttcttttttactaactgcccttctcaacaaatctgcttctccaagagaaaaaccggccatttttgaagcaatctgcataatttgctcttgatacacgataacgccgtgcgtggattgtaaaatgtctttaagcgtaggatgatcatatattaccttctccactccatgcttgcgcttaatataggttggaatattttccatcggaccaggtctatacagcgcgttaactgctacaatatcttctagctctgtaggttttaattgctgaagcactcttctcattccatctgactctagctgaaaaataccggtcgtatcccctttactcagcagttcaaaagttttctgatcgttaaacggtatatgagacagtgacagctttcgattcatgtcccgctcaattttctttaaaatatgatctaaaatggttaagttgcgcaaacctaaaaagtccattttcaaaagcccaacatcttgcagagcttccattggatattgagtcagatatacatcatcatgtccttcttgtacagctacagattgcgtcagcggcttctcactaatcacaacgcctgctgcatgcgtagaagtatgccttggcagtccttctatcttcatggcaatgttgtaccattgttttctggcttcactttcagataaatagtcttgaagaactcttgaatcacgaagagcgctttttaacgttgtacctggtttagttggaatcgctttggacattttgtttagcgcctcttgatcaaattccatcactctccctacatcacgtacggctgctttagctgctaatgttccaaatgtaatgatttgagctacgtgcagcgctccatatttttgagccacatactgaatgacttgatctcgtttgttatcaggaaaatcaatatcaatatcaggcatcgaaatacgttcagggtttaaaaagcgctcaaataaaagctgatgctgaattggatcaacatttgtaattcgtaaggcgtatgaaaccagtgagcctgccgctgaaccccggcctgggcccgttaaaataccgtgttcatgagcataattcataaaatcccatacgataagaaagtaatcactaaagcgcatattttcaataatgttcagctcataatccaagcgtgcctcgtattgttccgtgatcacttgaactctttcttgcaatcctttttcgcagagagtgcgcaagtaggttgatgatgtaacagacgggggaacaggatattttggaatggacattacgcctagagaaatttcgagctcgcatcgtcttgcgatttttatactttcttctattaaaaaatgctggtcatgaaagagatcttccatttcatcaggtgatttgaaatagtactcgctgctcttacttttcatctcttcatcgctatgtaatttctctccgtctcgaatagctgctaaacactcatacgcatcctgatcttctttttttaaatatttcacttgattcgtcgcaacaagcgggatattttcttcagcagcaagctccgttaactgctgatttataaaagcttcatcctgtccgtggcgctgtatcgatatatacaaagactgcgaatatacttttttaaagaattgaaggactcgcttggcatcttgaagtttgttttctgctagcagggtttcaatctctccagttacaccgggtgtaatagcaatcaacccgccgctgtaatgatggagccattttttatttacaccgtgtttttccttggtttgaactaaactgcttagttttaatagattttcatatcccttatcattttccgctaacaaaactaaagggtatgctcgctcgctttcttcatgttctaggattgataatgtgagcccaataattggcttgattcccgctttcacgcaggctttataaaaaggaatgactccgtacatcacgttttcatcagtcaaagcaatcgcttcatagttcattttcttagctgtttctacaagttcatgaatacgaacggaactgcttagtaagctataagaactttgaagctgcaagtgaacaaaaggcacaggacttcccacctttctttaattctttattcttattataaattttgttgccggcgtagacaaattacataactctgagcgtttgtccatatatatgtaggaagcgtgattcattgataaactagtaaaggaggacacgtcatgacaaaagagccttttatgtctcttttcatttggagttacttcacttcattaggtattattttaggcggttcattaattggagcatttgcgggatttttaattggaaaatctcctttatacgtcatgcataccctcagcaatagtttgaaaatctgggcaattgtcggagcaattggaggaacatttgatacgttttacagctttgagcgaggactcttcgaaggagccacaaaagatgtattcaaacaaatccttttaattctatccgctatgggaggagctcagaccggggctcttatcatcaagtggttaactcaggagcattttgtatgagggtacccagcgagcgaatgttcaagcgctccgactggcagcgtttttttgccggtatagtcattggagcaattgttagctggggggtgtttttaacgatttatggcgtttcaagagatagagagctagaagaagttcgaattgctaatgataagctaaaaaaagcaaatttgcaaattagcgcatggcaagaagatgtaaaagcattaaacaaggaaatgaagcagcatttgattattcagaatgtgaaagtaaaattagtaaacggcaatcgttataaagtaaactctgtggttgaatacaatattcaaaaaagcgtcgacgaagaagcacagcacttaattgcccaagatattgaaagtgcgtatcgaagcagggatatcttaaaaaaagcaattgaaaataaaaaatacgaattcgataaaacgatttatgaagttgaagttcatcaaatttatttttatacaacgctttcgattgaagttcgaattaaaaagatggaaaaagtactataaaaagccgctgatttaaaatcaacggcttattttacagattactcctgactacagagctcttctaaatcaagtagtaaaggctctacttcttcccatgaataaatggaagcgccggacgcaagaggatggcctcctccgttgtattttctagcaattgtattaatgacaagctcttttgaacgaaggcgaacacgaatttgattttcttcctccacaaaaaacacccacgtttttactccatcaatttgccctaacgaaccgactagctgagaggcatcagctggtgtcacatcatattttcgaagaatttcatttggaattttcatatgagcaactcctgctggagacatcgtaaagttttgcagcacatatccgtgtaagtgagcgacgttttcttttgttttgtataactgatcatacacatctttaaaattgaaaccatattgaatcaattcacttgcatagcaaaacgttttcggctttgtatttggaaataaaaatcgacccgtatctccgacgataccgctgaagatcagctttgctccttcatcattcagagataatcccttttcttttccttccaagtaaaattcataaatcatttcgcttgttgaagaagcagacgtctcaacccaaagcaaatcaccgtaaggagtttggtttggatggtgatcaattttaatgaccatttttccatttacgtagcgctgatctgacactcgtgcttcattcgccgtatcacaaacgatgacaagcgcatcctcgtaggtgtcatcagcgatgtcatccatacggtataaaaattttaatgactccgcttcttctcccgttacgtataccttcttctccggaaaagatgtttttaacaattcagctaatccgcactgagatccgtatgcatctggatctggacgaatgtgccggtgaataatgatggtgtcaaactgcttaatagcttctaatatttgtgctttcattttctctctcctgtcaatactgttcttgttttatgtacgcaccacatgcacttacatttccacagcgctgtatccatattatttattaaatcatatctcttctcttttttaaaagaagaatcaatcaatagtagaattttctgtcatcgacctgtaaaataatagatactactgtaagcactttcaaaactacgcattactaacatctagaaacattacgggtagaaatacacccgactggaggggcgtctgtgccattttttatgattttaatcgttgtgtcctttgttttctacatgtatttaaaagtaaaatacgtacgttcgaaacgcccaatggaacgaaagtggatttccgctaagtcgagtatttgtcttggctcttttgtattattttttggaatcaatcaatggtttatttacgaaacaagcctttcgcttatcattggcatactatttgtattattcggttcaggcagcatattagcaggtatcaaagcttacaagtactatcagccttatgcaataaaagaagctgatcaaatgtaaaagaagctgcagagcagcttctttttttatactctttccagcaactgagccatcatcatcgctttccctactacaaccccagcattgtagacttctacatccagtttagcaaacttccggccaagttctaatagcttaggacgaatttcaattacgctttcaatttgaactggcttaataaaataaacggtgatgttttcaataaccaaatcaccttttttatataagcgaagaacacgattggcggcttccgttacaatagtagtgaaaactccgtatgaaatagtccccatgtaattcgtcatttgcggcgttacttcacagcgatacaccggtgcttcttttgtctcttgtacatccataaattgattggttacaatgtcgtcaatggtttctcctacctgcggttgacgctgaatcatttgcagcgcctttaaaacatcttgacggctgataatgccctctagccggtggtaatcatccactacaggcagcacttcaatcccttcccataccatcatatgcgcagaagaagcgaccgatgttttcccgtgaaccgtcatcggatttttcgtcattactttttcaattgaagtagaaaggtcatatccaataacatcttttgaggtgaccataccgtgaactttcatatgctgatccactacaggaaaacgactgtggtgagtcttatcgttacattcatgccatttttcaatcgtatcggttaactgcaagctaaccgcttcagaaacaggtgttaaaatatcttctacaagcacaatttctttttttatcagctgatcataaatagcacgattaatcatcgttgcaactgtaaaggtatcatagctcgttgaaataataggaagcttaagatcatccgcaagcttcttaacccattcttccgtatcaaagccgcccgtaattaacacggctgctcctgcttcaagagctaattcatgagcatttactcgatttcctacgataagaaggtttccagcctcggtatatctcatcatagcatcaagcttcatcgctccaataacaaatttgtttaacgttttatgcaaaccttcacgtccgcccagcacttgtccatccacgatgtttactacttcagcaaacgtgagcttttcaatgttttctttcttctttcgttcaattcgaatggtcccaactcgttcaatcgttgaaacatatcctttattctccgcgtcttttattgctcggtacgccgtgccttcactgacattcagttctttggcaatttggcgcactgaaattttttcaccaattggaagcgaatcgatatactgtaaaatttgctcatgttttgtcgccacgtgtacttcacccttctaaaacgtttttacgtttcatatgtcttttcttttattatacgggggaagtgaaatgtattcaatctaacctctttgacgcaaaggctttctcgcattatttttttgaatacctgcctttttgcgacgcggtgcataaagtagtgatgacaagttgcctccggctacaaaaagagcaaaggtaagccagcttatactaaaaagtccttgcaaactcgaagttgttagcactaagtgcggcattgcatagtaaagcatcactccgcataataaaagcgataaaataactcgatttttttccatagttctccctccttattattactatcgtatgcagggaagtaaaaaaagcagaacgtttctttacaaataaaaagagattaagacataactgcatcgattcaatctaaagacgaacaaatgtgagacatgagctgaaccgcttgtgacaccgcagttgatttctgtgcaagacttcgctttccgcgggcggccggtgagcctcctcgtcgcttgcactcctgcggggtctcacctattctgcttttcccgcaggagtcttcgtcttgtcctccaatcaacagctagaagccgctacatatatgaaacctacgttcaccataataataataaaaaaagaacgagtaatcgatattatcgattactcgttcttttttaactttaactgaaatcgttttgtcccagcctctatttataattaaagatccaatccttctccaacttttaatacttttccttcaataccagataaagactcaacaaattgatgaggatcttgcttaattacaggaaatgtatcgtagtgaattggcacaacaaggtttgcctgcacccattccgctgcgatagccgcatcttcaggtcccattgtaaagttatctccaattggaagaaatgctacgtcaggctcatggcgaccaattaactttaaatcagaaaataaagccgtatctccagcatgataaattgtctttccttcaatcgttaaaagcaaaccagccggcattcctgtataaataattttctcattattttctgtataacttgaaccgtggaaagcttgtgtcaattttaccgtgccaaaatcaaatgtataggatccgcctatgctcattggatgtacgtttaagccttgccagctaagatatgtagctaattctgctactgccacgacaagtgcaccgctccgcttagcaatttcaaccgtgtctcctacatgatcattatggccatgagtcagtaaaatcacatctgcttttacatcttcagcatttaaatctgttaattcatttccagtgataaacgggtcaattaaaattgtttttccttttgtttcaattttaacaatagaatgtccatgataagaaacgtgcatcatttattctctccttttacactaaccttttctatattctacccgtccgttttgtttacaaaacaagtgaatacgcggctatcatatcacaaactgcgcaaaaccatgccttattatgcttgctctaataaagttgttgcatcagcgtaagtgagaccgtgtgcatctgccacagccgcgtaagtgacaaacccgtttagggtgttgatgccttgaagaagggaagggttttttaagcacgcttttttatatccctgacttgctatttgcagagcataaggcaccgttacgttggtcagtgctaaggtcgacgtgcggggaacagctcctggcatattagcaacagcataatgcaagacctcatgcttcgaataagtcgggttatcgtgagtggtaatgcgatcagttgtttcaaaaatccccccttgatcaatagcaatatcaactacaacggacccttttgacatcgtttgaatcatttcctcggtgacaagctttggtgctttagctcccggtatgagaaccgctcctatcactaaatctgactcttttacagattgtgcgatattgtagtgatttgacattaatgtcgtcacttctttaccaaataaatcatcaagctggcgaaggcgatcagcgtttaaatcaattattgtaacatcagcccctaatccgaccgcaattttagcagcgttggtccctgctactcctcctccaataattgttacttttcctctttgcacgcctggaactccacttaataaaatccctttgccacctttggttttctccaaaaattgagctccgatctgagaagacattcttcctgcaacttcgctcatcggcgttaacagaggcaagcttttgtttggaagctgtacagtttcataagcgatgcctaccacctttttatcgatcaatgctttcgttaatgcttcttcagctgccaaatgtaaatacgtaaataaaataagtccttcacgaaaatatccgtattcttctgaaatcggttcttttactttcataaccatttcagcatcccatgcttcttttgcagtatttacgatagaagctcctgcatttgtgtaatcttcatcatggaatccagagccttctcctgcctgtgtttcaatatatacatcatgcccactgttaactaaagctgtaacaccagctggagtaatagccacgcgattttcattgttttttacttctttcggcactccaattttcacctttatccctcttttcttatatcagtgattaactgaaaaaagaacgccacaccaaatcctttagaaaaccggatttactatgacgttacctttcgatagagctcagcataatcctgcttttcttagtctatatacagtatatgcatctagttattcatatagttcgttatcactctgtgcttctggattttcaactacagaagccatagcatcgccaatgacgccgcttgaataagaatccattagctgtcttgatgtctctttttctccttcaaaatcgtattcatatacatgctgcggatgttttttgtctttcatatgtcacttctcctttttcactctattttctttacgaatgtgaactttacttcataatcccttacatgatcttttctattttcttcttaaatgctctagttataccatttatctcacatcaaaaaacgcccgcagatttttctgcggacgttttgataacttttttatatcgatgttttttcgtgcaattcatctttagctagctgaattgctttttttacttgttcaaatcctgttcctcccgcgctattgcggcgattaacagctgtttttggacttaatacatgatagatgtcttcctcgaataaatctgacgcttccttatattgctcaagcggcaaatccattaggtagatatttttctgaatacaaacgagaaccagtttcccaaccacttcatgtgcttcacgaaacggcataccttttgaagcaagatagtcagctaactccgttgcatttgaaaaatcttgttttgtagctttttccataacatttgtttttactgtcattgtttcgatcatgccagcaaaaatggtcaaacatccttcaattgttgtaaccgtatcgaacatgccttctttatcttcttgtaagtctttgttgtatgttaaaggcgtgccttttaacacagtcaataagctaaataaatgaccatatactcgtcctgttttaccacgaattaactccgccatatcaggatttttcttttgaggcataatactgctgcccgttgcgtacgtatcatccatttcaataaattgaaattcttgactagaccataaaattaactcttcacaaaaacgagataaatgcatcattaaaatagaactgttacttaaaaactctaagataaagtcacgatcgctgacagcatccatactattttgataaatcccattaaagcctagaagctccgcgctatagtgacgatcaattgggaatgttgtaccagctaaagctcctgctcctaaaggagataaatcaatacgcttcagcgattccgcataacgttcagcatcgcgcttgaacattgaaacataagccattaaatgatgagcaaaagaaaccggctgtgcgcgctgcaaatgtgtgtagcctggaaaaatggtttcaacatgctgatctgcttttgtaagcaatacatcttctagattttcaatcagccctacaatttgctgaacatgcttttttaaatataagtgcatatctgtagcaacttgatcattacggcttcgacccgtatgaagctttccgccaaccggaccaatttcatcaattaataacttttctaaattcaaatgaatatcttcatattgagcagaaaatgttaattctttcttcttagctttttcgagcagtgtttgaaggccttttttaatttgtgacgcttcatctccagaaagaatactgcatttctcaagcattgttacatgtgctaaactgccttcaatatcttcttctacaagatgctgatcaaatgaaatcgacgcaccgaactcgtcaatccattgttcagggcgtttcgtaaaacgccctccccaaagtttggtcataccgttgtcaccttcttttgatttaccatgctgctcacttgtgttggaagtccccataatgagatgaaaccaactgctgcattgtgatcaaattcatcttcttttgtatatgttgcaagtttttcattgtataaagaattaggagatttacgtccctctacgatagcatgccctttaaatagttttactctcactgttccgttcacatattgctgcgtatcttttaagaatgcaagcagtgaatttgttaatggagagaaccataaaccttcatagataacttctgttaattttttctcaatcactggcttgaagtgcgctacttctttcactaatgttaaatcttcaagctctttgtgtgctttaattaatgtcatagcagctggacactcatatacttcacgtgatttaattcccacaaggcggttttctacatgatcaatacgtccgactccgtgcttacctgcaatttcgttcaattctagaattaactgagctagcgtgtaagattggccgtttaatgatactggaacgccttcaacgaattcaatttccactacatccgctgtgtccggagtgttttcaagagaagccgttaggtcatatgcttcttcaggtggagctgcccaaggatcttcaagaacgccacactcgttacttcttccccataagttttggtcaattgaaaatgggctgtctaagttaattggaattggaatattcttttcttttgcatactcaatttcttcttcacgagaccatttccagtcacgaacaggagctaaaacttctaagtgtggatttaatgctttaattgatacttcgaaacgcacttggtcatttccttttcccgtacatccatgtgcgacagctactgcattttcttgttctgctacttctacaagctttttagcgattagcggtctagatagtgcagatactaatggatattttccttcatataatgtgtgtgcttgaagtgctgctaacgcaaatgtattggcatattcttcttttgcatcaatcacatatgatgataccgctccaactgttaaggctttttctttaacgaattttaaatcttttccttcgcctacatctaaacaacaagctaccacatcgtaccctttttcctgtaaccatttaattgcaactgacgtatctaaacctccggaatatgctaaaacaact

SEQ ID NO: 25 - DNA, 65725 bp, Priestia aryabhattai
  source 1..65725: mol_type = genomic DNA
ttaatactaaaatgattgatccgataatagcaggaataatagcaaatccacctacaactggtccgaagcttccaaagatagatgaacctaaccaagaaccgataaaaccggcaataatgttaccaataatacctcccggaacgtctcttcccgtaattaatccggcaagccacccaataataccacctacaataagtgcccataaaaatgacataaatatcatcctcctttttaatgatgtattgcttatataggttaataccccacttaaaagaaaactattcacggaatagcaaaaaaaataaaaaaaacttgtaaaaggatttaagaactgcgatagagtcatagaaaatagactaactagtatataatagaaaaaggaacatagtttagaagagaagggagacataaagtgaaaataaaaaatcaaagcgaggtagtagaacagcacttgattcagcactggatgtattttcagcatacgaagaaatctgtgaaagtggatacgtcagaaattaaatggatttctgcatctccttacaatcgggggatatatgcaggaacccgtcacattgagcccgcgttaggaatatgctctccggaaggggaggaacctctatggattgtcggtccaacttcatatgataaccttgggccggttcttcataaaaatggatttgttccttatgaaaaatggatcggaatgattcagcacattcaagaaaaagaatacatacatacatacaggagtaaaagggtttcaatgtaagcgagtgcacacagaagcagaattgaaagaatggatcacggtatacatagacggctatcaaaaaccaaaagaatatcaagctgactttcttgaaaggtttagggagcttatgcagcacgctgaccaatatcagttatatctgggtctttatcacaaccggccagctgtagctgggtctctctttttttatgacggtacagcgggtttgtattgtatcactacagctagacatatgaggagaaaaggcctggctaccgcatatttgaaggaagttcttactgaagcaaaaaaacaggcggatacgtgtattttgcatgctacaagtgcaggaaagccagcctatgaaaaacttggttttacagcggttaacgaatttgatgtatacagatggaaaaataggaatggaacaaaatgtgctgcagttcacgaaaaaagagacaaaattcgacaaaattttaaaaaagtgtagcttccatttcgtttttggtgtatcctaggacaaagcagcagcatgagctagtgttgtacatagaacacagataaaaggagtcattatgaaacatttttttaaaacgagcacgttttggataggtttggttattggaatcgcgctcacatttgggggatattttactgttactagtatttatgattattatttaggacgagaacagctgaaagtattgactgcctctcagaaaaaccttcaaactgcttttaaagagtataatcagcttatgaccgaaaaaaaaaccaaaaagcaatttatcaatgaactcgatgatatttcaaatactataaactatgaatataatgaattagcttcccttgatcctacggtgaaaacgatgtataagcatacgggcgtcatcgatgatatggaactgatgattgataatatcgatagcatttatgaattaacgatgaatgatcataaagacgcaacaaaaccgcttcaaacctacgtatctgatttaatggaatatgtagaaaaagatatgaaaaaagaaataagcatgctaagtaaatagaacaaaacagctgtctaaacaaataggcagctgtttttttgttgattataaaaggaatcttttcgttgcaggcgaaagagtatactatgcacccactcacttacgtgcaccacgttcacaaaaagggaggacatagtatgaaaaaagtggtggttatcctatttagtttgttttcattagccgcatgtcaggttcctacagctgaaacgcttgaagatccttatccacccgctataaaaataatagccgaaggcaaagaagccatcatcaagcctttatttttttgctggaccgaatgtgaagctgattttggcgaacgaaaaaattttagacaaattgttatgaaagatagtattcccgtctctcaaggtggtcaagtgtccattgaaatagatggtaaaaaacctaatgccctttattacaaacaaattcgtaatcagtctatttatgaaaacatagtagaaaaaaaggacataaaaaaaacatctgctattaccgtagattctgcctctcgcagtgatcggtatatactcgtagcggactggaaagataagaacgagaaaaagttaatcgggcgtgtctactacaccccagtaaaatttgaaacgccatagatatggctctctatgcggtaatagagagccatatgcttaactaatagaattaagtgcttgtgcaagagaagaagtagttttaacacgttcaaatgaaagccctaagcgaattgcagtttgagaaatttccggtcgaattccagataaaattgtttgcacaccaattaaacgaagagcttttaccaaattaaaaatctcttgtgccatcatcgtatcaatcgtagctacaccgagcaggtcaatacataaatgttcaacgcctttttccgagcattgctgaagcgtgttttctaagataaactgacttttgaccgttccaatatcccccacaagaggcaaaagtgcaactttgttttgaagcatgatgacaggagaacttaattcattaattaactctttctgagcgttcagctgttcttgcgtatttttatgatattcttgaataaagatataaacggatagatcaaaagctttaacaataatgtcataccacataaatatcttatctacgcttacctcttccgaatgcaaagagataaatttttttaagtaatcaacggcaattttttgtgaattaaaatattctcgcacaataaagtggagaggcgtacttaaatgctttggatcacgcgctagttctatcgaccactgctgaaaatccgaaaaaaaatactcctcatcctttataaatacgtcaaataaatgctggaaataatcttgattttgctgcttcagttctttcacaattgctggatttttactcgaatagacagagaactcattttcatcgtcgagctgattgtaccagtcttcagttaattgaagagaatgttctttaaaaaaatgatataagtcctgatttttatgcatgaagactctccttacaaatgtatagtctaattgatttataaataaaggcataaaagcatcccctgatctagagtgaggatgcttataaataaatccattatgaagcgcatttgttttcctatacgccttgttttccctaactatatactctcaaaccaaatttattaaaaaataaacatttttcagctagaatattcatgcattttaactatttttcataaagaaccacttcttgtgcttatagctttagctttggtaaggcatctttaatgctttgatagactaaaataaaggacatatcatcttctatagtgctcatatgtatggccatgttaggagaaattcctgttaagacaagctgagttcccataagcttgagccaattgtaaatattaagaatatcacggccgaatgaatcgttaaattgcgctagccctgagacgtctaggattaaataacgatctttgctggttgtgttacgcgaggtgaagctattaaatagcatttctatacgccgttcgtttaacgttccgattaatggaagaacagagattccttcctctattggcacgataggggtggatagcctttccacttcttccaaggattgctgaagctgttcctgggctgtaatttctattgtcacgtctttttgaacaccgataaagtagtatttgtcttcttctatatatgtcgggtcaatcgttagctgattatgaaagaaagagccgtcttttggataattaacgagcgtaacagagactgaatgattgtggctgatagcgctgcgaatttcatcaacgtggtgcgggtttgtaagaggaccttgtagaaaacggcaattttctcctaatacttcttcttccttatagacggtcataagggaaaacccttgattgaggtaaataattgggttatcaggcaaagaagagtctgtcacgataataccagattgtgagctatgaagagctttatttaaaatggaccattttgaatcttgagcttcaagtgtagtcaatgcattcccttattccttggaattttcataaaaatattgtgacataaacacgtcaaaaaaacaattttcgacgcatttgttcctagagaaagaatgaagataaggaaaaatatgttataatgggttcaggtgcaaggggagtgtgaacaaacgtgataaccatcaatttatttaatgttagtttctttgtgatggcgctagtaggctttattctcattttttgtttgcgtctaaagtttaaccggccactgtcattatttaaatggtcttttttgttgggaacggggctgctgtcgctaagcttatacttgtttatggcgaccagccaatatattcatttgatatgcaatacaatcggctcagttatggcagcgctctatcttatcagtattatgattatggtcggagcagaagagtcataaatacatatgtttgaaagtctattgaaagtgaaaaaaaggaaagatgcataaaagagaaagagacgaacttacattcttttagccgaaatgataacaactggaaaaacacctcggtaaaaaatgccgaggtgtttttcataaataaaagggaagggagaatatttagagaaatactagtcatattttactgagtgtagtaaaatgaaaagttattattctatttttgggttgttgctattggcaacatgtgttagtctgaaagtggtatacattttaggcgatcttgaaaaagagagacgagaagcttttattcaagtttcttaaaagctttacgtttactgaggtgaaacaatgaaatctcaagtacaaaaatttgtaggctatttattagctggtgatcaagacagcgcttgggaagttgtgctagaagaaatccaccaaggaaagaacagcctagttatttatatgaataacctaagtgaaattattgctgtgaataaaaatgtgagttaaaagattggaggagaagaaagaataactttcttctcctctttctgtatacacttctcttcttataattaaacatctattaaagaatctttttatatttcagctgaaagaatggcgttaagacgttgaagtcctgtgttcaaatcagtatcactaagaagggaatagcttattcgaatgtaagcatgaagcggtttgtgaacaaaacaagcctcaccaggtaaaaagcagatattgtgctcctgggctttttttaataacccaaaggtgtttactttttgaggcagttttaaccataagttgaatcctcctttaggaacttggaattgaacggattcggaaagagacgaaagcaggtcgcttgcatgatctcttctcagttgcaaagcgatcctcagtttttccatgtgatgtttcattcgctcagtgcgtaaaaaagctagcacggctttttgggttagcaagggactaccaatatccatcagtgctttaaccgcatatagccaatcaaatacagaaccttgtgcataaagtaatccaattcgaagtcctggagccaaagttttactaaaccccttcaagaacaaaacatgcccatttttatcaaacgttttgatcggcggaggcaccgatatatcatcgaaataaatctctccaaacgaatcatcttcaacaataaaaaagtgatacaattcggccaaatcaactagttctttgcggcgctgtctgctcattagtatacctgtagggttttgaaaagaagggttcacgtataaaagcgaaggctttattttttggcagacttcttctactaaatcagattgtattccttcttcatctagttcaattgaaatgacgttaacacctttattggtgaagacatcaattgcagctccgtagcatggactctctactataaccgtatcccctggctttaaaagcgtttgagcaattaaatcaataccttgctgagcgccacttgtaatcataatttcatgaggatcagcttttattccttgctctctctgtaaataagaagaaagctctatgcgaagctcacgatctccttgaattggaccgtatgtggctaaaacaagctcattggcacgtaacagactttgcatttcttgcgctaaaaactgattaggaaggagacgagggaaaagaatagcctgagagaaatcataatatttacgatcacgatttaagctatactgagagcgcgtgatatttacgtttaattcatcctgccatgaaaaattatctaataccttggaagaacgtttagtaacccctttaacaaaagctccttttcctgactgtattacgattaatcctgatttttgtaagagctgatacgattttcgtaccgttaataagcttatttctaactcttgtgatagcttgcgtaaagaagggagctgatcaccaggttttatcatgctcgtttggatgcgataacgaatctgctcatagatttgctgataaatgggggtagaagattttttatgtacattaaatctcattatgtcacctaactattcttttcctttagttaacctcaaaataagcatgggcgcaactggaaaaacagcaactgttatagtcaaggttttactgttatacttcctttcttttatactcgtggcatgtttaaaggaggaagatatatgattattattaattacgtacttatctgttttattttcggcacgacatttttaactattaaattagggattgaagcaggaatgcctccacttttctcagctggaactcgctttcttttagcaggaatcttagtaatctcgtactttgcatataaaaaagacgttcgacgctcgttattattttcaaaaaaagtgatgatggtagggttttgtttgacctttatgacattttcaacgctctattgggcagaacaacatgtgacatcgggtcttgcagctgttttatctgctactggcccaatgatgatattgcttattcatgtgatgcaaagaaaaatggaattaaaaaaagagcagttattcgctttgcttttggcttttaccggtgttatttgcatttcacttccaaatgtgacagccactatgtcttattcgtggacgttagggtgtatcattatcatagtaggagaggtattttacggcataggcagcaattattcgaaagctttgttaaatgaactaaaagaagtgtcaccgtttttaattaacggtattcaaatgctttacgggggaatatttctactggtgctatctttatgtacagagcatatccatgtttcaactattatgcctcggaacgcagtatggtctattgtatatttaatttttgttggttcaattgctggacacggcttatattattggctaatcgcccaaacaaatccggtttttccatctacttggttgtatgtatctcctttaatcgcgatgttaatcggttatgtagtcttaaatgaagctatcacgccttctattattggcggaggccttcttattttaataggagtgtttatagccaatcgtgaagctttgggagtacattttaaaaaaggtgtgctattcaaaaagcagctgtaaaacaagtcgccatttgctgacttgtttttagttgatcgcaagacaaaaaagattgaagaaagatataaaagatgactaacagcctcttcctaataaaagaagaggctgttttattaggaatttgctgacatcgtatgagacggtaaaatgatatcttggtcgacgagaaaggacaaaagttctcgtgtagcatatgacatatagcgatcttttttcaaaatgatgccgagctcccacattggagtaggtgcggcaattggaatacttttaataaagggattattgattttcggaaacacggactttggtaaaatagcaatacctaattcagaagcaactagttcaataattaaatcccattgagaactttcgtacgctatttttggatgaaaacccgcttgaatgcactcatgaataatgcgatcatgaagagagaaatctttgctgaacagaacaaacggctcttctctaagctcgctcaaagcaacaattgatttagctgccagcggatgctcatgatgaatgtataaattaaactcttcttcaataaacggatagacgtgaaaaagagggttttgaataggcaacacgataatgccaaggtctacttgttcgttttctacaagttcgacaattcgctttgcgccaagctccacaagctctaatttcacctgaggatgttttgatgtaaagttttttgcaatcatcgggaaaacaacagtccctactaaaggaggaattcctactttaatatctcctgtaggcagattccgtaaatcatctaacagagcatgtagctcgtgaagagtggataccagcttttggctttgcccatacacaatctgtcctgcatcggttaacgtcagctttcgagtagagcgatcaaaaagatctacgccgagttcttcttctagtttttttacaattttacttaatgctggctgagacaagtgaattgcagctgctgctttcgtgaaacttttttgattaactacttccatgaaatgttgcagttctcgaatatccataaattctcctcactagtattcttagttttcatactatttattctatttatctattttacttatgattcaaataaatgtaaactcttacataaggaagtgaatagggattcatctaaaaatagtacatcaaattcctctaaatacgttagaaacccgcatgtttgtaagcgttaacaaaaaagcaccctcgaagaaaatcctagaaaaatatttttttctcccgtaaaacaaagccgcgagcgcagaaataatacgtgttgaaatgttcattttgtatactgttctgacaattaagaaagaggaataaaatggtatagtacaccactaaggtgagtctattcattctgcaaacgagccgtacatagaaaaaagggccggtttgttaaaaataattgggggagtggttgagatgacatacgttaaaggactagaaggaatcgttgcagctgaaacaaaagtagggcacgttgatggagagaaaggtcagctgatttatcgcggatattgggcaaaagatttggcgatcaattattcttttgaagaagtttcttatttaatttggaacggcacgctgccaaatcatgatgagttaaaagcatttaaacaaaaaatggtgactcatcgtacgcttccagctaatattgttgcgttaatggactgtttgccaaaagatacagaagtgatgagcgcgcttcgcacatgtatctcagcattaggagacccttcatacagctggcctccgacaaaagagcaggcgcttgcgattacagcggtaacacctaccattattgcctattggtatcgtaaaatgaatgatttagaagtagtagagcctaacgagcatttggatcatgtagcaaactatttatatatgattaacggagaaattccagatcaaagtttggttactgcgctgaacgcatattttgttttgacaattgaacatgggatgaacgcctcaaccttctcatcacgcgttatttcatctaccgaatctgacatggtttcagctatttgcggagcaattggcgcgatgaaaggtccgcttcacggaggagctccttctggtgttattaccatgtttgatgaaattggaagtgaagagaatattgagccttgggttcgtaaaaaattagataataaagagaaaatcatgggatttggtcatcgcgtttatcgtacacatgatccaagagcagaagcattaaaagaagtatcgaaacaaatctcaggagacaacgggctatttgatttaattgttaaaattgaagataaaaccattgaattactcaatgaatacaagccgggtagaggcatttataccaatgtagaatatttcgctgcagcggttatgaaagcggttgagcttccgtctgaactattcaccccaaccttcacagcaagccgtgtagttggctggacagctcatgtcgtagagcagtcagaaaataatcgtatttaccgacctcagtctgcgtatataggttatacgccagttgaacaaaatcaataaataaactcgctttcacataaaaacgtcggtagatccgacgtttttttatatggttaaatatattctttttgagaataaaatcgctttaataaatagaataatccgactgctaagcataaacttgctgcagctaagctagaggtaatcatggcgtgctcaccttcggtaggggtatgtgaaagtttatagctgctgtagcataagagagctgtgatacataaacagcaggagctaatcaatccataccgctttttaaagccaataatagatagtaatacaatcaaataaattccgctcaccatcatcataattggaaactgagggtggaatttaattgtatataacaaataatcgatgtgagaatagtgatgaactgccgaggactttgttagccctccggtcaaactagctgataaaggtccttcaagcatcgaagagccgttataccaagtagcgactgaggaaagtaaaaaaacaaaacaacttgcaaatagctgcgtcatgcattttattgacacgtatagaaagctcctctcaataaccatcttttgttaatacaagtccgaaaattattatagcaggttttgaaagtaaaaaaagtactattggaatggtttcataaaacgttcatatttgaaaaggtttgttttttaaaaagaaagggaaaaaaagtgaaacggaagatatgaatagaggagagagaaatatgaaggcagcagtgattttgaatccaaacgcaggaaacaaaaaattagtaaatgaaattgactttatatgtgatcggttaaacactgcatttgagacggttactttatataaaacagagcaacctggagatggtgccgatctggtaagaaaattggaaggcaaagcggatgtcattattggagcaggaggagacgggacaatttatgagctcatcaacgctcttgctccgctgcagcaacgtcctgtatttgctattttacctggtggaacgtgcaacgacttttcgcgtgcaattggaatgaatcaaaatcctttaaaagcggtggagcaaattatagaaaagcagacggaggcagtggatgttggaaaacatggcgaagattattttttaaacttttggggaatcggcctcgtagctgatgtatctgaaaatattttggaagaaaataaagagaaatttggtaagctctcttactacatgagcgttggtagaactttaaatcaagcagagccttttcaattaaaaatgacgagcgaaaaagcttcctatgaaggagaagctgttatggtgttaattggaaacggcccttttttaggaggaactcgtgctatgctaggaaacagctcatttcaagacggattattagatgtatttgttattaaagaaatgggaatcgagccggttatggcatggttacaaacaagccctgatgaggaacagcttaaccctgaaagcaaccttatgcattttcgtgcaaaagaggttcatattgaaactactcctgaaaaaacagtagattgtgatggagaaaaagaaacgacgacaccttcaacgattacggttctccacaatcacataaatatgatagtcggaaacagataaaaaaacgctggaagttccagcgttttttttatgaagacagccatcgcggagaagtaaagagcataatcattatgctgctcatcgtaataacaagcatggagtagcaaaaagcagtaaatccgataatatgtaagcccactatcataatcgtactgtctaagataaaaatggttattcctatattgattttccattttttcgatacaataatggcaattaaatcaagcccgtccgaactgatgccgtagcgaagcatcagtcctattcccattcctacgagtgcgcctccaagcaatgagctaaaaagcaaagggagctccagcgtgccttcgagaatagacagccattctgtcataaaaaaagaaacaaataaacctatacttccataaaaaaagttttgacgatgacgaaaaaaagcatataaatagacaggtacgttcaaaaagaaaatggacagtccgataggagttccaaacacataatatacgataagcccgaatcctataagtccaccgtctagtaagtgatacggagcaataaatccgtttagccctagtccaattaataagctgccacagcaaatcgaaactactctcgaaaaaatatccctcaccctatacgttaaattttaataggagtactcgtccatctatgtatatggcaagcttaggttatttagaagtaaagaagaagaaaaaagaaaattatgtaaaaagcattgattctataactctgatattctatagttaatctaacttcgttttcacgacaatttcttgattttttacgataatgtttaactgtttgtatttttaatatatataaaagttgtgttttgtaaaaagcatacgattgtaataagtcgataaaagcaagccgctatataaaggggttgattacgtgtaggattctctttcttttcagtcatactaaaaagaaagagggattgtcgtgaaaaatcgttccgtactttttttatggtttggtcaaagccaagccaatttagcggatgtattatatattgttgcgttaatcagcattctttatgctcaaaatagttctcctgtgctgctttcatgcattccgtttaccattacggctgctaagtttttgagcagttttactgtgccttttcttatagatcgctacagggctaagcgtattcttgttgtgtctcagctgttaaaaaccagtgttttgtctatgtttttcttgtggcatatgtcgcttataaccatgctgtgctgcgtggcgcttattgcttttttcgatgggtgggcagctccggttcaaagcgctatgcttcctcatttagtagataaagagaagctgttgaaatggaacagtatgtttaatgtcaccgatcaaacgattcaaattgcagcctatccgcttggaagctttctgatcattagctgggatgctactggccttttatggctgtcattttcgttattcagtttgtcacttgtatttatgcaggccattcgcattaacgttcattcttctaaaacgaagcaaaaacaagggttaaaagagggatggaagctaatttggcattatccgcgcctgcgggttttattagtcatggaggttttagaagggatggctgccggcgtttgggcatcagcaattgtctacgtgtttgtgaaagagatattaaataaaaatgaagcttggtggggatatatcaacagcagtttttttgtcggaacggttcttggaggtttcgttttgttgaagatttcagttgaacaagagaaaagtctttatcatatcgtaacattaggcagtcttttatcaggtttctttacattattgttcggagtgatgccttctccttttctttcacttttacttagttttgctattggcgttgctcttcaaataagcgctacgtgttcttacacgcttacacaaacggccgttcctttagaaaagctttctaaggtactttccgctacgctgagcgtttcatatgtgacgttcgggctttcggtgctgctgcttggagctgttgcttcgctaaatgtgacggcggcgtttctaacagcaggaggactgattataatcagcggctgtataggtttattcttacgaaattatgcgcttgctaactaaaaagggttgctatttgcaacctttttttaaaacatcgtagtttctctcctcaatcataagccgtataaggttgtttgctttaaataccccttgtgtaaaagtagggagcttttcacgaaaacgaaaggaaaaaaaatatggctatcgaattatgttaagagcattgagctaaaaggagtgattaaatggttgtcattcgacaggcggttgaaactgatcgagagcgactggctacgttaatgcaagaatatatagtaaaattctgtgagcagcctgccccttcccggaaagctttaactttacatattaagcgcttattgaataatccttcctatggtatccagtttgttgctgaattggaagggaaactagtaggttttgcgacggtgtacgtatcgtggagcacctattattttaaagaaacagcgatcttaaaagacttgtacgtatctcctttaaacagaggaaataaaattggtgaacgtttgtttaagatctgcctggcctattctcaaaagtatgagtttgcaggtatgaccgctgagtgcagcagtgaaaataaagttgctcaaaacctttatcaaaaaatgaacggtaaagaaaatgcaggggttcaataccgttttttttaagagaagtgcagcttttacttttaagacttctactaaatggcaaaaatatgttatagtatgaaaagtgaaattgatgaaaatgtcggtgggctatatgttagatgatcgtatcaatagtagggggaaattggactagctgcttgaaaggcggccatcctatttttagtatagccgcaaggaaggagcaggaccttgaaaaaaaatccaatcttaaacgcgtggaaagtagtaactgcgacgagcggttttttacttgcgctgtttatctttaaagtccgaaaaggaagataaccatataaagaaagctcctcgattgaggagctttttattatttagtaataggaaacgtcaagggagtcactgttgataaagaatctctgtaagaatgataggtgaaataatgacgtgttggactataaatggtcatgtaaagtaaataatcatatttcgtttccatatagaaaaaaacgccgtctgcgtgaagtgtatagaaagagtacgaaatcccgagcagcgtttgcttttgtacgcttgtgcttggattttctttaatccattcatacagttcaaacacactcactcctggtgatgattgcagcgtatgtactttgtcatataacttatcagatacatcggaaactgactgttttaattggtgaaataagttggacatttgttctttcattgcggtgatctcctttacgggtagtcagctattagcatgctcagagaaatccacgcttatgtatagttagtggatggctgatttgaatttgccgccatgcgcttcttgggtatccataatggttgtaaatgcatgcggatctatttcggaaataatagttttaagcttggtaatttctaaacgcgtcacaactacgtatatgacttctttttctgtaccttcaaatccgcctttaccatacagtttcgtcacgccccggcctagacgatgcgtaatagcgtctgatagctcttcatagtgatttgaaactataaaagctgcttttgtttcatcaagcccttgaataatcgcatcgattgttttagaagcaatatagtacgtaaggatcgagtacatggcctgttcccaacctagcacaaaccctgcccaagcaaaaatgaagatatttaaaaacatcacaaattcgcccacagaaaacgggattttttttgttaataaaatacctaaaatctcagttccgtctaacgctccgccgtgacgaatgaccgttcctacacctgctcctaacagcagcccaccaaatacagtagcaagaagcggttcagatgttacagctggaacatggtgcaattgagattctacaatggataaagcaacaactgcaaacatagatgaaaagcagaagttacgaccaatttgtttgtatccactatataaaaaagggagattaaagatgatgataagaagactgaacggcaatttcgttaagtaaactaaaattagagaaataccaataataccgccatcaattacggaatttgggactaaaaataattcgatagaaacggcagccaaggaagctccaattaacatcataatgtagcgataaatgagccgacctgccttttcctttttgtgctgtttcgttgtcataaaatctttcctttcaaaatactgcctatacgcaactcttactagtataactaagtcttgggaactctatccaattatctactttaaaaaagactagccagaataaacaaaatcctgttaaattaaacggtagacatttgctgaaataaaggagctgtacatatgataaacgtttatattccggcgcttcaaacaagcgctggtgaaaaagcggcacgctatattgatacattaaccaaaccgataggaagccttggaagactcgaagaaatagcagttgaattagcggccatgaccggggaagtttttccgacagtcacgccgccaggagtcctcgtttttgcaggcgatcatggaattgtaaaagaaggagtttcggcttatccgcaagacgtaacggcacaaatggcgctgaattttttgcagggaggagcagctattaacgtgtttagtcagcaaatagatgcccagttcaaactgattgacatcggcattgcttctgacctttcccataaggaccttgtacaacgcaaagtgaagctgggcacagcaagtttttataaagaagacgcgatgacgcgcagtgaggcagaactggctgttcaagtcggatatgaagaagctgaagagcttattgcccaaggaattaaatgtttgattgtaggagaaatgggcatcggcaatactacgtcaagcacggctattttagctgtattgacaggagaaaaagtctctaagcttgcaggaatgggcacagggatttctgacgaacaactgcgccacaaagtgaacgtgattgaagaagcgctgcaaaataggcacattaaccctcaggatccaattgatattattagtaaaataggggggcttgaaattgccgggatgacaggtgctatgctagcggcagctgctcaccgtattcctattttagtagatggttttatttgtacagttgcagcccttctagctacagaaatcaatacacaagcaagagactatatgtttgctagtcaccaatctgttgaacaaggtcatgcgtgtgcaatgaagcttcttggcaagacaccgctcctcaacctcaatcttcggttaggtgagggaagtggagctgctgttacatttccgctgctgcactcagcttcactgatgattgccaatatggccacatttcaatctgccggagtgtctgagaaagaataaacctaaaaaagacatgggaacaaaaccatgtcttttttctttattttataaaaaaatcttatatttttaacatcataaaccaataaatgctaaagctagcacctgttaaaataaatgatccaataattaacaataccagtgcaacgcgtcgtttaatcgcttgaatttctctatcttttggcaaacgtcccattggtcttcctccattatgtaaatatttcacgtattttcctattttactccgctttaaaaagagagaacatgtgtcaaagttactaaaaatcaaattattttacaaaaaaattgtatccccgttacagcagggcaaagaatacgtattttttcagttagaaaaggactgctctaaaggtttacttacatggcaacaacctttatcatataactgactatactatgatgttatccaaagttggaagaaatctcaataaatgtgagtgttataattacatgataagagtcagaaaattttaaaaaagagtgtgagcaaacaatgaacggtatgttgattattcggaacggtgctcctttttatgaaggagcttctgtgcctattccaaaagataaagcctgtattatcggacgaagcagtgaagaatgggagccttatctggcctttcaaagtgcttacatttcgcgcaagcattttgaagtaacgtacgaaagcaatgcatttttcattacggacttgtttagtaaacacgggacaaaagtaaacggagaagagttacagcctggaacccctcgtttattgaaagagcaggatgtcattaccttagcaaatgaggaggcagctttagtatttagaaatgatgatatggatgcaaccctcgatttaggacctttgctaaaacaaataaataagccattttacacattagatccaattttgcagaaagtaaaagtaaaagaggaaacgtatattctgtcagataaagaatacgcgtgcttagcttatcttctagaatacaacaatcaatttgtttcaaaagaagcattaaaaaaaagcgtttggcctgaacgagtagagtcaaatggagaaattctagtagcagcggaagagctgaatgcactgatttaccgggttcgcaaaaaaataggaacatatttagaaatcgaagtgattcgaggaaaaggatattggctgcactttaacgaaaatggacgtgaatagaatcacgtccattttttagtctcgttttacagcatgtacacgtatatgtttagcttctgctagccaagatccgttttgaaatagtttgtcttgcattcgattttctaagcgcgtaatgaggacattttttgtttctgtcgtcacgtgagcaaaaagaggggctgcatttgtttccagccaattacgcaagccgttttctccttttaacaagaagagacggctgtagtgtatagcagtggtgacttgaaaattctgtgattccaaaagagaagaatattcagctacagaaggaaagtaccatgggaaatctacatcgttataagggatatcaaacgttttaaattgacgaataatttctgtaaaaatttcgtccatgtttccttttccccaaaattctgcaacaaatcggccatttggttttaaagcattgtaaatgtttttaatgacaaggtgagggggacggatgtcgtgtaaagttgcatttgaaaaaactgcgtcaaattgttcgtaataaggaaggttaagggcatttaactgttcaaaggatagagttgggtactgatgacgagcctgttcaatcatattttcagagcaatcgatgcccgttgcacggacatgaagcttattgagctgcgaaataaattcgccagtgccgcagccaatatctaaaatatgttcgccagcttgaggagaaagaaggttcatagcacttcctccaaatgaagaagcaaacggaagatgatacacttgagcaattttttgttgattaacagtttgactcatgaagtgattcctcctttgtaaaagatgatgactatcgttttataagaagaaacaagctttgaatagtagatatgaagttattgatagaattataccatatatctcacttattatgccgaaaactgcaaagaaaaagcgcaccaaacttctagcttgggcgcttacaagcacgaactattttataaccattaaccaaactgaacaaatagaggaagatctgtatgacccatctcacgtacatagacgtataaatttcctttatgatgaatttcatggtcaatggccatttgtaagagttgacttccaggaagctttcttccaaacgctgccgtggcgtcaatcgttttgtttaaatcatcttcgctaagtgaacgtaatacgtctactgttttttgcgtatattcagctgcaaggtccgataatgatttaccactaaaatcagctttttggccaagtggagataaatcgccggattttaccactaatgcaaatgcataaaaggatgttaaaatatgcgtagataagtcaaaagccgacatagatgtcggggcaggtttgtattcgtagtgacctgcttcaattttgttgattaattcattggttacgtttcgatgtgctaaaaagtgatgagtaatttgttcaactgtcatgatgaaaggctcctttattatgtatttcgcttctgagtatagcatctggaaatcagaaagcgaagaaaaaactttaacaaaaagaaaaacagctgcatgtgagcagctgcttttcttattattagaaattacgttgttttaattcttcaagtaataactccataccttcgcggcttaaagttaatttgccatctgcgattgttacgttatcagaagatacttcgccagtaatcgcacaagcaccgttcggctcatatttctttaaaataattcgatctgtttcgacaaaaatttcaacaggatcttttacatctatttcaagaacacgtcttaactctttaggaattacgatacgacctaaatcatctacttttcttacaataccagtcgatttcattttttaatcacctttacttttatattttattgagtacgcaaaatattatttttggaatttctaagatgattatatactagataaccgctaaatttgtcgaagttattaatatgtaaatgaactgtaatattattgaaatattatctgtaaatacaaatcttcctacaatatggaatatgtagggctctttgtatgatataggagatacaggaattaattacatttgacatacaattttttttatgcttatgtagcagcctggggataggctacatgtaagcgtagaagcaaataagttgaaaaaatgaagaaaatatgattaaatttaaaaagtaacttgttcaaaataattaaatcgtaatgattacgtatttcaaataaaaaattattaaaacgaaaggatgagaaagagtttggctaaaaaatcaaaagtggtaaaagaacaaaaacgtcaagagatggtagcaaagtatgcgcaattacgccaagagctgaaggacaaaggagattacgaagcgttaaaaaaattgcctagagattcttcaccaacgcgcttaaataatcgctgccgcgttaccggtcgtccgcgaggctatcttagaaaatttgaaatgtcacgcatcgcttttagggaattggcatacaaaggacaaattccaggggttaaaaaagcaagctggtagtataaaagccctcattatgagggcttttattatttattagctgcaaaatatcgagcaattccttggtaaatacctgtagatatttgctgctgatacgcgttagaagaaacaatttgctcatcgtgagcatttgataaaaagcctaattcaagaagtacagctcgctggttgttttctcgagtaacataataatctccaaaacgaacccccatatccttcatagaaggcgcgttttcagccatgctttcttgaatgtattttgctaattctttatctttggattcactgtaataaaatgatgcgatgccgtttgcagaagatgaagtagaagcgttatagtgaatactgataaatgcatctgcatgctttgcttcactaacattcacccgtccgctcagtgaaataaaagtatcgtttgaacgcgtcataaatacatttgctccagaattagctaggcggcttgccacaagttttgctgttgttaacgctaaatttttctcaatcgatgacttgcctgaagtgccaggatcatatccgccgtgcccagcgtctactacaataattttatcttttaaagcagcagaaggagaaggcaaactagctgaaggtgtagaaccagccccagctgttaatccttttgatacccatgctgtttgactcgcagagtactgaatttgcacccagtcattcgtttcgtttacctttttgaatctttcacctgcttttgctacacgaatgattcccgcacttaagctcggctgactgcgcaaatttgaagcttttgtaatttgaatcgactgggctgtttgtgaagactgtccggaatcagcttgcaaatattgactcgctacccagcccgtttgacccgatgccgttttaatctgtgcccaagacccgctgacttttactaccgttacttttgaattgcgcggtaagttcgtcacgatggacgcacttgtgctcgcagaagaacgaacgtttaatgagctcgcattaacaacccctgacttcgatgttgtagagccagaatccttagctggcgcagaagaaccggagtctgcttttaagtactgacttgccacccagcccgttttgccgcttgccgttttaacctgcgaccacgatccgctttcttttaccaccgttacttttgaattgcgcggtaagtttgtcacgatggatgcgcttgtgcttgcagaagagcgaacgtttaatgagctcgcattaacgaccgctgacttcgatgccgaatttgcggtagacgtactgtttgtttgcgttttatttatgtattgagatgaaatccaagcttctttgccgttataggtaattttagcccatcctttgctttcatctactatatcaacggtgtttcccttcgttatttttccaacgatagcaccgcttgtactaggcgttgcacgtacatttaacgatgtagcagttacttgggccgattcagctgcatctgcatcaattgaatgcaaaagcaatgaagagcttaaaagaacagaagaaacggctgtgtacatgacatgttttttattcattttttcctccttgcaaattacaaatttcaacataaggttattggtatacaaagcatatatcggcaaatagtccaaaattttgagttaaatctactattatattataattacgatattatccaacatactatatgtccaaattaaattgtataatgaatttgaactatccaccatccttaacgttaaaattttacattaatgtaaaatataattattttaaaggtggaatttaacgatattaaagacctttaatcccttgttcatctacattttgaggatatgtcttctactagcaaaagcgtaaaatagtataaaacagctgagtgtgaatatgatagaggagatatagaaaataaaagcgtatctatcttttggaggaggaaacatccacaattatgaaacatttagaataaaaataacaaaaatatataaaataatacaaaggctgtctatatgggtgtaaagctcgtaccatgtttcaaagtaaatagttagaaaattctttctttttaccttgaaacatggtacagtataaaaaagtgaaagggtggaaactgatatgcgaaagattgttcagtatgaaacaaagtggtcgcttttgtatcaaatggaaaaagaagcgttgcttaatacactaaaagatttttcagtagacatcgaacatattggaagcacgtccgttccaggattggcaggttcaccaatcgttgatattttaatcggagtcaaacgcgaagaagatataaatgaagtgcgcgctatattaaaaaataaatctcacgtatatgtagcggaaaaagagatgtttgtcttattaaaagaaggcgttccagctgcacactaccctccaattatgacagctaaaaatgctcgtaagctcattccacatgatgctagaagaagtcatgtgtacgtaacggtcagtgaatcaccttactggaatgaacgaattaatttcagggagcagttacgctcgagcgaacgtgctagaaaaaaatatgaaagtatgaaatacgagctttcaaaacgattgtggaacgatatttctacctatgagtacaaaaaagaagaattcattcagcgcagtctataaaaaaacgtcatttcaattgaaatgacgtttttttaattaattatcttgtaaaacaatggtctcaagcttgtcagcagtatttactgcgagaatcgtatagtttttaccgctttgaagatttgttccaggaagacttagtatttcttttccatctgctgtggaaacagatagatcatacgatcccggatttactacttgataacctgaaatgcttttaaaagacagatctttaaataaaggagcagcacctttaggacctacgtttaccgcaggagcatcaggagataaatgagcaacacgtaagcttgcttttccatccgttccttgcttattattcgtgaaagcctgtagttcaaggttttctgctttatttacagcggccactgtatacgattttccaccgtctacaacaagggtagcttcgatgatggaatcttttgttccttttgtcttcgcttcgtatacttctactttatgagaaccggctgccaaaggcagggagttggagacatctttaaactttgctccttctactaaagctttgtcatccacaaaaatgtctacagccggagcatccggtgaagcatgaacgatgcgaacttctgcattttgagctgttcgctcatctgcagcaggaggtgtttcagcggcaaatactaacatgcggctaagtgccaagaaggcaatcactgctaccattacgaatagtcgtttcatcaagtatcactcctttttaagtatacacagctttatgtaaagagaaggactgtgcagttgttagcgtatactaaataaaatcaactattcgtttgtttgttaacttttgacgtgtttactcagatttctgacgaaaaaatcgaagaatagccaaaatattgtacagagctgttaagagccatgtcaataaaaagcctaggccaagcccaatattggcatctatatacgtatgcgtgaagtcatcacatacgacgtaggaaagaggagcaatcgacagtaaaaatagaagaaaaaacaaaagctttttccatctgtttaaagtgaaggttaaataaaagaaaaggaaagcggcgaacaatagaagaccgtctcgaatagcccaaggcaaaacgccgatatgtggattagcgagaagaaaagtcgggacaattgaaaggaggaaaaggagagaaagtaaagttacgtgaagtgtgtgcttttttgtaaaagccggcaccaataaaaacgctgcggttgcacttaaaagaaaattacaaattaaaataaactccatatcaacacctcatttattgagtattacttttagtctattcagcacgctgtcagagtagataaaaaagctgcgatgttcatcgcagcttttggttattcaaatttaaatccttgtttttcaagcatcgctcgaacttctggataataaatggttttataaatagctgatacagtttgtgaccagttgcggtcatcagcaccgtttgttctctttttcatatactctgccatttcagcatcatagtcttgaatcaatgactttaagtcgtgattatagctttcacgatggtgcacagcagcttgtggcaatcgaggttttttcgcagaatgatctgccggatgtccaaccacaagaccgcttactgggaatacgtattccggtaaatcgagcagttcaatgacttctagcggttttctgcgaattcctccgattgggactgtacctaaaccgagtgattcagctgcaactgttgcggcttctaaagaaattccagcatcagttgccccgactaaaattgattcaagcccatcggttacgccaagaggggcatcgttaagttcagctgcaatcttagcacgattaaaatctgcacaaaagattaaaaatagaggagcttggtcaatccacgcttggctgccggcaagctctgaaagttttttcttcttttctttatcttggacgctaataatagtcacttgctgtccattaatagaagaagcggctgactgagcagattgaataatcgtatctaaatgctcgtcacttactgcttcgtctgtatactgacggatagaacgatgatcttgaattgtacgaattgcttcattcatgatgcgtcatcctttcgaagaagttatgattaaccttgtaatgtttttacatctaaaggtgctacaagtacgccagtttgagcaaatgctacaaaactttggaagtgagctgatttattgtgtgcttgaattgcttcttcgcttttccactcttcaatcatcataaatgtgttaggtgtaaaagcatcttcaaatagttgatagttgctgtttccttcttcttgtaaagaatgcttaattagttcttgtacgttttctaaaaattcttctctttttgctgggttaactttcattgaagcttgtaaatgaatcatggatgattcctcctttaataatgatggtgctttatattatttgttttgtttttaatctttcattcaatttatgattaaaatgaagataagttcgaatatcatcgaacaatgaaactataacaccgattaaataacagtgcaaggaatttagttcgaaagttttcgaacattgatacacaaaagaagctgtgttatattttaaacatgagaaaaccttatcaaccaccgaaatctgaaattaaattaacgcctattttacacgcgttgagtgatcctaaccggctgcgaattgtacagtgtttagcgacaagaaaggagcagacctgttcgtattatcaaaaattaaatgtatcaaaatcaacgctatcacatcatattaaagtactccgcgaagctggaattatcaaactacgtatagaaggtacgcagcactattattccttgcgtttagaagagcttgaggaattattcccaggtctgcttccttccattataaatatagatgagcagttattttaaaagctgaacgatgttttgttcagcttttttgttcaaaataaatgtgtccatgcaggctgcatccgggattaaaagaagaacgacagtgagggcaagtcgagttacaggttaagtattcatgaattgatagctcatgtttacatactccgcaaagaatagctttttcattaaacatagcttctggccactttttaatgtcgtgatcagcatgtccgttatgacattgatagcatggataatatgtattacagcaataaaattttattgcaataatatctttatccgtatgatagtgcgtacagcgcgtttcggaatccaccgtatcaccttttactgcaggtgcagatttgttcattatcatcactccctatgaaaagtatagcatgcttttatacgccttatcatacatatgtaaaaagaaaaatgctataataaaaccatcgttttacatgtcagattgcatgctaaaaagatcagataaaaattgatgtcaaaacagatcaattaagtgaagtaaagagaggaagaaaaaatgagtaagcaagttatcgtttttaccggaggcggaacagctgggcacgtaacaccaaacattgccattatgaaagaattagacagtgaaaaatgggatatccattatgtcggttctcacaatggtatcgagaaagaattaattacaaaattaaacgttccatatcatgcgatttcaagcgggaagctgcgtcgctacgtagatatggaaaatgtaaaagatgtatttcgagtagcaaaaggagttggcgatgcacgtcgcgtgctgaaaaagttaaagccttctcttgtgttttcaaaaggcggttttgtcacagttcctgttgtaatggctgctaaatcgttaaacattcccgtgttcattcatgaaagtgatttaacaccgggactggcaaataaaattgcgcagaaatttgccactaaaattttcacttcttttgatgaagcggcaaactattttccaaaagaaaaagtgcaggttgttggttcacctattcgaaaagaattatttagcggaagcgcagcgaacggggaaagctggcttcgcttttatgataagcgcccaattttaaccattatgggcggaagtttaggagcacgtcgcatcaatgaaattgttcgagagtccttgcctgaactgcaaaagaaatttcaaattgtacacctgtgcggaaaaggcaatattgatacaagccttgaaaaagagtcgggctaccgtcagttagaatatgtaaatgaacagcttccagatgttctagcggcgactgattatgtgattacacgcggcggatccaatgccatatttgagtttttagcccttcataaaccgatgatgattattcctttatcaaaagcacaaagtcgaggagatcaaattttaaatgcacagtcctttaagaaaaaaggctactgtatggttgtggaagaagaacagttaacaaaagaactgtttttgcgtgaagtaaatgagcttcagcagcaggcaagtacgatgaaacgtacaatgcgtgaagcaacaaaaacggatgccatttcaattcttgtaaatgaaattgagaaaatgagctaaaaaaagcgttcttatcgaggagataagaacgcttttttctaaaagaggcggaggaagcatgccgtaaaataattcatgatgaaatggaaagtattttgtcacgcgcgtcggaacaaaattttgtaccagttgtagatgatcaaaacatttttattgggctcgtgcggcgaagagagattatagagtattggatctctcaactttttatacatggagaaacacctctaaatgtaaagatttagttaagtttgcgtaaaaaacataatttttacataaaaggtagtctctttttatataattaatgttataataagagatgtaaagacgaaacttgcgtaatgtaagcctctaacatttgttagaggttctttttttacataacataaaacatttgatttcagttctttctatggttaagttagaataagtgttaaagtaagaggtttcttgcttttttacataagaaaagtgagctgtacaaaggagacaaagtatattgactacggaaaaaacaaaaagcgatcaattacgcagcatattcaaaactattatcttcgctatcgctctagtatttatgattcgcgcatttttattttctccgtatattgtagaaggcgcttcaatgaacccaacgctgcataacggagagcgtttgtttgtgaataaactgtcgtattcgctccatgatattcgccgcggagatattgtgattattaaagatgaggctaagaataagcattatgtaaaaagagtaatcggtctgccaggtgaaaaaatcgaaatgaaaaaagatcagctttatattgatgataaaaaagtaagtgaaccttatttaaaaacgaatcgtcaaattgccaataacatggatatggagcttacaggagattttgaacccgttcaaatacctaaaaacgaagtatttgtaatgggtgataaccgtctgtacagtatggatagccgcaacggtctaggtctcattgatgaaaaacggattgtcggaaaaagcgaatttgtattttaccccattaaaaaaataagaaaaacaacgtaaaaagaaatgccggcgaaggcatttctttttttgtgcctatgtctactcggcttctagatgggcaagctaaggaaaaaaggtgtgaattaattgaagacagcctatgaaaaattatttaaacattttaaatttgttgatgctcttgagatgaaaaaccgattagcaatgggacctatactcacatacgcttcacgggaaaacggagaaatatctgatatcgatctgactttttacgaaaaacgagtagggggcgtcagtacggtaattgtcggccccgcgtttatcacagaaaatggccaagtagcacatggtcaactcggcattcatcgtgatcaggtcatacgaaagcttcatcaactaacccaaatgattcatagaagaggagctaaagcgattcttcaactatcgcacgggggcagaaagtgcgtagaaatgaaaaataaatggcaagccattagcccaagtgaaaagcctcacaaacgtaaagggaaaaagcctgttcaaatgaccgagcgcgatataacttatattgttcaagcgtttggcgaagctaccacaagagctatggaagcagggtttgatggagtagaaattgacggaggaaatgaatgtttactgcagcagtttatgtcaaggcaagccaatgaacgaagtgattcttatggtggaagcgcagaaaaccgcttcacttttgcacttgaagttattcgtgaagtgacgcgtcgagcagcacatgcgggcaaaccatttattgtggggtatacattagcgcccaaagaaaaaggctatttaagaaataaaatggaagatacatttgagtggattgaccgtcttgtttatacagaaattgattatttacatatcagtgctttgcatgaacctaccttaggtagtgaagaaaatcggtcactggtttcttcgattattaagcacgtcaatcaccgggtcccccttgtaggtacaggaggacttacggcaacagaagtagcagaagcttttgagcaagggctggctttaattacgattgaacaagcattagtcgtacagccagattgggtagaaaaagtgataaatagcgacgagcccgcttctatggatatgacgtcattagataaagatgtgagtttgccacctgaagtgctagctcactggcaagacatgcataaaaatgaccgcccttactaagtgagcggtcgtttttatgttgttgacttaacaagaagaattttgttttactgatactataaccaagcagcatacatagactaaaagaaaaactaaaaacacagttgacttctaggaatagttaggattacaatataagcaacttattcataaaacggacagctgatcggacataccgaaggcttctagcaaacaactgttggaggcctttttgtgctttctaacagaagatgaaagtggagggacaacatgaaaaagttaattacgtttgcacttattggctttttagctcagttaattgatggatcactcggaatggcatacggggtgacatcaactacgctgcttttaacgtttggaattgcaccagctgtggcttccgcatctgttcacttagcagaagttgtaacaacagcagcttctggtgtttcgcatattaaatttggaaacgtagataaatcgatggtgttaaaactaattatcccaggttccattggagcttttgtaggagcctgctttctaagtaatttacctggagatgcagtaagaccttacgtttcaacattcttattgctcctaggagtttatgtattatttcgttttttatttacgtttaaaacaaacgaagaaaagagcaccaaacctttatcgacgaagcagtccattccgttaggattaattgctggatttgctgatgctacaggaggaggcggctgggggccgatagcaacgcctgtattgctagctaaaaaaggcacaacagcacggaaagtcgttggaactgtggatacaagtgaatttgctattgccgtctcggctacacttggctttttaatttctcttggctgggagcaggtaaactggttctgggtaggagcccttatgattggcggaattatcgcggctccgattgctgcatggtttgttcgtattatcccggctcacttgcttggttcacttgttggtgggtttatcattttaacaaatgctcgaacactcttaaacacttgggtatcaagcagctctactcagatagctgtatatgcattcatacttattgtgtgggcagcagcgatcatttactcactgttacaaggaaaaaaatataatcaaaatcgaaacgtagaagtttcgtaataaagaggatggaagaaaagcagctcagttaaagaaagatctgaacgtgtttgattcttgatggagaatcaaatgtgttcagattttttttatggttagagtgaaggtagtttcatgtatgtagtggtttctagctgctgattggagggcaaggcgaggactcctgcgtgaaaagcggaacagatgagacccggtaggagcggccgccctcggaaagcgaagccttgtacggaaatcaacagcggtgtaacaagggatccatactagcgcattaccccatttgttcgtctttagattgggatgatttcgtcaagtctcaatctctattatcatctgaattccgtaaaatggacgagcgtagatattttttttgcttcttatgatacaatagacgagttcattcacgagtgggaatactttctaacacatataaaattcattgaatcgtcgaggtgtgaagagtaagtggtctattttattttagtattagtagcagctatcgaagtaattgtcttgttgattaatcgacctgtatttgcaaacattccgtatgttcaagtatatattgttcctttgttaatagtaattgtcatcacgatgttactttcgcgaaatccaaagagatttatgcggtggtttaaacaagggcttattacgatttcagtcgttgtgcttgtattcgtaccggttctctatgccaaaaacctcccgctgtatggttataatgaagcaaaaaaaatgcttgcgcaaagagaacagctcttgctaagtcagttccaaaaaggaaaatacgtatatccagcaaaagacagccctaaaaaataccgttatctatttaaagtcaatcgtggaaacggcatgcttgaatatgtattcgacccatacacaggcggttatgaagttgtgacagatgtgataaaaaaataaaggtttagcttatttaaagctaagcctttttatatgagaaaaattgaaactttttgaaaatctgtgcgtatttattaaagaacgttcacaaaaaagtcacaaaaggagttgcacaagcacaatgggagagttagaataccgactgctaaagcctgacgatacatttgtatctatttatcactatcaatctattgaacttgaacagattttagcaagaagagaatgcgaattttttgttaaagaaggagtaacgtataaacaaacttcatctgcagtcgaagatgatatacatattatttatgtaaaagaacatgaacatggaccgaaagagcaagcagaagatgatcacagagaaattacgttagaagtccgcgaactgaattctcttcgaggacacccgattttattcgtctcttcattttatacgcatttagacgtattaagctatatcggaacagtttatacatactacaatggatgggaatgggaaagagactctgcggaaattgatgaagatcgcagcgtgtacagtttatatgtaacaaaaacaggcgtaacgtatgaagggggaaaggcgtaatgtcaaaaacaaaaaaaatgatggccggggttttgaccacagctttaatgacatcgctcgttgcctgcggttcaactgctcaggcaagaccagctaaaccgaaagataaatcgtgtgacaagtggaaatgggatgaagatacccaaacgtattactgttcagattcttcttcttcgcacagcggctcatattatcacggaggccgctactacggctctaaaaaacagttgacctcatcatcggcgtataaatcatttaaatcaagcggctcgtataaatctggaattgggagcggatctaaaggcggttttggcgggtaatgcataaagaaaagcgagaaatgttttataaagaaattgaagatttttggcacgatttatacggaacagagtatgctctttatgacgtacatatagagcatactcatatcattgattctattaaagaagctgcaaatcgaattggggaattattttttaaaactgcacctttacttcgttcgttagatgatcagacgcttttttctttaggatttccaaaagacagcctcccgtacctacgactgaaaacgatggaaacagaaagtgtgatttcgcgccttgattttgctgttacgactgatcaaattaagcttttagaactaaatgcggatacgcctacgttcattaaggaattatttcatgtaaatgagttagtctgtcgtcattttcaagtacaaaaccctaataagcttgaggaaaaaaagcttgctttagcattaaaacacgccatttttgaagcttataaccagctcgatagaacgaactatccaaacgtcgttttttcttctcatgatacacatgaagaagataagctaacgactctttatttaatgaagctagccgatgtagatgctacatacgttccattatcgcagcttcgaattgttccttcctctacaattgaagaaggtgaacatatagaagcgggcgtgtatgatcaatatggacaaaaaatagacgtactctatcgccaaacttatccgcttgaacatttaattgaagatgaagatccgagcacgcatgaaaaagtcggacacatgcttttaacattggcacagcaaaaacaagtagctataatcaatccgccttctgcatttttactgcagtccaaagccgttcaagcactcatttgggctttgtatgaacaacatcatcctttcttcactaaagaagagcatcacatcattgaaacgtactttttaccaacgtatttagaagaagatccatttattgaaagaaaacaagcatttgtgaagaaaccatcttttggtcgtgagggagatactgttgaaatttataatgaagatggaatcaaaatagacgaagatcagcataagacataccaagaatactcggctgtgtatcaactgtttattccattgccaactgcaacgatgaagactcaaacgcaaacaatagaggctcatatcatgtacgggtgctttttattaaatggaaaagcaagcgcagtaggaatacgagctggaaatcaaattacagataacgaatcatattattggccgattggattaaaatgaaaaggggaataaaaatgacacaatggattgattgggctagtatagggagttttttatctcacgtagcagtagggttagggctattatttatcggagtcatggtatttgaattaacaacaaaatttaatgaccgtgaactcataaaaaaaggcaatgtggcggtcgctttgaagttatggggaaaaggaattgggcttgctattgtcatttttactgtatggagcaacagcttaaatttggtagatgcaactctttggggagtagtaggtatcattactcaagtagtggcatattgggttattgaatttattatgacgcctaaaacgagcctagccaaaaaagtagaagaaggaaatgtagcggttggagtaactctttttgcagcgtcggttgccgtcggccttattgtggccggaagcttaacatattaaaagaaggcgattcctgttttacggggaatcgctttttttatgtccagattgctcgtgttcacttagtaataatgtacgtgtattttcacggtcggcacgaacaattttttgctgtgtgtaaagcggaatgacaaagagcaaaataaataaaaaaacatagctcattcttgttatcctcccatgtaaattgtaaacgcctgctaatagtgtgtgacaaacaatacgtaaatatagcatatttgattgggtgaactggaaaaaattgagggatacaaaaagaatataatcctacctacaacaaaaactaaaagtagtatagaggcacgtcttttattaagaaaggagttggaaaaagtgaaaaggtggctcattttgtgcttattgattgtaatcgcagctggatgtggacgcccagatgaaacgtctcaaccgagcattttccttataccagaagggtacaaaggatgggttatggtcgaatatgataaagataacggaaatcccagcaagacagaaggagactacactgtatttaaagtaaatgaccagggagtcgggaaaaccaaaacgcttttaagcggcggcggctgggcaagaaataaatatttctatgtaaataaaaatggagagcgaaagcaattgaagcagggaaagatgattcatggaacgactcaaggtaacaaaaatcatacggtaacctactttttcgtcggcaccgcaaaagagttcgacaaggccggagactatcgaagaaaacttaccgaagaaagttcttcgtaagaaaagaaacgttgccgaagaggcaacgtttcttttctatcttcatttgaatgtgcaaaagacggtgtcttttaaacgttgaatttcgcttaatgcttctttctgcttatgaattacccaatctggcaatgagtgttcaaccgacagctcgtcgaaacaagccccgcatgttttaacttcaatataagattcaatatactgaaggtgatctaagttataagcccaaagtcgacgttcagggcatatcgtttctaagtaaagcggaagctgaaaaaaaggatctactgcttcagaaagttctaacggtccttgactatcagcgttggtgacatctagatagccacagtgaggacacgtgcatgagtgcgttgacccgctcaattttttatccagttttacaactcgcgcacatagttcgcagtttggacattttactaagataaagtcaaggaacttatctaaaaattgctgctgtattacttgctgatttgtcattttttgtacctctaactgtcaaactttttttagttacgaaaataaataatgaaacctacatactattcataacacatgatgggggttaaaacaacaaaaacccttttcgacagaagggttgtgtgatatagtatgacaaatcagaataaataaagaaaaatggtgagaaaaaatgagtcaaaacgaacaatggacatcaaaactcggctttatcttggcatctgccggttcagcaattggaatcggagccatttggaaactgccttatgtagccggaacaagcgggggaggggccttctttttactgtttatcctgtttacagcaattattggtttgccccttttgcttgctgaatttgtactaggtagacatacacaaaaagaagcaattcgtgcttatgatgcagttgctcccggttctctatggaaaggaatcgggtatttaggtgtgattacatgcttcattttattatctttctatagtgtagtaggaggatggattttacaatatatttttgcaagcgtcaccggtcagctaaatggagtaagtgactacgggagtttatttaactcgaccattgctaatccaacaagtgctgttatctctcaatttgtttttcttcttttaacaattgttgtagtcgcaagaggcattcaaaatggtattgaaaaagcaaacaaaattttaatgcctgctctctttattttatttattattatcattattcgttctttaacattagacggggcgatggaaggcgtatctttctttttatatccagatttttcaaagcttacatcccaaaccattttgtttgcaatgggacaagcattcttttcgcttagcgtaggcgtttcagttatggttacgtacagttcgtatctatctaagcagcagaacttgccaaaatcggctatttcaatttcagcgttaaatattttgatttctttactagcaggactggcaattttccctgcggtcttttcaatgggcgtaaagccgacggaaggaccaggtcttttatttatcgtattgccttctatttttgaacagcttccgttcggaattgtgtttcaaactttctttttggcgctgtttttatttgctactttgacatctgcattttcgatgttagaaattattgtcgcttcattagccaaaggagagcagcataagcgtataaagctatcttggatttcgggcttgctaatcttcgttgtagggataccttcagcgctatcgtatggtttattaagtgacgtatcgatctttggaaaaagtatctttgacgcttttgattttcttgtaagtaatatccttatgccactcggcgctcttttaattgccatctttgttccttggaagatgaaaaaagatgtgctaattgaagaatttaagcatggttcaacgaatgtgaagcgctggttctctttatggcttcttgccattcgatatatcgcacctgttttaattatcattgtatttattaatatgctaggctttatctaacgaaaaaacgctgttaaaacgcttggttttaacagcgtttttttgaaggaaaaggaggagtatgatgcttgatttcttgtacgatatgtttgtaggggcaggggtatttattttattaataattctgttgctagtagcgagaacgtcagggaaacgcaagaaataggcgggtataattcccagtgtaaaaacccaaaaaaagactaacaccacagaattaaactatgataatatattatcctatgagcataatcaatgctcacatatgttgtgatgaagcgttttttagaaagagggatcatcttgagtggagaagttcttgtcaagattttatctcaagcgtatgaacaaaaaaagacattaccaatcgtctcattctcgtctttttttgaacaaaaaaaggtgggctttcgtttaaataacgatgtgtccgctgatatcatctaccatacgcttatgtgtattcagagaaaaacgtgtgtccaagatgtgttagtggaagtactaaaagttgatagtccaaacaatgacggggcattttctgattgtgtatatattttagcaaatggtacaaaacagcaagtgaaagaatgggttcaacccttacatcctaaaagagtgaaacaaggatatcagcacgggacacccattgatgcgccacagttaaaaaatgactaccacgtgtttgccgttacttggtcataagcgtttaacccaaaaaacatcctgctgtcgctgcaggatgttttttgttaataaggatgagcatcgtttcctttttcattagcttcttctaccgcatcagcagctttgttgcttcctaacggtgaaccgccttcttttggcaatttcctgtatgtaggagtcacttctgctcccatttcaatttctagggaaccatcatcatgcatcagaagaccaatgccatttgctactcggttgccgtagtcaaaatcacattgagttaaaagctcaatcatctttgtttgaacggtatggtgacaacattttaagccgtctactaaattttgaataagctcatcacgttcccagtcctctagtaaacgatagcgttcaccagcttgcttaaagtcatttgtacgatcaattttttctttttttacatttccttcaacataaggctgatgaggttttggatggtcatgcgcttcttgaagacctccaagagaagaaggctcgtaattcacgtgcgggttctgacctggagcagcatctacatgataggccatttgaccgtcgcgttgatttgttgctacatgctttttcggcgcgttaataggcagctgcaagtagtttgttcccaccggtgacgctgcgtgtcggaataggaaaacgttcttccttgcagcattttatcatcagaaaaatctagcccgtctacaagtacacccgtaccaaatgtcacttgctccgtttcagcaaatacgttgcttggatttttatctcggaccattttacctactgggagaaatggaaattggtcttctggccaaattttcgtgtcatcaagcggatcaaaatctagttcaggatgctctccatcttccatgatttgtatacatagttcccactcgggatagttaccgctctcaatcgcttcatacaagtcttgagtggcatgactgatatttttagcttgaatttcttctgcttgcttttgggtcaaatttttaattctttgttttgtttcccaatggtatttcacaagaaatgcatcgccatctttgtttacccacttatatgtattaacaccggaaccttgcatttgccgatagttagcaggtattccccaagatgaaaataaaaaagtaatcatatgcatagcctcaggggtgtgagaaataaaatcaaaaacacgctcggtatcttgacggtttgtcacaggatcgggcttaaaagcatgaatcaaatcagggaatttaatagcatcgcggataaaaaatattttaaggttatttcccactaagtcctagtttccgtcttctgtgtagaactttacagcacccccccttgggtctcgcattgtttctggagagtccttttcatgagttacggtagaaaatctgacaaaaacgggcgtctgtttgcctgctcctgaaaaaacttttgcgcgggtgtatttttcaacaggctcgtcagcaagctttccgtacgtttcaaaatacccgtgagctcccgttcctcgggcatgaacaacacgttccggtatacgttcacgatcaaaatgcgaaagtttttcaatcagctggtaattttcaagagtagcaggtcctctgttgcctaccgttcgagaattttggttatcacgaatggggtgaccttgacgcgtcgtaagggtctgctcgttttctccggctgcatagcgtttgtcttccgagtcacttgatccgctagcatttgtaccatgaatgcctttatggctcataaaataatcctccttgtttcaaacataacaagactatttttttcagccctcgctttttattcattaatatggaaataatataaatttttagaagaaagctgttttactaaagaggggaacaaatctgctaaacgaataaattttaaaaaagtttcacatttttaaaaaaataaattgttttttttgaaatataaagataatgttacgggtgattttttacctattattagtgtaggaaaaggaataatattggaatatattagcttttttgtcgaacttattaagtgttaaacgacaataaactacgacaatatacaccatacagctgcgctactgtcgttccctgtaacataaatgtaatattagtgatgttattttgtaataatgtgttgatacaatgtaaacgtcttatagattagtagattatggcattggaggaacctttttttatgaaaaagttgatatattcgttagcgttatgtggatctttaacagtagtacctacaattagtgaagctgctttaggagatgctacgctacacccaggaacaagtaattcagatgtgaaagaattacagcaaaaattaaaaaacaaaggttattttacatacggtacaacaacaaactactacggttcaatcacgactagcgcagtaaagtcatttcagcgtgcaaatggtttatctgcagatggtattgcaggttcagctacatttaataagctgctaggaagcggaagttcatcaattagctcaagttcattgctgcgcgttggttcaactggaccaaacgtacaatctttacagcagcagctaaagaataaaggctattttaaaggaactacgactcaatacttcggttcaattacaaaaaatgcagtaatggcatttcaacgtgcaaacggactgtctgtggacggaattgcgggtcccgctacgttaagcaaattaaaaaatggcggttctagcgcttcaactggtggttctagctctagcagctcaactattttacgtcaaggtatgaaaggttcagcagtaagcagccttcagcaaaaactaaaaaataaaggttacttctcagctggtgtaacaggctactttggttcaattacaacaagtgcagtaaaatcatttcaacgtgcaaatggtttattagtagacggagaagcgggtccagatacgctgaataaattaaattcaagcagctctagcagctcaaaaccttcaacatcaacaggaagcagctcaagctcaagctcagcttcaaaagttatttcatacggtaaacgttttatgggaacaccttatgtttggggtggagctgcgcctggaggctttgattgcagtggttaccttaactatgtatatcgtaatgcagtaggtgtaagtcttcctcgtacagttgctagcatctatcaaactggtacgcgtgtaagttcacctcagcctggcgatatcgttttctttgaaacgtaccaaccaggagctagtcatgctggaatttatatcggaaacggtcaattcatgcatgcaggttcttcaacaggcgtgacaatcacatcactaagcaactcttactggtcaaaacgttacttaggagcaaagcgttacctataagagtgtaacaaaaaggagtagttgtagaactattccttttttctatgcaccatgaacgtaaaagtaggaaatttttgcgcgatttggtatgataactagggaacaaataaaaggagtgtataacatggctattgtagatgtaaccattattccagtaggtacggaaacgccaagcgtgagtcagtacgtagctgatattcaaaaagtgttgaccaagcatgaagatgaaattacatatcaattaacccctatgaatacattgattgaaggggaattaagcacgctgctaaacattgttcaagagatgcatgaagtaccttttgaaaatggcattcagcgcgtatgtacaaatttacgaattgatgatcgccgtgataaagaaaatcatacgatggctgggaaattacaatcagtacagtctaaattaaaagcgaaataaataatatgcaatacaataaaaaacgcttgagtatccactcaagcgttttttattgtatttatacttaattagcatgcacaagagaaaaaatttgaaaagctacacgcagccgaagggtttcctccgacgtgtgaataggtctttttaataactcttcgcatttttcaattcgatagatcaccgtgttccggtgaacgaataactgcttagcagtctctgagatttggcaattggaatttagatatgtttcaagcgtgtcaagtaagatggagcgatcttttttatcgtactgcagcaaaccttctaatgtttgagaatagtaatcttgtaaatcgtttgctggaagcaacctcagcagttctttaaactgttttggctgataaaattgaataagcttcgactgatctttaaaatggatggtttcaagagcttcaacagcttctttatatgagtcagcgattgtaagtagggattggctttggtttccaattccaaatgacattcgcttatcgtagtgacagtaaacagcttcctgcaagcgatgcaagcattctataatcataggttgagaatgaggtgtaaacaaaagaatataaagattgtcatagaaaaacaaaacggcctctgtatgatctgctgataactcatattgaaggagctcatagatcatatcatcatcgctgtaaggcgtgaatgtagagtggatcttcccgacggcgcaaatatagctgtttcctgctgataagcccatcatctgtgcttgaaaggaagcatcttcaagtgttttataataattgttaacaagctgattgaaaaaatcgttttttcgtcgccgttcagcttcatacaaagcctgctgtctcatcatctcgaaggataaaacgtttgtcgcttgttcaatcgttaggagcgctgaatcggataaagaaacttggtgttcaataagtaaataactgtactttcttgtatgcgtcgcaatcggaaaaagcgtaacggtttttttggtgtgtaaaaaggaaaaggttgtatattttacggttcgtaaaaacagctgcttagcgcccgctaccgcttcttccatcgggagtgaaaagggttcgcgtttgtttgtataaaagagttcatggccatgggtatcaaaaagggcaacgtgagcattgcataacgtttgaatagattgcataattttctcaatgccttttccttgtaagatgtacgaggaaaatagctgatgtgtgaccatcgcttgctgaagctcggctgtttttttatctaaaataaagctgagagattcgttaataactgcgcctaacgtttcatccgtttggaaatcaatgatcggaaagtgaagttcatcagctagctgacaaatagaagcaggaacgtgttcgaaaaagcgcttcgtttttatggccaatcctgcacatttctttttagccattccttctacaagttttgctaagctttcttcatgttctttgaagtgataacccgttgtaattaaaaattctccttcttttaaaaaagataaaatatcgggtgcgtccatcatattgacgttatgtactttgcgggtgactcctttttgcccggctactacagatgctttttcataaattggaatgcgtaaaagagtttgtagttccattatttattactccttttgttaaaaattctcacatttccctgcgcgtatctttatctatcttttattttataagaaagtttagttaaaataaataaaattttcagaaaaaaatgtataaattgttaatgaagaagtgtattcaatcctgtaagatgaaataaataacatataatgttagaaaaagtgacgtatataagactttgtatatttagtgataatagccaaaaaaacactaaatcattgtaggaagtgttaatgaaaacaatcagtcattttcttaaaatgaagatagcaggagggatagcaatggttgcagatatgacgggaaaatctaagctttgtcagcaaatcgaagaaaacgttagctggttgtcacagtttgggttagatgaaaaaaaaggggtcacgaggcttttatatacagaagagtggaatgcagctcaaaaggcattggaagaaaaaatgaagggacttcacctcaaaacgtattacgatgatgtaggaaatttgtttggacggttgcaaggaacgggttcagaacaacaagttattttaacaggatcccatatcgacaccgtgataaacggaggaaagtatgacggggcgtttggtgttgtggcaggtatcattgctctgcagtacctatacgcgcattacggctcccctacaaaaaccttagaggtcgtatcactttgtgaagaagaaggcagcagatttcctcttacgtattggggatcaggtaatatgaatggattacacagcaaaagtgatgcaaaacatgttataaataaagaaggggttaagctgaatgacgcaatgaaacagctcaatttcggaaaaggcctccacagcgagccataccgcacggacatcgcttcttttattgaactacatattgaacaaggaaagcagcttgaaatgtctcgttgcgatatcggaattgtttctagtatcgtcgggcagaaacgatttacagtatctgttaaaggtgaaagtaaccatgcgggcacaaccccgatgaacatcagaaaagatgcattttatgtgagctgcaaacttgctaaagcatttattgaattgagcgaaaaatatcataacgctttatacgtaacggttggcaaaattacactttctccaaatgcaccgaatgtaataccaggatatgtagaattcacggtcgatataagacatcatgagtataagattttacaagaggcagaacgagaaatgaaggaaattataaagcgaacagcaggggatttagaagtgaatatcgactgctggatggatgaaaaacctgtcgccatgagcgaagaattatctgaactttccaaaattatttcctcggaaaagaatatctcctcccgagaattagtaagcggtgcaggacacgactcgcaggtattcggacgaagagttcccacatgtttgttattcgtaccgagccaagatggaatcagccattccccaaaggaattcaccaaaggagaacagttagaaaaaggagtaaaggtcttaatagaactattatataaacttgcctactaggaggaatttgacatgactataacaaaacagcttcatacaccgccgcgtacaattatgacacccggacccgtagaagcagatccacgcgtattaagagcattaggaacacctattttaggtcagtttgaccccgcatttacgcacattatgaacgaaacgatggaaatgcttcgtgaactatttcaaaccaaaaacaaatgggcttttcccgttgatggaacgtctagggctgggattgaagcagttcttgcaagtgtagttgagcctggcgataaagtgttcgtcccgattttcggccgcttcggctatttattaacggaaattgccgagcgctacggagctgatgtacacaatattgaatgcgaatggggagaagtgtttgaccctgaaacagttattcgtgaaataaaaaaagtaaatccgaaaattgttgcaatggttcatggtgaaacgtctacaggaagaatgcagcctcttaaagaaattggtgctgcatgccgcaaccaagatgttttatttatcgtcgacgcagtagctactattggcggtacggatgtaaaagtagatgagtggaacattgacgcattgattgcaggcacacaaaagtgtttatctgttccgtccggcatggcacctattacgtacaatgatcgtattgaaaaaattatcatggaacgtaaaaaagttgaaaaaggaattgcgacaaaagcagatgctcaaactgttcgtctgcgtccgaatattatcagcaactattttgatttgagtcaacttcaagactattggagtgagcgcagattaaatcatcacacggaagcaacgtctatgctctatgctttaagagaagggctgcgtgttattttagaagaaggattagaggaaagatttgcaaggcatcgcctccatgaaaaagcacttgtagccggtattaaagcaatgggattatctttattcggagatgaggattcaaaagttccaaccgttacttgtgttttaattcccccaggtattgacggagaggcagttcgttctacgcttcttgaacaatttgggattgaaattgcaagttcttttgggccgatgcacggaaaaatatggcgtatcggtacaatgggatacagctgtcgaaaagacaacgttctctttacattggctggtcttgaagcagtgcttattcgaaacggcgcaaccgtgaatgcaggttctgctttacaagcagcattagaagtttacgaggaagaagtagcgttgtctagtctgtaaagattcgttttattcatcatataaagaaaagaggagattttctatgagcgaatacttttttacacacccctatgcatcgcagcgtacgtgtacgtttggaaaaaacggaatggtagcaactagtcagcctcttgccgctcaggcgggtcttgaaatgttgaaaaaaggaggcaatgcggtagatgctgctattgcctccgcagcttgtttaacggttgtagagcctacgtcaaatggaattggcggagacgcatttgctctcgtgtggataaatgaagagctatacggactcaacgcgagcggtcctgctcctgcttctatctctattgaggctctgcgtaccatggggataaaagagatgccagctcgcggttttgttcctgttacggtccctggtgcccccagcgcgtgggtggaactatcaaaacgctttgggcgactatcgttaaaagaagtgctgcagcctgctatttcgtatgcacaagaagggttcccaatctccccgattttagggtacaattgggaacgagcgtttgaacgatttacacaagcgttaaaaggtgacgaatataagcactggtttgagacgtttaccaacaatggatcagctcctaaagtaggggaagtgtggcgatcaccggaccatgctgctacgctgcttgaaattgccgaaacgaatggagaatctttttacagaggggatttagctgataaaatatcagctttttcgaaaaaatacggcggatttttagcaaaagaagatttaggagcttttaaagcagagtgggtgaagccaatttcaacttcttaccgaggatatgatgtgtgggaaattccgcctaacggccaaggccttattgcacttttagctttaaatatgctaaaaggcttttctttcgatgtcaaagattctgtcgatacataccacaagcaaattgaagccatgaagttagcgtttgcagatggccaaaaattcattacagatgctgataaaatgaccgtagcagttgaagacttgttaaatgattcttatgcaaacaaacgcagagggctgattggtgaaaaagcgcttattcccgaagccggacagccgtctcatagcggcactatctatttagcgacagcggatggagaaggaaacatggtatcattcattcaaagtaattacatggattttggctcgggacttgtcgtacctaatacaggcatatgcctgcaaaaccgcgggcataatttttcgttagacccaaaccaccataaccgattagagcctggaaaacgaacctaccatactattattcctggatttttaacaaaaaacaaacgtgctgtaggtccattcggcgtcatgggtaaatttatgcagccgcaaggacatgtgcaagtcatcatgaacatgattgatttccacctcaatcctcaggcagctttagatgcaccaagatggcagtggattgaacataaaaaggttcttgtggaaaaagaaatgccttcgcatattgtagaagcattagaacgcaaagggcatgatattcatgtggccacaagcaggcatacgtttggaagagggcagattattttaagagatgaacaaaccggtgtattatacggcggcacagaagcgcggacagacggagccgtcgttgcttattagatcacagagaaaggagcgcgagaaatgcgacaattggatatttttatagcgttttttcgctcaggtatgctcggctatggaggaggaccttcagctattccactcgtaaaaaaagaagtggtcgatacgtacaagtggatggatgacgatgaatttggcgatttgttagcaatcgctaatacgctgcctgggcctattgctacaaagctggctggatacatcggctatcgagtcggcggtattttgggtctcgggacagctttatttgcagccgttattccaaccgtttttttaatggtattgctgttaacaactttaacgcaatttaaagatcagccgtgggttatgggcatgaccaaagcagttgttcctgtagtgggagttatgctcgcggttatgacgtgggacttttttaaaaaatcaacgtctggtttagggtggacgccagctattatcttactgattattagcttaggattaatggaatttgcccatatccatccagcggtcattattattgttcttatggcggcagcttggattccgttaaaacgaaaagaaaaaaaaggcgaaagtgctgaacacaagcagaagagggaatcggtatgatttatattcagctatttatggcgttttttgtttcaaatattttaggctatggaggcggacctgcgtcgattccgcttattcaaaaagaagtcgtagatcgctaccattggcttacggtcaaagagtttagtgaaatgctggcaattggaaatgcgcttcctggtccgattgcaacgaaaatggcggggtttatcggatatcagcaggcagggattttaggctctgtgattgctctttttgcaacgattgctccatcggttttacttttagttattttacttcgaatattatttaagtataaagattcgccaaatgttaagaaaatgacgaactacattcgtcccgttatcgccattttactgggcttgatggcgtatgaattttttatgaattcatacggtgattcagggatatggcaaactttatttttggtagcatccagctttcttttattggaaaaattgcgtgtgcatccagcgttcgttattgtcggagcactcgtatacggagctgtttttcttgcttaaatgaagctctcaaataatgagagtttttttgtgtaaaagagacgaaaagaggggaagtcatggttgaaaaagcagcgctagaaaacgttcaggatttggttaaactgcgaatgttgctcatgaaagaactgggagaattaaacggaaacgaggagctgtttcaaaaagctacagaagaatattttactgcaaatataaataatccaaataactatacggctattttaaaagcgggtggagaaattgtatcagcaggaagcatcgtcttttttatacgtccgccttcaccgagtaacctccaaggaaaagaagcatatgttatgaacatgtatacagctttcgatcaccgaaagaatggctattcttcagctattttaaagcatttgatgcagtactgccaaaaaagtggtgtaaatcgaatatggttaaatgcttcttccgctggaaaaagcttgtatcaaaaacatggatttattggatgtgaatctgaaatggaatacaagtttgaaaaaaattagagtagcaaaactcttgatagagatgggtttgaaggagctatggtttttaaaaaataaaaaaaattaataaaaagtgttgacgaagataaaaaaaccattcataatacaaatcaacatcacacaacattacacacaacttggaagcgacaaacagtttcaaacgatcggaactgattatccaagtacacatacatagtcaatactgagcgttgataggagcactagtagaaaaaatttccctgtaacagagagctgacggttgctgcgagtcagaacacaaattttttcgaagtacattccttgagcatcttttccgagcaggaaaagacggcctggccgttattttaatgaagaggcaagtgaaatgcttgcaactagggtggtaccgcgaattttcgtccctactgactcttaagaaaaatcttaagggtgagtagggactttttgtatttcggtccattataattttatatccattacaagcgatgaaaagagcatagtagcaaaatcttccctgtattcagagagctgatggttggtgcgaatcagtacaaaagagattgcgaattacattcttggagctttcttttggcgatagtcaaaagcggcaatagccgttatcttaatgaagaggcaagcaatgcttgcaattagggtggtaccgcgatcaattcgtccctactgatacaatcagtagggactttttgtatatccgcataagcggttgtgtaggtgtaaaacggatttttcaatacaaactaaacgagaaagtccgttcgaggttataaaatcaaaggaggatttttaaaatgacaaaatcactagaacaattacgaggacaaatcgacgaaataaatttagaaattttagaattattaaacaaacgcggtgaaatcgcacaagaaattggaaaagtaaaaggtacacaaggtgtgaatcgctttgatccagttcgtgaacgtaaatcgttagatcaaatcttagctaaccataatggtccattcgaagcttcaacaattcagcatattttcaaagaaattttcaaagctagcttagagcttcaagaagacgaccaccgcaaagcacttcttgtatctcgtaaaaagaaatccgaagatacaattgttgacatcaacggtacaaaagtaggacctggaaatttagaatttgtaatggggccatgtgcagtagaaagctacgaacaagtaaaagaagtgggcttagcgcttaaagaacaaggcattacattaatgcgcggcggagcgttcaaaccacgtacatcaccttacgatttccaaggtcttggagtggaaggactaaaaatcttacgtcaagtaggagatgagctaggcctatcaattattagtgaaattgtttctcctcaagatattgaaacggctctagactacgtagatgtgattcaaattggtgcacgtaacatgcaaaactttgagctattaaaagcagcaggttctgtagataaaccaattcttttaaaacgtggattggcagcaacaattgaagaattcattaacgctgctgaatacattatgtctcgtggaaatggaaacattattctttgtgaacgcggtatccgcacatacgagcgtgcaacacgcaacacattagatatctcagctgttccaatcttgaaaaaagaaacgcatttaccagttgtagtagacgtaacgcattcaacaggacgcaaagacttactattaccatgtgcaaaagcagcgattgctatcggcgcagatgctgtaatggcagaagttcatccagacccagcagtagcactatcagattcagcacagcaaatgaacattcctgaattccacaaattcatggaagaattaaaaggtgcagcagtaaaattatcttaatttcatatgtgatacagtgataagaaactagtagcaaacatttccctgtctcagagagctgacggttggtggaagtcagtacacaaatgtgagcgaattacactctttgagtactcttttacagagcggtcagcggatcgttaacaattcgaggtggcaaacaatgtttgcaactagggtggtatcgcgagaaaaactcgtccctatgacgcaggggcgagtttttttattttttataacagaaaggaatcgataatatgagatatttaacagcaggagaatcgcatggacctcaattaacagcgattattgaaggagtaccggcagggcttgaattaacagccgaacatattaatgaagatttagcaagaagacaaaagggacatgggcgcggacgccgcatgcagattgaaaaagatcaagttcagattaaaggcggggttcgccacggtgagacgcttggttcacccattgctttagtcgttgaaaacaaagattttactcactggagaaatattatgggtgctgatccagttgatcatgatgaagaagtaaagcgacaaattacaaaacctcgtccaggtcatgcggatttaaatggagcgattaaatacggtcacagagatatgcgaaacgtattggaacgttcatctgctcgtgaaacgacggtacgagtagccacaggcgcagttgccaaacaagtactaaaagctgtaggcgtaaatattgcatgtcacgtgcttgaaatcggcggtgtgaaagctgaaaaaacggcatatgagtcactgacagaacttcaggaaaaaacagaagcgtcacctgttcgctgcttagatgaagaagcgggacagaaaatgatgaaagcaatcgatgatgcaaaagaaaatggagacagcattggtggcgtagtggaagtagtagtagaaggaatgcctactgcagtgggaagttacgtgcactatgatcgtaagttagattcaaagctagctgctgctattatgagcattaacgcgtttaaaggcgttgaaatcggcgtaggctttgaagcagctcgcagaccgggaagtgaagtccatgatgaaattctatgggatgaacaaaacggctatacgcgtaaaacgaacaatgctggaggtttagaaggaggcatgacaacagggatgccgattgttgtgcgaggcgtcatgaaacctattcctaccttatacaagccgctgcaaagtgtagatattgatacaaaagaaccatttgctgcaagtattgaacgctcagacagctgtgcagtacctgcggcagcggttgtagcagaatcagtgattgcttgggaactagcatctgctattatcgatcaatttggggcagatcgaattcagttaattcaagaaaatgtaaaaaaacatgaagaatacgcaaagcaattttaatgaatagaggagaatgaaaggtgaaaacacgtgtattacttattggcgtcggccttattggaggatcattagcgctagctatgaagaagcatcgtcacgtcacagtcgttggagctgatatcaatacaaatgaagtacaagtagccaaccagctaggtatcgttgattatgtagctgaagatataaaaacagaagcagcccaagcagattatatcgtgcttgctactccagtagagtacacgacagcatggatacacgacctttctacttggaagcttaaagaaacggttatcgtaacggatgtcggaagtaccaaaggtgaaattatgaaagcagccgaagcgctgaataagaaacgtatttcatttattggcgggcatccgatggctggttctcatacgagcggtgcagtcaatgcacgagcggatttattttgttcggcgcgctatattttaacgccgtttgaaactgagcaaaaagaaaaaatagatgcgcttatgcatttgctagagcctacaggtgcacaatttgtaccgcttgatgcagctactcatgaccaaatcactggagttgtcagtcatttacctcatgtgattgcgaccagtcttgtaagacaagtaaaaggatattcagcacagaatcatcttgtcacggaaatggcagcaggcggttttcgagatattacgagaattgcttcaagcaatcctcatatgtggagagatatactaaaacaaaaccgttctatgcttttaacattgcttgatgactggatgaaagaaatggaacaagtaaaactattagtagaaaaaggtgacggtcacgaattatttgattacttttcagatgccaaagaatttcgtgattcgcttcacgcataaaaggagagacatattgtgacagtaaaagctttacgaggaacgattcaaattccaggagataaatccatttctcaccgttccgttatgtttggttcaatcgcagaaggaacaacaacgattaacgggtttttgccaggagacgattgccttagcaccatttcctgctttcaaaaactaggtgtagacattcaaatgattgatgaacaaagcgtcgtagtaaaaggaaaagggatacaagctctaaaagagccatctgatattttagatgttggaaattcgggcacaacgattcgccttatgatggggattttagcaaatacaccctttcattcaacattgattggagacgaatccattgccaaacgccccatgaagcgtgtgaccggtccgcttcgtgatatgaatattcatttagatggccgaaaagacgctaattttacaccgcttgttatacgaggtgggcaagcaaaagggatacactatacatctcccgttgcgagcgcacaagtaaaatcagctattttacttgctggactgcaggcggaaggaacaacttctataacggaaccggcgaaatcacgtgatcatacagaacgtatgctagaggcatttggtgttaaagtcgaagaagaaggcttaaccgtttcaattgaaggcggtcaaacgttaagaggaacgcatgtagaagtgcctggtgatatttcgtcagctgcattctttttagtagcgggggctattatttcaaacagccgcattgaaattcaaaaagtggggatgaatccgactcgaacgggtattttagatgtgctttcaaatatgggcgcttcgatcgagacagtcaaagaaacaaaagaaacagcggaaccctatgcagatttagttgtagaagcttctcacttaaaaggtacagaagtaggcggagacttaattccacgcctaattgatgaaatcccaattattgcactagctgccacccaagcagaagggattacagttattaaagatgctgcagagttaaaagtcaaagaaacaaaccgtattgatacggtagtgaatgagttaaccaaaatgggagctaacattgaagcaacggaagatggaatgattattcacggaggtacaaaacttcacggagcaaatgtaaacagccacggagatcaccgtatcggtatgatgcttgctgttgcctcttgtattgcagaaggggaaacaattattgaaaatcgtgacgcggtatccgtctcttacccgcaattttttgctcacttagagtctttacaacagtaaattcccttattatgttaaaatagcagtttgaaagttgtaaggaatttataaaattaaaaccaatgactctatatttcgccggagaaatccgatataatcattacaacacctctagtattaaatagaatttggtgaatgattatgtttttgatgattgtctacatcggggccattttattttttataaaaatgtttatggatcgagattttatttggtttttatttttattgccatttttgatgtttgttatgttttttgaaacagactatcttgatcatgtccctgaatctggaaggttaattatctttacgttttcttttttagtcatttatgcaatggttttggtgtataatcgatactttagaaaagaaggatgtaaagagtaaactcaaatgtgaatccattgataatgataaaaaaagcatgccctacggcgtgctttttttatcgcttgaattgacctccactggcgtaagcggctttttagcagggccttctaccacagatccgtcgtaagagaaacgagaaccgtgacaagggcagtcccacgtgcggtcaccagcgttccaattcacttcacatcctaagtgcgtgcatgtagtatccacgcagtgaagcttcccttgaggatctttataagcccccgtacgtttgctgtttacgtatacgactgacccttcatcattttgaagctgatccagtcctttttcaggcattgaaaacttaccggtaataaagtgttcagccacatcaagattttgacgaaagaaatgcttaaggctagggtccgcataaaaacgagatggattatacaactctgcatatgggttgtcttttccggttattgcatctcgaataatatgtgctgcaatggtgctatgagtcattccccattttttaaatccggtggcaataaagatatttggcttgctttctttaatgggaccgatatatggaattttatcaagcgtaaataaatcttgtgcagaccatttataacgaaaatgttgaacagtaaaattttcttcggcgaacctctgaagggactcatagtggtacatagtattaattccttgtccagctttgtggccttctccaccaattaaaatgagttcttctccgtcaacttttgttgaacgcagcgaatgagtaggctgatcagcacttaaatacatgcctccagggtaagcttgttcaacttttgctgctaacacatacgaacgtttggcatacatgcgcgtatagtaaaagcccgctccatcataaaatggaaagtgtgaacacgccactacatatttgcaagaaattcgatggccgtctcttgtgacaacggtgggcgacgtgctttcttctacgtccgttgctacggtgttttcaaaaatcaatccgccgctttctgtgaattttttcactaaatgaagcagatattttagcggatgaaactgagcttgatctttcataatagctgctgccctaatatcaaaattaaaaggaagctctgttgcaaattcacatggaatatgtaatcgctgataggctcgaaattctttacgaactcgatgatcaaactccagcgtttctccgtacaagtaagcatcttgtaccgaaaaatcacagtcaatgttttccgtttgaattaagtttttcataaactgaagagcttgttcgtttgctttataatacagcagcgttttttcttcgccaatgtgtgaaagcagctcatcgtagataacgtcatgctgagctgtaatctttgctgttgtgtgaccggttgtcccatttaaaatattatcagcttcaattaacgccacgttcagtccttctttttgtaataaataagctgttgtaataccgctaataccgcctcctactactacaacatcaacttttcgattttctgaaagagatgggtatgttggaaactttaaatgatcgcgccagtagggctcagtatcctttgggatatttgccactttattcacctccatatgataagtcttatttttaccatagttttctaaaaaatgtatgcaaaataaaggaatctactctaatagtgtctctttgctatacccatttaagcaaaaggagaggaaaagagtgattacaatcagcctttgtacgattgttgcgaacgaagcagaggctaaacgaaaatatttgctcttcaagattcctctgtttcacggtggcttccgcacctgcaccttgccgtttgctacgatagaattggtgaataaaaagcagagtatgaaatagtaaaggttacagatttaaacatgaagagcaataaattcatataaatgatagggagcatcatataataaaagtatagaggcttaattcggcaaaagatatttaaacatacaaggtccaaataaaagggcaaacggcatgtttgtccttttttcatgattatagtgacaattttcatatatagtaataaagtatatatatagcaaaaaaatcccaaatttcaagaatataaaaaacggcttaaaaccaaaacaagttgtactctcagagtatgtagaacgtgcaaaaaaacgaaataatatgtagtattgtaatacaggatgtaattgggaagaaaaatgaaaacgttgacaaaaagaggaggggtaccatgttgggttcactacctaatgttataaatacgtcaacgcttgtgtcttcaagtgaacaacaagaagcgtcatctgaatcatttaaaacatatactcataaaggaaaaaaattcaaggtctatttacctaaatcctatcatattttaaaatcttacccactaatggttatgctgcatggatgtacacaaaatgcagatgattttgcgataggcacgcaaatgaatgagctcgccgacgaaaaggaatttattgtcgtatatccacagcagtcttctaactcaaatatgaataaatgctggaactggtttgaacctcttcatcaaattagagggtttggcgagccagctattattgcagggattgtaaagaaagtccaaaacatgcattttattcagaaaaataaagtgtttattgccggtctgtcagcaggaggagcaatgagcatcgttatgggggtaacgtatccagaactgtttgctggaataggtgtgtcagcgggtatcgaatatcaggcggctcttaacgtatttaatgcgtattctgttatggccagtaaaggtccttcccccgtgaaacaagggagaattgcttatcagcaaatgggaaaacgggcaaagccactgccgctcattgtatttcatggtaacgctgattctacggtaaatgtagccaatgcagatcaagtggttcaccagtggattacaacgaataatcttgcttataacggaagaatagatggatggattcaagatagcccggttaaaacgagagaagaaaaaattctctttggacgggattatacaacatatcgctacgaaagcagtaagggagaattggctattgataaatatattatcaatggaatggggcatgcatggtcaggagggaattcagcgggcagctatacagatcctaaaggccccaacgctagccgaatcatgtgggactttttcatgagtcaaaaagtataaacagagcatataatgaggttcagttgcgttcttatcgcagagaagaagagctgaaagtagctcttccggcccttattagtataaaaaagcagctgcaggaaccattattttaactagacgtgtttttctaaaaattaggatttgattatttagaaaacgggtactgtaataaagaaaataagaagccaaaattacatagcttaggattgacagcttatagttgtaaatgtaagataactgcgagctgcattttgtatgattaaaacattcaaataaaccgaaaactgaaaaaataaatagaaattgtaagatgagcgggtaaggaaaaggagattaaaaaatgaatattgcatttttcttagtaccaaaaagtgatgttgtaacactaaatattcaatcgacattaagacaggctcttgaaaaaatggagtaccatcgctattctacagttccgctggttgacgatgatggtaaatatgtgggcgttcttactgaaggagatcttctttggaagttaaaaagcctaggagactatcgctttcaagatacggaaaatattaaattaacagagattgaccgctatcaagattataacccagttgctatatatgatgaagttcaaaacatcctttcaaaggcaattgaccaaaattttgttcctgtaacggatgatcaaggtgtatttattggaattgtgagaagaagagaaattctagagttttatgcagaaagcgcaagtaaagtgaaaaatcaaatataaaaaaagccatctctagatggctttttttcttgtcttatctgccccgtacatactcctaaaaacaggcttaggtcatggcccacagcaatgcacttccttgtactagtttacataatctatttatataggtataaaattgcctatataaatcttatttatagataaggatggtttatgtgagttacaacaacaaaaagaagtgttgctggtgttctaatcagtattattacaaaacttctggctatgatccaagaagtagccacgaaggaaaatgctgtaataacgattataagcataacgatcattgtcctaaacatgatgatgatcatcgttctgggcataaaaaatgccatcatggtggcaaccatggcggaagtcacgacggtaaccatggcggagatcatggcggaggtcacggcggtaaccatggcggaggtcacggcggcaaccatggcggtaatcacggtggttgcaaaagacgtcgctgctgttggggctgggtgttttaattcaataaacatttgaattaaaatgaagcgttgatttagcagaaagaactcaagaaattgagttctttttttgtaagttgaaacttataaacggtatacttcgtatatatagtaagagcattttggaggaggaaaaagaatgtttaaaaaaatgtttgctaaaattggggttggagctgccaaagtcgatttacgattaaatgaaacggcttataccctcggtcatgtaattgaaggagctatcgtcatccgaggcggaaacgttcagcaacatattaatttaatcgatgttgaattttggcttgaagttcaaatgaaaaacggtcaaatgcatacacatcgtgttgaaagcctgcgcgcagcttcttcatttacaattaatgaaggagagaaaaaagaaattccatttacataccatttgcctctggatcttccaatctctgcaagtaatgttggctatttctttaaaacacacttagatattgaagggggagttgactcaacagaccgggaccctgtgcgcattaaagctccaaaaagcttatatcagctagtggaaggctttgaagcacttggtttcagagaaaagcatcattcaggaaaatttaatggatacaaacaagaatttgcatttttccctacagacttcttaaagggatatgtaaatgaagttgagtttgaggtagccattgaaagagaaggtatccgcgtgctattggagctagatttgccttctttcggccgagagagagaaataaaaaacgaactcttttttacaaacgatgaattaagccattcatctactattgctcgtttgctggaagaagcgatggaagagatgatggaaaatcctcgggactatgaatattataagccttctcactatgatcagcactcacatcactcccgtatgagcgggttaggaggagcaatgggaggctttgcagccggtatgttaggtgggctgctcattgagaatttgatggatgatatgtttgaagactcgactcttggtgaaattggagaagatattgaagaagccggggaggatctgcttgatggagatttttttgatggaggagacgattggtaaaatggattttgaataaataaaaaggatgattaatgatgatcatcctttttttctttcttctttcttttttttacttctatatacttaatgtgaaaatcttctataatcaaaactttaaagtaaaattgctcatgctgaatgatatcatttttggtcacatcaaacttttcggttaacacccacccggcaatggtatctacttcttcgtcgctaatatctgtgccgagtaaatcatttacttggctaatgagcatttttccgtcaagaatataatgatcctctttaattttttgtacataaggaatttcgtcagtatcaaactcatctcgaatttctcccacaatttcttcaataatgtcttctactgtgacaagcccagcagttccgccatactcatcaaagagaatagccatttgaatacgttctttttgcatctttacaagcaagtcgtgaataggtacggtttcaattactttaaaaataggcttgacgtacgattctaacgtattggtgccgtctttttcgttgaatacaatatcattataaatttctttaatattaacgagaccgattactttatctttatccccatcttcaacaattggatagcgcgtatatttttcgacatttgcaatttgtaaaaaaacctctaccacgtcgtctttagaagcacttacaatttctgtacgaggaaccattacttctttagctaaacgatcatcaaaatcaaaaattttactcatatatcgatattcggattgattgatttcaccgccttcaaagctctcagataataaaatgcgaagttcttcttcactatgggcagcttcattttctgaaatcatcgttataccaaaaaccttggtcaacatacgagctgagccgtttaatattttaatgaacggatacataagtctgtaaaacacgataatcggttttgcaaagttcagcgtaatttgttcagccatttgaatagcaaacgttttaggagctaattctcctaagacaacatgtaaaaaagtaataacaacaaatgcaatgacaaaagataaaataccggcaagcggctcattcgtatggaaggtagtgaaaagagggtgaagcaaccggtctagcgtcggttcaccaagccaaccaagcccgagagccgtgatggtgataccaagctgacaagcggatagatattcatctagatgcgtaataacgtgtttggcagagacggcttttttatttccttcttctagtagctgattgatttttgaactccttacttttacaatagcgaattctgtggctacaaaaaaagcagttaatgcaattaaaactgcgactaatagtaattttacggcgatcattaaagtcaccaccttgtgcgtaaatgtatatcttaagtgttagccaaagtggagaaaacatgtattaaatccggaaaagaaaaacgcacataaaaaaactgcttctatcttttaaaagaaaaagaagcagtttattatgttacatgttcatttaggggaattaaccttaactttaccatcatggtctatcacatatcggttctacagttcaactgacttttagcaaacgtattgcgagcgtgttatgacacctcctttaactgtaatccgagtatatatgatgcatccctcactcctttctattagttaactgtattataatacataattaatcaaaatactacaaatattcagaaaataattcgaaatgcatagttttttgtcattttctgaaatatacacacaaaacgagattgagatataacaaaatcaatacaatctaaagacgaataaactgagtaaatgatctggtatgggtcgtttggttacactgctggtgatttccgtgcaaggctacgcttttcgcgggcggccgatgagcctcctcgttgcttgcgctcctgtggggtctcatctattccgcttttcccacaggagtcttcgccttgccctccaatcaacagctagaagcaactctaaacataacctatattcaccataccaatgaaaagatccgaacgatgaatcgttcggatcttccttcaaccaaaatacgtttgtatcagcctctttttaattaatgcaggttatggttattaggcatctgaggagaggcagtggcttttgcaaaacttgtgatcatttgctgcatatcttcttttgcaagctgcggcacttgataataatggtgtttattttgataaagagaaatttcataagccatttcaatccagttaggaacactgtctccgaatattcggcgaacaacaggattcgttatttctaaagcggtcatggttaaaagagatgcctgagacttaactagacctagcatatgacctgaaattcctttttcattaatttcctcaacggactgattcggctttttaggctgcgaaggctttaagccataaacaaaggtatgagactgcttcatgttgtatacatgtgtagaacccgccggcttttgaccggtagaaaaagcttctacaatcaaattatattcgtctaaaataaactgatactgacgatcaataatatcaagcagttcttgttcttttacatattgccgaaacatcataaactgatccattacattaattgagcccgcaagcgtttcatgaacatcaaacagttcatgccctccatgattcaattgaggggggacagctccagtttgcatgtttgtaggaagttcgtgattattcatactaagtcctccttaaaatcggtatcgactatagtctttaaactttttctggttttatactcaaactttctttattcataaaatattgctttaaataactaaatttacattcagttatttttaattaaagggtaaaaatgaaagggttttatgaaaaaaaagcgaatatcaataacaattcacgatctatagataggggaatcaaaaaacatgaatgagctgctgtcatactcaagtgaattaaaacacgaagcaaatcaattggtggtatccaatcgtttattggatctgttaagagaatacggttgtcctctctcaggagagagttttgagttaaatgtcatgacaaatcgcatcattcatttttacgtaggaaatgatgaaatggatgaagaatctatttttcacatggggtatcagcttacaaagcgttttaacccttataagatgatatttgctaatgaaaaagataagtatcagtggagtctgtatatgattcagaagggagaagagtggaagcttgatatttcagtgcttccagaaaatatcgtgaaaggcaaagttgagaaacaagagttattaaaatcacttctcactgaaaagaagcgggaatgcattttatttttcaagcagcaaagcggatataatcgctattatacgagtgatcatgtctataaggctgtgctagaagatgacattcacgatgatatgtctttttttatgtggctgcaaagacaaaaaaaagtaaatcaacaaacgtaaaaaagagccgcttaggctctttttatgcgtttacggatattttcacaggtaaagcagcttttagcatccaaatatgtttttcaatgttgccgattgttccaatgaataagtcagctgttacgtgatcctgtgctgcttcagcgttttcaactgcattttttaggtttttgacaagtagcgtatagtcattaattaaggtttctaccatttcttcactcgtttgctcgtttccatcttcagaaagagtagctgcttgcaaaaattgcttcattgtagcaattgggcttcctccaatggctagtaatcgttctgcatattcatctatatagtccgccgtctcattatagaattcttcaaatttttcatgaagcgtaaaaaattgaggcccttttacataccagtgaaagcgatgtagcttcgtatacaatacgttaaaatcggcaatttgttggttcaa

SEQ ID NO: 26 - DNA, 64146 bp, Priestia aryabhattai
  source 1..64146: mol_type = genomic DNA
taatattcgtttttatttcatttatttagcatgacatatttttgtatgatactattcttaccgtctcttattccataaaaaatgaggttgagacataatgaaatgaattcaatctaaagacgaacaaaggggatacatgagctgaacagcttgtgacaccgcatttgatttccgggcaatactccggtttccgcgggcggacgatgacctcctcgtcgcttgcgctttccccgcaggagtcttcgccttgcccttcaatcaactgatagaaggaactaaacagatgaaacctatgttcaccataacaaaaaaaacgaaccactaatcaaacatgttgatcaatggttcgtttttcacttgggctaaaatacttttgtcccagcctcatcttttctagtaacattattaagatccaacatcctcattttgctgagaaatcagcacggaacgcggcttacttccttcataaggtcccaccactccacgctcttccattgcatcgatcaagcgtgcagcccggttatagccaattcgaaagcgtcgctgcagcatagaaacagaagctgtttgcatttctgctacaagctgtaccgcttcgtcatatagctcatctgcaaaatcatcaacttgttcaggagcatcggttggaatcatttcttcttgatactgcgctttttgctgtgcaattacaaaatcaacaatttcttctacttcttcatctgataaaaaggcaccttgcacacgcacaggttttgaagctccaacaggcatgaacagcatatctcctcttcctagaagcttctcagctcctcccatatctaagatcgtacgagagtcagtttgtgaagatacactaaaagcgattcgggaaggaatgtttgctttaataaccccagtaataacatctactgatggtcgctgtgtagcaataatcaaatgaatgccggcagcacgagccatttgagcaagacgtgtgatcgaatcttcgacgtcagatgaagcaaccatcatcaagtcagccaactcatcgacaatcaccacaatataaggaagagtcggctgttttgcatcggcgtctccatcatcattcatacgttttactaaatcgttatatccttcaatgtttctcgttccgctgtgtgaaaacaactcataacgtcgctccatttcacttacaactttctttaaggcttgagaagcttttttcggatccgttacaacgggagccaataaatgcggaataccattgtacatattgagctcaaccattttaggatcaatcatcattaattttacttcatgaggctttgttctcattaaaatactaataataataccgttgatacacacactttttccgcttcctgttgcccctgctacaagcatatgaggcattttattaagctctgctagcacagcttcgcctgaaatatctcttcctaaaccaactaatagctttttatccggtcggttattttcagttgcttcaagtacttctctcagtgaaaccatcgctacttcttcgttcggcacttcaattcctaccgctgatttcccgggaattggagcttcaatccgaatatctttggcagctaatgcaagtgctagatcatcacttaaattgacaatcttacttacttttactcctacatcaggatatacttcatattttgtaacagctggtccaaggtgaacttttgccacttttgcttttacgccgaaactttgaaacgttttttcaagtttttcggcatttttataaatgtttttatgctcttttgcttggttgcttttctttggcatcgttaatagcttgataggaggaagctcatactctttattttccgtttcagtaaatgtaatcataggagctttttcttcttcctgttccttttgcggccttggctgttgcggtgcagcagctacaggcttcgattccatcaccggcggcacctgagctataggagcagcaggagattgactagactcttcctctccgtagtcaaagtgttcaataattggaggagaaggtgcttctacttctatttccatgctttcttcaggttcttgcacagctttttcttggcgtctcttttttgttgttttaggagcttttttctttttatatttccacgtctgaatatcttgccagccttcttttaactccgttgttaaaaaattcactagaggtgacaaaagttttaataccgtttcgtgaagcgaacgtccggtaataagcagtaccccaatcacaataagcaaggcagcgataagttctgttcctatgctatcaaatagatagtagaacatggcaaacataatagctcctatcatccctccacccaaatcactgtgattcgattggcccgttgcttcgagcatatacaaatcccacgtgttcataatgacagacggatctgtaaacgttccatttttcgataaattttcaaataacgtcacgtgactaaaaagtaaaatagataaaataatgagatatgtaccgataagctgccgcgtcactaaaggaggcatttctcttttccaaataatataaacagatagaatagccattccgattaaacacagcatataccattcgccaataaataagcggaccactagtacaagggcctgtcctacagcaccaagtcctgccatggcaattaacgttaatgctaataaaaataagccaataagctcaaagcgcaatatgcgtttccattcatccttttttatttgacctcttcgttttttctttgccatttttccactccaatcaacgtccaacactctatgttgattttgtttcttttatcagttgaataaaaaagcagccaatacagcggctgccttcttcgtcatattcattataccatattcaccataattatactgaaatccttacgacaaaatttgaccaggataataattttcattcaaataatcttgaggattcgtgcttaaaatcctcacaatttgctgttgcttttgttcattttcttcaacaataaccgggattccattatggttaataagctttggctgagattgttcttgatgataagactgctgaaagatcagttcttgcggcatcattgtatacagaatcattgcagcagctgctcctcgttctgacgtccttgctcaatcagttcattcaactttttgatcgcttgagcaactccgcctacttcgttaattaacccgtatgaaacagcatctccgccaactacatttgttccgatatcacgcgttaagttcccttttgaaaacataagttctttaaacttttcttctgaaatatgagagtgttctctcacaaagttaatcacgcgctcttgcattttatctaagtattcaaatgtttgcggtacaccaataacaagacccgttaagcgaataggatgaatggtcatggtcgctgtaccggcaatatacgaataattagttgaaaccgcaattggaacaccgattgaatgtccgcctcctaacacaatagacacagaaggcttggataacgaagcaatcatttcagcaattgcaagacccgcttctacatctccacctacagtattcaagataataagcaatccttcaatttttggattttgttcgatcgccacaatttgcgggatgacatgctcatattttgtcgttttgttttgaggaggcagctgcatgtgcccttcgatttgtcctacaatcgttaaacagtgaatattagaatcctgaggaagctgagccacgttggtctgtcctaattgttgaattttatctaatattccgcccttgctttcttcatttttattaggctgctgaggcgcttcatcagaatgtaatctttcgttattttcaaacatattctagctcctttcacttattgatagtagtagtatgaacttctcatagttattacatccgcatcagctgcaaataaaaagccttcccagcgggaaggcttcacattagatttccatgataatcggtaaaatcatcggtttacgacgggttttttcatataaaaattgatttaaactttctctcatttttaattttaatgaagaccactcgatcactttgtcttccatacacttttctaaaatttgctgaacaatcttcgttgcttcttctaaaagcttttctgattctcttacatagacgaatccgcgcgagatgatttctggccccgctactaccgttttttggcgtttgttaatcgtaactactaccgttaagattccgtcctgtgaaagcagcctgcggtctctcagaacgatatttccaatatcaccgacgcctagtccatcaatgagcgtatttcctgcttgaatagaaccgctagggtacatgcgagcatctttaaactcaactcgctcccctttttcaagcaaacaaatatgatcttctgatattcctaattgaccggccagctttgcataagctttttgttttcgatactctccattcacaggcatgacatatttcggctttgttaagttaatcataaattttaattcttcttgactgccgtgtccggaagcctgcactttcttctgagcaaacactacgcttgctcctaaacgaaagatgacgtcaattgtttttgaaaaggtcgtttcgtgccccgccacaggtgtagcagccagcaggatcgtatcatcttgtttgatttgaataaatttatgggactgtttagccattcgagtaagacctaaaatcggttctccgtgatgacctgttgttaaaataaccgtttcatgttctggaagatcttttagcttttgcacaggaacaattaaatcctcaggcaactgcaaatgtccaagttttgctgcaatatcaatgattttcagcatacttttttccataatgatcaggttacggccgtgctgatatgcggcatgaatgatttgctgaatgcggtgcagattggaactgtatgcagccacaatgattcgacctttgcttttataaaaagcgtcggtaatattttgtccgataaccgcttcggaaactgtatagcctggcttatccgcatttgtactgtctgaaagcaaacacaggacgcctttttccccaatggcagccatttttccaatatcagcgctttgaatgctgactgaattttgatcaaatttaaaatcacctgtatatacaatcgcaccttgacttgtttgtaaacaaatgccgactgaatcttgtatgctgtgctgcgttctgaaaaatgaaatatccactccttcaaacgataaaaccgttgacgaagtgataggatgtaaagcttcgtattttttaattccatactcttttaacttttctttgatgagtgctagcgttaattctgtaccatatacaggcacatccaatttttgaagtataaagggaatagcgccaatttgctcttcgtgtccatgagtaacaaatatgccttttacgttctgctgattttctactaaatatgtaatgtcgggaatgacaatatcaattcctaacatttctcctcccggaaactttgatcctgcatctaacacgtatatgttttcattgatttccaccacatacatgttttttccaagttctccgactccacccaaggctgaaattttaatattttctgtcttttctagtaccataagctcctcctacttactttcacccgtacaatttcatttgcttacattataactgaagtaagaattggaatacaagaaatttcattcgtctatttccgtcatctgctcttctatatatcttataagaaaaaaacgtcccttcatcgactcgtatatacagtcaatgaagggacgtttaaaaaacatacttatagcttatagcgtatttaatgtgctgactaacgtttggcgttcttcttccgttaacggaactaaaggtaatcgtaccgatcctacgtctaatccttttagctgtaaagccgttttaacaggcgttggacttggagctgcaaaaagagatttcataacgggtacaatacgctgatgaatttttgctgcttccttcggatttcctgactcatacagcttaaccatctcttgcatttcattcccaataatgtgagaggcaacagaaataataccagttcctccaattgctaataccggtagtgttaaaccatcatcaccgctgtataaagcaaaatcatcgcttgtttgtgcgataatagctgtcattgcgtcaagatctccgcttgcatcttttaacgctacaacatttggcagttcagctaggcgtacaattgtatcaacagacatattgatcacggatcgccctggaatattgtataacatgacaggcagctctgtactttcagcaattgttttaaagtgctgatataagccttcctgattcggcttgttgtaataaggtgctacaatcataatcgcatctacgccgatttcttctgcctttttcgttaattcaattgatgcatacgtattgttgcttcctgtaccagccacaacaggtacacggccatctactacctttactgagtggcggaacagcgccagcttttcttctgttgaaagcgtaggagattcacccgttgttcctgcaataaccaacgcatccgaaccgttgctgattaaatagttaataagctgcgttgttttttcaaaatcaatatttcctttatgatcaaaaggcgttaccatcgctgttgcgactttcccaaaatcaatcatgttttcactccttgaaattgcgttatccctattcatgtaatgaaccgttagcttatagctaacggaacatgtagtttatctcttttgcggtgcttttgacaagtcaaaggcaccatgaagagcattaacagctttctttaaatcctcttcttttacaagcacccaaatcgtcgtatggctatcagcagattgtaaaatctgaataccttcgccagaaagagctgtaacaattttagatgtaacaccaggcacccctgcaattcctgctccaaccgttgacactttggcacaattgcgaataacagccggctcataccccagcgcatgaagcacatcaatcgctttgtcagttgcttcatctgttaccgtatatacaacacccttgggtgaaatattgataaaatctacactgattttttcttgtgccattgctttgaatacttctgcttgcgtatcataatggccttctttactaaaaactttaatttgagtgacgttggatacgtgcgcgatgcctgttacaaggcgttcttgcacatcgcttccacgctgctgtgcttcaccttgagatgtaacgagcgtacctgttgaatcagcatacgtggaacggacgcgcatcggcacttttgcctgcatggcaatctctacggcacgtgggtgaactacttttgcaccttgataagccatgttgcatatttcgttatatgtgacaacggacagcggtcttgcatcttctacaatacgcgggtccgctgtcatcacaccttctacatctgtgaaaatgtcaatgtaatcagccataagagctgcacctaaagctgaagcagatgtatcgctgcctccgcgtccaagcgttgttgtatcaccttcagtagttgccccttgaaagcctgttacaacaacgacatcatattcttctaattcttttaacaaacggtcgcatttcatttctagtatcttggcattggtaaaatcatcattcgtcacaaacccggcctgtgcaccgtttaacgctgtagctttaataccattttcgtttaataaattcgtaaacaccaccgatgaaattaattctccacatgccataagcatatcaagctcacgtttattaagagacgctttatttccatcaacaagtgaaagcaatgtatccgttgcatacggctcaccttttcgtcccattgccgatacaacaacgactactttgtaaccctcacttaatgcattatttaaatgatagattgctctcgctcttccttcttcgttacgaacggaagttcctccaaatttttggacgattattttcatacttacacctcatcatgttccgagacactctggttgcgcttattttactaagctaagcttaataagtgattctgcaatttgtacagaattccaagctgcaccttttaacaagttatcagaaacgatccacatatggaaaccgttatcgcgatctaaatctttacgaatacggccgacaaacacatctcgtttacctacacaatctgctggcattggatatacttgattttctggatcatcttgcaatacgataccaggtgcatcagccaataaatttttcacatcagctaccgttacaccgtctttttcaatttcaatgtacactgactctgaatgacctgttacaaccggtagacgaacacaagtagcagctactggcaattcaggcatgctcataattttcttcgtttcattgatcattttcatttcttcaaatgtaaaaccgttatcttgaaatttatcaatttgcggaatggcattaaaagcaatttgataatgttttttatctccaccaactggtaaaatttccggtgtaaactctttttcttctaaaatagctttagcttgttcttttaattcattaattgcagcagctcctgctccagaaacggcttgatacgtcgatactagcactttagataagccgtatgtttcgcgcaatggctgtaatgctgcaaccatttgaattgtagagcagtttggattagcaatgattccgttatgtgcgtgtaatgcgtcttcattcacttccggcacaactaacgggacattttcatccattcgataagcgcttgtgttgtctacaacgattgctccgcgttttactgcctctggtgcaagtgcttttgaaatgctcccgcctgcactgaataaagcaatgtctacgccttcaaagctatcgggagttgcttcttgcacaacaacttcttctccgttaaacaacacttttttaccagctgaacgagctgaagataataacgttaatttaccaactggaaaattacgctcctgtagggttttaatcatttgttgtcctactgcacctgttgctcctactactgctacatgtaattctcttgtcattttaataccgcctccaacaattttcaactactcaacatttatctgcatatactgactattttaacatattattatgcttcattgcgtcaaagaagagaagatttttaaaatcttctcttctttgagattgagagttctcttacagccgcagtattgaatagattcatgcaacagcaagaggcatatatgtcctatgactcttgaccgtcgcggaacctttcgacaataacaggctgaatctgtttatcttcaagcgctgcgtacaccgtgtctgataacatcgtcatacgcgctaccattgaattcggcttaagcaccgggtcatcttgaccaaatggaataaaataaatatttttagtcgccattagcctcattaagtttacaccatttagccctagtgcgtcattagtcgaaattcccagtaccaccggcttattattacgaagcgttgctttagctgccatgagtaccggggattcagtcattgcatttgcaaacttactcatcgtattcccagtgattggggcaaccaccatacaatcaagcggaatttttggtcctaaaggctctgcttttacaattgtattgatgacggcgtgacctgttaattcctcaattttcttcacccagtcttctccatctccaaaacgagtatttgtggattgtacagtgtaagaaacaaccggtaacacttctgctcccaaattaacaagcttttcaatttctggcataaccgcatcatacgtacagtgagatccggtcaagccgaaccctattcttttaccttttaatgacattattttttctcctctctcgcatccgcagcgtcttttaataaattcactaatacattagcgacaatctgacctgctgtttttggagccacaattcctggaagaccaggtgctaaaatagctttaattcctcgtttttctgcatagcggaaatcggttcctccaggctttgaagctaaatcaataatgagcgcatgggtcgggacattagataatgtcttagccgttaagatggggtatggaatggtgttaatacatatatcactatcagcaatttctttatcgagttcagaaagataaaaaggttgcaaacccatttcagcaatacgtgctaaatgttcagattttctagcccctacttttacattggcaccgagtgcagcaaaggacctcgccacgctcattcctactcttcctaaacctaggacagaaatatttgaaccgtgaatggtaaaatccgtatgttgaataacaagcatgatggtaccttcaacagtaggaatagagttataaattgctacatcatcacgctcaaatagctgaacgagtttacggtttgtcgttttgactaattcgtttaaatacccattgctaatacccgaataaataatgcagtgctcaggcgtttttttaagtatttcttcagtcagcactactttttcatttgaaaaaatagtatctacttgcccttcgtgatttgttccaggcactggaaggatgatggcgtcaacatctgaaaaatccagctcctctatctgatatttcgtcgcacccgtaaaaccatgatctagctgatcaaaaccaataagagaggtttttgcatctaattgaattaattttctaatgacttcaagctgcctagcatcaccgccaattacagctatgtgcaaatccgttaacatgtttcattttcaccttctttaacattaaatagatgtatctttcgcttaaaccatcgagatgtaaagtgctatcattacgccctagaatgcctattgcttttcttcaacatactatgtaaacacacaggaatcggtgaatctttatccctgaaaataaaagaaacgagatgcaggaagcatctcgtttcttattttgttgactgattgtttatgtcttctagctgctggacatttacaatcaccatatctgtaccaatcttttcgatattcccccacggtactcgcacttcatctccttgctttcgaaacccaaaccacttcacagatggaataataagcgcattaatttgtcccgtatgttcattaatttcaagatctgtttgccctaaaatacccaaacgctctgctcgcttaacatctacaatttcttttccactcagttcacttaatctcatagaatccctcctttcatctaatttattgaacaatcatacaaaaaatgtcaaaaaaaataaggctggctcaattattttagccaaccttactgttactgtttaatttcctttaaaacctttaggtaaatctccactcgggcttattaatgaaagagcaaattcatctttgaaaatatctcgcgcaagaccatttacactatctttagtcacggcattaacaaggtctagaatctcatctaatgaacggtgatagcctagcattaactcattttttccgtttctgctcatacggctatttgtactttcaagactcagcattaagtttcctttcagctgctctttgctgttagaaagttctttatccgtaatacctttgtctttcagatcataaagcgtttcttgaaccgtatcatataatacgtcgagctgatggcttcccgtccccccataaatcgttacaagaccgctgtctcgataagaagaatgataagagaaaacagaataagccaagccgcgctgttcgcggacttcttggaacaaacgactgctcatacttccgccaagcacgttatttaatacaattaagctatatacatcttctccgccgattggcaaacctttaaagccaaggcaaagatgagcttgttctgtttcctttttgcgcgcaatatgatttgtatggaactctggctgaacatattgatgagcggaatgacttgacgtatatgtaccaaaatagttttccacctgttgaataaaactttcatcaatgtttccagctactgaaataacaatgttttcaggaatatacatttgctccatatactgacgaagcgaatcaccgttaaatgtttttaacgtatcttccgttcctaaaattggatagcctaatggatgattgccatatacggcttttcctaataaatcgtgtacaatgtcatcaggtgtatcttcatacattttaatttcttcatatacaacatttttttcacgagctaattcctcttcatcaaatgaagaattaaagaacatatctgccagcacatctagcgcttgatctgcgtgttcgtctaatacttttgcatagtagcacgtgtattctttagaagtgaatgcatttacttgtcccccaatgcggtcgaagctttctgcaatttcacgagcagatcttgtttttgttcctttaaaaaacatatgttcaagaaaatgtgatacaccattaatttcagggtgttcacttcgagaacccgttccgatccacaccccaatggccacagatcgaacagttgggatattttccaatacaattcttacaccatttttgcacgtatatcgttttatcaagctagtgcctcccttttgcttatctcacttacttcttagtagaagaaggtattttcatcattcgttcttcatctagcattgttgacacatcgctaactttcaggcctttgcgttcaatatcggttaacaattggtcaagcgattcggccgttgattcagtcgggtgcatcagtacaatagcccctgggtgaatctttttcattactcgattaattaacacttctgaacttggcttttgccaatcgattgtatcaactgtccacatgatggtactcatttttaactgagaagcaagcgttactacttcggggcgaaaactgccgctcggcggagcaaaccattttactttttgtcccgtagcagatgtaataatatcattcgtttttttaagctgctgattgatttgactagccgataaagtggccatatcaggatgagaataagagtggtttcctacttcatgacctgcgtctacaatcatttttgccatatttggattatttttaacccattttccttctaaaaagaaggttgctttagcatggtgcttttttagcacttctaacattttaggcaaatactcgttcccccatgctacgttcactgtaaacgataccataggcttttcatcgtgtccacggtagataggttcctgtggtaaatcacttaagtgaacctttggtctaacctgtttgtacactagttttttttcatcgaatttacccgcaggtttcatatttttataagaagcagcaagatcaacttttatgccgttatagccaggaacccgtttccaaacgggatcgattcgtgcattcgctgccggcttttcataatcttttgctttttcttcaatcttttgatataacgcatcatgctgagctgatacaagttgtacatcggatttaagtgcttctatatatgcttcagcaaaaggattataaatagatttatatgtaattgccagtaaaaatagaaatgctgtaaattgcacaatggttctcttcacttatccttccccctttaccatttaaaatatgtataaagaggacaaggtagaacaaacatctacaaacgataaaatcgccctacacatggattttcttcatgtatggacgatttcacaatatctatatagtaataaaagaagattattttgtttcttttgctttttcttctttttctttttgttcttttaaaattgctttacgagataagttaacgcggccttgtttatcaatttccataaccttaactaaaatctcgtcgccaatcgatacaacgtcttctacttttccaatacgctcttctgcaagctctgaaatgtgaacaagcccatcttttccgctgaagatttctacaaatgcaccgaatttttcaattcgttttacttttcctaagtacatttggccgacttcaacttcacgtacaagatcttcaatgattttcttcgctttttcattcatcggctgatcaatagaagaaatgaagattgtaccatcttgttcgatatcaattttaacgcctgtttcttcgatgattttattgatttgcttgccgcttggtccaataacatcacgaattttatcagggttaatcgccattgtaaggatcttaggcgcatattgagaaagctcttgacgaggcgtagcaatcgttgacatcatatgatttaagatctgcatacggcctttttttgcttgttgaagggcttcgtctaaaatttcacgagataacccgtcaattttaatatccatttgaagcgcagttacgccatttgctgtacctgctactttaaagtccatatctcctaggtgatcttccattccttgaatgtccgttagaatcgagtagtgttcacccgatttgatcagacccatggcgatccctgctacaggtgctttaattggaaccccagcatccatcattgcaagcgtacttgcacaaatactcgcttgcgaagtagaaccgtttgactctaatacttcagatacaagacgaattgtataagggaaatctttttcattcggaataaccggctcaagtgcacgttcacctagcgcaccatgtccaatttcacgacgacccggtccgcgcatcggtctagtttcaccaacactaaatgaagggaagttatagtgatgcatgaagcgtttagattcttctacacttaaaccatctaaaatttgcacatcgccaagtgcacctaatgtacagatgctaagcgcttgagtttgtccacgcgtaaataatccagatccatgtgtacgaggaagcaagtttgtttcagaagaaagtggacgaatttcgtcaatgctacggccatcaggacgcactttttcttctgtgatcaagcggcgcacttcacttttaacaagcttcgataaaatttcattcacttgatttagtacttcttcttctacatcttgctcttcaaattttgcagctactgcgcttttcacttctttaatcgcattttcgcgcgcatgcttttcttgaacttgaacggcacggttcatgtcaccttctgcaatttcgcgaacttgatgctcaaggtcagcatcaacagtgtaaagctcaacttctactttttctttgcctactgctgctacaatttcttcttggaacgcaattaattttttaatttgctcgtgtccaaacataattgcttctaacattacttcttccggtacttcatcagcgcctgcttcaaccatgttgatcgcgtcttttgtaccagcaaccgtcagatgaatatcgcttttttcaagttcatctaccgttgggtttacaacaaattcgttgtctacacggcctacgattacgcctgcaataggaccttcaaatggaatatcagatactgataatgctaatgaagaaccgaacattgccgcgatttctgaagaacagttttgatctacgctcattacaacgctgacaacttgaacttcgtttcggaaaccatctgcgaataaaggacgaatcggacggtcgattaaacggctagccaagattgctttttcacttggtctgccttcgcgcttaatgaatccacctgggattttaccgactgcatataaacgctcttcatagtttactgttaacgggaagaaatctacatttttaggctcttttgaagccgttgctgtacttaatacaactgtgtctccatagcggattaatgctgcgccatttgcttgttttgccaactggccaacttcaacttctagctttcgtccagctaaatctacggagaacactcgtttttcttgttccatatcgacgagtacccctctctacatataaaatatgtatgtaatcaaatgtgatagttttattataaacgaaatatccaaaaacaatagcttttttcacattatgtagcatctttaatgtttcttaaatgtacatactaaaaaagcgggaatgctcccgctttcttcttattatcgacgtaaaccaagtttgttgattaactcacgataacgagtaacgtctttgttacgtaggtagttaagtaagttacgacgtcgacctaccatttttaaaagaccacgacgtgaatggtgatcctttttatgagtacgtaagtgaccgtttagattgttaatttgctctgttaggacagcgatttgaacttctggagaaccagtgtcgttcgcatgagttttgtactcactaatgatttcatttttacgctcttgtgtgatagccatcctattcacctccttattattaaaccccagttaccgagcaaaacgttggtgaatcgtaatgccaagcaatggttgttttacatacaagtgttatgttactacttattgaagcaaaaagcaagtcgtagcagctatttatatatatttttttatttcttatgcttttgaattccttcaaaataagcaagggcttcttccttgtcctttgagatctgaccgacaagctcttcgatgccgctgaactttttttctgaccgaatcattcggtgccatttcaccgttacgtgctgatcgtagatttgttcgtcaaatgataataagtggacttcgattgttggcttttctaaattatcgtgaaaagtcggcttatagcccacgttacatactcctgcataccacttgccgtggagctgaagctcaacagcatacacgccgatgcgcggaagtaaatactcatcgtctaaagcgatgttagcagttggaaaacctatttgcctgcctcgcttttctccatgagttactgtgcctgacacttcataatagcgcccaagcagcgcttttactcgatgcatgtcgccatttgctaaattttcgcgaataagcgttgaactaattttttcttcgccatttgttaacttatcaattgttgtttgagtgaattttgatcgagaatgaaatggtagtatttccattgttcctttacctaactttccatacgtatagtcaaatccagctaccacatgctgcacattcaggccaataatatactgatcaacaaactcttgaggcaatagtgctgcaaactgtttatcaaaatgaacgatatataaaaagtcaattcccatttcctcaatgagtttctttttttcttgaagtggtgtgatcatatcaatgtgctgtacgttgcgcccgagcaccacagaagggtgaggagtaaacgtcatcacagcactagctatgcctttttcatccgctaactgttttgctgaatttatcacttgctgatgccctaaatgcacaccatcgaaataaccaagcgctaacactgattgttgaacagcttctcgttgaaagtggtgtggatgtcgaatttcaatcgtttccaaaacacagttcaccttttccctaaccggtctagtcgattgccaacactttaaccggcttcattaaatgtttttttgttgggtgctgagcataaattgctaagcacttgcctgcagaatttatcattaaaaagaatggttccttttttaactcttcatcttctgtgcacggcaataccgcgccatttttcactttctctgctaatgtatcactaatttgaagtttcggcaaatgattaagagcttcttcgatcgaatgcagtttctcattgatcgtttcttcttctaccgctcgttcaatatcttcaaatgtcacacaatcttccagtgaaaactgccctgaacccgttcgctgcaaatacgacatatgagacggatagccaagagcttctccaatcatcacagcaagcgttcgcacatatgtacctttgctgcacgttacgcggaatttgaaggaaatttgttctccctcaaatgtagcgcgatcatccagcagttcaaagttataaatatgaatggttctaacaggtcgctctacttcgattccttgccttgcatattcatatagctttttacctttgacttttaccgcggagtacatcggaggcacttgctgaagttctcctgtcatcgaagacagcacttcttcgatttgagcacgtgaaaaagaatccgctactttcttttcttctacaacctctccggaagaatcttctgttgttgtagaaaatccgagtgtaacttccccttcataggttttagtagctcctgttagatactctacaattttggtagctctaccgatacaaataggcaatacccctgtaacgtctgggtctaatgtgcctgtatgccctacttttttagtgcgaagcagctttcggactttaaacacacagtcgtgcgaagtcaggccagctggtttatgtaaaactaaaacaccgtccactcattcttcatctccttttcatttaaaaaagggtgtctcagaagcaaaaaccacttttgagacacccttttttgtttctacattcactgatcttattcgttctcttgatggtcatcgctttcttttttaatttcatgaagcaatgattcaattcgattaccataatcaattgattcatcaaactcaaacgtaatttcaggtgttttacgtaagcgaatgcgctgaccgatttctgaacggataaatccttttgctttcgcaaggccttttaacgtattctcacgctgttcagcatctcctaaaacagagatataaactttcgcttgctgtaaatcgcctgatacttgaacatctgttacagtcacaaaaccgatgcgcggatccttgattttacgatttaaaatctcgcccatctcttttttcatttgttctccgactctagttgctcttatgttcatctgtgtcaccccttttataaccaatcaaaagttgtaatggtacgttcaatctctggaaaagaatcaatcaagcttagcgctttttgcagttcttgttccgttgtgacacggctagatgagactgcgacaatgctaatttttgttcgttgccacacatcttgaaaatcagtttctgaaactgatacgttaaaccgctgcttcaagcgcatcaagatgcgctgaagcacggcacgtttttctttaagagaagcagcatcgtaaattaagcattcacactccactagtccaatcatttaggatcaatttgctccattacatatgcttcaataatatctccttctttaatatcattgaagtttttaattgtaataccacactcatatccttgagcgacttcttttgcatcgtctttaaagcgttttagcacatctacttcaccttcaaagataacaattccgtcacggattaaacgaattccactgttacgtgtaattttaccgtctgttacgtaacttcctgcgattgtaccaacttttgatactttgaatgtttgacgtacttccacttgaccgatgattttttcagcaaactcaggatcaagcattcctttcatcgcagattcaatttcttcaattactttataaataatgcggtgaagacgaatatctacgttttctacgtcagctgtacgttttgctccagcatccggacgcacgttaaagccgataacgattgcgttagaagcagttgcaagaatgatatcagattctgtaatcgcacctacacccgtatggataatacgaacatttacaccctctacatcaatcttttgaagagcagcagccaatgcttctacagaaccttgtacgtctgcttttacgataaggtttaagtctttcatttcaccttgtttaattttttcaaataaatcatctaagcttacgcgggatttttcaccgcgctgttgttcaagctgcttttgagcacgagcttctccgatttgacgagctgttttctcatcttcaaacactaagaaacgatctccagctaacggaacttcgtttaagccagtaatctcaaccggagtagatggtcctacttccttcacacggcggccgatatcatttaccattgcgcgaacgcggccaaacgtatttccgaccacgattggatcacctacgcgtagtgtaccagtttgaacaagaagcgttgctacagacccacggcctttatctagctgtgcttctacaactgtacctgctgcacgacggttaggatttgcttttaactcttctacttcacttacaagtaaaatcatttcaagcaattgatcgataccttcacctgaaatggctgaaagcttacagaagattgtttctccgccccactcttcagctacaaggccgtgctccattagttcttgcataacgcgatctggatttgctgcttctttatccattttgttaaccgcaacaataattggcacttctgccgcttttgcatggttaatcgcttcaattgtttgaggcattacaccatcgtctgctgcaacaacaaggattgtaatatccgttacttgcgcaccgcgagcacgcatcgttgtaaatgcagcatgccctggtgtatcaaggaatgtaattttcttttcgtcaaccacaacttgataagcaccgatatgctgcgtgatgcctcctgcttctgcagccgttacttttgtattacggatagagtcaagaagcgtcgttttaccgtggtcaacgtgacccatgattgtaacaactggaggacgcacttgaaggtctttttcgtcatcaataatttctaatgattcaaaagcagtgtcatctaccactacttcttcttcaacttctacaccgtattctccagcaattagttcgatagaatctttatctaactcttggttaattgttgccattacaccaagcataaatagttttttaataatttcagaaggctctttgcctaattcttttgctaactcagaaaccgttaagcttccgacaaacgttactttttccggtaactcttttgcagctgctggagctggtctaccttttggtgcctgcgacttttgtgcctgtggctttttgttacctttattgtttcctttgttagctgttgattttgtatttttattcaatactttcacccccataaaattaaccgagcatcgttgctagctttttagcaaatccctcgtccatcacggctaccacaactcgagcatctttaccaatcgcttgacctagcgtgtagcgatcgggaacaattttaaccgaaacgttgtagtaagaacatttatccgttacttttttctttgtgttttcagacgcatcgcttgctaaaagtactaactttgctttttgtttccgaacttctctaaccacaagttcttctccagaaatcaatttgcgtgcacggtttgcaagccctaaaaaggagatccattgttcattcattagcgtgactgtttctccttttctacaagcgctagcaactcttcataaaccgcttcatctattgacgcgcctaaatgtgtcgaaagcacatttttcttttttgccaataaaattgcttctttatccttgcttacataagctccgcgcccggactttttacccgttacatcaactgaaacgtcgccttcttttgagcgtacaacacgtactagctcttttttaggcttcatttctccagtggccacacattttcgcatcgggacttttttacgattgttcaccttggctcacctcttattccatatcttcatctgaatcaaatgcatgttgacttactagcatatcatcgctgttttttacaaccataccttcttgttcagcttctgattgacttttaatatcaattttccagcctgtcagcttagcagctagacgtgcattttgtccacgtttaccaattgcaagtgacagctgatagtcaggaacgataacagttgttgctttttcattttcatctacaatcacatctactaccttagatggacttaaagcattggcaacaaattcaactggatcatttgaccagcgaacgatgtcaattttttcaccttttagttcatttacaacagcctgtacgcgctgaccttttggcccaacacaagaaccgaccggatctacttcagcatactcagaatgaacagagatttttgaacggtctccagcttcgcgagctactgattttaattcaactgtaccgtcatagatttccggtacttctttttcaaaaagacgttttaaaagacctgggtgcgtacgtgaaacatagatttgtgggccttttgttgttttttccactttcgtaatatacactttaatacgatcatgaggtttatactgctcatttggcatttgctcgctttgaggaagcaatgcttcaattttgccaaggctcacatagatgaagcgagaatcttgacgctgaacaatacctgtcataatatcttcttcgcgatcgctgaactctgaatagataacgcctcgttccgcctcacgaacacgctgtgtaacaacttgttttgctgtttgagccgcgatgcgtccaaagtcttttggcgttacttcgatttcaaccacatcgtctagctggaagttagggttgattgtttgtgcttcttcaaccgaaatttccagacgtggatcatatacttcatcaaccacatctttgcgagcaaacacgcgcattgaacctctttctaaatttaaatcaacgcgtacgttttgcgcttggttaaagttgcgtttgtaagcagaaattagcgctgcttcaattgcttcaataattacatctttgctaatgcctttctctttttcaagaatgactaaggcatcaaataactcactgctcatcgttggataatccccctttaatattggcccctacacattaaaatacaatcgctaatcgagcaaaagcgactttgtcatatggtaaaaccaccgtttttgtgcgtgttttgatacgaatagataatgtgacagtttctccgtcaaatgattgtaattcgccttcaaattcttttgcaccttcaattggttcatatgtttttatgtatacatgcttaccaattgcacgttcaaaatctttatctttttttaatgggcgttccgcaccaggcgatgatacttctaaaaaatagttatgagggattggatctactgcatccattttctcactcaatttttcacttactgctccgcagtcttcgatatccacaccggtatcagagtcgataaacacacgtaaaaaccaatcttttccttcttttacgtattcaatttcaacaagctctaaattcatttcctctaagataggggaaaccatttcttccactgtttgttttacatttttactcattctaatcctcccttcgagacattgcatgatatgtttaggttacgcgttttttatgtctcttatatcaaaaaagagtggtttatttgctatttttattttgcactctataagaggtctaacctactagagtggaaatgttgtcatttgtgttgcaggattttaaacgtcacataataaatcaatcatggtgattgaaaatctacagaaaaaacgaatcatgctagaagccgattcgttctccatactacttactatgtcagtaagttcatatcaataagaaagagcgggtttccccactctttctcgtccgtatccttagcatttccacaattactatatcataaccgcttattttatgcaaatgttagaaaagagaaagctggttctgatcaggtaatgattcaaggcatccatggttgtctagatactctaaaatcgtcttcgatactttgcctcgctgctgcaagtcttctttcgataaaaactctcccgtttcacgagcttttacaatgttaagcgctgcatttgtgccaagaccgggaatggcattaaacggtggaactaaagacgtgccatcaattaaaaattcgtctgcgctagattcatataaatctacttttttaaatgaatagcctcgttcgcacatttctaaagaaagctcaagcaccgttaataagtttttctctttaggagatgcatctaaacctttggcattgatttcttccatcttcgctcgaatggcagttgagcctttgatcatcgtatcaatatcaaagtcatctgcacgaaccgtaaagtatgctgcgtaataaagaagcgcgtggtgcactttgaaataagcaatacgtacggccatcaatacataagcagccgcatgggctttagggaacatatacttaatctttttacaagaatcaatataccagtccggaacaccatttttgatcatttcctcttcaaattcaggtgttagccctttccctttacgtacagactccataattttaaaggcaagtgaaggttcaagaccttgatagatcagataaaccatgatgtcatcacgacagccgattacttcacttaagttgcaaatatcattgcgaattagctcctgcgcattaccaagccatacgtccgtcccgtgcgacagtcccgagatttgaacaagctctgaaaacgtcgttggcttcgtatcttctaacatttgacgcacaaagcgtgttccaaattcaggtatgccaagtgttcctgttttacacataatttgctcttctgttacgccaagtgattccgttccgctaaaaattttcatcacttcaggatcatccgtcggaatcgtttttgggtcaattccacttaaatcttgaagcattcgaatcacggtcggatcatcgtgtccgagtatatcaagttttaataaattatcatgaatcgaatggaagtcaaaatgagttgttctccattcggaattacggtcgtcagctggaaactggatcggtgaaaaatcgaagatatccatatagtccggcacaacgataatcccccctggatgctgaccggttgtacgttttacgcccgtacatcctgctactaaacgatccacttctgcgtttcgcaaatgtaaatcacggtcaccggcatagccttttacatagccataagctgttttttcggctactgtaccgattgttcccgcgcggtatacattatcttctccaaacagtacttttgtatagttatgagctcgcggctgatactctccggagaagttcaaatcgatatcgggaactttgtctcctttgaatcctaagaacgtttcaaatggaatatcgtgtccgtctttaataaatggtacgccacaatcatcgcagcttttgtccggcaagtcgaatccagaaccaacggaaccgtcattaaaaaactcggatttcttacattttggacaaacataatgcggcggcagtgggtttacttctgtaatttctgtcatcgtcgcaacgaatgaagatcctacggaaccacgcgaaccaactaagtaaccatcatttaatgattttttaacaagtttatgcgagatcaagtaaataacggcaaacccgtggccgataatacttttcaactctttctctagacgagcttctactacttcaggcagctcttcaccatagatgctgcgtgccatcgcatagctcatttcacgcatttcttcgtctgcgccttcaattttcggcgtatataaatcatctttaatcggtttaatatcgtcaatcatatccgctattttttgcgtattatgaacaacaatttctttcgctttgtctccatctagaaatgaaaaacaattcagcatctcatccgttgatctaaaatgaacatccggcagctgatgacgatttagcgggttagctccaccttgtgaaccaattagaatttttcggtaaattttgtcttccggattgagatagtgaacatttcctgttgctacaaccggctttccaatcttttcaccaagcttcacaatattgctgataatatcttttaaggctttctcatctcgcactaaatccagttcaattaagtgcttgtagttgtcaggaggctgtacttcgatgtaatcataaaattcagctgctccttctacttcatcaattcctttttgcatcatgccttcgaatacttcgccccggtcacatgcggttccaatcaagatgccttctcgatatttgtcgagctgagatcttggaattcggggaactcgataaaagtaatttaaatgagaaatcgaaacgagtttaaatagattttttaaacctacgtcgttttgtgctaaaagcgtcgcatgataaggacgggcccgctgataggcattcccttctcccatataatcatttaagcgatcgtgcatcgtaatttcgcgttcaaatgcatctttcagcattttatttaacaaatagccggttgtttccgcatcataaatcgcgcggtgatgctgcacaagttcaatatcaaactttttagcaagagtatttaaacgatggtttttcatatgcggatacaaaaatcttccgagttcaagcgtatcaataacgccgttagctgctttttctaatccgattttttgcagtcccatatttaaaaatcccatatcaaagcttgcattatgagcgactaaaatactgtcgcccatccactcgtgaaaatcccgaagtacttctgagatttcaggcgcattttggaccatatcatctgtaatacccgtcagctcaattgttgttgcagacagaggatgatgaggatttacaaaccgttcaaatcgatcgatgatttcgccttctttcatcttcacggcagcaagttcaataatggtatcgtacacggctgacaaaccggttgtttcgacgtcaaatactacgtaagttgcttctgtcaaatccacatgctgcggattataggcaatcggcacgccgtcgtctactaaattgacttccactccgtacagtattttaatgccgttctttttcccagctccatacgcttcaggaaacgactgtgcaaccgcgtgatcagttatcgctacagccggatgtccccatttttttgcttgtccgactaaagctccaacagacgaaacggcatccatttgactcattggcgtatgcaagtgaagttccacacgcttttcatcttcaggcgctgtatcctgtctagcgggaccagtaatctcgttaacatcatttccaatcataactagatcacggacaaatgtatcgttttgtacacttccgcgaacctttacccacattccttttttaatagcttgaagtaaaggaatatcttctttgtcacgcgaaaacattttaaccataatagagtttgtataatctgtcactttaaaaataagaagcgtacgtccgcttcgtaattctctcgtttctgcatcaaatacgtatccttcaacggcaattcgcttttcttcatccacaatggaatccaggcgaaccgtctcgtctttaatcgtatatccaattgtaagcggaccttttggtaggtctggtccatcacttttttcattttctttattttgcatttctgtgatggcttgtaataccttttctgtatcttcttgttttcgttgctctacaaactgctgaaatgcttcttctgaatgtacaacttccgttattagctgaaggttcggaaatccataggacgcatactgatcagcaattaactgactatactttttacgtaaagccgttccttctgcatcatggcgtgcgttcacaatcaatttggcaccgttcaatctcggcatttgatcttgtaaaagcgactgtaaaaggggagatatgccctgcatttctccaatacaatgcttccaatatgactgtacatgctcttccgtacattctttattaacggtttgaatagaaaaagaaacactcgcaatatgagaaaaagctgaagacatgcgagcatggaataactcataaatctcaaaaggtaataacccttctaaagaaaaatggaaatgccattttttttgttctttctgaatgacgagcttttcaatcgctgcgttttcaaagtaaggaacaatttgatcactcgtcagctctaactgctgcagcagcaacttaaaacgctctttttttcctagcgtttgtgcttccaagttttctgcctccttttataaatgagtgcaatctattttaacataaatgacttctattctgtcatatgttctgtttataaacataaaaacagcagggatacaaatccccgctgcttcattacttcgctagcagttctttcactgttgaaacaagattgtcaactgacacttctaatgactccccggttttgcgtactttcacttctacaattccttcagatgcacgtttaccaactgttactcgaacaggaagaccaattaaatctgaatctgcaaattttactcctgcacgctcttggcggtcatctaacagcacttcaaagcgattatctaataactcattatataatttctcacctagttcacgctgttcatcatttttcacgttaactggaataacgtgcacttgataaggcgtaacagcttctggccatagaagaccgttctcatcattaaattgttctgcaatcgcagctaccgtacgagaaacaccgataccatagcagcccataatcattggctggctgcgtccgttctcatctagatacgttgctcccatcgcttcactgtagcgagttcctagcttaaagacgtgtccgacttcaatacctttagcgaacttaataacgccttgtccatccggtgactgatccccttcttggatgaagcggaaatcttcgtaagttgcattaaagttacgttcattcacatttgtgtagtgataaccttcttcatttgctccacatacaccgttagcaattgcttttacagcatgatcagctaccacttctactgaatcacttactccaatcggtcctactgaaccaactgcgcattttaatacttcttttgtttcttctggagttgccagttcaacaacggaagcttcaaaatagtttttcactttaatatcgtttacttcgtgatccccgcgaacaagtacaagcacaaaacgatcatctactttaaataaaagggacttgatacaagaagtcgcttcaacatttaagaaagcagctacgtcttcaatgctatgctgatttggtgtttctacctttgttaattctttttcagcttcacctgatttttcatacgtatttacaaccggtgccatttcaacatttgctgcataagaagatgtatctgaataagcaattgtatcttccccgatttcagaaagaaccataaattcatgcgtatcttttccgcccattgcacctgaatcagcgataaccgcacggaaatttaatccacagcgctcaaagatgcggctgtaggcagcaaacattttgtcatatacttcatctaaactttcttgagaagcatgaaacgaatatgcatctttcataataaattcacgaccgcgtaataagccaaagcgtggacgtttttcatcgcggaacttcgtttgaatttgatataaattcagcggtaaacgtttgtatgacttcacttcgtcacgaagcaagcttgtgataacttcttcgtgtgttgctcccaaagcaaattcacggccgtgacgatctttcatacgcattaactcaggtccatatgaataccagcgaccagactcttgccacaattcagcttgttgtaaagcaggcatcaataattcgacagaacctgcacggtccatctcttcacgaacaatttgttcaactttttgcaatacgcgcttaccaagcggtaaaaagctgtacacgccgcttgcattttggcgcatataacctgcgcgcaatagaagctgatggctttttatatccgcatcagctggcacttctcttaatgtaggaatcaatgtagaactttgtctcataacctcgcacctctttgcttacttctctatcttatttttttaaggcggaccatgccgcaattttcatataatcagcgagggaatatccctcgctgagcgtatgtcttataaaaagaacttttgaatatcgttccacgttacaacgagcatcagcagcattaataaagcaaaaccgataaaatgaacaatgccttctttttgacgatcaattggcttaccgcgaattccttctacagcgaagaacaatagtcgtcctccatctaaagcaggaagtggaagcaaattgacaatccctaagttaatacttaaaacggctgcccatttcattaaataataaatgcctgactgtgctacttgatcggttgctgcgtaaatacctacaggaccagaaagcatatccagtttgaactgtcctgtcacaagcttccctagacccgttaagatttctttcatccacgtatatgtttcagtagctccgtgcgtgatcgaaccaatgaatgacttttcaaccggtgcatatacgccaattagtccaattgtctgttccccaactttgcgactttcaggtgtaattggaatatctagcgttttgccgccgcgctgaaccgtgaatgtaatttgctgttcaggatgtttttgaattacttttacgacatcatcccacgttgaaacactttgtccatcaattgcttgaactttatctccttgtttaagtcccgcatcaacggctactccatctgatgttaatttgcccatcacgggtttgtcaacaacatatccttgagaaatcccaagaacgataaaaataacaaaggctaatataaagttcattagcggaccagcgaaaatggctagcgcacgctgaccaagagttttggaagcaaactgacggctgtaaggtgcaatttgaatttcttctccgtccataacgaagtaagattcttctgctacctcgaatttttgcagacgttcatcttcaccttcttcataacctgaaataaatagattatgctctaagtctgcttgctctacctcaataacttttgcatttggatgctgttccttgttgttaataatgactttatttactttgccttccttatcaaacatgaggcccaccatttgaccaggcttaacttcgatcatttctgggtcttctccagccattcgaacaaatccacctagaggcagcaagcgaatggtataaactgtttcatctcgtttaaatgaaaagattttgggaccaaacccaatggcaaactcacggcataagatgcctgcacgctttgcaaaaactaaatgaccaagctcatgaaagaatacaagagctccgaaaatgacgacaaacgcaatgactgtgttcaatgggtattacccccttcatgtaatagagtcaaacctccacccaccagaaataaatgagtggcttctctcgcacgcacattatcgagagatggcggatctaacaaactctcttgcttctaaatctacttctttaatagtagataaacaaggtttctgtattacagtatgttcattcattgctttttcaatcacatcttcaatttgtaaaaatgtaatgtgaccatctagaaaggcttgaacagcttcttcattagctgcatttaaaacagtcggaagtgttccacccgctttgccagcctcaaatgcaaaagctaaacagcgaaaacgcccttcatccattttagcgaagtgaagctggccaatgtccgccaaacttaaacgcttggtgttgggcaaagacatgcgttttggataggttaacgcgtattgaattggcacgcgcatatcaggcgttccaagctgagcaataacgcttgtatcagaatactctaccatagaatgaatgatgctttccttatgtaacaatacatcaattttctcatagggaagatcaaaaagccaatgtgcttcaatcacttctagtcccttattcatcatcgttgccgaatcaattgtaattttagctcccattgaccagtttggatgatttaatgcatcttcaaccgttacttcctgtagttctgctctcgtcttatctcgaaagctccctccagaagccgttaaaattaaacggtctattgctttttgatcttgcccttgcaaactttgaaaaatagctgagtgctcactgtctaccggtaaaatatcagcgccatattccttggctgcttccatgacaaggtgaccagcggtaacaagtgtctccttatttgcaatagcaatcgtttttctcattttgattgcttctagcgtaggagtcaaccctacacttccaagaacagcatttactaaaacttctgtgtatggatgagttgccacttccacaagcccttcttctccataaacaaatcgaatagaagggaattctgcttgcagtgacagacaatcttctttcttcatcacagaaacaagggctggcttacactgctgaataatctttcttgcttcattaatatttcgacctacagagattgctgagagctcaaaatgctccggatgcgctcgaacaatatcaacggtttgagtaccgattgaacctgtagctcctaacaaggaaattttcttcaagtatattcactcctattaaaacaaagacatcttttttatagagataataaaaaagctaaaattggcatgatgaacattaaactgtcaaaacggtctaaaatcccaccatgacccggtaaaatctttcctgaatcttttacgccatagtgacgtttgaacgctgattgtacaagatcacccatctgtccaaataacgatacgataataccaattacaagtagttcgatcatagtttgatcaatatttgctaaaagcttaaatacaatggctactataatagcgcatacgatgccaccaacaaaaccttcaattgttttattgggactgatttccggccatagctttcgctttcccattgctcgtccaataaaataagctccggaatccgtcgcccaaataataagaaaagcaaagaacaaataagctaacccgaactcttgacgaacctcgataaaataatgaaagccaaagccaacatatactgtcgttaataaaataaacccaacgtcatcgaaggtaaatttatttttaactacaaccgtgtacattaataaaagaaggacagcagcaagcgctacttctatcttatgttcacttaagaattgaaatgcaacatctcttccatttggtagtaaaaacacccaggttagcaataaactaatgatacttggaaaagacattgctttcaaatgtttcatttttaaaagctcaattacaccaactgttccgattacatacatgataagggtaaaaggtaaccctccaattaaaacaatcggcacaaataccgcaagtgctacaatcgcggtgataatgcgctgtttcatcttgttttccacaccttcttatacaccaccaaagcggcgaccgcgcttttgaaacgcctcgactgcttcgattaaatgattttctttaaaatctggccataatacttctgtaaaccaaaactctgtgtaagctagctgccaaagcataaaattacttaagcgaagctcaccgcttgtacgaataagcaaatccggatctggaaggcttttgctcattaaataggaagaaaataaattttctgaaatagaagaggaagctacctttccctgttctacatcttctaccaatgactgaatagcacccatgatttcgtgacggctaccgtaattgagcgcgaagtttaaaatcagccctgtgttatgctttgttttttcaattgcgttatccacggctcgaatcgtatgggcagggagctcacttttatcccccataatacgaacttgcacatttttttcaattagctcaggcagaaaggttgttaaaaattcctctggcaatttcattaaaaactcgacttcagttttggggcgcttccaattttcagtagaaaatgcatataaagttaatactttaacacctaattcattggccaatctggtcacatgacgcactaccttcattccttcatgatggcccatcatgcgaggaagagctcgtttttgcgcccaacgaccgttcccatccataataattgcaatatgttcaggaacagggtgctgtttcacttgatcttttcgttctgacaaagacagtgtatttaaatcttgacttttcttccatgcttgaaattttcttaacatgcaaaggtcccccgttgtacgctctcacataaacgcgtggcttatgtgagttttttcttactacacattattaacaaaaaaaccccctgtaaacaatagagggtcttttacaatatattttaccttgaaatgacttaaactgccataatttcttcttctttatctttcgccactttatccacttttacgatatggtcatctgttagtttttgaatgtcatcactgtagccgcgtaaatcgtcttcagtaatttcaccttttttctctaactttttgaaatcatcgtttgcatcacggcgtacattacgaaccgcaacttttgcttcttcagcatattttttcaccattttcactaactcacgacgacgttcttccgttaaagcaggaatcgataaacggataatagttccatcgcttgtaggtgttaaccctaagtcagattttaaaatagctttttcaacttcaccaatttgtgatttgtcataaggctgaataacaagcatacgagcttcaggcacgcttacttgcgccaattggttaattggtgttggtgcaccgtaatattctaccgttacacggtcaagaagtgacgcgcttgcacgtccagcacgaattgatgctagttcgcggctaaatgattgaattgctttttccattctttcttttgcgttttgcaacacttgttttggcatgtttatttcccctttacaattgttccaatgttttcgcctgtaacggcacgtttaatattgccttcttccgtaattgaaaaaacaattagcggaatatcattgtccatacataatgaagaagctgtagaatccataacagctagtccatcttttaaaacatcaatatacgttaatgtttcgtattttacagcatcaggtacaagcttaggatctgcattataaacgccatcgacgttgtttttagccattaagataacgtcagcttcgatttcagctgcacgcaaagctgctgttgtatctgtagagaaataagggtttcctgtacccgccgcgaaaataacaacgcgttttttctcaagatgacgaacagcttttcttctaatataaggctctgctacttgtctcatctcgatagaagtctgaactcgtgtttgcacaccaatgttctctaagctatcttgaagagccaaagagttcattactgttgctagcattcccatataatcagcagcggcacgatccatacccatttcactgccaattttaccacgccaaatgtttccaccaccaacgactacagcaatttccacacctaattcataaacggcttttacttgttcagcaacagatttgatgatggatgggttaataccaaacccctcttcaccagctaatgcttctccacttaactttaatacgatacgattatattttgcttgactcatgcttacctccatcgttaacggtgagatctcttttgtaaaaaagggaacacacagtgttccctatacggtcaaacccttactttttaacttggttcattacttcttcagcgaagttgtcttgacgtttctcaataccttctcctacttcaaaacgaacgaagctttcaacagtagcgcctttgctctcaacgaactgacgtactttttgatcaggatttttaacaaatgtttgatctagtaagcaaatatcttcgaagaatttgccaaggcgaccttcaaccatttttgcaacgattttttctggtttgccttcgtttaatgcttgttgagttaatacttcgcgctcacgctcagtttcttcagcagaaacttggtcacgagagatgtatttagggttgattgcagcgatgtgcatagcaacgtcttttgcaacagcttcttcagttgtaccagataatactgttaacacaccgatacgtccgccagcatgtaggtaagcaccgaatgcatcagcatcagtttttgttgctacagcgaaacgacgtagagataatttttctccgattgtagcgattgcagagttgatgtgttcttcaacagttgcaccgttttccattttttgagtagcagcttctgcagcgtcagctggtttgttagctaagatgtgagcagctaattcttttgttaatttttggaaaccttcgtttttcgcaacgaaatcagtttcagagttaacttctaggataacagcttcgttaccttgagtttcgatgtaagttagaccttcagcagcaatacggtctgattttttagcagcttttgcaatacctttttcacgtaagaaatcgattgcttgctccatatcaccgttagtttcagttaacgcttttttacaatccatcataccagcgccagttttttcacgtagttcttttaccatttgagcagtaattgccataatgtgtagcctccttgtttgggtatgtaattaatgtatataaatgggttaaatcttttcaaaaaaaggtgataaaaggctattccctcttatcacctttcacggaattaagcagtagttgtttcagtttcaactgctgtttcttcaccttgtttagcttctagaatagcatcagcaactttagaagttaaaagtttaacagcacgaattgcatcatcgtttgcagggattacataatcaatttcgtctggatcacagttagtgtctacgataccaacgattggaatgtgtaattttttagcttccgctactgcaatacgctctttacgaggatcaatgatgaataatgcatctggaagttgtttcatatctttaatgccgcctaagaatttttcaagacgctctaactcttttttaagttgaactacttctttcttaggtagtacttcgaaagtaccgtcttcttgcattttttcgatatcttttaaacgtttgatacgtttttggatagttgagaagttagttaatgtaccacctaaccaacgttggttaacaaagtacataccagcgcgagctgcttcttctttaacagaatcttgagcttgttttttcgtacctacgaataaaacagtaccgccgtctgcagctaattctttaacgaatttgtacgcttcttctactttcttaactgttttttgaagatcgataatgtagatgccgttacgctcagtgaagatgtatttcttcatttttgggttccaacggcgagtttggtgaccgaaatgtacaccagcttctagtaattgtttcattgaaattactgacatgtgtttttcctcctaatggttttaagtctcctccgctcatttcatcttcagccgaaactacaaaaagtagcaccatcaaccgaatcaacaagcgtgtgtaataacaccaaaaacaaatatagcacactcctttttcacaagcaagcgtttcattaagtttattgatgaaatttcaataataattcaatttcagttttccctctgtgtaaatgttttgcaatttcttcaattgttaagccttttccctttaaataaacggaaaattcttttatctcttcacctgacaaatcttgaatttggtctgtagttaattcatcaaaaggtgtgcgtatatgcttctgattttcttctatagaaagaagttcatgcagcgactgggaaggctcactttttagatccaccctttgaacaggcacgtcttcttcatctaccaaaggtgattttacgctgcttttttccacttccgaagaaagcgaagtggaacgctctcgaagctgccttaaaaactgctcgttttgttcctgaaattcagcgagatatgaactcatcgcagcttccattttatttatattttgctggtgcaagcgttcaatccttttcactttggtcacttgcatatataaaagaataatgcaaaacagtgatagaccatgaattaaaaaactaactgtgagtaaaaaccccatccttttacctctttgttaaattattttgcttaaactcgtacgcattttaaacagcgctttcgaatgaatttgagaaatacgtgaagtagatagccctaacagctgtgcgatttctgtgaaagtcaactcttctttatagaataatgaaacaacgagctgctctttttcatttagctgctcgataacttcagcaagctcttgatatcgttcgtcgttaattagctcctcttcaggagagagcgttttttcatctttaatcgtatatttttgctctccatcttcatactctttcggctgttcttccattgacaacacgttagctaaaaagccttcattcatcgtatgaacgacatctgcttctgtcatgcctacttcttttgcaacctcacttggtgcaactctgcgcaagtatctttgttcaagtgcttctgttgcttgctcaatccttttcgtcttttcccttgcgcttcttgataaccaatcttctttacgaagcccgtctattatcgcccctcgaattcgaaaagatgcatatgtatcaaactttaagtctctaccgtaatcaaacttttccaaagcatcgtaaaggccgattaaacctaaactacgaagctcttctttatgaatattcttcggcagccccacgctaatccgctgaacgtgatagttaacgagcggcatatactttttaacaagcatgtttcccgcatgtgagtctctcgtctctatccattcctgccaagttttatgttcttcaacttcttgtatacttttcaagggtctttcaactcctttttatagcgctattaaacggtcagagcgcgctttatatcgtttttatcccttcgttaatcgtacgaacctttaaaatagccgtttgaggatcaaattcaattgtgcgtccgctgtgtcctcctgtagcttttgctgcaatttctacactgtttctatgcagctctctctctactgcttgaacatttcgaaggccaattcgcatgacatcatttcttggttcaaattgaaacatctgcgcgcctcctgctatttttgcttttaacaattttctatgtgcgccttgtttaatcaacatatttatcaaatcaaaaatggctgtatctgcatatttagctctattaaaaggacatttagccccgcttgaatccggaagcatcacatgagcgagcccagctactgagtgaatagagtcataaacgacaactcctacacatgatcctaatcccgctgttcgaagcactgcgggtgcatgtgtaacattcatctcggcaattcctaccttaatcacttgtttatcatctctcacgattcttcaactcctagaaccttcagcatgatatccattattcgtttggttcactggaggtggtcttctaaagagagcactttagttaaatttagaagaacaattaaacggctatctactttaaccactccgtttaagtattctacagctgttccttcaactgtttcaggcactgaagcaatcgttttttcatcaatatccactacatcatttgccgcatccacaatcaaacctgcttctacatcattaagacgaaccataataatacgtgtcagctcatggttgagctgttcttgcaagttaaaacgagtgcgcaaatcaataatcggtgtaataacaccgcgaagattaataacaccttttacatatttttttaccccaggaacacgtgttatgtgctgaatcttttcaatcgactgcacttcttctactgagattccgtactcctcgtctcccaattgaaacacaataattttcatgcctttctccctttctttttacagcatttgttatttaatcaaagcgttgcaatcaatgataagtgctacttgtccatcgcctaaaatcgtggctcctgaaatagcaaacacacccggcagataatgacctaaagattttaaaacaatttcctgctgaccgataaaagaatcaacaattagcccggcggtcttttctccttttttcacgatgactactgaataatgatcgccttgtactgagttaggcacagtgaatagttcttttaaatcaataagaggaataatggctcctcgaaagtcaataaccttttgaccgtgtacatgcatgacctctttcggctgaacaatagctgtttcaataatcgaagaaagcggcaaggcatagcgctcttcactcatttgcacgagtaaagcagaaatgatagaaagagtgagcggcagttgaatagaaaaacgcgaaccgtacccttcgttagaatcgatcgttacagaaccccctagccattcaatcgtgtttttcacgacatctaaacctactcctcgtccggaaacatctgaaatttgctcagccgtcgaaaagcccgaagcgaaaatgagctcgtacacttgtttatccgtcagcgtttcagctgtttttccatcaataattcctcgatctaacgctttttgcagtaccttttcacgattgatgcccgccccgtcatcttctaaatcaataaagacatgatttccgctatgataagctttaaggcgaatcgttcccttttcattctttccgttctctaagcgtgcttgaggcatttcaattccgtggtcaacggcatttcttaataagtgaacaagcggatctccaatttcatcaatgacggtccggtccagctctgtatctgctccgacaatgtgaagttcaatttgtttccctaaatcttttgaaagctgtctcaccatacggggaaaacgattaaagacggtttctacaggcaccatacgcatatttaaaataatcgtttgcaaatctccagaaatacgagacatccgctctaccgtttcgtctaattcgctattattcaattcttttgatatttgttctaacctgcctctatcaataactagttcttcaaacaagttcatgagactgtccaaacggtcaatattaactcgaatcgtcttgttatttgagggctgtcttttctcttcaacaggcgatttagaaggtgctgacacagtaacttcctgtatggctgctgctacttctggtgaaaccagctcctccatttctgtctccttttttacggggaccgcagcaatttttacactttctacttcagagacttccataatgctcgcctgcagcttttcttgtgattcgtttgttactaatataacgataaaagatgattcaaatttttcttgttcgatatcttgaacagttggcgctgacttaatgacgtctcctgcttgctctaacacatcaaataccatataagcgcgtgcagcttttaataagcaggtgcgttcaagctgtacggctatttcaaacgcgttaaacccttggtctgctgtttggctgagcagcgtttgtactaattcatcgtactcaatggaagaagctgcatgctgtgctacgggttcctctgctacaatacgctgcagcttttgaacaagcaatttgacatcaagctgaccatcgccgccttcagaaatagattgaaccattatttctagcgcatcgactgattcaaacaaagcatcaagaacttccgtatgaacgtcgagttggtgatttcgaacagcatctaacacgttttccattttgtgagttaattgtgctaaatcatcaaatcccattgttgcagacataccttttaacgtatgagcagaccgaaaaatttcgtttacatagccaagatcatcggtatttttttcaaaacgcattagctggtcattgacgttttgaagatgttccctgctttcttcaataaacacttctaaatattgattcatatccatcgtaactttccctcctatttctgtgcgtagcgagaaataaagcttccaacgtttcgcagcggttcaatataatcaacaagttttgtagaaacggctgatttgggcatcccataaataacagctgtttcttcagattcagccaatataagcgcgtctttatttttctttaaatcaataaccccttccgttccatccgcccccattcctgtcaacacaatagcaagtttttgataacctgaaattttactaatcgactgaaacaaacgatccactgaggggcgatgtccctttacaggtgaagaagtgtctaaacaaatgctgagctgtccttttttctctacaaccgtcatatgaaaacctccaggcgcaatataagcacatcctgagcgaacgatttcattgtcttttgcttccttcacttcaatatcagctagctgatttagtctaaccgctaatgattttgtgaaatttggaggcatatgctgcacaataaaaataggcgcgtttatgtcttttgaaacagttgataatacttcttgcagcgcacgcggccctccagtagaagtgccaatacaaatcattttgttcactttcgtccccatcgggaggttatatacactgctgttttgcacgtgctgatgactgcttgaagatatgttggctttactagcaagcagtagtttagagataagctcatctttcactttatgtaagtccagcgaaatagctcccgagggtttagcaacaaaatcaactgcgccgtactgcatagcggtcagcgtattttcagcaccttctattgttgtactcgataacatgacaacaggaaggggcttcacacgcatgagctgttttaacatatccaagccattcattttgggcatttcaatatcaagtgtcacaatgtctggcgacagctcgagcgcttttttcaccccttcttcaccattacgtgcggtacccacaacgtgaaaacgactgtcacatgctaaaaaatcgccgattagctttcgcataaatgcagaatcatctacaataagcacctttatttcattcactctaatttcctacctttcaagaaaaaatcgtttgaggcgccgaataaacattccctcgtttttagccgttatcctattgccttggggaataagaatactcaccatttctattagtgatatacttgctttagatgctggattttgaagcaaaaaaggcatttggcgactgaccgctttctggacagcttgatcgtttggtacaatacctaatagagaaatagatatgttcaaaaactgctgaacagctcggttaaatcgttcataagtctcatttccttctttgtcagaaagcgttttgttaataataagacgaaccggtgctgatacagaataggaagctgctagcttaatagcagcgtaagcatctgttatagatgtaggttctggtgttgtgatcacgattatttcatctacagcttttaaaaacttaagtacactctctgacatgcccgctcccatatcaaaaatcatataatcatattgatttgttaacgaattcaattcttgtattaaatgagcaaggtctgatggagaccattcaaatacagaggaaattcctgttccaccagccacataagctaaatcttgagggccttttttaataatttgctggatggaaagctttttttctagcaaatcaaccatcgtatatgaagcagtttgcccaatcaaaatatcaatatttcccatccctatatccatgtcaaaaagaagaactctttgcttttgcttcgttagcgcaagagataagtttaatgatagattcgactttccaactcctccttttccgcttaacacggctagtgttttacaattccttaaagagttttgatgcttctttaacactttttctcttaaaactgctgcttgatcattcatctttccaatctccaaacacatcgtcaataaactcttttattttaaatgccgaaacatcttctggtacatcctgcccgtttgttgtaaaagcagcttgctggccgtaatgatacaacatatttaaaagtgagcctttttgggtggtttcatctcgcttcgtaaaaatcaagtgatcaacaggcagactagcaaaacgttcatatacagctttcatatctgatacttttgacgttagtgctaaaacaagaaatgtttgcaaatcttcttgaaacgtaataattttctttaaatcatttacatatttctgttctaaaaagttacggcctgctgtgtcaataaaaatcacatcgtacgcttccgtttctagcaaagcttttttaaaatctgctccgttataacaaatcgttaaaggcgcattcaagatcgaagcgtacgtcttgagctgctcaatcgctgaaattctatacgtgtcagttgtaataaatgctattttttgattgtgttccaggacacactttgctgccaatttagcaagagttgttgttttaccgacacctgttggtcctactacacttacatattttttgaaaggaccgctccattcacttgctttaaactgattgacaaaccagctcttcgtccactccataagttggtttgagttagggcgatgtaagtagtagtactctagcataggagcctctacgctttttaaaatagcttcgtctatttcttgcaaacgcaaataggcaagcacatcctccactgcttttggatatgaacctgaagaaacctttggcatttgattcatttgtgagacaagagtatttaactcactaagctgctgcttcataaaagattgattatcttccatactggattctggcggcgatgaattcttctttacgctcagcttttctacggaatcgacagctgccaatacttctatttttgccttagtaaataagccaagaaaccctcctgttcgaatttgttttgaatgtaaaataaccgcttcctcacctaaatctgaacgaatggctttcatagcttgcggcatagatgctactacgtatttttttactttcatcagatatctaccactccaacactttgaacttcaacatttgcttctagctcgttatatgataaaaccgccatatgaggaaaataccgctcagtgatttgacgcacgtacatcctcaccgcaggagaacataacacaattggagactgttcttgaaaagaaagtgtttctgtttgcttggctatactttctacgatagtttgtgaaacgttagggtctagtgataaataattcccatgctccgtttgttgaacagcttccgccatcgttttttcaacttttcctgaaagggtaagaactcgaagcagaccttcttggaccgtgtattgactggtaatttgtcttgcgagcccttgccggacatattcagttaacaaatcggtgtctgacgtcatttttccgtagtcggccagcacctcaaaaataatgggtaaatttcgaattgagacgctttcttttaaaagctttgccagtaccctttgaatgtctccaacagaaagcggattaggcgttacttcctcaattaaaataggatacgtttcttttgtgtgatcgattagttgctttgtctcctgccttccaatcagctcatgcgcatacgattttataacttctgttatgtgtgtagacacaaccgacggtgggtcaacaacggtatacccgaacatctcagcctgctccttcaccgcctcgctaatccattttgcaggcattttaaaagctggctctaacgtatcaattccttcaatcaaatcatcatccattcccggactgattgctaagtagtgatcgagcagcagctccccttttgccacttcattgccctttattttaagacagtattcgttgggctgaagctgaatgttatctctgatgcgaacaaccggaatgaccaaccctagctcaagtgccagctgtcgcctaatcatcacaattcgatcgagcagatcgcctccttgattcgtatcagcaagcggaattaatccatacccaaattcaaattcaattggatcaacgcttaatagattgacgacactctccggacttttcatttcattgtcttctagctcttcttcagtaggcgccatttcttcgcgaaccgcctgatgcttagcccgagacaagtaatagcctcccactcctaacaaaatagcaataggcattgtaataacatcattaattggcgtaattaaaccaagagcagcaatcgttcctccagtgacataaagcataactggaaaagcaaacagctgctgtgtaatatcttcgctcaaattgcctgttgaagcagctctagtgacgataatacctgtcgctgttgaaatcataagggctggaatttgactcactaacccatcgcctactgttaacaaagtaaaggtttgggatgcttcagtaatggacattcccatttgcagcataccgataataattccaaacaagatattaataagggtaatgacaatccctgcaatggcatcacctttgacgaatttactagctccatccattgctccgtaaaaatctgcttcgcgctgaattttttcacggcggtcaattgcttgcttttctgaaatcatacctgcatttaaatctgcatcaatgctcatttgtttacccggcatcgcatctaaggtaaagcgtgcggcaacttcagaaacacgctccgctccttttgtaataacgagaaactgaatgataattaaaataatgaagacaacaaagcccactaacggattgcctccaataacgaagtgtccaaatgtttccaccactccgcctgcttctcctgttcctaagattgaacgtgtcgtcgatacattcaaacctaatcgaaacagcgtaagaaccagcagcaaagacggaaataccgatagctctaaaggttctttcatattcatggaaacgagcagtacaagcagtgcaagagaaatgttaatcatgattaaaatacttaataaccatgaaggcaacggaataacaagcatgacgataatgagtacaacacctataacaactggcagttctcttgcagacattaatttttctctccttacaatagcgtaacgttacattttattttgaatgcggtatacgtaagctaatatttcagcgaccgctttaaaaaattcttcgggtactgcatctcctactttggtttggtcaaaaagtgctcttgccagcgggcggttctctaccatgatgatttcatggcttttggcaattcctttaattttttgagcaataaaatccacgccgctggctacaacatagggagcatccattttttcttcatcatattttaaagcaatggcataatgagtggggtttgtaatgacgacatctgcttttggaacttcttgcatcatgcgagacattgccatttcccgctgcttttgctttatttttgatttgattagaggatccccttcaatgtttttatgctcatctttgatatcttgctttgacattcgaatatttttttcgaaatcaaacttttggtacaaataatcaagcagcgataaaaataaaagcataagcgaggcagcaagtcccatttgaaaaacaagcttagacagaacaaccagcgagtcccctatactcttttgagataaatttaatacatcttctatgtgaatccataagataaaaaacgtgacggctccgatacacataattttcagcgttgacttgattagttctaccaacgctctcatggcaaaaatccgtttggctccgctaatagggttaatcttttctagcttaggctgaagagcctccgtggaaaaaagaataccaacctgcatataatttgccccgagcgcagcaataaaagctgcgagcataacaggacctgctgcaagggctactgaaggaagaaggtgcttaaacatctcaaatacgcgctctgccgtcacttcctcaagcatatacgtttgaaaagcttctcttaacaacttcatcatttgctgtaaaaactgtttggctccaaacaaaaaataaagaaaaaccattaaaaggatgagcgcagttgtaacgtcttgacttttagctacctgtcctttttttctagagtcttgcttttttttaggtgtagctttttccgttttttctcctgcgaaaaattgcaaatcaacttttactaaaaacaaagctacacccctcctaatatgcggatcatcgcgcgcatcgcttctatcatttgttcaaatatgatttgcatcatataaaacatgctccccatcacgacaatcagcaaaataaaggcaacaataatttttaccggaaatcccactacaaaaatatttaactgcggaacggttcttgcgacaattccaagcgcgatatcgactaaaaacaatgaacctaccaaaggtaaagacatttgaacagctactaaaaacatcgatgaaaaaacagttatgatgtgtgtagcaaacgcttggcttcccacagggaaagctactttgtctaacggaataattaaataactattatagatgccgtctattaataaatgatgtccattggtcgataataaaaataggagagcaaatacatataaatattgacctagtatcggactttgcgcccctgtctgcggatctattacgttggcaatcgcaaacccaatttgaaaatcgatgagacctccggcaatttgaatagccataataaatacatacgcagtcaaaccaataaacaacccaacagcacattcttttactactaaaagtacaaactgtgcatctaacgaaacgacgggtaaatcaatcgttgtcgcaataatgacggatagcgaggcagacaaacctaccttatgaactgcgggaatcgttttgtatgaaaatagcggaaccgtgataaaaaaagacgttactcgcactagcactagtaaaaacgcgggataggataagatcaactggctcatagctaccctacgtaccgatacagatttgaaaaaatttcatatgtaaatgaaatcatttttgataacatccacggaccaaaaaatacaatccctactaagaccgctacaatcttaggaacaaaagcaagagtttgctcttgaatttgggtagttgcttgaaaaatactaataatgagcccaactacaagggccagcagcaataaagggccagatacaattaagattgtatacacgcctttttctgctaacgaaatgacaaattctccattcattgtctatcacctattgaaaacttattaataatgatttaacaactaaattccagccgtcaaccagtacaaatagtaaaattttaaacgggagcgaaatcataacgggaggaagcatcatcattcccatagacatcagtacgcttgctataatcatatcgataatgagaaaaggaataaaaatcataaatccaatttgaaatgctgtctttagctcactgattgcataagccggaacgagcgcagttaagggaatatcttgaacagaggatggtttatctatatccgcatattctaaaaaaagagctaaatctttttgtcttgtatgagcactcataaattctttcatcggttcagctgctttttcataggcttgattcagcgtgattttttcttttaaaagcggctgaagcgcctgttcatttacctgagaaaaagttggcgccataataaaaaacgttaaaaacagcgataaaccaactaatagttgattaggaggcatttgctgtgtcccgagcgatgtacgtacaaatgacagcacaatgacaatgcgtgtaaagcaggtcatcataattaaaattccaggagctaccgaaaacaccgtcagcagcaacaagagctgaacagatgtggaaatatttgtaggactgctcgagttaaagaggttcatcacttcattcatcgttctttttgttcctttctaactcttttagtacgttttgcctttttattttcatttcattcatttctcgctgaaaaagctgttgaaaagaatgactggatttctcttcttttttagaagtcaatttttctataaaagacggtagtacgactttatattcgctctcgtttttctgttgttcctcatactgcgtaagcagctgctgtttctcttgccctgtaatttctgaaagaagctgtacattttcaccgactccaatgataaaaagctgatttccaactttgactacttgtacagatttgctgcttccaacatttgtaccacccaagttttgtactactttatttttttgtagcagccttccttttttattgacaaattttaaaagtgcaaaaagcagcccaattacaagtaaaaacgcgaatatcatcttcataatatctccagctgaaagcgtaggcgtcccctggagttcagttttttcttttgaatcagtactcccactctctgaacacttctccgttttttccaaacattcttttaccgatgcagatccactttctgcatagacgatttgatttgatcctgctaatacgcttattaaaagcgcagcaattacgaactttcgcagcaatgtctgccacctcttacttcaacatagtgtaagattagcgggaaagccccgccaatctgttgtttatccaatcgcttttgaaattgcctctaatacacggtctgcttgaaacggcttaacaataaaatcttttgcccccgcttgaatggcatcaatgaccattgcctgctgtcccatggctgaacacataattaccttcgcatcactttttatgtttttaatttcttttaaagccgtaattccatccatttcaggcatcgtaatatccattgtgacaagatctggtgcatgttctttaaataactccacagcctgctggccatctgcggcttccgctactacttcatatccatttttcgttaaaatatctttgatcatcatgcgcatgaatgcagcatcatctacaattaaaattcggtttcccatttctactcctcctaaaaatcattactttagtttgttaatacggtctctttgactaataatatcggttacgcgaacgccaaaattctcgtcaatgacgaccacttcaccttttgcaattaatttgctattaatcaagatatctactggctcacctgctagtttatcaagttcaatgattgcaccagaagatagtgctaaaatctcttgaaccgttcgcttagtccttccaagctccacggtaacttgaagcggtatatcaagcagcatgtctaaattacgcgaatccccttgaggagaaggcacatgctcgaactcggaaaacgatgctggctgcacatcaactggtgtatgaacagattctgcctgctgtgtttcttcatgctgtatgtattcagctgctagcggttccgttggctttttattaaaaccagattctttttcaatcgaagctgccgtaccttctacgcttggaactaaaagctcttccaccaaacttttggcaaacggtatcgataaaagctgcataatattcgaatcgattaatgtgcctaccttcaaattaaaagagatctttacaaagacgtcatcttgtggaatcagctctgtgccttctcctttttgaatatttaaaatatctaagctcggcggagagatatcaattttcttttgaaataccgtagacatagatgtggctgcagaacccatcatttgattcatcgcttcctgcactgcactcagcttaatttcatccatgatttccgtcggattctcacccgttccaccaagcatcaaatctgaaataacagctgcatcttcatgcttaataactaacaagttcgtaccagaaaagccttctgtatactgaacttgcacagcgacatgaggatttggaaattcacccgtcagctcttctttatatacgagcgatacaaacggtgtggtaatatcgactttttgattcaataaagctgatagcgctgttgctgaactgccaaacgaaatgtttccaatttcgccaagtgcgtctttttccatttccgtaaagtaatcgtctacttgacttgacttgttcgtctccaaaacctcgtcaagtgaagaagttccttttaacaatgcatcaatttcatcttgcgaaagcatgtcatcgttcattcctttaattcctcctcttaacatcatctagaatctgcacagcaactttccgactgacttttccaggctgtgcaataaatttaggttgctctccgacgtaaatagttaacggattatgaacgcttgtttgcagtcgtataacatctcctgcatctaatgctaagaaatcttcaattgaaatatccgctttccctagctcggctacaacctgcaattccgcagcattgatttgtttctttagctgctcaatctcttctacattaggttcttttttcgaagattgcatccagtaatgaacggacagtttggacacgataggctcaagcgtcacgtgcggaatacatagattaatcatgcccgtttcatctccaatttgtacgtttaatgaaatgacgatgacaatttcatttggtgaaatcacctgcaaaaactgaggattcacttcaaactctgatgtttcaggttcaatttccgcaatagaactccaagcttctctcatactttctaacgttttatctaagaagtttcgaatcaagctcgtttcaatttccgttaagttactaatttccccaccgctctcgccttgtcccccgagcaagcggtcaagcatcgcataggcaatgttcggattgacttccataatgatatgcccttctaaaggagggacggctatcacgtttaagatggttactttcggaacagaacggataaattcctcatatggaatttgatccactgatacaacggacacttgtacaacgttacgaagctgcgccgaaaagacagtggtcagcatgcgcgcgtaattctcataaattcgtgtcaaactgcgaatttgatcttttgaaaaacgcagcgcccgtttaaaatcatatgtacgaatgcgctgttttttattttcattttttaattcatctgcattcatctctccggttgataacgcagataacagcgcgtcaatttcattttgtgacaatacatccccagccactagcttccccccttgcttctttactgcaacactttagacgtcgtatacactctaacaacgtgtccgctttccattagctgatcaatttgctttgcaatattcgtttctaacgtattgagcccttgcgttccttcaaaatcttttgcattcatatttgacagctcgttaatgataatatcttttacttgaaaatctcttttttgaagctcttccgctgcttttttactatccatttgaattttaaaggagatgctgatgtagttattactttttaaatttgttttaatatctgttacatctacagaggttttaatcacatcgtcgatagatggaccttttgcagtacctgcctgctccgtatactttagcgtcacgataacagcaatgcttcctattaaagtaagagaaagcaggataataatcatcttactaattagcttatttttaaacacactttattcctccgtcgtttgctgcagccctaatacgttaattcgctgataatagctcgtcactttctcattcacttcttcaactgaatcctttaccactagctttttgttattcgttagcgtaatggtcgtatcaggaaatgcctcaacctgctcgatgtagagcgcatttaacgtaaatgttttgccgtttagccttgttaaagtgatcataataaccggagtaatacctactccttcctcccgcctatcgttttagattgactaattcttgcagtatttcatcggatgttgtaataattcttgtgttcgcttgaaatccgcgctgtgcaacaatcatgtccgtgaattcttccgataaatcaacgttggacatttcaagggcgcttgagacgaagcttcctgtgccgttggctcctggagctcctactaaaggacctcctgagtttacgctttgagcaaataaattcccccctgctttttgcagtccttcattatttgcaaatttagcaagttcgatagtttgattactggagatgttcccgttagcatctatgatgttaacctttccatctgctcctatactgtagctcttacttgttgaaggaatatttatatttcctcctccagttttttgtacgtacagtccatcccccgtcaccaaattaccgctactatctaaataaaaattcccagctcttgtgtagtagtccgatttcccatcatttacaacaaaatagccgtcaccagaaatagctaaatcaagcggacgtcccgttgactgaatgcttcctgccgtttgaactgtatcaattgtgccaatttgcgaacctaatccgacttgtttagcattaacacctccacggttagctcccggtgctgttgctcctgctacctgctgacttactaaatcttgaaacgttgtacgtccttttttatagccgtatgtattaacgttggcaatgttatttcctaggacatctaatttagtttgaaaatttttcatgccgctgattcctgaatacatcgaacgtaacataaaatcactccttaaatttggttggttaactgcttacttctaagatctcgtttagcgaaagtatcgtatgattttcatcattgatcccaaacgatacttcattgtttttgacggatgctgtcgaaatgactccttgctttttatttccttcttcatctaaccatgcagcggttttcccaattaattcgcttccttttaaaataggagaagcctgagactgcgttaaaaacgtattgagcgatgtgctcatatttgtcatttgttcaagagatgaaaactgagccatttgagcaataaagtctttgtcttgcattggattcattggatcttgattttgaagctgagcaatcaaaagcttcaaaaagtcatctttgccaagcgagctgtttcccgtttgcttcactggtgtgtccctattgcttaaatacaagtcagacataatttcatttgtcattgttatcacctatacgttgtagttaatgagcgctgcttcaaaagaagatagaaaggaagccgattcttccaattgttgtgaatcttgatcttcctcttcttttttaaacgcttctttttcctgtctttctttttgctggtcgttttcattgttatacgacatcgcttgttctgacagtagcacatcgattttatcaattgatacatgctgagacgcgagaccgtgccgcaaagttgaaaggttggagtccaataactcttttgtttttgctgacgatacgacaattcgcgcaaccgtttcactgtctttatgaagcatttcaattgaaatcgcacctagctgttttggaaataacttaatgagaagcttcgatgttccctcttcagtactgaacgaagctttactccatattttttcaagctcgtttaccaaattgctagactgttgatagtcagattttgcttgccctagataaatagagaactgctgaagcttaggcatttctccacttccaaaggatggtggctgattctctactgtcgctccggttgtgtttgtacctgcagaactttcgctattttttaaagagctatttgtatctatactttcgctgtgtaataccacgtcttttttccatagaagctgattgaaaaacggtactttttcttctttacgaaaagcgttcatatttctcacagaactttctgaagctgtatgaacagcgtccacaccaacttgatcaacggatacatgctgagacgtgagagcttgccgtaaactgaaaaggctggcgtctaacagctcttttgttttcgctgacgatacaactacttgcgcagtcgttttattgtcttgttgaagcatttcaattgaaatcgtccctagctgctttggcaataaagtaacgaaaagcttggaccttccctcttcagcactgatcgaagctttactccatatttttcgcagctcgtttaccagatcactagactgttgatggtctgatttttctttccctaaatcaatagaaaactgcggcactttttcttctttagcaaaagcgttcatatcttttacagaactttctggagctgcttgaacagccgccacatcgacttgatcaaccgatacatgctgagaagtcagacctttccgtaaagtcgaaagattggcgtctaacagctcttttgttttcgctgacgatacaaccacttgcgcaaccgtttcattttcttgctgaagcacttcaattgaaattgtacctagctgctttggcaataaagtaacgaaaagcttggaccttccttcttcagcactgatcgaagctttactccatattttttgcagctcatttaacggattgtcagactgttgatgatcagattttacttgccttagatcaatagaaaattcttggaccttaggtacttctttagatttaaaagatgatggattattttctaacgtcgccccgtccgtgttagcagtgaaagaaatttcactatccttttttttaaaactacctctatccatactttcgctacgtgaaatcacatcttttttccatggaagctgattcaaaaacggcactttttcctctttatgaacagcggccatatctcttacagaactttttggaggcgcatgaacaactgcgaagaaatcagctgagcgcttttcatgtaaggtatcggttaatacacgtggttgtttatgaattttctctattttttcagcagcagctttctgcaagccttgaagctgcgaatccgaaagcttcactgactgcagctgcggtttttgtagttcttccatcagctgagcaaactctgtttgaaaaacagatgacgtatttttacatagttccagcaaggtagaaatagaagacaaatattgttcttgactgcctgttttgaacgaaacaggctcctgctgcatttctgttaacacgtgctgcagctttagaagcggctgttccaaatctagactacttggaatactactgatcatctcggctagatgttcgtacaagacagacggttcatcttcttcatcttctgcttcgcttaactgaatcgcaattaaccccaccgccttgaagacatcttgatctactgctggttcatcggatgatttctccccgcgcgctaaaggctgcgcatctagctgcttaagctgctgaacaatttcttcaaaaaaaccctgagtctgaataacagctgctttttcatcgcagtttacctttgatgcagctgctggacgtagtgaaatttccactgttttcacctctgcttttattcctcaatctgatctgttaacaatgtcgtatagcgtgcagctactttcggatccattttttctaagattgccgttcttgtactcgctttgaactgcttaagcatcgcgaccgctttgtcttcttttaattcggcaaagataagtgctgcatttttaggagacatgttttcataggtagtaatgacatctttttttgccagctgattgttcttttgttttttcgcttcatcatcggctttttcttccatatcgcgcatttcaatttttagttcatccatttgacgatcttttgtagtgatcgttttctcataagctgcgatttgcttttccttcgtgctcagcttcttttgaaggctctcaacctgcttttgtatttcttcattgctttcttgaatattttcatttttttgcgactgttcacttgatacaaacggaatagcgtgtgtaatacctgaaactttatcatttacatcaacgcctaaaagcgtcagaacaatataagccgccaagatgaggaacaccgctggaataaagattaaaaataaaaacacttggcttttactgtaagacttttcttcttcgtactcttctcttaactctttttgattagccatgttttccacctaattcctatgcagcatatactgctgtagcgacagctcatccatttgcttcgcttctaactgtttttccgcggttatataagaatcgtagtctctcttttttaacttttcatacttctttacttctatgttcttttcttctagcttcagtttctttaagttcatttgctgtcttgcaaacatgacctcttgttgcagcctctcaatcactcgttcggcacttgttaaaaactgctgaaatgacgtaatttctaaaatagaaagcccttgcttcattttgcccgtatgctgttcaatcagcgtttctttttcttttaactttttataaagcttttcacccgctgtttcaaactgctgtaaggattgattatattgagatagcagttcatctttttcatttgacttgattgccattattttagataacctaaattcatatgccatatttactcacctttcacaaacagttcacagagctttgttacacttgtttcaaatgatggatgttcgttcgttttttgctttaaaaatgcaccaatgacaggatgatagtggattgcctcatcaatgtaagcagaagatcctcttttgtaggcacctatgttgattaagtcttcagaattagcataggtagccattaatgaacgcagtttttcagctgcttctttatgccgttcacttacgatatggttcatcacgcgactaacgctttttaagacattaatggccggatattgacctttattggccagctcccggtctagtacaatatgtccgtctataatgcctcgcaccgtatccgaaataggttcgttcatatcatcaccgtctactaatacagtgtaaaaagcagtaatagatccatgttgattagttcctgtacgttcaagcagccttggcaagctagcaaaaacagatggtgtataacctttggtagttggaggttcacctacggctaatccaatttctctctgagccattgctacacgggtaacagaatccatcatcatcatgacgctcagcccctcatctcgaaagtattcagcaatagaagtagctgtatatgctgctttcattcgaaggagagcaggctgatccgaggtagcaactactacaacggagcgctttaacccttcctctccaagatctcgctcaataaactctctaacttctcttcctcgctcgcctacaagggcaatgacattgatatctgcttttgtattgcgtgcaatcatcccgagcagcgtacttttcccaacaccgcttcctgcaaaaatacctatgcgctgcccttgacctactgttagcaaactatcaatcgttcgtacccctacttcaatcggctgttcaataggcggacgctctaagggattaggggggtcttggtcagttaaaacaaacggcaaataatgagaaagttcagacccatctaaagggttccctaacgaatcaagcacttgacctattaactctttccccacgcttacctgcagaggtttttctgtcgtttccactaggcagccaggtccgatatatcgaacagacttataaggcattaaaacgacgtgctcaccgttaaaaccaacaacttctgcacgaattttatctcctcgttcactaagatgaataaagcaaacatctcctattgacgttctaggtcctttagattcaatcatcattcctactactcggctgactttcccgtaccgtttaaaagaagatgtgcgcgggatttcatgaatgagttgtgcgactttcatgtttactctcctctaacaaacgttcttttaattttttcttcatttccgttaactgactatcaaaagacgcaacaagacgcccataagaggaatcgatgacacaatccatttcctgaagattttcatctgcataaataaatagcccggtttctccgtttaataaatcgaacagttctcgtttatgttcacatacatatgtatattttttcggagaaacaaaaagctgaatttctttatgttctctaacttcttttaaagaccttgcaacaagtgataaaaatgattcatctctttgaagctgctcatttaaaatcgtttcagctagggcgaaacctaattcaaagatgacttcttcagattgatttatatattcgtagtactgattctttgtttcgtcaacaatgtttcgcgacatggctaatacatgctcatactcttgttttccttgaagcagcccttcttcgtatccttcttcatagcctcgcttttgttcttgttgaaacagcagcaccttctcttcttcccactgctttttcaaacgttcaacttcgtttcgagcttgtttgtggtaagcgtctgcctcggcctttattatttcagcttcgctgtgcgcttgttcaataacgtgctgtgcattttcttgctgaagatgttcttctgctggctcatcttgtatcggaaaaccaaatggaatgacttgaatgtgcttcgcattttcgtctgaaagtttgttcgtataagttgatttaatgatattagacaataatatcgtctcctccacctcgagctagtacaatttcaccagcatcttctaaacgtctaattgcagcaacgatacgtgactgagcttcctctacatctttcaaacgcacaggacccataaattccatttcttctttaaacgtttcgaccatacggctagacatatttttaaaaataatagatttcacttcttcacttgctacttttaagctcaacaataaatcatcattttctacatctcgtatcacacgctgaatagaacggttatcgagcgttacgatatcctcaaatacaaacattcgctgtttgatttcttctgctaatgccggatcttgaatttcaagcgtatcaataataattttttcagttgctcggtctactccatttaatacttcaactactgcttctaaaccaccagtttgggtatagtcttgggtaacagtagcagaaagctttctctctaaaatttgctccacttcattaataacttccggagacgtacttcccatcgttgcaatccgtcttgcaatatccgcttgcctttcctgaggcagtgatgataagatttgtcctgcctgcggcggctctaagtaagataaaataagggcaatcgtctgaggatgctcatgctgaataaaatttaacagctgcataggatcagcttttctggcaaagtcaaacggacgaacttgcaaagaagaagttaatcgattgataatcatcatagcctgctctggtccaagtgctttttctaacacctgtttcgcatagcttactcctcctttttcaaggtaattttgagcaagcgttatttgttcaaactcatgaagcacagcttcttttagggaaggttccacttttcttaccgaagatatttcaagcgttaactgctcaatttcatcttcactgagatatttatagacagaagctgagacatccggaccaagggaaatcaacaaaattgctgctttttgctttccagttaactcatttttttgcatagcctttaccattagcttccctcctaatcttcactaatccatgttcgcagcagttttgcaaactcttccgggtcttgcttcgctaacgtttcaagatggctttttgtttgctgttcagcacttaaaaccggggctttttgtgccgcttcatatgcttcaaaagtttcatcatactcttcatcatattcctcttcatctaagtcttgacgccttttcctaaccagcagcacaataagaacaacaataataagcagcagtgctcctccggttatatacatccacaatggaatcgaacttgctgtgttgtcagctgtttcttgtccattaaacggctgaacggaaacggtaatcttatcgctgaccgcattatccgagagtgctttcgtatttgcatcttttgaaatagaagtacggacaattgtacctaacattttttgaacgtctgactcaagcgtatcggaaacttgtgatttcccttttgcattggacggatctatcattacttgaatgccaaggtcttgaattttgtatggactttcgacgatttctttatgaattcgattcacttcataattaattcgttcttcatttttttcgtaatctccgtctccacttgttgtgctggatgagtaatttgttgtatcttgttccccagtgccagcaacgcctccatcttgagcatttttaccggaaaatgtttcattaattttttcagcactaacggcaattccttgcatattatctttatcaacaggctctactagtttttcttcacgattttcctgtgtaaaatcaagatctgccgtaacagagaccattactttatcttgaccgaccagtcttcctagcatttgctgtacttgacgctgaatatctcgctcaacttcttttttcgcttcattctgcgaagcaaatgagctagaagcggaattcgtttcgttaccttttaaatcaaagtactcaaaatactggttcataatgacgatattgtctgtaggaaggttcgggacactttttgagactaaatgataaagagatttgatttgctgatcatcaaacttatagccagctttcgtgttgagcacaatcgatgcagatgcttctccctgcttttcattcgcccatacgctttcattgggaagggtaatcatcacttttgcatcgttgactccttggatgtttttcattaagttagccaattcagtttgcatcgcatcgagttttaacacatcaaattcattatctgtcatcccaaagcttgcgtttttcccaaaaaatgaataatcgatacttccgctatcgggaattccttgtgcagctaaatcgacttttagggagtcaacgctttgttcaggtactgaaatggttgttccgttatcagatatttctgaaggaacacttctagcatcaagctctgctttgatttgtcctgtttcttgagcggatagattgctataaagcgggacaaatttatcttggtttaaaaaaacagatgctaaactaatgactagaatagccgcaagaggagcagtgataagggctattttctgtccttttttgcggttattccaaaaaactttcatcttatctcgataaagagctattctttcattcatggtattcctccggttattactattttcattttctttaataaccgctcaattacatttgcattctcatcatttcttgataggcttcaacagctttattgcgtatctcaagagccgtttgcatcgtaatacttgctttttgagcagtaatcattacatcttggagttcaatattttctcctttagcaagcttttcagtcgctatatccgaagcgcgttgagtattgtttaattcattgattgagtcttttaaaaacgttgaaaactgttgcgttgtttgtccagtgctagtagaggctgctgtttttgctaatgctacttggttactaatactattaatcatttcaccactcctttattttccaatttctaatgcttttgttaacatgcttttgtttgtattaaaaaccgtgacattcgcttcgtaggatcgagtagcactaattaaatctgtcatttcctttaaaggatctacgttcggcatctgcacgtacccttggtcattcgcatctggatgagtcgggttatatactaaattaaaaggagtattatcttctacgatatctgtgacttttacaccattgttttgacttttattgatttcggagtgtaagaaggacgaaaaagaaggcgaacggtcagactgcatgacaaccatttttcttttataaggctgccactcaccattaacgtacatccctcttgtcgtttcagcattcgccatgttagatgaaacaacgtccatccttaaacgattggcagttaaagctgaagatgtaatattcatattttgaaaaatagtcaaactcatttacctcctctaatgactgtttgaagagaattaaattttccatttaaacgatctactagcgcctcatagtaaatttgattttcagccatatccgccatctctttatccatatccacattgtttccgtttgtttgataggaagtgtttccttggtgggtaatcactcgctgggatgaatcggaaaatgggatatgttttgaatcagtccgatatgcttctaactcgttatgtaataaatctcgaaattcactcgtacgcgatactgttttcgatttatagtttggagtatcaacgtttgcaatattttgtgcactcgtctgctgcttttgtgacgcgtagctaattccattttcgattgtttgaaaagtagttgaaaacaaactcaattcttacacctgcttatctattctattttcctcaaaaatgagacaaatttcgactttagtaccatagaacttattgtaagaaaaacttcatgcaatgtctatccttttttaagaacttttggactataaaccaaaattttcattcatttcccaagcatattttaacatcaatgctatactttagctctattttttaaattgaaaatcaatatatataccataag

SEQ ID NO: 27 - DNA, 63540 bp, Priestia aryabhattai
  source 1..63540: mol_type = genomic DNA
tttggttgggacatctattattagtagatagcttgattgcaggtattgtttgcattgtgttaggaattttatttagagctcataaaacaagcaaatttttgtatggcatagggattgtgtttggtcttatttttgtcatcgggacggtcactcattctccatctaatacagaaacttcatcagttacagctgagaaagtagaagcaaatcaaaaagacagtaaagacacgtcagaacttaaagctctcgttactaagggaatgacagataaggaatttcaaaaagaaaaagagaaagccgcttttcaacagtcagacttaattgcgttaggtaacggagaagtcggatatgtgatcaaagctgaagacggttacgttgtagctgatacgaatggcgaaaccatttcaagcgttgaaacgtttaaaacggctgatgaagtagaacagtatgaattaactgaagttaaaaaagtacataaagatgtaagaacagttgatgctcattatacggcttcagatttagaaagcttagaagattttgatcaaaaaattaatgaagtgctgaagcgcgttaatcttacaaaaaaagagtttaatgaactaaaattaaaggatgttaaaacattaacttctcatgaaatagaaataatgaaggctattcgtgactctgtttctccccttacaaaagatacgctgctgcaaaaaacgatccctgctaaagatattgaaaagtatgtagatggatcttatacagcagtgggaggatatgtagctaaagctcaagatgttcatgatattacttcgtacaaagattttgttgaaagcttacgtttagattacaccgatggttcaggcaaaaggccgtttcctgaagaaggatcgacgtacggtgtaatcaaatttaaatcgcaagcggtaagtcacgttgatattccctacggaactgtattcggagggaaaacaacagatggacctccatgtacgcttaatgggtttacaggatctcgaaacggggaaaccgttccagagttcaaatttgataactattatccaccagcaaacggagcggaactataccaagtggtaaatggggaagaagtacttttagctacctatgtggcagaagaaaaacgatttgtaccagcggttgctaacccaatgtaaaggactggttttttgtgattcgaaaaggtttgtatgcagcatataatgaacgagattacgaatgttatgaaacggaaaacggatgtgtaaagctgattagctatgataaaggcgacgtagcaaatggattcattccatacaatgacacgactttcacaaaagaagttcctcgtgatgctgttgaagaagtgttttttgtagctccgtatgctacttatcaaaatgaaaagtttggtgtgtcagatgcttctgatcgtcgagtgcttttgaccacatctgaaaaagaaaaagctgataaatatcattttcaacgaacggataaatatctatacgaaaaacatgtgttaagagaagaagtgaagttaatggagaaaaaaactccttattcatgagacgtcataataaaaagaggatgcactcgcatcctctttttatttaatcaattttcttgaagtgtttctgttcgtattatcatttgtacgaaggaaggtaatgccaagaccgattaatcctcctacaatagcaggaactacccagccgagacctactccatacataggtagaatcgatgtaaacagatcgtttactgctgcaattttgaatccagcagcatttaagccatcaaataaactaacgataaacgtgaacagaaggcttacttggtaaacttcagaacgtcctttaaataaaggatgtaaaaatgttaaagcaattaacacaatagctaacggataaatagccgttaagaccggaactgaaatagcgattaattccgttaaaccaaagtttgctacaacggcgctgaatgctgataaaatgacagcaatcaacttataagaaacacttggaaacagcttatgaaaaaaggaagaacaagatgttacaaggcctacacttgttgttaaacaagcaacggtaatcatcagacctaaaagaattcctccgtaagagccaaagtagtaatttgatacttcagccaaaaccgtacctccgttatcaagacgtccaagctctgatacgcttgaagcacccatataggacaatgcactataaataagagctaaaataacggcagcgatagccgtagcttttgcacaaattgtgatgatttgtcggttagtttttgctcctttttctttaattgcattaataataataattccaaaaacaaatgatgctagtgtatccattgttaagtagccttcttggaagcctttaaaaaatgagtgtgttgtataagcttcgcttggtgcttcaaattttccaattgggttcacaacggctacaactaccaatattccaataaacgttaatttaataggtgttaaaacttttcctactaaatcgacaattttcgcaggatttagcgaaaaaaagcaggtaatagtaaagaaaattaccgtgaaaatgataaggggaaggtgccctggattttctgataaaaaaggcttaacgccaatttcgaacgaaacgcttcccgttcttggcatcgcaaaaagcggtccgattgccaagtataaaatcgtagtaaagataataccgaaagctgggtgtacgcgactagctaaagactgcagatcctcttttccggaaaaaccaaatgcgagaacgcctagaagaggcagacctacacccgttactaaaaatccagcgtttgctgaccaaatattgcttccagcagactgacctaacattgcagggaagattaaattacctgcgccgaagaatagggcaaaaagcataaagccaataaccactataaatgaaaaaggaactttgtttgacacgttaaaacctccaaaattataaatgctttttattatcgtgttgaataattaaaattttcagaattttatattcgaataataaaaataaacatgtatcgtattatactaacctaaaatgcatatttcaatataaaattttatttttttaatttattcgctgaaatagcaaaaatagaaaaatacttagcaaaaaaatctcaatatacaacaattatttgatatgataaaacagaaccgtggcttttaaaaattcgcatgtgcggccttacatccttttagtaaagaactgtttacataaggtgctgtaaggatgtatatttatacacggttcgtggaaccgcatatgctcgatggatgaaagtcaactgtgcgaaaggagcaagaaagtgaaaaggttaggtctagcaactcagattctaattggactgattttaggcgtagctgtaggtgctattttttatggaagcgatacagccatttctattttacagccggttggagacatatttattcatttaattaagatgattgtcgtaccgatcgtgatttcagcattaatcgtagcggtcgcaggagtaggcgatatcaaaaaattaggtaagcttggcggaaaaacaattctttattttgaaattgttacaaccattgctattgtagtggggattattgccgcgaacttattccaccctggtgcaggggttgacatgggacatattgaaaaaagcgatatttctcaatatgaggcaacggcaaaaacgtctgaaagtacagggattgctcaagagcttcttcatattgttccgacaaacgtctttcaatcggtagcagaaggtgatcttttaccaatcattttattttccgtactgtttggtgtaggcgtagcttcgattggagagagaggaaaacctgttttagccttttttgaaggcgtcttggatgcaatgttttgggtaactaatttggtgatgaaatttgctccagtaggtgtatttgcacttattggtgttaatattataaagtttggtgtcggatcacttattccattgggaaaattagtgttcgccgtttacttcaccatgattttctttgtgcttgtggttcttggaattatcgctaaaatggctggaacaagcatgtttacgctgataaaagtgttaaaagacgagctgcttcttgcttttacaacggcaagttcagaagccgttttaccatctcttatcaaaaagatggaagacttcggttgttctaaatcggttacatcgtttgttattccaacaggctatacgtttaacttagatgggtcgaccatttatcaggcgctggcatcgctgtttattgctcaaatgtacggcattgacctttccattatggatcaaattcagctccttctcgttctgatgttaacatccaaaggaatggctggcgtgccgggagcatcgtttgtggttgtacttgctacacttgaatctatgggcttccctcttgaaggcatggcatttattgcaggaattgaccgtattctcgatatgatgcgtaccacagttaacgtagtaggaaatgctttagctgcaattgtgatgtcgaagtctgaaggcgaatttgataagcaaaaatcattaaattatacaaatgaattaaagaaatcaaacatagcttaaaacaaaaaagccgggcagctgcccggctttttttgtttggagctgcctgttatcttttttgaaacatatggtaaaataaaagaaatgagagacaaaggaagtgtcataatgacggaaactgttcagttaattaaaaagcttgtttcgattcccagtccttctggaaatacagaaaaggtgatttcatttgtcgaagactatgtaaaagagctaaatattcaaacgtatcgcaatcgaaaaggaggcttagtcgctactattcccggtaaagatacagatcaccaccgcatgctgacggctcatgtcgataccttaggtgctatggtaaaagaaatcaaaccgagtggacgtctgaaaatcgacttgattggaggatttcgctacaattctattgaaggagaatattgtgaaattgaaacttcatcaggagaagtatttacaggaaccatccttatgcatcaaacatctgttcatgtgtataaagatgcaggggaagctgagcgaaatcaagaaaatatagaaattcgactggatgaaaaagtacatagcgcagaagatgttcgcagccttggaattgaagtcggcgactttgtttcgtttgatcctcgtgtagaaataacaaaaagcggttttattaaatctcgtcatcttgatgataaagcaagcgtagctttattgcttcagctcatgaaaacaattcaagaagaacagatcgaactgccatacactacgcactttctcatttcaaataatgaagaaattggatacggaggaaattcgaacattacgcctcaaacagtagaatacttagcggttgatatgggtgctatgggagatggacaatctactgatgaatacaccgtgtctatttgtgtaaaagattcaagcggtccatatcattacggtttgagaaagcatttggtggagctagctaagcagcatgatattcagtacaaattagatatttatccgttttacggatcagatgcttctgctgctattcgtgccggacacgatatcgcacacggcttaattggtccaggaattgattcttctcatgcgtttgagagaacgcatcaagattcattaaaccatacgtataagcttctttatcactatgtgcagtcgaacatggttctgctttaagaaaggaatatttaattagtgtatttttatgcaaaataaagagcacgacgggattgtgatgtctgtactttcctttcctaaaaaagaagccggctgtccggcttatttttttaaataaatactatatatttttttgctggtgaagcaacagttggttaaaaaagcaccttttttaaagaggtataatactgcttaaaccttttgtacattgtgttcatttacagaagttaaaatgtttttaaatttttaaaagtttcttgtgacaagttttgtagaatgggttttcaaaaggaaatggtttcggcataatgtggatatagcgatcactacaataatcggaggcgaatcttttcatgtgggtactgacggtatatgctggaaaagaaatggaaatgtttgaatttgaaactgaaaagcaggcgagagaagcttttgccaaaacaaatggctgtaaagttctttcagaagtggtttattataatgatcctcatttaacattagtagctatataatgaaaaaacaagagctgactttatgctcttgtttttttatagatgcttgtatcttccgaaaagaatagagttgaaataaaaaaaaatgtacgctatgatatggtagttacttctattattctgatagtttaaaaggttcatatatatcaaacagcaacagtaaagatgccaagaaggcttaatagggaaactggtgaaatgccagtactgtccccgcaactgtaagtgtggacgaacgagtataaccactgtgaaaaaatcacgggaaggttctcaagtagaatgatacacaagtcaggagacctgtctttattgtgaagtttctatttctccggggagcgggaaggaagacgttggcttaaagtggcattcgtgtacactcttattctgacgttttacccgctcgcatattagcgaagcgggtttttctggtagcgtaaaactacatatcgtgcaaaaaaggtgcgcaatgttcacattgcgttaaatgggaagtctggtgtgaagccagcgcggtacccgccactgtgaagaggagctgattgcatatgccactgtattcgggaaggcgcaatcaagtgatgaatcgaagtcaggaaacctgcctttttttaatgcgaagcttaccctacgggatataggtggaagtgcaaaaacttagtttgaattttctgcgcctctatcattgatagaggcgctttttttagtaaaggagcgatgagtgtgacgacgtggaacttaaatggaacaaaacatcacgtattgatttgtaatggaagcagctgtatgagaaaaggtggagaagaagccacgcaagctattcgaaataaagtgacggaactggatttggatgaaacggttcatacaacgcgtacgcgctgtaacggacgatgcaaagatgctcctgtagctatcgtctatccttcaggagattggtacaagcaggtcactgaaaccgtggctcaccggattgtcgaagagcatttagcaggaggctgcagtataaaggaatcgcttatctatgaatatgatcaaaatggtttcgtttctccggaaaacagtgactccatagaaggaattgacaaagtaaaaagtaacgcataaaggaggagctagcatgaaaggtaaactgttagttattggatttgggccgggaagctttgaacatattacacagcgagcaagagaagccattcaagaaagtgatatgatcatcggttacaaaacctatgtggaattaattcaaggactgttaacgaatcagcaaattattagtacgggaatgaccgaagaagtaagccgtgcacaggaagctgtaaagcaagctgaagcaggaaaaaccgtagctgtcatttcaagcggagatgcaggagtatacggaatggcaggccttgtgtatgaagtgttgattgaaaaaggctggaaaaaagaaacgggcgtagagctggaagtaattcctgggatttcggctatcaattcatgcgcatctcttcttggagcgcccgtgatgcacgatgcttgtacgattagtttaagtgaccaccttacgccttgggagctaatcgaaaaaagaattgaagcagctgcacaagcagattttgtagtggctttttacaacccaaaaagcggaagacgaacaagacaaattgttgaagcacaaagaattctattaaagtaccgttcccctgatacgcctgttggtcttgttaaaagcgcttatcgtgaccgtgaagaagtcgtaatgactaacttgaaagacatgttaaaccacgaaataggcatgctgactaccgttgttgtcggaaattcatctacgttcttttacgacgatttaatgattacaccgcgcgggtatcagcggaaatataccctcaaccaaacggagcagccgctaagaccgcatcagcgacttcgaaaagaggcagaaccatgggctctcgatcaagaagagactgtaaagcaaaccggttcagctattgaagcagttcagaacacaagagaagaaaaagcaacttcacgagctcttgcagaagaagcgcttcaagcaattttaggtgaaaccacttctgcggtcgtacaccagccaatacagtctattttcgaagtggcggttagtccaggacttgcaaataagaaattcacgcctgttcaaatgaccacactagcagaagttgttggtgaaaaaggtatgatggagtatacacctgaccatcaaatcaaactgcaaattccaacggctcagccagatgtgattattaaaaagctccaagcagcttcctttttactatctccggtcggagacgtgttcacaattaaagcgtgtgatttttgtgacggagaaaaaagcgatgctattccacatacggaagaattacaaaaacgcctcgggggaatggacatgccaaaagagctgaagcttggtattaatggatgcggtatggcctgttatggcgctgttcaagaagatatcggcattgtctatagaaaaggtgcgtttgatttatttttaggagctaaaacggttggacgcaatgcgcattcaggtcaaattgtggcggaaggcatagcacccgatgacattgttgaaatagtggagaacattgtccatgaatataaagaaaaaggtcatcctaatgagcgatttcataaattctttaagcgtgtgaagaacgtttatggattcgactatcaagatataacaccaaaaataaaagtagaaccagctccgtgtggagattaaaaaatgggagggcattatatgaaatcagttttatttgtcggtcatggaagcagagatcctgaagggaacgatcaaattcgcgaatttatttcgactatgaagcatgattgggacgcatctattttagtagaaacgtgttttctagaatttgaacgcccaaatgtaagtcaaggcattgatacatgtgtggcaaaaggagcaaaagatgtagttgtaattccaattatgctcttgcctgctggtcactctaaaatacatattccggcggctatagatgaagctaaggaaaaatatccacacgtaaacttcgtatacggacgtcccattggcgttcatgaagaagcccttgaaattttaaaaacgagattacaagaatcaggagagaatttagaaactccagctgaagacacggctgttattgtcttagggcgaggaggaagtgatcctgatgcaaacagtgatttatataaaattacgcgccttctttgggaaaaaacaaattacaaaatcgttgaaacttcttttatgggcgtgaccgctccactgattgatgaaggcgtggagcgatgtttgaaattgggcgctaaaaaagtggttattctcccgtatttcttatttacaggagtattaattaagcgtttggaagaaatggtggagcagtataaaatgcagcatgaaaacattgagtttaagctagccggctatttcggttttcacccaaaactgcagacaattttaaaagaacgtgctgaagaaggattagaaggtgaagtgaaaatgaactgcgatacgtgtcaatatcgcctcggcattatggagcatattgatcaccaccatcatcacgatcatgaccatgatcacggacaccatcaccacgatcaccatcatgatcacgaccaccatgaagataaggtcggcgagctaaaatgattttattgttagctggaactagcgatgcacgtgcattagccgtgcaagtgaaaaaagcaggtcatgaggttacggcaacggttgtaaccgaaaacgcagctatcgaattacagcgtgcagaagtgaaagtgaaaattggacgtctcacaaaagaagatatgatggattttgtaaacgaacatcgtgtaaaagctattgtggatgcaagtcatccctttgcagaagaagcatctaaaaatgctatcggcgcggctgctgaaacagcgattccttacatacgctatgagcgggcttcgcaggcttttacctatgataatatgacgatggtttctacgtatgaagaagcagcagaagtagcagctgagaaaaaaggagttattatgctgacaacaggcagcaaaacactgcaggtttttacagaaaagctgcttcctctttcagatgtacggcttgttgctcgtatgcttccaaggctggataatatggaaaagtgccagcaattaggatttccgcaaaaaaatattattgctattcaagggccgtttacaaaagagtttgatcgagcgctgtataagcaatacggagtgacggtcatggtcacaaaagaaagcggaaaagttggatctgtggatgaaaaagtggaagctgctaaagagttaggcttagatattattatgattgggcgaccgaaaattgagtatgggaccgtgtattccacgtttgaagaagtcgttcatgctttagtaaaccaaactaggagttgattgagatggattttcgtacagaatttaaaccgttaactgttcagcctcagcaaattgaaggaaaaagttttgaaatgattacagaagagcttgggcctcatccgtttacagacgaacagtacccaattgttcagcgcgtaattcatgcgtctgcagactttgagcttggacgcagcatgctgtttcatccggatgcgattcaagcaggaattaaagccattcgcagcggcaagcaagtggttgcagatgtacaaatggtacaagtaggaacaaacaagcagcgaattgaaaaacacggcggtgaaatcaaagtttatatttcagatccggacgtaatggaagaagcaaagcgcttaaatacaacgcgtgcaattatttctatgcgaaaagccatcaaagaagcagacggtggaatttttgcaattgggaacgcacctacagctttacttgagttaattcgtttgattaaagaaggagaagcgaagcctgggcttgttattggtctgccggtaggatttgtttcagcagctgaatctaaagaagaacttgcaaaacttgacgtgccgtttattacaaacatcgggcgaaaaggcggcagtacggtaacggttgctgcattaaatgcaatttcaattcttgcagatcaggtgtaacgcatgaaggaagtaccaaaagaacctaagaaactcagagaaggctatacgacgggcgcttgtgcaacggcagctacgagagcagctctgcttacgctaatttcaggagaagtgcaagatgagtcaacgatttacctacctgtcggccgctttgctacgtttcatcttgaagaatgtgagtatcgcacaagcagcgctgtagccagcatcattaaagatgctggagacgatcccgatgccacgcacggagcgctgattatttctgaagtttcgtggtgtaatggtgcagacattatcattgatggaggagtgggagtagggcgtgtgacaaagcccggcctcccggttcctgtcggtgaggcagccattaaccctgttccaagaaagatgctgaaagaaacggctgaacagcttctagctgaatacaatatacaaaaaggcgttaagattgtcatctcggttcctgaaggagaagaaatggcgaaaaagacattaaatgcgcgcctaggtattttagggggcatttcgatactggggacgcgggggattgtcgttccgttctcaacagctgcttataaagcaagcatcgtgcaggcaatcagcgttgctaaagcgagtaattgtgagcacgttgtcattacgacagggggccgaagcgaaaagtatggaatgaaacagttccctgaacttccggaagaagcatttatcgaaatgggagattttgttggatttactttaaaacaatgtaaaaagcaaggaatgaaaaaagtatcgcttgtaggcatgatgggaaagttttcaaaagtcgcgcaaggcgttatgatggttcattcaaaaagtgcacccattgattttaattttttagcaaaagcagcttctgagtcaggcgcttctgctgaactggtagaggaaataaaaggtgcaaacacagcttctcaagtgggagatttaatgacgcaaagcggccatcatcagttttttgaaaaactgtgcgagtactgctgtttatcagcattaaaggaagtaggggacggaatcgatgtcgatacgtctctttacacattaaaaggagattttttaggacaggcggtgcaacatggcgattaaaattattggaattggtgacgatgggaagttaagtctgcttcctatttatgaacagtgggtgtatgaaagtgatgtgctaattggaggaaagcgtcacctggatttttttgaagatttcgaaggagaaaaagtagcgattgaaggagggctttcttctcttgttgaacgtttaaaaaacgaagaaggaaatgcggttgtgttagcctcaggcgacccgttattttacggaattgggagctatctttctacgaagctagacgttgaaatatatccttatttaagttctattcagcttgcattctcacgtttgaaagagcgatggcaagatgcttattttacaagcgtgcacggcagaagcataaaaggactggctcagcgcattgacggctataaaacagtggcgattttaaccgatgagcaaaattctcctagtgctctggcaaactacttattatcattcggcatggcagaatacaagatgtttgtggcagagaacctaggtggagaaacggagcgctgtcagctgctttcgctagaagaggcggcgaatcaactcttttcaccgcttaatgttgtgatattaaagcagatagaaaaaagcccagtctggcctcttggaatagaggacgatgaatttattcaacgcaagccggacaaaggacttattaccaaaaaagaagttcggacacttagtattagcgccctgcagctaaagagagacagcgtcgtatgggatatcggaacatgtacgggttcagtcgcaattgaagcggctaaaattgcgcgtgaaggacaaatttttgccgtggaaaaaaatgaagcagacttagaaaactgcagagaaaatctagcgaaatttcgagtagacgcccacactgtgcacggaaaagcaccggaagggttaagtgagtttgctgatcctgatgcggtgtttattggaggtacagcaggaggcatggaaaccattttggatgtttgctgcagtcgattaaattcaggagggcgcatcgtattaaatgccgtaacgattgaaaatttagcagaagcgatgaaagcttttaaagaacgagggtttgagactgctgttacgcttgcacaaatttcgagaagcaagcccattttacatttaacgcgatttgacgctttaaaccccatttatattattacagccaaaagaggagaatgaatatgattggaacattgtacggacttggagttggaccgggagatccagaacttattacagtaaaagcatttcgtaaattaaaagaatcacccgttattgcgtatcctaaaaagcaaaaaggaagcaaaagctatgcccaaaaaattattgatgtctatttcagtgcaaatgaaaaagacatgcttggccttgtgtttccaatgacaaaagatcctgctattttggaaagaaaatggacggaaacggtagaacgagtatgggaaaagctcgaggaaggaaaagatgtagcatttgtcacagagggcgaccctatgctttacagtacgtttattcacatgatgcgcctgatgcaagaacgtcaccctgaagctccgattcaagtaattcccggtatttcatctattaatggagctgcatctcgtctaggtattccgttagcagatggtgatgaacacgtagcaattgttcctgctcgtgaagattatgaaacaatgaaaaaagtattaatggaaaacgactgcgtcatttttattaaagtggccaaagtcatcgattttatggtcggtcttttaaaagagcttgatctgcttgaaaaagcgtcagtggtgacaaaagtaacgtcagatgaagaaattatctggaaagcttcagaactagaaggagccgatttacaatacttaacgctaatggtggtgcgaaaatgaagttatacataatcggagctggacccggagatccagatttaattacagtaaaaggcttaaaattacttcagcaagcagatgttgttttgtacgccgactcactggtaagtcaagagctagttgctaagtctaaaccaggagctgaagtgttaaaaacagcgggtatgcatttagaagaaatggtcggtactatgcttgagcgcatgcgtgaagggaaaatggttgtaagagtacataccggagatccagctatgtacggagccattatggaacaaatggtacttttaaaaagagaaggcgttgatattgaaatcgttccgggcgtcagctccgtattcgctgctgctgcagcggctgaagcagaattaaccattccagatttgactcaaacagttattttaactcgtgctgaaggaagaacgcctgtacctgagtttgaaaaattaactgatttagcaaaacataaatgtactattgctttatttttaagcgcgacgctcacaaaaaaagtaatgaaagaatttataagcgcgggttggagtgaagacacgccggttgtagtagtctataaagcaacgtggccagatgaaaaaattgttcgcacgacggtaaaggacctggatgatgctatgcgaacaaacggcattcgcaagcaggcgatgattttggcaggctgggcacttgacccccacattcatgacaaagattatcgctcaaaactttatgataaaacatttacccatggctttcgaagaggagtgaagtcggaatgattcaactccaagaaggaaaagaagttctcattacacagcgcggggattatgctgtcgtggccatcacgaagcacggcgtagaaattgcaagaaatctaggccgcacttttcagcagtctgatgtgtattacatgagcaagtttgaaaaaggagacgaacaagagcagaacattcagctgttttcaggaagcgttcggatgcttttgccttctctttttgaatcgtataaaggacttattattattatctcactgggagcagttgtacgtatgattgcacctattttaaaagataagaaaacggatcctgcggttgttgtcattgatgataaaggcgaaaatgtcatcagcgtgctttcaggtcatatcggaggagcaaatgagcttacgcgtgaagttgcggcagctcttgaagctcatcctgttattacaacagcatccgatgtgcaaaaaacaattccggttgatttatttggtaagcgctttggatgggtgtgggaatcagcagaaaaactaacgcctgtcagcgcttctgtggtgaacgaagaagaaatagcagtggttcaagaatcaggtgaaaagaactggtggcattatgagcaccctgttccagctaacattaaaacatattcatcgattcagacagctcttgaggcatcgccacatgcagctttggtcgtaacgcatcgtaatttaaaaaaagaggaagaagcaatcttagaaaacggtgttctttaccggccaaaagtattagcgattgggatgggatgcaatcgagggacaagtacagctgaaattgaaaccgttattgaaaaaacgcttgctgaacttcagttctcaatgaaaagtgtaaaagcattatgtacaatagagttaaagaaagatgaagaagggctgttagaagtggcgtctaagtacggctgggagtttgtctattattcgccccaagagctaaacagcataagtatccaacagccttcagatactgtttttaaatatacaggtgcatatggcgttagtgaacctgctgctatgttatacagcggtgctgataagcttgaacttgtgaagaaaaagtcagggaatgtaaccatttcagtggcacttattccatatgactaaaggagagaacaacatgtcaaacagaagactcgtcattgccggtaccggaagtggcgtagggaaaacaacacttacaatcgggctgatggcagcgttaagacaagccggttacagagttcaagggtttaaatgcggacctgattatattgatccaacgtatcatacggctgttacagaacgaacgtctcgaaatatagacagctggatgcttgaacacgatatggttagggaaattgtcgctcgtgctagtgaagatgctgatatttccatcatggaaggagttatgggatttttcgatgggaaaaatccgttaacgaacgaaggaacaacagcagaaatcagcttaatcaccaatagccctgtccttttagttgtcaattgtgctagtatggctagaagtgcagcggcgattgtaaaagggtttcagcaatttttacccgaagcaaacatcgtcggtgtgatcgctaaccgagttggaagtgaagggcattataatcttgttaaggcagcgattgagcaggaatgtcacatccctgtagtaggctacttgaaaagaaacgctgatcttacgattcctgaacgtcacctcgggctcattccatcgattgaacgaggagaattaacaccgttttttgaacagttaggaaagcttgttcatgatacaattgatatcgaaaaagtatatgaactggctttagctcctaaaatagaaattaatgatcctatctttacaaagccgtccgtacctcaagtgaaaattgctgtggcgagagatgccgcttttaacttttattatgaagaaaatttcgaattgttaaaagcttgcggagcagagcttgtagaattttcgcctttaaaaggagaaacggttccacaagatgctgacggtctttatataggaggcggatttccagaagaatttgctgaaacgctggctcagcaaatcgacgttaaaaactctgttcgagcagccatccaaaaaggaattcctacacttgctgagtgcggaggctttatgtttttaacagatggtattgtcacaacagatgatacatgccatgaaatggtggggcttattcccggacaagtaagaatgcagacaaaattagctgctttaggataccgagaagtgacgggaaagccggcgaattttttatttaaaggcgatatacaagctaaaggccatgaatttcattattcaacctttcattcagagaaagagttttcgcctgcctatgatacaaaagggatgcgaggaatgaaagaagaaggctatatgaacaataatttaattgccggctatacgcactttcatttcggctcttctacgaagatggtagaaaactgggtggaacagtgtaaagcggtaaaaaaagaaagaagagatgccgtgtgacagttggaaaagtatatttagtaggagccggaccaggagatccgaagctaataaccgtatatggaatggagtgtattcaagaagcggatgtcattttatatgaccgcttagctaatgaacagttgttaaactatgctaaaaaagacgcggagcttattttttgcggaaaattaccgggcaagcacggagtcatccaagatcgtattcacgaactgcttgttgaaaaagcacttcaaggaaaagtagtgacccgcttaaaaggaggcgatccttttgtgtttggccgcggagcagaggaagctgaagtgcttgctactcaaggaattccttacgaagtagtgcctggtatcacgtcaggaattgcagctccagcttatgcaggaattcctgttacccatagagatcatgccacttcttttgcgattgtaacgggtcatggaagagaagaaaaaggaaaagattatttaaactggtcagcgcttgctcaaggaatagatacaattgcgttttatatgggcgttggaaatttacctcatatatgcaagcaattgatggaccatggacgagataaacatacgccagtagcgcttgttcaatggggaacgacgaagtatcagcgcaccgtaacgggaacgcttgacacaatcgaagaaatagcaaaaaaagcagaaattgctcatcctgccatcgtgcttgtaggtgaagtagtgacaattagagaaaaaataaaatggttcgaagaaagagcggaaaatattctgctttaacgttaaaaggaggagacaatatgacgattatttcacagctaaaagaacgaagagcggtacgagatcatgaaccgcgtgaagtcgaacaagagaaaatcgaacagctgcttgaagcagcgacgtgggctccaaatgaccgaatgagagagccttggagcttttatgtgattcaaggagaagcaaaaaagaagtatgaagaactggctgaagcttatttaaaggagcgctttcctacaaagcctcatttagtagaaagttcgttaaaagcagtgaaaaatacgcctgtacatatcgttgtaacagctgatacagttgaaggagacgacgaagccacggaagacaacaaatatgcggtttcatgtgcgattcattccatgtggctagcagctaaagaactaggtcttggattcgtgtggagaacaagaggcgttggtcttgttcgagacgagaggctgtatgagtttatcggcaagccttcaggtaaagtcgtagtaggaaacgtatttctaggctatccaaatgaagagtctcttacaaaaatgaaagagcctgctagaacatcgtttacagaaaaaacaacatggctgtaaactgaaattcgaagaaaaagaggtttttagattgaaagacaaacggggtcttacgttaatttataccggagacggaaaagggaaaacaaccgctgctttaggtcttgctttgcgcgctacgggacgcggacaaaaagtattaatgattcaatttattaaatctcctcagcgtacatatggcgaaaagctgatgtttgacagaataggaattgaaatgattcaaacaggagtcggctttacgtggacaaaaacaccgcctgaacatcgtgaagctttgcaaaaagcttgggcgctaacgaaggaaaaagtcttctcgaatgaatatgatgtagttattttagatgagttaaataatgcactggctatcgagaaatttcctattgatgatgtgctaccgctacacgaagtaattgaccttattcaaaagcgccctgagcatatgcatttggtcattaccgggcgttctgccaaaaaagaagtgatggatgcagcagatcttgtgacggaaatgaagcctcataaacattattatgatgaaggaattcctgccgtaaaaggaattgaattttaaaaagccctcagtgaagagggctttttttattgagcaggggcatctactttttcagcttgccagtaaaattggctaatgacatcagacaatgcttttgttgtgttggttagttcatcaaagttattatcaactccgcccacttcaattaaaatcgcatttttagaaacatcctgattatatacaccgttaccgctggatttgtttttgccaataactccgcggcttaacccaggatatttcttttcaagaccttcatgaagcgcttttgccatttttaagttttgttcaaagttttgattcgctttccctaaaacaaacacaacttttgcatacgatttattgttaatcttaatggttgtattatcttttcgaagtgaatctcgatgcaaatcgataaagtaagttaaatctctattctcagtcatcgccgtttcaattactgtgcgagacatggcgtaggcttgattagtattccatcctttttcttttaacttctgtccaatattggtttgatctacttctgctccaattccctgagcctctaaatcttttcctagcatatttgcgactatattaatatttgttttgctatctactgccttattagcatctggatcaccttcaagtcctaacagaggcaagtaagattcccagctgtgcgtatgataaatataaaataccttatttccgccagttgtattattatttggagcattcgtaccattgttttctttaggttgctgaacttttgtagtagaatttctttcttttagcgtttcatctaacggcggtgcagattctctagggaagtttgtgaaattggtgccttcaccggcgatgataatattggagtcgtaaatactgaatccaggaagttctgaaccaaacaagcttctcgcgtcttctgctcgaatacttgttgataactctagcagtgtagaagaaagacctggaggcgagtagtttttatcaaaagccgttgaaaagtggtggttttcttggctcatcaaataataaaggctctccgctttatgcttcgataacgtttgatagacaatagaagaattgaactgttctttaaatgctgagtaactcactagaacaatgatagatgatgtcattaaaacaatggataaaataacaaaaaccatcttatatgttaacactacaaaattggcgcgattactagatttcaatggcgaaatctcctctctatgtcagcatcaggctaataggtatgaaggactttgctaatctagtaataattatatgaatggagatttctaattatgataagcatttaatagagaaagtagttttcaaaatcaaaaaagaagaatcacgggagatataatctcatattctccgtgattcttcttcaaatagacgtcgaatggcttcgccttttggagtaagggtgaatctttttttctcttttttaagcagctgatagttttgtaattcttgtaaatacgtaacaatgcgcttgcgctttacggaatttaataatccaaatgcgggtattttatcgatttatttttgcgtccgagcggaaggaatgttaagtggttgtaagctgtaaaatcaacaggcaaattttctggtaaagtcatttatctaactcctttcatttattgagtattttacctattaaagaagagaagaaaaagttttagtgtgtcttaaatataagagttatttttaaaattttctgttaattaatctttagaaatcaagaaaaggggttcaaagtaattttgaatgggtatagtaataaaaattttgacacatattatcgaatatatatgaatgttgtcaaaaaaaacaacaaaagtgatgattcatccaaaggaggaaacttatggaaaataaaggcccgtttaaaaagacgatatccctattagatttaacgttgattggattaggggctatttttggctccgcttggctgtttgccgttagtaatgtcgctacacaagccgggcctgcaggaagtttttcttgggttattggtggagttattattttattaataggccttgtatacgctgagctaggggctgccttgcctcgtacaggaggaattattcgatatcctgtttattcacacggtcatcttgtaggctatatgatttcatttattactattgtagcttacactagcttaatcgctatcgaagtaacagcagtgagacagtatgtggcctactggtttccgggtttaacaaaatctggatctgattcaccgacgatatctggatggattctacaatttgtgttgctttgcttattctttttactcaattactggagtgtaaaagcatttgcgaaatcgaatattattatttctatttttaaatattttgtaccgcttacagtaatcgtaacgctggcattttattttaagtcaggaaactttacgatgggagagtttgctcccggggggtttgatggtatccaggccgccattgccacaggcggggttatgtttgcctacttaggccttcatccaattgtatcggtagctggagaggtgaaaaatcctcagcgtaatattccaattgctcttgtgatttgtatcattctagcagctctcatttatactgctctacaagtattatttatcggagctattccatctgacatgattaaaggcggttggtccggcattcaagataaattctcactgccatttaaagacatcgctgttgttcttggccttggctggctagcaacacttgttattttagacgctattttatcaccgggtggtaacggtaatatttttatgaatacaacatctagacttatctatgcttggtctcgtaacggtacgctatttaaaacatttgctcatgtggataaaaaaacagggattcctcgatcatctctatggctttcattaggactttcgattttttggacactgccatttccttcatggaatgcactcgtaaacgtatgctctgttgcgcttattctttcttacgcgattgcaccaatttcatcagcggcctttatggtgaacgcaaaagatttggaaaagccttttaaattaagaggaatgagtataattggtccattatcctttatttttgcttcctttattgtctattggtcaggatggaagactatttcatggctgttaacttctcaactggttatgtttgttatatatttgatttttgctaaatatgtgcccaaaaacgaagtaagtcttcgtcagcagattaaatcaacttggtggttagttgcttattatatcatcatgctctttatttcttatattggttcgttcggcggaggaaagggtttgatcgatacgcctgtagacttaattatcatagcggtcgtatctcttgggatttattattgggctaaatatacgggccttccaaaagcgcttattgattacgatcaccatcctgaacaggaagaaaaagcacccgtataacctgtaaagcagcgatattcgctgcttttttctatgttatttgaacatgaatttccaaagtttgtcgtataatttagtaggaaagaaggaattagcacattattgtttaattaatgtaatgtaaccgttttaaatccaacgcttggaggaagagtatgattgaaaaaataataaattcacttcgaaagcggctgtgggaaaacaataatgttatagaagtgtgtaaaaatgaaggagaagtatacagaaccacttgtactttttttgatggagtaagcaagaaccaactgaatgtttttgaagaagaaatgcatgtatcacttcctgaagactacaagcagtttttgcagctaacaaatgggtgtaatttgttcattgatgctgacaaaaaaataacagggaatctttatagcttagaagatgtaagagaaacagcttataaaagtcagagtctctatatgacaattgggtctgttggagaagaagagattatcattgactctaaaaaatcagcgcactctgcatatataatagtaaaaaagcggaacgcatcgtttcaagatgcacatgtattacatatgaattttcagaaatggctggattgttttatagtgagtcaagggaattgtttttggcattggaatgagctttgtaataaagttcattcaacggataaaaagacaacggctcaataacgttatcttctccaatgtaaaagcagagcgtgctaatcgctctgctttttatgtagtcatcataagctagaacagcgtgttcattctaaaaggttatgtatatgcttataaagcacttgtctaatatctgaattgtggataagtataggtaatagtaagatgaatttaaataaaatgaaaagggagaatgggggtgagtctaacaaagcgaggtcctatcatttcatcactagtgataggcgcatttatagctattttaaatgaaacgcttatgaccatgttaaaaggattaaatgaaccgaatacggctttagcacaagtaaatgcgctgattttcagatagcagcgagtgtttctatataaataaacgagtacactagtgtgctcgtttatttatatagaaggaagacgttcccaaccgtatgcttcgtcttcaactttagtttctccaaactgacttgtgcgattcaagatttttttgccgcctgattttttataaaactgaacggctttcttatttttcttcatagcccaaataatcatagacgtatactgctgatcagcaaattcttttactgaatgagaaaatagaagatgaccaattccttggttttgtacttccttgcaaacgtatagcgcgtatatttcagcacgggacaaatgaggcttacctgctgaaaagccgacaatctctcctcgttcatcgatagcgagcaaaataaaatgagaaggctcggtaagaaaaaaggaccatttttctgcactttgtttataagacaagctttttaaataagcatcaggtactaaccctttgtatgtaatgcgccagctgtcaacgtacagacgggcaacagaagggatgtgagaggaagtagctttaataattttcattaaaaaatctccttttttaaaatattaaggcatatagtatacctttcagcctaagaatattataaaaaatagatcataattttccagtaattcataaaatggtaaaaaaggtggtgttcattcccactctatcacggtaaagtgagaatatacatttgttttgttgttttaatttttgctatatgtataatgtctaacgatctatttgttattcacctttactagtctatcaaatagttttgttaaagccaaaggggcatagggtaagtaatgtcaattcagctgcgttttattttaacgtatatcagtattgtgtttgtctttattattttgctttttttatcgggctttctcattttcttctccattactggagacgccgattttgtaagaaaactgtacagtcactcctatgagtataaattgttaacgccagaagaagaaaatgcattcttagatttaaagttattgagtgaaaaaaaaccagaacagctactgcggccggagacggttaaaaaatatgaatttgaaaatattgatattgtgattcaaaaaaacacagaggttgtatatgcttcagaatccattaaaggagaaaaccttcgtaaatacttgccaaagcatcaaaaaagtaaaggaaatcattcgtatcagcaggacatgctgcgcataggcaagcagtactttacatatatcaaccttgattttcctttctcgaatcaagaaaagggaagcatttacgttttgcgaaaaatcagcccttatgtaggtattattaatcgaattttcccttttttaatctttctactattaattttagtaattgtgattattgggtttttaaactatcttgtttcaagaagtattatcaaacccattcgtgaattaaaagaagcggctgaaaaaataaaacaaggtgatcttcactttgaaatctctgctaattcaaaggatgaaataggcgaattaacgcaagcatttgaagaaatgaggcaaaaattaaaatcttctgttgaactgcaaattcagtatgaagataaccgaaagcagctgctttcaagtatttcacacgatttacgaactccaattacttccattgtaggatatgtagaaggaattcaagacggagtagctaatacgccagataagctttctaaatatttgttaacgatttcaacgaaagcaaaagacatgaatgcgttaatcgatgagctgtttttattttcaaaattggatttgcacgaaattccatttgtgtttaaaaaacttaatatttctgcatttatggaaagttatgtgcaagagcttcagtttgaaatgagcgaacatgatattgatgttttattttctaatgattctctaacgacactgtatgcaaaggcagatgctgagcagctgcgaagagttttaataaatttaacaaccaacagcattaaatttatggataaagaaagaagaagaatcgatatcgttctttctgctaccgaaagcgaactcattattgaagtgaaagataacggcgcagggatttcaccagaagcattagcgcatatttttgaccggttttatcgagcagaacagtcccgcaacagcaatactggaggaagtggacttggactagctattgtaaaacaaatcgttgaacgccacgggggagacatctgggcactaagtaaacttggcgaaggaacaagtattttcttttctttgcaaaaaatgaatgaaaatggtgatacatatgaagaagatattgttagttgaagatgaagtaagtattgctgaattgcaaagagattatttagaaattaatgattttgaaatagacgttcaatatagtggtgataagggattagaaaaagcgttaaatgaacattttgatctggttattttggatattatgctccctaaagtgagcgggtttgaagtgtgcaagcaaattcgagctgcaaaagatattccaatcattttagtttcagctaaaaaagaagaaatcgataaaattagagggctcgggctaggtgcagatgactatattaccaagccattcagccctggggagctggtcgcaagagtcaaagcgcatttagcgagatatgaaagactctctgataagcaggaaaagcgtatgattcgtattcatggcttagcgatcgacacgctcgctagaagagtatttgtgaatgacaaagaagtgttttttacagcgaaggaattcgatttgctgaagtttatcgtttctcatccaaatcaagtattaagtaaagaacatctatttgaaaaaatttggggatttgattcttcaggagacatttcaaccgtaacagttcacattcgaaaactaagagaaaagttagaagaaaacccagcagatcctcagtacctagaaacggtttggggagcagggtaccggtttaatatttaaaaaaagagatccgaacgattaatcgttcggatctctttttttattacgtagtaacgattctatgacgagccttaatcttactcacgggaggttcggaagaaaatatatttttttcaccgattttatcatatagaccggttgactttaacatttctttcggctggtgctgtaacccggaaataacgacttggctatgcgaatctttcaaacgttcgaccaccttcgatagtaaagcttctccagatgtatcaataaaggatacttggctcattcgaagcaataaaactttcggtttcgcttcagcgatgttatcaaaggaatcttctaatacttcagccgatccaaagaaaagagatccttgcatggtatattccatcaactcagatttgtgagcgttttcagatgtttccgctaaaacctttgaaatcttcagtgatccgctcattcgtttcacgaacatgacaatagctaaaagtagacccacgcctacacctgttgttaaatcgattgaaactgttaataaaaacgtagctacaagtacaaatgaatcagctgacttggtttttaaaatatgcgcaaattctttacgctcactcatattccaagccacaaacattagaataggtgccatacttgccagcggaatgtttgatgcataaggagccagcatcacaaggaccaataaaacaactagcccgtgtatgactcctgataacggagaagctgcgccgtttttgatattggtagctgttctggcaatggcaccagttgctggaattccgccaaatagcgaggtagcgatattagcaattccttggcccacaagctctttattgctattatgcttggttttggccatattatcagcaacaacagccgatagtaacgattcaatacctccaagcatcgcaattacgcaggcagccggaaatagcatcacgatgttatcccatgttaaatctgggaagctgaaagatggtagtttgctcggaatggcaccgtaagtagagccaatcgttgcaacttttcctgggaacagtgtaatggctacaagtgtggagacaagaagacctagaagggcaccgggaattttaggtaaaaactttggcgtggtaatcacgatagctaaacaaatagcggctatgatgacgctgtaaatgttaatcgttgcaatttttcgtaggatttcaatcatatttaaatgaaattcctcatgttttgcaattccttttaatcctaaaaaattagcgatctgacctgagaaaataataatcgcaattcctgctgtaaatccaatcgtcacagggcgcggaataaactttataaatttccctagcttaaatattccgagaagcgtaatcataattccagccataaagccggcaataatgaggttctcataaccatattgcatgacaactccaagcagcaccggaacaaatgcacctgttggacctgcaatttgaaatttcgatccgcctaatattgaaaccataatccctgcgataatggttgtataaatcccgtattcaggtcttacaccagaagcgatggcaaaggccattgctaaaggaatagcaacgaccccaacaaccaaaccggcgataatgtctttttgtaaatgccctgctgaatagccttgaaatcggttatcttttagcattcgataaaatcctccttcatgagcttacggtttcagctcgatcttgggaatagccgtttacaacgacatcaagttttcccgttgagggatgaataaccattccagaaacaagcacgtcttttggtaataaagggtgatttcgaatcatatccacactgttttcgacactatcttctacacattcaaacccagttagccatgattctaaatcaataccagcatattttagattacgaatctgctccgtgctgatccctctttgttcagcagaggctaaaatagcttcagctttcatgcctgtcattccacattcatgatgaccgatgacacatacctcatcagcttgcaaagcgtagacggcaactaatatacttctcatgacgctgccaaagggatgggagataacagctccggcatttttaactatttttgcatctccattctttagccccatggctttaggaagtaattctaacaaacgtgtatccatacaagttaagattactatttttttgttaggaaatttggatgtttgaaaagcctcaaattgattatttgttacaaatttttcattaaactttaaaacttcagatagacaagtcattgttttcctcctgcattatttatttttaacttattttttagtctaaagataaagtttaaaaacgaactaaataaaatattaaaattttcttaaaatattcagaaaaaacttataaataagtcaaatttatatgcgtgaaattatgtaagcgtattctttctttgtttttgcgaaaaaaataggaattatatgttaaaatggtacaaagctggaattgtctaaaagaatggtagagaggaggaaggcaaaagtgaaggctcttatagcaataggcattattttctgttgtttagtagggtgcagttctaatgcccaagtcaccaacgacaaagaaatgggggagaatattcagcaatcatttgaaaaaaaaggtgtaagctcagtggatgtatcgaagttaagtgattttaaatgggaaaaaggatatttattaacaaacaaaagcaagaaagccgacgtagaaaaacttgtaaacgcaccgatcagtgaagaggtgatgaaaaaaatatctgctgctaatcaaatgcttgtgtttgtacacgaaggagaagttgtccgctatgtagagctaccccaagatttcatagcgcatgataaaaaccaacttgaattttcatcttctcattctgaactaaaacttaataaaaaaagggagggcaagcctataaaagcaggagataaaacgttaagttcagaagatgctttaactgtagaatcaattatgaaacaaattcaatggaaaaaagctgattacagcgtcgctcttgatccagatgtgcagcttacttatgaaggagtcgtatacaatatacgattcaccgccgagagtgcggaacttacttctaaaagaagagggatatacggcaaagtaacaggagaaacagcacagcagctatatgacatattgatgtaacctattgatttatcaataggtttttttgtgcacatatttttaaatttacataaaatgccttgattttattgacattaacgttaacgttaatctataatggtgatagatagttaacgttaacgttaatgttaaagggaggtgaaggggaaaacatgtatctaatcgatgacgtgacgaaaatgacaggtttgaccaagcgtgctcttcggtattatgaagagattggactcattttgcccccgcagcgcacaaaaggaaatgcacggatttattccgaagaagaggtaaaagaactaagaaaagtagcagaagcaaaggaagttctgggtttttctttacaggagctgcagcagtttatgtcgctcaaaagaatgattgaagaaagaagtgagcagcaaggattatcagcgaaagagataactaaaatagaaaatttactggcaaatcaaatcaagatgattgaatttaaagtggttaaaatgcaggcatttaaaacagaattaaaagaaatgcgagaatctgctatggaaatacatgaaaaaacaaaaacaaaaggagagatgaaagagtggaaggacagcattcaaataaccgattaggtcaaattattacggtagtagctacttttttagcatttatgggaattggggtagtagatccgattttaccggagattgctaagcaaattggagcttctcattggcaagtagaaatgttatttacttcctatttgttaatgatggctattatgatgattccagcaggcatcttagcatcacgtgtaggagacaagcgtttgatggtaacaggacttatcattgtgacgatttttgcagccctatgcgggttttctaacaatattcctcagctttccatcttccgagcaggatggggacttggtaattcgtttttctttgcaacagctatgacgctgcttattgcattatcaggtgaagtaaaaaaagcagtaggattatatgaagctgcaattggtttgggaatggccggaggaccgcttgtaggaggcgtgttaggaaatgcttcttggagattgccgtttttcggtacaagtgctttaatttttatcgcctttattttagtattaacgattgttaaacagcctacaagcactaagcctcgtaaagcagcgggttttaaagacatggttaaactttataaattaaaaccatttactcaaggcgctgtatcaggcatgctttattactacggattttttacagtgttagcttatacgccgcttattctatcgatcggagctcttcaaattggctttgttttctttggatggggattatgtttagcttatggctcagcggttttagcacatcagttagaaaaaagatatcagccaaaacaagtgttacatgttagcttaattgttttttcacttattttaatttgtttatttgcctttgatgcaacatggttgcgcattgttttaatcatggcagcgggtcttgtatcaggacttaataatgcattatttacgagtcatgtaatggaagtatctccttatgaacgaggaattacatctggaggatataatttcttaagatggttaggtgcagcttttgctcctttattatcaggagttatcggcaatgccgtagcgcctcaagctccttttctcgtagcagctattcttggattgctagcttttgttatcatggttataaaagtaaaaacaacttctcaaacgaatgaagctgtatctaaataaacgttgaaataaaaggctttttcctagaaaaagccttttattttgttttatgttataatagtaaaaacgtttttaatcataaaaatgaaactgtataccaacttgtacgtatactttatatgtacataaatctttttaggagcgtgatgcccatggccacctgtcaaaattgtaatcataaatggaactggaggacaacctttaaacaactgttaacatttagaaacgttttagaatgcccacactgtgacaaacaacagtatatctctgcaaaatcccaaaagcgattatcaatctactcatttgcaccccttattatttggcttattctctcactatttgacttttcctttccatccattgttgttgcggagcttattttcttcatagcagcggttattatgatgccactttcttatgaagtaagcagcgaagaagaacccttgtggtaataaaaaaaccttccgttaaaacggaaggtttttttatgcggctttaccgtctagctgttgtccgtgatggcgctgataatacacccacccagcattcaatagtagaagaacactggttgttaagaatacgtaaggaattcctttagccccggcaatttgtccgccaatgactggaccggctaaattcccaaagtattgcgctgtttgattatagccaaacattttacctgtaatagagtccggcacaattttcttcaaataagaattaatagaaggtaataatcctcccattgcaaaacctagtaaaaaacgaagtaagaatagctgccaagtactatgcacaaaggcctgcaaaccgcaaataaccgctacgataagcaagcatatttgaagcacattttgaggacccacgcgatcgctgactttgccaagttttgatgcagctaaaatatttgaaattcctgttgccgccacgacaaagcctgaaataagggcaaggtgatcggtatgagtagacagttgttttacatacagtgtaacgattggctgaatagccataaccgcaagctgcagtaaaaaagttgtaacaaatacaccaatcacggcctttgaatttttaagagacagtaacccaatattagattctttcgtcgttttcgccgtctcttttttgtcttcttgaattaaatttacaattaaaaaagacaaaaacataaatgcacccgtcacgaaaaagacgtggcgtagcccgattgtatctcctaagtagccgcctactagcggtcctaataaagatcctgatacagcccctgtagacaacgtacctaatgctttaccgctgtgctctttaggtgtttgagtcgctactaacgtaatggctgcagagatgaagccggaaacggcacccattaaaaagcgcagtccgacaagctgatagacattttgcacaaaaccaatagaagtcataacaattgccatgcccaagcttgcgcgaaggagcataagctttcgcccatatttatcggccaaactcccccataaaggagaaacaatagccgccattaaaaaggtagatccaaatgcaataccagcccatctgctgatggagcttgtatcgtgaactcccagcttttcaatataaagcggtaaaaacggaataactaaactcatcccggctgtggtgcaaaaagaaccgaaccagcaaatgtacaagtttcgtttccataattccattctatttccttctttcgttgtgccgcatggcgtgaaaacaacaaaagagcgaaaccatacggcctgctcttttagcatacatgcagcatcttttttatcagtttaaattataccatatgtcagaaatatttaaaattaaaatgattcatctggtgaactattaacgtacagaaaaaatagaaagatgaacggtttttacgttcggcttaaaacataaggagaccctcggttcactcattaccttatgctgcaatagtaaggattatgtaagaaactcacgctgccccgaaaaacgtgtcagataaggtgtccaaaatatatgttgtctccgcaaatattggctatttattaaataatttgtaaagtaatctaaaaaagtgaattttctgttttttaactctatattaaaactatgttctcattattcataatgtggagagtgttttaaggaggagtgtatattggagcagatgattagtagaataagtaaaatgatttggagtacaccgatgctttatctgtgtataggagtggggcttttatttactattctcactagatttgtacaagttcgatacttgaaaaatatggttactttattgtttaatggacaaagttcagaatcgggcgtttcgtcttttcaagcgttaacacttgctttatcagggcgcgtaggagttggaaatattgcgggagttgcaacagcaattgcattcggtggtccaggagcagttttttggatgtggtttattgctttataggttcagctagtgcatttattgaatcaacacttgctcaaatttataaagtgaaagataaaggagaataccgaggtgggtctgcttattatattgaaaaaggcatggggaagaagtggtatgcactgattttcgcttttgccgcattgctagaggagtgcaagcaaattcaattacggcagggctactaaataatgcattttcaattccgcctttaacgtccggaattgtacttgttgttattttaggattaattatttttggaggcgttaagcgtattgctgccgtggcacaatatgttgttccgtttatggccattggatatgttcttgtttcgttagtgatgatcggattgaacattcaagctttaccaggagtccttgctttaatctttaaaagtgcgtttgcacttgattctaccttcggcggaattattggcatggctatagcgtggggagtcaagcgaggtgtatattgaaatgaagcgggtcaaggtaccggagctcaccccgcgggagcagcggaagtctcacatcctgccaagcaaggtctggtacaagctttttcagtttatattgatacgctgcttgtatgctctgctacagcctttatgattttaattacaggttcttacagcacccaagcgccagatggttcgttcattgtggatcatttaaaaggagttgaagccgggcctcaatatacgcagcaagcagttgagacggtgcttcctggattcggatcagggtttgtagctgtttctctcgtgtttttcgcctttactacgattatgtcacagtattatattgcggaaacgaacttagcttacgtaatgaaaggcaaacaaaataaaatagtatccatgttccttaaggcagctcttttagccactactttatacggagctatccgaacggctgaaactgcatgggcattagcagacatcggagttggaataatggtttggcacaatttaagtgcaattttgattttagctaaacctgctttaataactttaaaagattatcgccagcagagaaaactagggatagaccctatcttttctccaaggaaattaggaattcaaaacgctgattattgggacgaggaatatcaacatgatcaagataaggaaaatgtttcataaatcaaaaaagccagctggggttatctcgttggcttttttgatttatgaagaagctcttttgaccgcttgaagatggtaatgattcgttcttttcgggtataatgtggcgtgaagcgtcctcaatttattttcgtttgagcatttatttataatagaagacatataaaaggacggtggtatgtaaatgactaaaaacgaaaatgaatccatttatattcagcagcatttagcaaatgaacgaacgtatttagcgtggattctaacgtctattgccacactcggcattggctttgttgcaggcggcctacatttcaattccggaaaaaaattaagtgaagcagccgatactattattattgctgttattatcttttctttagctgcaagtgcaggtttgcttctcttctcaacctatcattatttttcaacccgcaaaaaaattaacagccaaacgtatcaatcttcttacgctttggttatttttgttttaatgattatgctgatgctgatcggcgctcttatgttttacttttttaacatagcgtaaaaaagtttaagatataagaaaaaaaggaaagcagtcccagagaatttacggttttatgaaagaaaaagaagatctattgatatggtagtaatggcagatgtaattataataatatcttctttatgaaccggctgtataattttacaggttaaattctttgttaatcgcggataatggaaaaggaaagctttataagctgaaacttatccaatacatgttgaacataaaaattgaatatgaatttcactgcagggtgaagcgaaagtaaaggagaacgctgttatgattcaaacatctaagaccgttgccgctcggttttttacggagcgtttctttgatcaggctgctcaaacagcctactattttttgttatcttttgtaccgtttattatctttcttttttctctgctgagtttctttccaattgatacaaacaatttgctgatatttattgaaccatttacgcctaaaagcgcctatgacgtaattgaaaggtcaattgaaacagttaacaatagcgggaaaaaagttttatcttttagtttattggcgactttttggctcgcatctatggctatacaatctttggttcgctcgttaaatgatgcgtatcatattcaaagaaaacaaacgtttttacgcggtttaatcaatgatttaattttaacttttggttttatggttgtggtagctatttcattatttgtaccaattactgaagaggtcattcgacatttggtactaacaaaagtccatgttcctgacatatggtttcaaagctggacgacaattagatggggaattgggacattatttttattaggcttttttattcttttttacaaactgatgccaagcgcaagagtaacgtggaaagatgtatttccaggagctgttttctccacgctaggatggcaagttgtatctaccggatttggatactatgtccagtttggaagctactcgcaaatctatggtcagcttggaagtattattattttaatggtctggttttatttaacggccgctattttattaattggcggtttaataaacggtaataagttcatcaaagctcacaacacaacgtatagagacgcggaaaatgactagggaaacctagtcgttttttttatattcagttttacagttagaaagtctgaatttgaagcgaaaacagatcaagacaaagagcaggagtcaaagcgtgatcttgaataaaatataaaaggtaaagacttccattcatcatatattctttgtatgatgaatgagaagtgtttttttatgggagggagaattctgtgattttggttagttcctgcttagcaggtcaagggtgcagatataatggaagcagtgccttagttaaggaaattgaagcgctggttgaaaataaagaagcggtgatgatgtgtccggaactgttaggtggatttcacacgcctagagaaccggcagaaattataaaaggaacgggaatagacgtaataaacggaaatgcgcgagttattgaacgatcgggaaaagacgtgacagatatatacatagacggggcctataaggcactgagcatcgcaaaagaaataaaagctactgttattgtactaaaagaaaacagcccttcatgcggaagtgaacatatatataacggagcattttcaaatgttaaaatagccggtgaaggggtaacgactgcgttgctaagaaagcatggttttatcgttatgtccgaagctcaatttgcagctgaaatgcatggagaccaatcataatcaaaaaaagcgtacaccatgtgtgtacgctttttttataaaattttatttactgtgaagcgtatccgctgtgctttctgttcgtgttaccgcataaagagagcagaaaagaccaagcaaaacaaaaatagacccgatccagccgttataaataacagagtattgattaacgacaattcctccaacataggagccgatcgcaattcctacgtgtgaaatcgctgcattagtgctgattaaaatgcccgacgtttcgcgtgcactatgaataattaaattgctttgagctggtgagaccgcccagctgagcgcactccaaatgatcataagaagcaagaacacaacaaatggtaaatgaacgccaaaaggcatagcaatcatgctaacaaaaaagagagcaatcatggtgataacagacgaagaagggttccatctatcagaaacagctcctccaagtcctcctcctgccacggcagcaagaccgaaaataccataaataatggtcaccatcgttgtatttaatcctagtgtctcttgtaaaaatggtgtgaagtacgcataaagcgttaaatgacccgcaagtacaaacaatgttgctaggtgaatagcgagcatttttttattgcgtaaagcttttacctgagtttttaacggtacaattggagcaggatctagacgctccattgtaaaccaaacggtaatcataataatggcagtcaaaattgcaatcataacaaatacttgacgccagccaagcgcatttccaatcaaaataccaagaggaatacctaaaacaagtgagccgctgattcccataaatacgatgccaattgctctgccttggtattcaggttttaccattctagaagccattgtggtagataatacaatgataaaagaaccgctcgcagcagcaagaatacgtccaattagtagcatataataacctgaactgtaggctgaaaatacattgctcaataagaaaataaataatgtccacatatatacttttttacgctctatcttagccgtcacatttagtaaaatcggcgcagacaaggcataaacaaacgaataaatagagattaaataacctgcttttgctaatgatacatgaaatgcatcggcaattaagtctaagatgcctcctagaattaattcgaccgttccaacaacaaaggaagcaatcgcaagtatgtaaacttttttattcatcaaaaaaccccctctttgaaaaagttacaactagaatagtaaccttttttagaagggatttcaataggtaatattaaaaaggttactaatgaattagtaacctttttaatatcgcagtcgagtaagcagctccatgatctcagaatcttgaagaagctgctcttgatatttctttgtaatatgggtaagtgcgacgtcatgataaaagaaatcagcaaaaacttttacaagcggctgcgacatggtttttattgctttccatgtctcatgttcaatgccggcaaataaaaggtaagcgtcgtcaacaataatcaactgcgacggctcaaggtttttatgatcatctattggatttaatgtatgtaaatgtttgagggcagtctgcaagtttcctatggttaagacctcgacgtttacgccttgtttctctttttcttctagcaatgagcggtaatgtgctaactcatcattccaagcggataaaataatagaagattccgcttcatgaatcaattgttcaatgtgagcagaaatagaggatttatcttttaaactccaaacatgatcatctgtaaacgtttttttaattttatatgtttttaattcattaatatcattttcaaaatcagcagtaagtttttgaatgacggtttgaagggctaccgctgagtaaagtttctttttcccggacaatgtatttactacaatacctttatcaattaaacgattaagcacttcataaatttttgcttttggaacatgcgaatacgtaacaatcgaactagcatccagcgggccatcattcgcaagcagcgcttcatatacttgactttcatactgagaaaaaccaaatttttgcagcataattttctattcatcatcctttctttttttaagtatatcacggttcgtaaaagtattactaattgtatcagatataataatcttattaaactatgttctaaataatcattaaaaataagataagctattaaaggatctttattacaggaaaaatatttttaaccatgtactttctatactaaaacactcaacattgggtaaagaaaagaaagaggtgaaaaaaatgaagaaaaatgaaaaactactgttgaaaaaagagaacatgagctgaaattcaagcataagatgctgtgcgaagaatggacagcactataaaagacaggcattttgtctgtcttttattgcatctaaattttcatcactcgaatagggctaaccatcaaaatagctaaaataatcataaggtaagggtttacgtaataaaacatgccaagcagtgcgataattagagctggaaaaggaataggaagtcctataaaacaacctatggttggatttgcactaaatttagctaatcttaatgcgcccatgcttggataaatcataaaagcgagtacggttagccaagagtggggagaaagagtatgaaatagcattgcaggcgctacgccaaagcttataatatcagccaaagaatctagctctacaccaaactcactgttaactttcagctttctcgcaattttgccgtcaaataaatcgaaaaaagcggctagaaaaataaaaagagcagctaagcgttcgtagctattcatattaaaagctatggaaaatacaccgcttagcaaatttccaatcgtaaagagatttggaacccattttaacagtcgaagaatcaatgtcatacaaccgcctttcacagtgtgtacgattagtgtaactgttaaatcatattattatgtgagatgtcagataaaaagaaggtagtattgaaacctggctgtcgttcctgtaatatatatatatcgtataatacgataataactaaaaatacgatataaaggagcaggatcatgaaagtagaggagttaaacagttattggacgtctatttattatcatttgcactatacgcatcaagagaaaattacacaccaaacaatacgtcttttacagcatatagataaatcatcttcggttggaataaaagaaattgcggattatttacacgtttcacataatacggcatctgaacacgtaaagagaaatattgataaagggtatatatataaaaatagagatatacatgatgaaagaaaagtaattctgcatttaacagaagcaggaaaagacctattaaaacggaattcaagcttggatgaagaaaaagtatcagctattttacgcgaaatgacaacatctgaaaaacagctgattcaacaggcttttcagttattgagtgagcgtgcaaaacatgtatagtatcatcaaaattttaatgtcggctcttattattgcaggggtaacagaaatggccaaaagatttccgacatacggtggaattgtggctgcccttccaattgtgagcttactcagtattatatggttatcagtgcaaggagaaaaaaaggaagtggtcagtcagtttacactaggcgttctttatggactgccaggcactattttactacttgctgtcgtctatatttgtttaaaaaactcccttcatttgtttatgagtttatccataggagtagtgtgttggggtctgtttttggggcttcaaaagattttgtttaaaataattactacataaactgttggaatttaattcaattttctgtaaaataaaagtctaagtaaaagataggagctgagtagagttgagtttagcagagaaaaagttaggaattgaccgaattgtttttatcggtagaacgtttgaagagtatagagctatgtttactttgaatgaaaagtatttaaaaggaaaaaaagtgttagattgtgctagcggggcctgttcttttactgctcatgccttgcagcaaggtacggaggctactagctgtgatattgcctataaatttacggcagaagagcttgaaaagaaaggaagcctggatttaattcatacgatgaatcaaatgcagcacgtacaggaacagtatgtgtggaagtattttttgtctattgatgatttaactgaacatcgaaaaagagcattaaaagattgtattgctcatatgaaaaagaaccccgaagcctatcagtacggagcacttcctaatttgccgtttcaaaagaacgagtttgatttaactctttgtgcaaactttttatttatgtacagcgaccggttagattatgcgtttcatttagaggctttaaaagaactgatacgcgttacaaaagaggaagtacgtttgtttcctttaacgaatttgagcggcaagatttctacctatttgccgcagctattagaagagattgcgcctctagtaaaaggaacagaaatagcagacgtcccgtatgaatttcaaaaaggtgccaatcaaatgctgaaaatatatgtataacaaatataacgaaagccgcttttagttaaagcggctttttaacattcaaacgttttttggcagtttgagtatgcttcgttatgggttcagatccaagcgctttagctaaaccgaacgaaggcatattcacatatactgattcataatttcctgcaggaatgacgtacgtttcatgataaatgccaaccgcgttcgtttttgaagcctgtttataaaaagaattccaagcttttaagtgctgaggacctttggcataggaggtcaattgatcaactgactcccaatattgaatcagcgtgatggttcttaaattaaaagttccttgcaaagataaaaagccaaggtttttgtttgcatacaattcgcgaatcataggaggcattgctttaaatacagggaaccatttgtgtacggctgtccatttattaatacgcattcctataacaaacacgaccaaatcctgaccgggcttagccatcatacgattggaatgaatcataaattatgcgcctcctcatcatataatttattaatcgtatctttgcaccattctatcgaagcacacgttgttcgtttaccgtagtctagggtaataagccaatacgttcgttcgggagaagggctgttagaaatgctgtcttcgattccgcaatacatgtgataacgttcagttagtttctgctgagcgttttttaactgggaaattgtgagctgcttttcttgctgactactaaaaaagagttttaacaaaagttcatttctttctgaagggagctgcttaataggttcacgcagccaatcttgcagaacttcttttcctttagttgttattacatactcttttttatctggtttatcagtttgagcaacggaattgaccgttgctagttcatcattcacaagcttttgtaaagtgggataaatttggccataactgattttccaaaaatgatttagacttcgatccattaactgtttaatttcataaccagttctgcattcagtggtaagcagtcctaaaattgcatattttgtttgattttccttcattttttcctcacttatatctttttgatatatatatatattaccataaacaggatgctcttcaataaaaaaacgcgagagttatgcactctcgcgtctaaaaaaaggtttgtattgctgaaccatcatttgcgaagcagcaataaataaaaagataaagcctccacacattagcaacatgacagcacctattctccataaaagctttggcatcagcatatctccttttttgaagttattacctatagtgtaaagaatagcttgcaaaaattctagttataactagatataattttatgacttttttagactgactcttcctttggatcatcttcatcaaaaataggaacttccgtatatgtttcttctttttcgaaagcggaagaagaattttctttttcctcttgtgcaggcttcgttttgccagaagaaatatctgatttagcgttttttaactcttccatgtctttttggatttggtccgtgaaatcttttggtatagctccgcttccgtatgtagctccgatgtttaaagtaccgccgagttctttaatgccaacttggccaatattattgttttgttcgtatttatcaagaaaaaatttatcaatatgaataggcgggggagcattttctaagagtgcggctctttggtgaattgcttttacttcttcttgaagggcagacgttcgttttagcatgtccacctgtacttcagttaaaagcgacatgctgcgttctaatgctgaaactctttcatctagttcggtcattttttcgagataaggagccatttttttctctacagattgttctaccaagctagttaaatccggataaggcatagcttctttctttttatcacgagggttttgtatagagataatttgttccaactgcgctactttttcttttaaaaaatgaagctgcctagcagtctcttgcatgtcttttgtatatgattgttctgtctctttgtgagcttttctttgtgaagatgaagagtcgttggaaagcgtgggctgagcctccagcttttttttgagcattatgagagaaccaatttgcggttcgagttttaaaaaacggttcatgtgaacttcaagcgtgttaatgcgtttaatttgatgtttgaagtccgctagctcagtttgaagctgttggttagtctgtttggggttgaaaaatcctttcatagacatttcgcttctcctcatcttgggcttatttcctctttaatcacagttagataaatatatagtgtgccagtttagaagtgaacgttaaatttttcgcgtttataaatgcttatgtgcagcattaaatttcattcataaaactactaagccttattcaatgtgaatacgttcttcttggaaaaactgcctgtgataagaaagaataagcagtccattttcaaatttcgcacgcagatgatgcgcatccgtaggctctggcaattcaacaattcggttaaagtctccagaaggtcgttcttgtacaaccggctgtcctgtgatgagagggtgcggtgaaccttttaatagaagccggctgcctgaaacagaaacgtgcaaattttcttttagatagccgggcaagtcagcgataataacgatttcatgtggggtaacgtaaatgtcaacaggtggaaaattacttttagaagcctgaggcgcctgatatgaatcaggagcattcatatccatattttctttcataaattcgttaaaagcagtttgatcaaaaacaccgttccaaaagtcatttgtttgatattttttagcaaattccatccactgcataagtttatcaaagtccatatggtttcctccttaccacacatcataaaaagatggaatttgaatatagtttgaaaagggggtggtttaaatggcaggtgcatctataaatattaatattttaatgctaaagataaattcctttgaaaatgcgtctgcagtaaatatcggacagaatttactagcagactggaataattcagataaaaaaacacagggatttgggcaaaattttggtgatgatagcggttttataggaacaagaagctgtgtcgatgatcgagatcaaattgacagcccatcatcttttcaaaaagtgcctatttcatagaaaaagcctaataaatatagccagttcagatgcaggttatatttattaggcttccgattgaatgctaatagacgaatagatgagcagaggtagaggagatgaaaaaaattaaattacgctatttttaactgagtttgaatcatttacatctgagtctataatccatgagaacggagttacgttcggagaaaaatctccgtttgattctcccagaccttgattacgtttataagatacgaacacatcaagctgctgattaggtcctatgcttaaaacggatgaattatccaaaacgttcactttgaaggcttgtaagttaatgaccataggcgaaaaaatcatatggtttcctccttatttatcattttttgttgcaaatgcatccacataatcattatctacagttttttgagcagatcctgctgtaaaacattgatcagcgtgctgctgtccgaaggcctgatttttctttgccgtgacatatcttgtaacttttaacgtatttccaatagaaatactgcttgcttgatcagcactgcgaacgttcaattttcctaggttgatttttgttgagtcgaatagcatattattctcctttcaaacgacagttcttctaagtctttaaaagcttattgtagcttctttgaaaatatgaataatacatggattcattcagagagtagaagtggtctactgtagcgtattgtagttctgtgtaaaacgtgaaaagattttaaaacctcgacaggaaaaggaggaaataataaaaatgcacgatattttacatgctgtaaacacatcaacagtaaaaagtgtgttggcaacgattgttcatgtagaaggatcctcatatttaaaagaaggaacgtccatgctgtttcaagaaaatggggagaacatcgggatgttaagcgctggttgtgtagaagcagatcttgctgagcgcgtaaaagagttgttcgacactgagcacgtattaaccgttacgtacaatttaaaagaagaaggtgatgcaggatggggacaaggagcaggctgcaatggaattctctatattctcctagaacctgtaactgcgaggatgaagcaaaatcttttgcgggtaaaacgtcatttagataaccgaaatcctgttttgcatattaaaaaattagaaaaaaactttattcaaacaacctctttttatgtagaaaagacgggcgaaacatttggtgtaaatagcgacgaatcatcttttgcaacagatgattggaatgggagaaagagcggtattcaactttcaaattgctccctgctcacatatgctcatctatataagccaaagcctcgtctagttatctggggagcaggtgccgatgcaaaatatttagtatcacttgctgccaatacggggttttctgttactttatgcgactggagaccggctttatgtaataaggaacattttccgctagcagaggaaatacatattggatttccagaggaagtagacaaacaattgtccatacaaagagatgattttgttgtgatcatgacgcataatttttatcacgatcaagaaattctctcgctattacaatcaaaccctgtgaagtatataggagttttaggatctaaaaagcgaacacttcgattattgaatactgatatttcttcacgcattcattccccggtaggactttctataggagcggtaggaccgcaggaaattgcagttagtattcttgctgaattaattcaaaacctccgaatgcatgatgaaaaaaaggggtaaaaatgtccgggttaaatattgttgctgtttatctcgccgccggagctagtaaaaggatgggaagcaataagctgctgctgcctttagggaatggatgtttaggtagtaaagctttacaaaccgccgtttcttcaaaagtaaatcatacgatagtagtaacaaagaaaggagattatcttgagtggattgatcctattcttttttcagaagcatatcagcagaagtggagtcatacttcttgtagtagcactttaaaaggtcagtctgcgtctttaaaatgcggattaaaaaaagcaaaagaattaaacgctgatgctattattgtgctgttggcagatcagccttttataagtatcacactgattgatacatttgtttctttgtttgagaatcactcttccgttccgtttatttcctctttttatcaaggaattgcaagagcaccggttttattttcaaaacaaatgtactcaagattggataagctgcaaggagatcaaggggcaagaaaaataataagacaaaacgaaaatgaaaatggaatgttttatgaatgtaacgatgcttccctttttatggatgttgatacaaaacaagcgtatgaacgcattaaaaagatatacaaagagaaacgtcgactgttttgattgatggaggtgaaaagaatggatgttattggaaaaagcgttattcgaaaagatgcattagaaaaagtaacgggtacggctcgatacacaaatgattacatgtttaaaggctccctgcatgccaaaatagtagtcagcccttacgcacatgcaagaattcaagcaatagacgttcaagcggcgattgctattcccggtgttcacgcggttgtgacgggtgagcatttgccgttaaccggggaaggagttcgtgaccggcgaccgcttgcatttgaaaaagtgcggtatcacggagaagccgtagtcctagtagtagcagaaactcctgcactcgctgagcgtgcggcgagctccgttcatattcaatatgagccgttacctgtggtccattctcctagcgaagcaattaagtctgagtctcctttggtgcatgaaaatatgcacgtctacaagcatgatgaaacggtgtatccagagcccggcaccaacgtagcaaacagagttaaaatacgaaaaggcaatatagaagaaggttggcaaaaaagtgagttaatagttgaagaaacattttctctgtctccttcggatcatgcggcgatggaaacgagaagcgccgctgctgaaatccttccaaatggattagttaaaattatcacgtcttctcaagctccttttatggtgaaaaaattaatcagtgagtactttgaaattgaagcgggaaaagtgatcgttgaaacaccgctagtaggaggaggatacggaggaaaagcagctgtccagctggagctgcttgcttatctagcttcaaaagctgtgggtggaaggctggttaaaatattgaacacaagagaagaagatatgctcacttcgcctgctcacgtaggtctagatgctaaaatcaagctaggttgttctaaagagggactcttgcaggctgctgacattctttatttgtttgacagcggtgcttacgcagataaaggaacggacttgagtaaagcagcagcagctgactgtacgggaccttatcgtcttgaacatattttttgtgattcattatgcgtatatacaaatcacccttacgcttccccttttcgaggatttagccactcggaactattatttgcgttcgagcgcacgatggacatccttgctaaaaaagcaggtatagatcctttggagtttagagaaaaaaacgctattctgccgggcgataccacgcctacgcaagtacgtttaacttctagcagcgttggtaacttaccggaatgtattcgccgcttgaagcagctaatgaaatgggaagaaggacagagaacggttcatgaaaacggccttattactgccaaagggattagctgcgtctggaaaacctccactattgaaacaaacgcaggttcaggtgttattctcacattcaatcctgatggaagcgtaaatttgatgtctggcgttattgaattaggcacggggacaaaaacagtgctcgcgcaaatactggctgaaaaattgcagatgcgagtggaacgtattcatgtgcgaatggaagtagatactcaaacgactcctgaacattggaaaacggtggctagcagaggcacttttatggcaggaagagcggttttagaagcggctgaagatgtgattaaccaattaaaaaagatagcttcctgtatatttcgagcttctgaggaagatatcgaaataaaaaatgaaaaagtgtttttacgggatgagcctgaaacctccttggactttaaagaaattgtgtatggctataaatacccgaacggaaatgcaattggaggacaaatcatagggaggggcaattatattttaagagggatgacctacttggataaagaaacgggagctgggcgtcccggtcctgaatggacagtagcagctgaaggagtcgaagtggaatataaccctagaacatatcgatatcgtattataaaagctgtctctgttattgacataggaaccgtgttaaacgagaaaatggcaagagggcaagtcatgggtgcgatgagtatgggactatcgtttgcaggcagagaaacattttggtttgattcaaatggccgtattttaaaccctcagcttcggaaatatcgtcctcttcgctacggggagcatccggagtacgtagtagattttgttcatacgcctcaattggatgctgcgtacggcgctagaggagttggagaacacgggctgcttggtatgccggcttctttaggaaacagtttaaccgcggcagcagaaacagaattaaatcaacttcctcttattccagaattaatttggagaatgaaagaagggcatacagatgatttcatttgactttgaatattataaacctgcaaccgtttctgaagcgattgccttgtttcaagagttagagaatcaaggcaagcagccgcgttattatgctggaggcaccgaaattctgacattgggcagactgaatttatttgttactcatgctgtcattgatataaaaaagataccggaatttcaaaaagcggaagctaatgaacactggatgatttttggtgcaggggtaacgttaactgaactggaagagaaaaatttgtttcctttattaagcaagtctgcaagcgaagtggctgatcacacggctcgaaataaaataacgctaggagggaatatttgtgggcatatcttttatcgagaggccgtattgccgctgcttttagcggatagtcaactcgcagtggcaggtcctggtggaataaacctctattcaattcacgatctttttcaccggcgtttgcagctggaaaaaggagaggtgcttgttcagatgtttgttgaaaccaagtatgctgacctgccgtatatgagtataaaagagcgacagcagtgggatacaggatatccgctagtgacaatagcagctttaaaaacagaagaaaacattcgggtagctttcagcggagtatgttcgtttccttttcgctcggctgaaatagaagaagtgctaaaccgtaaagaaactccattagaagctcgaattcaaactgctcttgagtatatacctgctccaattttaaatgacggagaaggatcggatcaatatcgcaaatttgtgattaaaaatttattgtttgatattttcaaagagctgggaggaacgtaatgtgctaagagatgaacggtatagaataacaattaagctaaaggttaatgggaaagaaaaaatgattgatatccgaacagcagatacgctgctttacgtattaagagaaaagttgggccttaccggagcgaaaccaggctgtttaaatggagactgcggggcttgtacagtagggataaatcagcggccaatgaaatcttgcctcatgttagcggcagaagcagaagagaaagaaatagtgactatagaaggactgaagagttcacctatgcaaaaagcttttattgaacactttgcttttcagtgcggttattgtacatcgggttttattatgaatgctcatttgctttccaaacgccatccttcaggcagtgacgatattataaaggagtggttagcttccaatatatgcagatgtacaggatataaagaaattgaagacgcagtaaaatctgttttacacttttcggagcgcgagtgagaaaagaaaaagcagaattagaataacacttacacgtgtttagaatagtatgtgctaagggtgtggagaatgtggaatggaaaagcggctttgacaaagaaagggaacttatctttgccattcaacgagatctggatgtagtaacagccatattattattaactggccaaataacaattataggagtatttgtgacacccggcgcttttcgtatttcagtaggcggacctattacaggaaccagtcgcatagaaggaaaagacggaaatgcgggaattaatattattattgatatgattgatgtgtttcttgcggctttgctgcttaataaccagattaatgtgtcgggcgcctttatttcttctgggaggtttaccattaacgtaagcgggcctatttttggcgttcctaaaacagaacctgcattaagtgaactgaatcaatcctctcagttttttcatcgtacggtatcaaaacattttcatgtaaaccctgacttagttgaaaaatttacaaaggactgattaagatgtcattaacggatatacctacagtaagaccttcagagacgagtgtttttcttatcgcgctgccacttattatttttatttttttctttactcagccaaaagcagcagacgttaaaaatcatatagcataatggtgttttatcacttggcacagaagctgcttatttttctgttcgtatcattgcctcttcattcattaagcccctaacgcttttcttttgtgtcatgtttcattaaaatgaacataaacatatatgtagagaaaagaataatctagtgttttctaacgttataaaatagcttactatgcgaagaaagcgtctataataaaacaaatgaaacttttgcgtggtcaactgacgatgctttttatttttacaaactgcaataacggcagaaaggagagaattcgatgagtttgcgcgaacggctgctgtatgtagcggaacattataaacaagttggtggagacgtacttgtaaaacacgaaatcgaaaatatgcttacacgcaggcttccgatttctctttatcgattggagcatataaatcgagaagaaatgcgcatatcgggacaccacggtgaaacatttccttacgtgatccttgccaataagaatatagagagtgatgtggtggtagcgtatttattcagtgaagacggtcagcgcatttacttagtcatgatgaagggagattcagaagaaggaactgatctgaaagacattcgcttctttactcctgaacatgcccgcgtatttaaagataatcatattgtcattggtacaagcatggaagcgaaaagctttgaggatagagtagctctttaccttccttacaatatagcagacttacctagcaatgatcagcttcaagacgacttgcatttactgctgagtatgcatgaacagtatataaaaacatatggaatgagcaaagagatggttggagacaaagacgccattgtccatattcatgaatatattaagaaatctggatttacatatgaacgacaagatatagctaacgcctactttgctttaaagaccaagccttttattgttttatcaggaatgagcgggacaggaaaaacaaagcttgcccagctcttagcagatagtattggtgccacgattgaaaacggaaggcaagtgctcattccagttcgacccgattggcacgatagttcagatttattaggatatattgatttaagaggagattttcgcagaggatcgtttctgtcgattatgcagcaagccattcagcatccagcttacacatatgttgccatattggatgaaatgaacttagctcgagttgaacattactttagcgatatcttaagcgtgatggaaagcaggagctggtcaaaagagaaaattaaaaccgctccgttatttcctggacataagatgttccgagatatttatttgccatccaaccttctcattatcggtaccattaatatggatgaaacaactcatgggtttagccaaaagttattagatcgtaccaataccattgagttaaataagattcaactagattcttttgactttttaaatgatagagatccatcccggaacagcattcaaaatgtacaaattcaaagtcaatatgttcacttaaaagatgcgtatgttgaacatgctgagctcattcacgaagtaacaaatgaattgctaaccgtcaacgagatgcttatagaagtcgatttacaaataggttaccgcgtacgcgacgaaatatgcttttatttaatttacgcggtgaaaagcggaatgtttacatttgatcaggcgtttgattttcagattttgcaaaaagttttgcctcgtatttcaggaagcgatgggtacacatttgatttattaaaaaacctttattattactgtacaaatacgctgttagatgatgaatttgagacagctgtcgtaaatgcagatggaatgagatttcctaaaagcgcacgcaaaataatggagatgatgagacgttttgaagtatacggatacacgtcattttggattaataccgtacgttgaaattgaaactgacacgtgtacggtggttataaaagggaaaaataagaaaaaaataaaatctgcagaagaagtgatgtttttttcttgtacgggaaaaggaattacacatgtaaaagtattaaatcaaacaaaaggaatgatgacttcacaaccgccgcttgagcctttattttttgaaaatgaaacctatcaaattacagttgtttctaaaaatgaaacaagcctgtttgttaaccacgattcaaaagcagttgaacaaagttttcaaagcgtaggatttccctacattttgacgggaaatataagctttcaaaatgaagtagggtattctacgtttcatgtttacagtgaaagagaaaaagagctgtcctttactcttgaaattttcccctcaaagatgagctacaagacagattatgtacacatggttgatgaagtgaacggatacattcatgatttggcatacgatatgcttcgtaaaacgtatattgaagcaaaatctgtttggtctaagcgagcaacatggacggaattttatcatgttctctctcactatatgaaaccctttcttcattctgtgcgtcagattgaaaatcagccgtttcaatcggtaaaagttgaacatgagctcatgagaggagatcaaataaaaaaacaagatagccgtgctatatcttttgtccgaacacaccctacctatcttgcatcttcaagcagggggattaaaattaatcgaaatataaaagtggtacccacaaaagcgattggcaccaggcatgtgtctacctatgataatctggaaaatcaaagtgtgaagtggatgatgacgcagctgtaccataagctaaccggactaattgacaaattgatagaagatagatatgtaaaaaaagaagcggtgtcgactctagaaactaatcataccgaattaaaaagactgttaaacaatgtgttttggcaacgggtgaagaccctacaagcctcaactcttccttctacactgcgtgcggcaccccgctaccgggaagcaagcagatactttatgttcttaacgcgaggattggctcttaacggcgaattttaccacctttcattaaaagatatcgcaactctctacgaatactggacgtatgttagtctgttaaaaaggttgcaaacttacggcaagcggatagaacaaaacatcatgacaacgacagaacaagggttgaacgtcagaatgcagccttcttatcatcgttttcaagtcgggaaagcagaagtcacgctatggtatcagaaagcataccatcatactcataccgttattcaaaagccggacttgctgcttgaagtaaagcaaggggagaaaaaaagtgtatatctttttgacgctaagtatcgtattaaaccaaatcacgatacgccctctcctagagaagaagatattaataccatgcatcgttaccgagacgctattgtggaggaaaatggaataaaaccggtacaaacagcgattgtgctgtttccagggaaagcagagggctataagcagcatcatttttataaaagtattgaacgtgttggagttggtgcgctgccttttttgcctggagaagaagggttggtagaagagtttattgaaactatttgtacggtagaaccacattttttcagcgctgagtaggtgaatagtaaaaggtgaacaagtctttttttatgcattgacatagtgttaagttttttatgttttgatgacatttcgagattttagttgtattttcctgttgaattttctagaatagtagagaataaaaccgtatcgaaaagaagtcgtatcatgtgcagagaacgtatcaggaggacaacgaagtgaaaaagattctactattcacgttagtagcgctattggcaactttttttattgacagggtatacagcgaacgcaaccaagcgcaacttcagcaaactgtaattaatgaaattaaaaaaacaaatcaaagtaaagaagaagcttccatccttgattttaatgaattatgtgattttagatgggataaagtatatgtttttggaccggaaacgactcgcagtgaggtaaatgaaaagctgggcttcacgtggtctgaagcaaaagcaaaaggtattggaaaagataaaaaagataactttattgtctttgtagaaaataatcaagtaacgcaatatttaaaaataccggcgtcatatggaactattgttcctaagacttctgttgcaaatgaaagctaacgaatttcttcgttagcttttttatgctttcttttttaaggatgaagtttttttctctgctgttgatttggtcgggtgtaaagtagaaggatctatgctcacttttaacatttccattaaatgtcgaatatctcgttcttcacttccgctgccttttgtaacttcgccttgatttattttttgttgaatgacgttttgtaaggcatctcggtagttgtttttgtaaatagatggattaaaagaagtagatagcttatcaattaattccaccgtcacttgtgtatcactttcattaatggaagaagtactggataagttaggcacatctgttactgaacgaagctcttcttcaaaatgcatcgtgtgaagaacaagagatccgcccacggaacgaataattgccatttgctgtttggaatataaaaatacattcgcaataccgactttattcgttatttcaagtgcatttaataaagtataataagcttttaggcttgtttccccaggagaaatatagtagggcttatcaaaaaacaggggatcaatgtcatctaacgaaacaaagtgtaacaattcaacggctttgtttgctgcaaagggctctttgacactgtcaatttcctgttgtgaaagtacaacaaactgaccggtcgcggtttcgtatcctttaaccagttcatcggattctacttctcgtccacacgtttgacaatgtttttcttgatgaataggtgtatggcaaacggagtgtagcgtgcgcagctttacatctttttcttcaattgctccgtgcagtttaatagggatgtcaattaatccaaagctgattttacctttccaagcagtatgaagcataaacgttctccttttactcttttttagtagtgtgccgtaaaataaattagatatcccattgttttgaaaagaagaatactcttaaaaaactatgtgctaaataaacaattaaatagttccaataaagctgcagatgttgtctctgcagccttattggaactcaatagggactatttgctgattagattcatttgtctcatgtttagaaatcgtaatttcaagaatttcgttactaaatgtagcggtaatttttttattcatcaatggaaatggaaagtcgattgtacgttcaatgctttcttccatttgttctcttgcaagcgttccttgcttttcatcatgaaattctctaatgcagtattttttggctgtcagctgtaagtggtcagcttgtatctgaacgataatatccttagggtgataccctaataattcagcttcgacaataaatgattgttctgtttcaaataaatctatacgaacggaatcataatctaaataactcataaagggatttgaaagcatgacttctaacaactcttgaaagccttttacaaacatttggtctgctggcagacgcttgtttttcatttctgcgttcctccattatttaaactgtttcactttactatcatatgcgcgtttatgtacttagtgaactcctgcgcaaagaataagcttgaagtactagctgtcttttctacgcataaaaaagcaagctctgtagagagcttgctgctgttttacatatcatgtccgctattgtgtttttggcgagaatgcttacggttttttactttatgagatccgcttagcggttctggctgtccagaattgctttttggcgcgtttcttctgatgtctttgctgctgtttttgttcatagttaaagcctccctttcatttattagggtaggatagtgacaggaaatttatccgatgaaaaattctcctttctaaaaataggtttaacaaaaacaggaaatgggaacaggaaaaaagcgtcatatataatgacgccttcttgttagatttcatggagttaaacgattttgcttttctaactagtgattagtatatccaataagagattgttttattgattttttttgcgttttttattattttgtttctgttgttccgttaatggttcatttgaaaactcttcattataacccgctccttttccttgagcgctagccgcattagctccaggaatgacgtggtttgacttgcgtttagccatgttgaatcacctccgtttctagcatgcgtaaaaatcaatgaaatatgaattattagaaaaataaaaggaagatggaaaaacgttataagtgaaacttatgttaattaataacattctttttatttacttatgtataatattatattaagatagatggtgaagggaatagaggatggggtaagtaaatcctttatacatagaatcttaagggggtaaaagcaatgactaaaaaagacgtttttaacgctcgttcgtcattcgatcttaatggcagcacatataattattaccgcttacaagctttagaggaagcaggtttaggtaacgtatctaagctgccgtattcaattaaagtattattagaatctgttcttcgtcaggtagatggccgtgttattacaaaagaacacgtcgaaaaccttgcaaaatggggaacaaaagatattaaagatatcgatgttcctttcaaaccatctcgtgttattcttcaagatttcactggagttccagcggttgtagacttagcgtcacttcgtaaagcaatggctgatttaggaggagatcctgacaaaatcaatccagaaattccagtagacctcgttgtcgaccactccgtacaagttgataaagcaggtacagctgactcattacgaattaatatggaccttgagtttcaacgtaatacagagcgctataatttcttaagctgggctcaaaaatcatttaataactatcgtgcagttccaccagctactggtatcgtgcaccaagtaaatttagaatatttagcaaacgttgttcatgctgttgaagaagatggtgaattcgtagctttccctgattctctagtaggtactgactctcatacaacgatgattaatggtatcggtgttttaggatggggtgttggcggtattgaagcggaagcaggtatgcttggtcaaccttcttatttcccagttcctgaagtaatcggtgttaaacttgttggtgaattaccaaatggcactacagctacagacttagcgttaaaagttacgcaagtgcttcgtcaaaaaggagtagtcggaaaattcgtggaattctttggtcctggcgtagcagaacttccattagctgaccgtgcaacaatcgctaatatggctcctgaatacggtgcaacatgtggattcttcccagttgacgcagaagcattagcatacatgcgtttaacaggaagagatgaaaaagacattcaggttgtcgaacaatatacaaaagcaaatggtttgttctttacaccagaaaatgaagatccaattttcactgacgttgttgagattaaccttgctgagattgaagcaaatctttcaggtccaaagcgtccgcaagatttaattccgctttctcaaatgcaaacagaattcaagaaggctttatcagctcctgttagcaatcaaagcttcggacttgatgctaaagacgtggataaagaaattacgtttaagcttgcagacggttcagaaacaacaatgaaaacaggtgccattgccattgcggctatcacaagctgtacgaacacatcaaatccttacgtattagtagcagctggtttagttgcgaaaaaagcggtagaaaaaggattggatgttccagcttacgtgaaaacttctttagcaccaggttcaaaagtagtaacggcttacctgcaaaattcagggctgcttccatacttagataaaatcggctttaacatcgtaggttatggctgtacgacttgtatcggtaactctggtccattagaagcagaaattgaagcagcgattgcagacagcgacttgcttgtaacgtctgttctttcaggaaaccgtaactttgaaggacgtattcatccattagtaaaaggtaactaccttgcttctccgccgcttgttgtagcatatgcactggctggaacagtagatgtagatttacaaaaagatccaatcggcattgatacagacggcaatgaagtattctttagcgacatctggccttctcaagatgaaattaaagaagttgttagccgtaccgtaacgcctgaattattccgtaacgagtatgagcgtgtattcgatgataacgagcgctggaatgaaattaaaacaagcgaagatgcgctttatacgtgggagaatgattcaacgtacattcaaaacccacctttctttgaaggcttatcagaagaaccaggtgaagtagagccgttaaatgatcttcgcgtagtagcgaaatttggtgactcagtgacaacggatcacatttcaccagcgggttcaattgcaaaaacatcacctgcaggtctttaccttcaagaaaacggtgtagagccaaaagactttaactcatacggttctcgtcgtggtaaccatgaagtgatgatgcgcggtacgtttgcaaacatccgcattaaaaaccaagtagctcctggtacagaaggcggctggacaacgtactggccaacaaatgacgtaatgagcatttatgatgcttgtatgaaatacaaagagcaagatacaggtcttgttgtacttgcaggcaaagattacggcatgggaagttctcgtgactgggcagcaaaaggcacaaatcttttaggtattaaaacagtaatcgctgaaagcttcgagcgtattcaccgttcaaacctagtattaatgggtgttttacctcttcaatttaaagatggtgaaagcgcggatacattaggtttaactggaaaagaaacaattgcagtagcagttgatgaaacagtaaaaccacgtgattttataaaagtaacagcaactgatgaagctggaaacaaaaaagaatttgaagtactggttcgcttcgatagtgaagttgaaattgattactatcgccacggtggtatccttcaaatggtgcttcgtgataaattacagtctaaaacacatgcgtaagttataaagaaaaagagcggttctcgtgagccgctctttttttatgcaaacgcaccgttttcgacaaaaagtgagagggaaatatgctatattataaaagaaaatgccctataaaaggattattttagtagatattgcacatatctattagtacatagattatcactttttagaagaaataaaggagccgatcatatggttaaaaaaataattgcggtcttgcttctagtaggctttcttagctacgcactttggcaagggctttctccaaatgaagcatccgataaccctaacttaagcgaatacaaggatttaaatatcaaaaaaggcgatagtgctcgtcaggcttcgggtcaagcttatgggttggaaccaaaagatacagcgcctccgtttacactgtcagatacgagcgggaaacccgttcaattatcggactttaaaggaaaaaaagtcattttaaacttttgggcaacatggtgtccgccgtgtcaaaaagaaatgcctgatatgcaagcgttttatgagaaatatggaaacgatgtacagctgcttgcggttaatttaacttcgtcggaaggcagtaaacaggcagtatctaagtttcttaaagaaaaacagtttacgtttcgtgtattattggacgaccaagatagtgtaggaagtaaaaaatatcgggtctccaccattccgacatcttactttatagatgaagaagggaaaattgttcaacgagtgaatggtccaatgacgcttaaacaaatggaaaactttgctcaacaagcagcgaattaacttcgctgcttgttttattaaacatgaaacttatttactttatcatcgtatatatagataggtcagtaaacatgtcaaactttcttacaacttttcaaaaagtatgtttacttatctgacaaattggttacaatatagatagttgtatgatatcagtttctttagatttttcagatttttcataaaaattacataaagtaggtgttgtgatcatgagaaaattacgcaaacgttcatttgaagagttagtgcaagaaaataaaacgcagctgttaaaagatcagtcagaaattgaacgcattgaaatggaaattgaaaagcggttagaagatcgtatgcttgaaagagctgaataactttaaagtaagttggttagagtaacggtgaggaggggataagcatgggaaatcctaaaaaacaaagcaaaccttttgttccgaatcacatcggcactcaaccgagagaagctggtggaaataacggaaaacaaatgcaagataaatccggcaagcatcctcaagttattcaaaccaagggtgaatgaataaaaagtcgctgaattcagcgactttttattatttgaattctaccgtgaataaataaacgtaaggattgctcgaaataagctctttaacaacttctccatcgtcggttgaaagcggagcaactcgtatgccactgccattgtcaccaaataaagcagcaactggatatgttttattcatttttaccgtttgttttttctctaatccagtaaaggaatagccgtttattttttttggcttttccgcttctattcctaggtttgtatcgttgctgcctacattaaacataactttatgagcatcctcatcgattttatatgtaatagcaaacatgtcaaattcttttgaaacggtcaacccacctgaaaataaaggttcttttgcttttcccttttcgtaataagtagcttttacataagcttcttttgcgtcactaggagctttcacatcgtatgcaatgatattgcttttgtagtccaggtttgtcacagctaacattttttcttcatgttttgagtaatgatgaggcttcataaaggcacttgctgtcaattttgatgccaatgaggtttgcgacataaaaaattcggcaagcactgcaataaagatgacacttagt

SEQ ID NO: 28 - DNA, 59284 bp, Priestia aryabhattai
  source 1..59284: mol_type = genomic DNA
gttaatactatagcgaaattaaaagcaggaattttgctatttgattataaagatattgttagaaaaaatttaatgagaatttttataaaaaaaagaaaagagattgagacttaactaaatcaatagacgaacaaattggataaagtagctagtataaatcactcattacaccgcgttgatttccgtgccagacttcgctttccgcgggcggccgatgagcctcctcgtcgcttccgctcctgcgggacctcacctattccgcttttcccgcaggagtcttcgtcttgcccttcaatcaccagctagaagcacctccatacatgaaatctacgttcatcctaaccataaaaaaatctgaacgattcatcgttcagatcttccctcaattaaaataattttatcccagcctcttttcgacttagcatttatttcatagcctgcaaatgattattagatttttgttttgcatcacgctgaacgaaaaaaataatgcaaagcgccagtagatacaaacatgcaaaagctgttatataccaaagtgctgaggtaattccgcttgcgtccatagtaaagccaataagtgcaggaaaaacagctcctccaagccctgaaaaaccagtaattaaacttgttacaatacgagcagatccggtaaatgtatgattagcatataccatcgtaatcgaatagatacctgacattgcaagccctaaaaaccctaataaaatatagcctgcaacagcttcttttaatacgataaacagcactaaactcacaattgttcctccaatgctgccaaaaagatagcgttcgtatgtaacgattcgaataatccatccagtagccactcgtcctattagcatagccacccaaaaaacgcttatgctcaaagtagcctgtgacggaattacatctagatacgtgataaaaatagacgaaagaaaattattcatactgctttctactccggcgtacataaaaatcatcacactaaaaagagcaagtattttccacctttgacttttagcaagcacaggcgcaggttctgagctggcgtctgaagcatcgctttctgaagttgaaacagtctcttttttaaaaggaatcattttacaaactacaaccattagtaaagctaatacacttgttataaaaaatgaaaacctccagctgttctgtgaaatcaataagctagctactaacggcatcaacagcgcacctaggccaaatgatacttctaaataactcataacaatagctcttctaccgataaatacttccatcattaaagtagctacaactacttccaatgcggctacaccaataccgtttaaaaaattgaatgcaataatcaactcaaatggaggcaataaaagcatacctatttgtgatagcgctatcattagtgaggcaattgtaagtaaattcatttctctgaagcgtcctaatagaaaagaagacagcggaactcctatcaaaaatcctaaagaacctaataatacaagctgtccgccaactgtataggacatatgataatgtgttaacaattgcggtaagacggaccctacggctgtaatgactaatccgcccagcaaataaagcgcatatgaagctagcgcaaactttttcatctccccacccccttaaattctctaaaactttctttctgtacttaattataaagcttttcctttagttgttaactgaaatttgagaaaaaaatcattcttcctcctctacttaatttccagtcatttataagataaaacaaaaagaagaagacgtatgtctccttctttttgtttttcactttacagtgacgcttttaaaatagctaaaatatcatctttatttagttttttaaagttaccgaaacctccgtgctccatttcacgagcagcaattccagcaatttcgtctagtcgctcttctccgatatcgtaatctgctaagcgagaaggtgcaccaaggcttgaccaaaaagcgcttagtttatcgattccttctaacgcaatttctttgtcgcttttacctgcagtttcaatatcgaacatgcttgtcattacacgcttcatacgagttacatcttgatctacaacgtgtcgcatccaatttgggaataggattgctaaaccgcctgcatgaggaatgtcatataccgctgataccgcgtgttcaattgtatgtgaagcccaatcgccaaagtagcccatttgaagtgttccgtttaatgcgattgttccggaatataatatcgtttcgcggtgctcgtagctttgcagatcttctagtaatttcggtgctgtttcaattactgtttgtaatacggaatagcacatacgatcttgtaaaggcgtgtttttcacgttatggaaatattgttcgaacacatggctcatcatgtctaccatgccgtagatagtttgatctctaggaacagacatcgtgttcacaggatctagtatagaaaatacagggtgcgtaacggcgcttccccaaacgtatttttcatttgtttcccaattcgtaataacagaatcaggattcatttcagaacctgttgctgccaatgttaataccgttccaaacggcagtgcttttgtagccgtttcttttttgttaataatatcccaaacgtctccttcatactcagctccggcagcgattgcttttgtgcagtcaataacacttcctccgccgactgctaacatgaagtcaatgttttcatttcggcaaatttcaattccttttcgtaccgtagatagtcgaggatttggctctacgcccgctaactcatgtatatttacgtttaactcttttaacagcgtaagaacttgatcgtataaaccgtttttcttaatgcttcctccgccgtaaacaagcaaaatattttttccgtatttcgggagttcttctgataatgcttgaagctgatcttttccgaagattaattttgtgggattatgataaatgaaattttccatactatctgtatacctcctagttgaatataaagtaagttgtcgcattacgcgaacaagaatgtaagtataaatgtaaaacaaaaatttttcaagagttaagttctcaaatcgcgtactttattttattgagtaattaaaatgaagaaaatggcttcttagatataaaaaagagagcaagtaaatgctctccttaaagttctttataagccatttttctatacgtaacaaattcttctttttcgtaaaagctctcggcaatcgtattgtcattccaataatctaactcaattgtagtgatctctttttcacgagcaatgctataaatttctttcatcaaactcgaaccaaaccctttgtttttatagggttctgcgatatttatttgatgaacgtaaattgactcgtaagcttttttaaacacggtctctgaatactgctttatttccagccaagcgaaccctacatgctgtccttcgtcttctgctaaaagaaagataaacctatcgtctttcatcactttcttaaaaaattcatgtacctgatgaaaatcatatgtttgaaaatgctgcgggtataattctacatgcagttgatgaacagactgattaagaatggcaattgtatcagcatcgaaagtacggctaatcttcaattttttctctcctatatatctcgtattcagtagtggtcgttatgaatttatttcgtttaatatagccggtgcgtttgaggtaaataacagatagtttttattggtcgtttttataaagatgcggtcagtcgttccgtacggagggccaattcgaatggcgtttgcttctttacctccgtacgtgtcatcttccgttacttcaagaatgtcttctaacggaatcgtaaagtgtgaaagctgccattttataatgagattatcatttatttttcggacactgatagttggtgtaaacattttatacatcccctttggtttctattttcacttacttgttctagcagaaaaaacaagttcatttccccttaactttctccctgtgcaatgtgttcttttatccttaaaatcgcttctttcggacagccttgaaaataccctccatgataacaaataatatgctcaatgtcgtagtgcaagaatttttccagtgattgaactgcttgatccatatttaaggtcgtttgtttaacaggtcccattagtcgtccatttgccaatactaaagcatctccagcaaccagtgtttttgattttcttaaataaaaacttacatgctcaggtgtgtgtccaggagtaaaaaccgcttcaatgccttcacagtatgggagcatttgactcccttttaatactaaatctacgtcaacttttggaggatttttatacaaatattttcaacctccataatcgcttagcatgcagtggtgttcttgaattttatcaataaacaaaataaaaaccagactggaaaaaaatcactttttatgctatgatatctataaaataaagcttactatgatagatttttataaataaaaaggtgaaccttgttgtccaaggttcacctttttatttatcgttagccgtatagcttttttatttcttatcttctctttgaatacactcatgcaaaggtacaaccttggttttctttgctattttatatccccaccacgtcgctaaaaagagaggcagaccgatgtatgagaccgtcaagccgtaccaatcaattttgtcagaaagtaccgcttgataattctgtcctagaataacgatgaggcacattccaaatgcaagaacaggacctagaggaaaccattttgctttatacgccagtgcatttatatcccgtcctgaagcaacatatgcttttcggaaacgatagtgactgattgcaataccaatccacgcaataaatccgctcatgcctgaagcgtttaaaagccacatatacatttgatcgccaaaaattgatgttaaaaaggcaagaccgccaatgatagtggttaaaacaagcgcgtttactggaattcctcgacgattaatttttcgaagcgctttaggcgcttgcccttcattggccatggaccataacattcgcgtagaagcatataagccagaagttccggctgataaaaccgaggtaagaataacagcattcatcactgaagcagctgcagcaattcctgctttttcaaaaacaagcgtaaatggactaacagcaatgttatccacatctcctcctagaagagatggacttgtgtaaggaatgataagcccgattacagcaatggctgcaatataaaatagaagaatgcgccaaaagacttggcgaatggctttgggtatatttttttgagggttttcactttcccccgccgcaatgccgactagctctgtaccttgaaaagaaaatcccgcgataaagaaaatgcttagtacggacagaaatccgccgttgaccggcgcttcttctaatgtaaagtttttaaaaccgatatattcaccgccgaaaatgccaaagatggtcagaaggcccactccgataaacacaatgatggttactacttttacgagagcaaaccaatattcagattctccatagctttttacagataggaaattaagtaaaaaaattaagcctaaaaacaaagcgctccagataatacttggcacatcagggaaccaaaacttcatgataatagcagaagcagctatttctacagcgagcgtaacagcccagttaaaccagtagttccagccgagcgcaaagccgagagctgggtctacataatgacttgcgtacgttgaaaaagaacctgataccggcataaacgtagccatctctccaagactagtcatgagaaagtaaaccataattccaatagccccgtaagcaatcagcgctcctccaggtccagcagtttggatggatgatccggtagctagaaataagccagttccaattgaccctccaatggcaatcatggtcatatggcgtgcttttaaatggcgttttacatgcttatcgtcctgcttcttttcttcctcattacgatttatatcgaccgcttccatacttatcccacctttataaatgaactatgcgaacatgtttaacgtaaagcgtataagaatatccatctcccacaaaaagcaggagatggacccttcattgcttactttgaaaaatcaaagtagtttcgttttaatagacgaggcaggctcataagctgttcgtacgttacacttttttctaaggcagaggtgttgattaaaaacagttgatcttcaatgtgtccaaccgtttcatctgtttgatacgtaattccgcattctgaacatgtaatggaaggcgtctctttaatttctatagcttttgtgccgtcaggaagctcccaataaactgttgcatccgcctctttcgcttcacaggattcgcaccattgacatttcaatattattcctccttcgctcccgccgtttcgtattttttcatttgcgtttcaaattttttctcttttaattgatcgcgcttttcacgcttgtcttttaaagagctatgctctggattttggtcatacgttttccggcggtcaagacggtttagaccttccggtgttaaattgaactttgtatcatcaataatcgaaagaacaccgttgctttcaaatttttcaaacacttcaggatatacttttttataaaattcttctgcgcttccactttggtaattttgcggctccggataagatgtaataacaccttcaaagtttcgaagcaccactttattggagctttgagaaataatatagtttggctgcagcggaattttaccgcctcctccaggagcatccacgataaacgtaggaactgcatagccggacgtatggccgcgaagtccttccataatttctagccctttactaatcggcgcacggaaatggccgattccttctgataaatcacattgataaatataataaggacgaacgcggatttttactaaatcatgcataagctgcttcatgattggcacgctgtcgttaattccggctaaaataaccgcttggtttccaactggaactcctgcgttcgaaagcatttcacaagcacgctttgattcttctgtaatttcaattgatgtgttaaaatgcgtatttagccaaaccggatgatatttcttcaagatattgcacaggttttctgtaatgcgttgcgggaacaccaccggtgctcttgtaccgatacgaataatttctacgtgcggaatatcgcgcaaatttttcaaaatatattctaaaatattgtcattgattaataggccgtctcctccggaaattaatacatcacggatttgaggattggctgcaatgtaattaatagctgtatccagctgttttttaggaacgcccatgccaatttgtcctgaaaaacgtcttcttgtacagtagcggcagtacatagagcattgatttgtaactaaaaacagcacgcggtcgggataacggtgcgttaagccaggaaccggtgaatcttcatcttcgtgaagcggatcttctaaatcataccttgttttatgcagttcttctgaaataggaacggactgcattctgattggacatttcggatcgttctcatccattaaccatgcgtagtagggagtgatatttaacggaatcgttttggttgcaattttaacgccttcttcttcttgaggtgttaaatttatcactttctttaaatcttccaatgttttaatcgtgtttgtcagttgccatacccagtcgttccactgctcgtccgttacatctttccaaagctcgatttctttccaatgtctgcttgctttatataatgtattgttcattttatattccctccaaagttcattttttgaatagatgttctactaagaaattgaccgcaccatataatagcgatcttctccttcgccaaactctcctgctcgcctttctttaatggtaaagcccatttttttatacagctttacggcgccttcgttttttacattcaccgtcaaacaaacgctttcgaaattatctttttttagaatcgaaaatatttcttctaaaaacagctgtccaattccgcttccttgtttatcagagcggacgtagaacccaaaaatataagcttttgtgacatctttgtaatctcgaagcagctcgcaaatggcaattggccttgtgtcattttcctggaaatattgaataagcttgccgtagcgggctaaaggtacaagcgtctgttcatcaacggctcccatgcccggaaacgcatctttttcaagttcaatcatcatcttttgctgctccggatttaacgattccggcacttcgatataatactgctcttttaatgcatccatttttctttcctccttttttcactttcatatttgacagcttgcagcggccagattggatttggaatgtgctggtaattaaaggtcgttaagcgatttgatgctacgcctggtgcatccacatagataatagatcctacaagaggttcaaaagcggctctgaaatgatttttagcttttaaaccgatgatttttttcatcgctggctcaataccgatatggcgaaaaagttcaggatcgtttgctgataccggccttccaatcagcaaaacatccaattctcctactcgaatatgagctgcaccttttacatttactttcaaatgctgattaaacggtcccgaattgtaaaactcaccttctgataagccaatgacctttgcttcaacttcaacgggttttccaaactcaggagaaacttttcctcctaaggaaagcgagacgtaattcccaactcccgcttgcacgcattgtttaatagattcagggtcataaagacctccaaacagcgtccccggcatatttagctttagcatgtattccaaaagctctgttgtatcgccgcttccgcaacttaaaggattgtctgctatatcagcgagtactgtgggctttgtgtttgatagttttaacgctgtttgcagaccttcttcaacggtaggcaaatccacgataaactcttcttttatactccaaaactgagaagctagtttctttgccattttttctgctgtttcaggattcaaagctattacgagcacgcttgctccggcaattggaatatcagaatacggaaagcctccaaaaatggaaacattgtatacatctgcttcttgctcggcttgtttagcaagatcaatcatttttttcattggtccttctgctgttcgcatattaattgacggcaaaagcataggcaatttctttaaagacgcataatagatagcgctttcttttatttgtgttaaaagcgctcgcgcagcgttcactccttgttggtacatatcaacatgaggatatgttttaaaaccaaaatgaagcggcgtgtacgtaagcatatcttcactgatatttgcgtgcatatcgagcgtagtagaaataggaacgttgcttcctatacagcttcttatctgatttaataaatgagcttcaggatcgaaaagatgttctacaaccattgcgccgtgcaaagcgattaacaaaccatctagcggtcccgcatgagtaagtgagtgcaacatttgcttttcaattatgtgataagcttcagaagatacgatcccagacggaactgcagctgcacaaacaaggggaacaatttctatctgcttctcttgctttaatacatctaaaaatccccctacttctgttttggttcctgagtatgctttatatatttccgttccaacaaaatagccttcttgtacaaactgttctatttctgtttttaatggactaaagctgtgagattcatgataaaaaaagacaatgccaatgcgatatgaagacatgtgctcctccttttcgctaaggtgcgagattaatagttggtgtagacagacttccattctgtcatcacatcaaatgcatgatgagaaacttccctgtgaccgtttccagacatcttcattcctccgaatgctacccccatttcagcattagatgttccattattgatatagactaatccgctaacagcgtcttttgccgctcggctggcataatgtaagctgcttgtataaatagaagtggaaagtccatacatcgttccattattaacgctcattgcttcttcgtagccatctacttcaataaaagcaagcacgggaccaaaaatctcttcttgagcaattgtgtggttagaatgaacgttatcaatgatagtaggcatataataacatgtccctaactcttctgataaagcacgacctccaagcgcaatatttccgccttcttccaccgctttttgtacgtaattttctactaaacggcactgctgttcattaacaagcggtcctatcacaaccccttcatcaagaccatttccaatcttcatttcctttgtaagggctactacttttttcaaaagctcttcttttactgaacgttctacaatcactctgctagctgcggtacagcgctgccccgttgttgtaaatgcagatttgacaattccttctgctgctttatccaagtccgcatcttttaacacgataacagcgttttttcctcctagctctaaagaaattcgttttaaggttctgctgctcatttctgctaactgctgaccaacttccgtagagcctgtaaatgagatgattttcacttcagagtgcgtagcaagcttttgtccgacgattctgcccgatcctgtaagcaagttaattgttccttttggaagccccgcagcgtgcaatacttccataaaaatcttcgctgagagcgccacttctgaagccggcttccagacaacggtattgccagcgattaaagcggcaaacattttataagaagcgagagaaacaggaaagttccaaggtgtaatacatgccacaactccaagcggttcgcgaaccatttttatatctcggtcaggaaagccagcgggcactatttcgccaaacaaacgtcttccttctcccgccatatactgagctgtggcaatgacgacaccaacttcgcctatggattctgtcagcggttttcccatctcttttgtcatcacttgagctagctcttcttttctgtcttcaaaaagctcagctgcttttgttaaaaatgctgcacgttcaggaatagatgtatttttccagtggctgtaggctgtactagccgcttttactgcatcatcgacttgactagccgtagcggccgcgcacgttccgacgagctcttgtgttgcagggtttatactttcaaaataggtttgctcctcttcacttacccactcgccgttaatatataaatttccttgtaacagttcggttttagtctgactcatattgttaccctccttttcattttaaaagctagttaattggaactgcttctgtgatgacttcttctagtaaagacagcccttgatccagcacgtctttatcaatatttagcggcagcattaaacgaatagtttgccctttgactccacagttcataataagcagtcttttttccagcgcttttgatttaataatagggacataagcagctgctgtttcaacatgaaattcaataccaatcatcataccaattcctctaacctctttaatagccgctaaatgtccaatagaatgctgaaggcgtttaacaatatcagcgcctactttttcactgcgctctacaagcttttcttcttcaatgattgaaatattggctaaagcagctgcgcacgatactggatttcctccaaaagtagaaccatgtccagctgttggccatttctcatgcagttctcggcttgctacaatggctcctaatggcatgccaccggaaagagcttttgctaaaactaaaatatctggtgtgactccagcatgttctgcggcaaacatttttccagtacgcccaaatcctgtttgcacttcatcaaaaacaagcagaatgccataatcattcgctatgtctctcagtgcgcgtaaaaagctagaaggagcagggtaatagcctccttcgcccatgactggctcaattacaatcgctgctacgcgtgaaggatccactcgcagttcaaacagcttttgcagttgatttaagcaatatgcttccgcatcttcctcgtcaatattaggaagctgacttggatacggataaggagcatgatacacttctcctagaatcggctcgtagtagctgcggtattttgagcttgaagccgtaatagctgtcgctcctagtgtacggccgtgaaaagaaccttcaaaagcaatgatcgctggtctgccagtggccgcttttgctaatttgagcgcaccatcaatggcttctgcgcctgagtttgaaaaaaacaccgtgtctaagtttccaggcgtaatttgcgcaagtttttctgccaaattcactgctgtttcgtaatagccgtagtttaagcctaggtgaagcagctgatctgcttgttttttaatcgcttctaccatcttttcatgcgtatgacccactgcattgacagctactcctgatacaaaatcaatatattccttaccatcagctgtccaaaatttcgcaccgtgcgctttttcaataacaagctctgttactcttgtcatcaccggtgataaatgtttttttcctttgatttgaagctcttctgttttattttgcactttcatatgactcatcctttcttatgtgctggtgaaaaatagaaaacgcatgatctagcaatctcactatttcatcaacttctgatttcgttatatttaaaggcggactgataatgatatgttctcctttatgtccatctacagatccggagcctggataaaacacgcctccaagctccatacaaatttcattgagcttttcgctggctgcttcacttggctcaaaaaatatctgttgattggcgtctttcattagttctaatccaattaaaagtccgcggcctcgaatatctgaaatataaggctgcttgcgctgcagcgctactaaacattccattaaatacgcgctttgagtttcaacgttttgaaggatattcatttcttcatacatatccaaagcagcaagacctgccgctattgaaacaggatgtccactgtacgtatagccatgaagaaatttcccgctgctattttctaacagaccttgaatcagacggtcatggacaatcattcctcctaaaggagcgtacccagctgaaactcctttaccaaacgttaggatatccggttcgattccgaattgctccactgcaaaatcagttcccgttctcccgaatcctgtcataacttcatcaacaatcaaaagaatgtcatagcggctgcaaagctcacgtacttttttgaaatagtcaagcggaggtacaacagctccttgctgacttcctacgatgggctctgcgataaaagctgaaatattttctggaccaagctctaaaatggtgcgttcaatatcggtaatacagctccagttttgatttgccacgcagtcttcttgattgcgattatacggacagcgatgacaatatggcgaatagacgtgcgcaaaatgtaaaaggttgggtgtgtaaggatatcgtctttttacatctcctccagctgatagtgcccctatcgtatttccgtggtaagactgccatcttccgattacgatgtgtttttgcatctttccggcatctctgtgatattgccttgctaattttaatgcactttcatttgcttctgatcctcctgatgtaaaatagactttgtttaaatgaagcggcgccatttcaccaattttttctgcaagtttatgcaaaacattcgtttcaaaacgtaatgtatgaacaaacgccgctttttttgcctgctctgccatcgcctcggctatttttacaatgccgtgccctaaatttgccgccacggccccggagcagccgtctaaatacttttttccttgttcatctattaagtagcttccttcaccatgcgtaatcattggatacttttttgttaaatctctatgaaacacatagtctctttttatttcgtccatctttccaccaccatcgccattcctaatcctcctgcaacgcaaatagttgcgagaccgtatcgtcttttttgctgttggagctcatgacacagagttgttatgattcttgccccggagcagcctaaaggatggccaagcgcaattgctcctccgtttacattcactttttctgatgtgatattccattctcttaagcaagcaatactttgggcggcaaatgcttcgtttaattcaatcaagtccatatcacctaagcgtaaaccgactttatttaaagcaatttgtgaagcagaaacggggccaattcccatttcctttggagagacaccggccgcggcaaatgacacaatttttgccataggtgttaatccaagctgctcagctttttcttccgacatcaacagcagcatcgaagcgccatcgtttctgccggatgaatttccagctgtcaccgttccatttctttgaaaaacaggtttaagcgtaccaagcttttctttgctagtaagacgaggaaattcatctgttgcaaaatgcttcattccttttttcccttcttttacaggtaccgggataatttcttcttcaaataaatcaagttctatagcccgcctagctttttcctgactataaaaagcaaactcatcctgctccgcgcggctaatgctatatttttcagcaagccactccgccgtctgtcccattgtaaatgttccgtataacgtttcaggctgtgattttggctgactttctgtattagagtcatagagtgttaaatcaccaacgcgaaaaccgaaacgagtgcctaccgtataatgcggtgcttgagacatgctttccactcctccagctaataccacttcggcttgacccgataaaatggacatggttccattcattacagcctgcatgcctgagccgcactggcggtgcaccgtataagctggaatacgttcagagaattgagctttcagcccagctactcttgctatattaggagcatgagcgctttgtttcgtttgtccgacgataatttcatcaacaatctctgacgtatatccggctgaagacaaattgtttttcatcacaagagagactagttcttccggaagcgtatctgcaagcgaaccgccaaactttccaataggagttcgaaatgcatttacaatcactgccattatgccgtcaccccattgtctttactaaacaatttagaaacgtgaaaagaagcctgtgttttttgttttacttcctctaaagaaacacccggagctgtttcaagaagttcaagaccaaggtccgttacggaaaagacagctaattccgtaataatcatatcgactcgtcgctctgaagtgagaggataggtcaacttcccaactagctttgactctccttgactatttgtgtgaagagtcgtcacaatcactttttttgagccttctaataaatccattgctcctcctacgccaagaacgcttttcccaggaacagcccagtttgcaattcggcctgcttcatctacttgaagcactccaagaatagatacattcacatggcctccgcgtatcatggcaaaggaatccgcactgttaaaaaatgaggaaccttccaaaaccgtgacgggcagcttcccagcattcacaagttctggatctacgtaggcttcttcaggagtaggtccaacgccgagaatcccgttttctgaatgtaaaaacacgtgaacatcgggtgaaatatagttagcaaccagagtaggaatgcctattcctaggttcactatatctccgtgacaaagctcttttgcagcacgcgcagcaatatattgtttggcgttcatcttaattttctcctttcactacgatataagtaacgtataaatgaggagttacgatttcttcaggagaaatctgtccaacttcaaccacttcttctacttctgcaatgacgatatcagcggctgttgccatcattggattaaaatttctcgctgatttgctgtaaataagatttcccagtcgatctgcttttttagcttttataagagctacatctgcgtgcagcgattcttgcaaaacatatttctttccttttaatactcgttcttcttttccttccgccagctgagtccctacgctcacaggcgtataaaatcctccgatgcctgctcctcctgccctaatagcctcggacattgttccttgtgggatgagctccacttggagttcttgttgttgataagcgtgtacaacttcagggttggaagtaaaataagaacctatggctttttttacttgttttttttgaaccaatacacctaatccttttccaggttcaccgaggttattactaataatctctaaatctttaaggtttgatttggcaatcgcttcaatcagactaagcgggcttccgacaagaccaaatccacctaccataatgcgtgcgccatctgttattttttctattgcttcttcgcgcgtgatgattttgttcattttgtttcctccttttctttttatatttcacagcgctttacgcgaaaaaaaccaagcaggacacaatgactccccaaagaaacagggatgtccccactctttgtaaagtgtgtgtgtctgcttggttttaataagaccatgaaaagaggttgtcttctcactttattctaaccaaacgctatgtaattttttgattcacattatcccagtaacgttggattgcagcctgaagcgctacgataatcgcctgttgagatggagcaaaataataattttgaatacgttcaataagaggttcaattccatctgcaaggcagtaaccaataagcagcttccggaaaaaattttgcgtcagctccgtaataaacgtaaactcagcatttacaattttatgctctgtcagatccacttctagtacaattcccgcatgcttatacatttcatacatggaagttccctgtggagcttttgcatatcctgtcacaatgactgtattcagtatttgcatgccccttaatctccttttaaaaactatttaattactccgcacttttacactaataattctgaaaggtcaaatgagattaactcatatgcttttagttatgtaagtgctttcatttttaaaaagatatgttcttacataactaatatttcgccttttctagacaaaatccttcttttcttttaaaaaaactttctatttttttatttattccgctttattgaaatttattcgagtctccatcaaacttttcatctgctatacggatggactctgttggacagccctcaaacgcatctattaaatcgtcttccagctcttggggcacttcagccgtgccttgattatcatcaagtataacgaacgcaattccttcatcatcataatcataaatatcaggtgccgcagctccgcatgcaccgcacgcaatacacgtttctttatcgactatcgtatatttccccatgatcattctcctaactaagtttaaaagttattactcattaccagccgcgttcttgcatacgattttctggtaataatgatgaaatttcaattcctttcattgcacttcccaatccttttgacaagtttgcaataagttcatagtcttgataatgcgttgttgcttccacgattgctcgcgcaaatttttcagggttggctgatttgaagattcctgatccaacgaacacaccgtctgctccaagctgcatcattaacgctgcgtccgcgggtgttgctacgccgcctgctgcaaagtttacaaccggtaagcggccttcacgtttaatttgcagtaataactcataaggtgcgcctaatagtttagcttctgtcattaactcgtcttcatccatgcctacaactttacgtacttgagcgtttacttggcgcatatgacgcactgcttccacgatgtttcctgttcctggttcgccttttgtacgaagcatcgaagcaccttcaccaattcgtcttgctgcttcccctaaatcacggcatccgcatacaaatggaaccgtaaatgtacttttgttaaggtgatattcctcatcagctggagtgagtacttcactttcgtcaatgtagtctacacccattgcttctagcacgcgtgcttcaacaatatggccaatacgagctttcgccataactggaatggatacagcgttcatcacttcttcaacaattgttgggtctgccatacgagacacgccgcctgctgcacgaatatcagcgggaacacgctctaacgccataacagcaacagcgcctgctgcctctgcaatttttgcttgttctgcattgatcacgtccatgataacgccgcctttttgcatttctgccattccccgcttcacgcggtccgttccatttctcaccatattcaattcctcctttatatgttcaaacacttattatgcaacttccatgccagtgttaaaatatagaagaaattagtaaaaaacattgattttcatgccaaattattaagcggtttttaaaaaattggcaggtgaaagccaattttttaaaccaaaacagctcccatctctattagagacggaagctgttttgttaaggaactaacactaattttccggtcgtttttcttccttgaagcagacgatgcacatctgccgcttcatcaagtgaaaatgtgccgcccagcattaattttaactgaccagaattcacgtagtttaataactcatgcagactttgctgataaagcgttggttttgccatcatttgaggtaagaaaaagcctagaaccgattgatttttttccatcaggcgggcagggttaaattttacaggttttccgctagccattccgtaaaaaacgaggcgcccaaatggtgcaagacattgaagagattcatagaatatatgccctcctaccatttctaaaataatatcggctccttttccttccgttacttctaaaatttgtttttcccatcctgtttctgtatagttaatcgcttcgtcagctccgagattttttgcaagctcaagcttttctttggagcttgctgtagcaataacttttccagctccaaaaattttggcaagctggacagctaaggttccgacaccgcctgctgccgcatgaacgatgacggtttctcctttttcaaggcgacccattgtttttaaaatatgataagccgtgagtccttgaagaggcaaagcaaccgcttgtgttaaatccacattttccggcaacggaataaggcctcttgagtcagccagcgtgtactcagcgtatcctgttgctcgattagatcctagcagcgtcacaacttttgtacctacttttatcccttttacatcctcgcctacttcaaccacttcgcccgctacttcagaacctgggataaaaggcagcggtgtttcgactacgtatgctccttcacgccgtgcagcatcggcgtaattaacgccgattgccgcaactttaatgagcacatctttcttttttggtacagggcgtgcaatatcgataacttgaagaacatcaggtcctccgtactgcgtaaattgaatggctttcatcttatatccccctcttatttcccttgaaatagtggctttcttttttctttaaacgcagatattccttcttgatgatccctcgtttctaccataagaacttgcgttagcctttcttgctcaaggacttgttctaacgttaaatgaaaggaattgttgacaatttttttcattttcccatacgctttcgttggtccttgtgataagcgacttgcaaaggatgtgacctcatctttcagctgatttaacggtactacacggtttaaaaaaccagctttgtaagccgtgtccgcatccataggctctcctaaaaataacagttccttagctctatggggaccaacgacctttgtaagaaagtaaaggcctcctccgtctgaaatcaatccaacttgagaaaagcttaatacgaaccgactttcttctgacgcaatgataaagtcagaagcgagagctaaattaaaagccgctcctgctgcaaatccatgaactgctgaaataattggcttctctagattttgcatcgctaaaatacattcatttaaacggccgatatgttcataaacatcagatccagatgcttggcccatcgtttttacatcgcctccggcagaaaacgagcgccctgctccatttaatataaccactttaatagactcatcgctttgtgcctgttttatttcagatgttaacttttcaatcatttcctcactgaatgcatttaaacgctccggccgatttaacgttaaagataaaatagtcccctgcttttctactactaaatcactcataattcggattccctcctctttaatttgcattaaacgataagccacccgccatctactaataaatcacttcccgtcatataagatgcctctttagacgctgcaaaagcaataacatttgcaatttcatccggcttacctacacgttttaaagccgtatttttttcgattgccttagcgaagcgctcattttcaagtccaggctgcgttaaaggtgtttctacgaatccaggagacacagagtttactctgactccacggggagctaactcaaaggccattgctttcgtaaaattaattaaagcagctttagcagcgctgtagtgaggaatttgtgccccggctttatgtcctgaaagagaagcgatgttaacaatagatcgattttctcctatctcttcagttaaaaaaggaatcaaatgttttgttacaagaaatacgcttgttaaattgacgtcctgcacgtgtttccactgttcaagcgttgtttctttgattgttgaattaactgatccgcctgcgttattaattaataaatgaatttgtccgtacttttcttttataaactcagccagctctttgacgtcttcttccttcgttacatcagctgagaaaatatccgtgcattttcgttcacaccgtgtgtcaatagccgatgcagcctgtactagtttttctttcgttcgcccgacaagaatgacgcgagctccttctttcgccattctctgagcggtcgcttctccaataccgcttccagctcctgtaataacggctatttgcccttcaaaacgcataatatccctccttatacaacatatcgcccgctgtcgataaattcacgggcgatgtctcgattgcgcgtgaactctccttcactttgcaaatcattcatccattttccaagaattgtgcggtactgtcggtgtttttcacccgttaacatcccgtttattaattgtcgagcctgcttttcaatttcaaagagcgtttcactaacaaccgttgctgtcagcttgctttttaacttttctttttcttctccatttttgttcacggctttttccgcgcgcagcacagatgactctatggcaaatagtccaacagcaatttctgcgagcttcatcagcgtttcttgttcttgtgctagattggcgttaaacgtttggaatgctgttcctaacaaagcaagaaataaatgtcttgtggtaataaccgcctgcttttctcttcctagaagttcatttgaagatatttcccactgaccgctcatcaattcactaacagcatgttctacttgttttctcagctctatttctcctttgcctgctttttttagaagctgagttggaagcaaaaggcggttgatttcatttgtaccttcaaaaatacgattgatgcgtgagtcacgatatacttgttctattttatattcttgaataaaccctgcgccgccatgaagctgcagcgattcatcggcaattaaatcaagagtttccgatccatacactttacaaactgaacattccattgcaaattcagccagctgtttagctactaacttatgattttcactttcatataagccaccaagcgcctcttctagtaaaccagctgtacggtactgaatagattcagatgcaaaaatacgagccgccatttttgctattttttcttttgaagcattaaattccgcaatagccgttttaaactgcttgcgttcttttgtataagctaaagcaagttcaaacgcatatttcgctgcgcccatacatgcagaacctaagttaaaacgtccgaggtttaagacgttcaacgcaatcaagtgaccttttcctacttgtccaagtacgttctctacgggtactaagcaatcttcataaataactggacgagtagatgatcctttgattcccattttcttttcttctggcccgagagacagtccttcaaaacctttttctacaataaaagcggtaaaatgttcaccgtctacttttgcatacgtgatgaacgtatctgaaaaggcagcattggtaatgtactgcttcgttccatttaatatataatgcgttttttcaggatttaatacggcttttgtttgggctgcaagagcatcagaacctgcttctggctctgtcaaacagtaggccccaatatattcgccgcttgccaatttaggcaagtatttttctttttgctccttggtgccaaaatacgtaataggaagtgtcgcaatgcatgtatgattagaatgagtgactccatatccgcttgtccggccaatgatttcaccgacgagtcctttgcttactttatcaagacctagtcctccatatgtttctggaatactgtgagcaagaagtccaagctcgcctgctttatgcatcaattctactactttattaaaatcctgctgctcaatgtcattatggtaagggtctacttctttttcaataaactgctttgctgtctgagcaatcatacggtgctcatccgttaagtcttcgggtgtataaacgtgatgcgtagatgttttttttagtaaaaatgatccgccttttgcttctgttttcatttcagacatatcgtttcctccccgtttactagcttttttttcactaccttaggaactacggaatagacgtttttccggcttacaaagccaatttcgtctagaaagccatactgagtgagcatttctcctacggctgagcgcttcaatatttcaacaggtgaatgctcataagcctcatacaaaagcagtgcggcttttgcagcatccgtcaaatgaaatgtttttagttgcagcagacagcttataaaataccccgctccatacaaatcttctagacagaagcgatcggatgaacctgaacaaactactaaaacagtttcatcttgaccttgctgacaaacagcactggcaaccgcttctccgtttaaaagcgaagccgtatatacatggtttgctttttcagcgttatgaatggctacggttccgttagtcgtggacaaaataaccgttttattttgaacatgctcctttaacgtgctggggtttggatcaaaaaagccttcaatcgttttccctctatactcgcctacaagcgcaatttcgtcaggcttatacgtttttgcttttttacgcgcttcttcttcattttttaccggaataacttctattgctccttgctgtaaagcagccgcaattgttgacgtagccaataagacgtcaaatataacaaccgtttttccttctagctttttggcaagaagctcttcttttttgagtattacgtgaatttttcctttcatatatgtcctcgttctgtgtgcagagcatgaataattagtgtttttacataatctccaaactgtgaaaatcgtttatcatttgtttggccttttttataacggtaataaatttgctgacaaatgacagcaagcttgaagtacgcaaatttcaggtaaacgtcaatgtgtgaaacatcccgtccgctttttttagcgtatgcttctacaaaatctcgacgggaataaaagcttttttgcacagtaacaggtggatttccgaggccttttttcaaaagttcaggatcgctgtcttccatccagtagctcagcgccactcccaaatcagcaagcgggtctccaacggttgtcatttcccagtcaaataatcctacaattttatttccatccggtgaaaataacgtattgttaagcttataatcatagtgaataatggtcgaatgctgtgaagtggggatgtgtgtggtcaaccatttttttagggcttctacttccggtatgtcacttgtttttgatttttcatagcgatgaatccagccgtgtacctgacgttctaaaaatccttcgggcttgctgattttttcaagaagcgtgcctttataaggaacatcatgaagttgagcaaggacatccaccatttgttctgaaatacaacggcaaagttcgctagttcctttcacgtcttctggaaacgctgtgtcgatgagaacaccgtgcttcctctccattaaaaaaaaggatttcccgactaccgtctcatcttcacaaaacacatacggcctaggagcgagagggaaagacttcgataaaacagataaaatcttgtattctctttgcatgtcatgcgcttttggcgcaactggcccaaagggagggcgtctcaacaccgcctcccactctccgactgaaagagcgtaggttaaattggacgcacctgatccaaattgcttgattaaaagaggctctttaggtaaatcaggaatcgaaacacggagaaactgatgcagtttttcggtgtttaattcctctccttttcgtacaggaatgatttgtgacattcttttaccacctgcttttttatagttaaacagctactttataattcatcaaaaactgcttaatgtccgctggaatagacacgcttttttgtgcatcaaaatcaaagtacacgatgacagcttctcctttagcaatcagcgatcccgtcttgctgtcggtaatttcatgtccaattgtaaagcttttattgccgacattagatacaaaggttttaatcattagcacttgattaaaataaccttgcgcaacaaaatcacatttagtagacgctaaaatatactcccacttttttgtatgcatagatgctcccatttcttcaaaaaaagcaatacgggcctcttctaaataaatgaaatagctcgtattgttaatgtgaccgagtgcgtctgtttcgcaaaagcgcactttgacctgtgtttcatacatgatcttctcctcctttacttatgtgaaaaaacagcgggacgcttttcaataaatgctgatactccttctttaatatcttctgtttgaaagacttcttcaaacagctctgcctcaagttcaagaccttcagataatgtacgattcattccttcgtttaccgctgtcttaattcgagaaagtgacggaagagagtgacggttaaatttcttagccagctcttttgctttttcgagcccttttcctttaggcgttatatggttggcaaagcctgcgtgaagcgcttcttctgcagaaacaggactgccggcaaacatccactctttagctttagaaacgccgattacgcgtggaagacgttgagttccgccgcctccaggaaacaatccgagcttcacttcaggaagaccgatttgagcatgttcttcggcaatgcgtatatcagcggttagtgaaagttcgcatcctcctccaaacgttaaaccgtttaacacgacaattgttggtttttcaatgttttcaagcttttgcaaaacacgatgggttttcataaactcttctttaatgccgctttgccccattaactgaggaaactctttaatatcagctccagccataaacgcccggtcgcccgctcctgttaaaatgattgtaattacatcaggatctttactaagctcttcatacgtttcttcaagctgctgcacaacagtctggctcattacatttaaaggcgggttatcaatggttacaattgccgttttctcctctttttcaacacgtataaattttttcatcattacttcactccttgtgtgtggtatgtgtaaaaaccttttcctgttttacgtccaagctcgcctttttgaactttttcttcaatacacgcagctggcttgtcctctggatcccctgtttcgctatagcgctgctgcatcacaaaatatccgacgtcaattcccgagagatccatcaattcaaaaggaccgatcgggtgattgagcgcttttttgcaaatcgtatcaatgtcttcaaaatctgcgtatccattttcataaaggaaaacggcttctttttgcaacgctcctaaaattcgattagcaataaaacctgagatttctttttttagaagaactgctgtgcgattaatttgcttgcaaacttccattgtcgtttgagctgttttttcacttgtcttttcactcatcacaacttctacgcagtccattacaaggggagggaaaaagaaatgcatgttaacgatttgctctggacggtttgttgcacttgcaataagcgagttaacaattgttgaactattcgatactaaaatggcgtgacttggtgcgtactcatctatttctttaaaaacactttgttttacatctaacttttctgccacagcttcaattacaaaatcagcacgtgaaaccgcttcctttaatgtgtttgtaaaagacaatcttcgaaatgcggcttctttagcctcagaagagatttttcctttatgaacccacttgcctataattgcttccagcttgttttttgcatcaatgagtgattgttcattcatatcttgaataattgtttcatatcctccgagtgcacaaagcataccgatttgatgtcccatttgtcctgctccaataacagcaatacgctgtatatctttactattcatgttatagcctccttttgatataaaaggagagaaagagcttatactttcccgccttttacgagcactgtctagcctagcagctactatgactcaatacctttcatcagcatcttataaaaaatagccgcaacttctcgatctgtcttttcaccatccggctgaaaccaaaaataactccaatttgtcattcctaatatgcctagcgtcacgatatctgaaggcaaatctgaatggaactgccctgcttccattcctttttcaataatttcctgtacgttttctttaaaacgatcgcgctttggaatgatttgttctaagtgttcttcactcaaatgacgcatctctcgaaaaaacactttagctcgaaggccttctttttcaatatcatgaacaagtttaaaaataatgctgtgcagcttttctggataagatgttgtcttatctgcaagaatcgtctcttggttttctattaatctttcaatatattgaaggtgaatatccattaaaagctcttgtttgcttttaaaataataataaaacgttccctttgtgacgtttaattcatttacaatatcttgaatagacgtttctttgaaacctttttgagcaaaaagctgaatgcttcgttccatcatcaaatctttcatcgtcaaaccctctctgtcttttctcattttcacaaattataccatggcttagagggagcttttgaaaaagtttgtttatgttcagcttatttacatcgtttctttcaccacttcttctcgtagtgcccgtcgcaaaatttttcctacattggtcttaggaagctcagggcgaaactcaaagattcgcggaattttgtaagctgcaaggtgatgtcgacaataagaagtaagctcttcttcagaaagagatttcccttctttcactaccaaaatcgctttaattgtttctcctctgtaaggatgcggcacgccaattacaacggcttctttaatgtggctgtgttcatataaaacttcttcaatatctcgagggtacacattaaaaccactcgcaataatcatatcttttttgcgatcaacaatggataaatacccgtcttcatctatctgtccaatatctcctgtgtacagccagccgtttctaagcgcgtgagccgtctcttcaggttgattccaatagcccttcataacttgagggcctttaattactatttctccaagctctcctcttggcagttcttttgttccggtagccacgtctacaattttataagcagtttggggaacgccaagtccgactgtacctggctttctctcccaaaacggcaggttgcaatgcgtcacgggagatgcttctgataagccgtacccttctaacactttagcgcccgtttttcgttcgaactctttcatcagctcaacaggcatcggcgcactgccgctgttgcagatgcgaatactttcgatgttgtattcttctgcccgcggatgattggtaatagcaacatacatagttggcacgccaggaaaaatactaggctgctctttttttattgtatttagtacttcttccaaatcaaaacgcggcaatagcaatatttcatttccgcaaagaatcgataaatgcatacaggaagtcatgccaaatacgtgaaacaatggaataacggttaagcatttttcttttcctaattcaatatcatgcttaaatatttcgtatgattgaactgcgtttgtgtaaatgtttgtatgtgtaagcatcgcacctttagatggtccggtcgttcctcccgtatactgaagaacagcaatatcgtgtgctggatggatgaccggctgattaaattcatgttttatggttaaaaaatctaggaaggaaaggtctggtgatgtaggaacaaaaggtttttgcaagctgacagttatcgcttcttctatatcaacgcggtttcttatcacttgaagcctcgtataaaaatcatcgagcagaattattttttttgccccggaatcgtttaaaatatgctctagctcttgttcgacaagcatagggttgacctgagtaacaatgccgcccgctgctacaatgccgaaatagcttattatatattgcggacagtttggcagcataattgctacacgatctcctttttcaattccttttttctgtagtgctcctgcaaatacgcgaactgagtgatacagcgcctggtacgttaacgtatgctgatacatgcgtgttgccgtgtgagcaggataacgttcggctgtttctttcagcatatcaaatagtgaaatatcttcgatgtgaatgtcatgagtgtaggcttctggataaggtgtaaaccattttttaacgtcttccatcaagttactcctttcttattcacatagcatgaactccaccgtctactgtcagaatatctcccgtaatataattagacgccgcagaagcaagaaaaacagccgctccttttaaatcagcttcggagccaaagcgttttaaagggatttgacctagaaaataatctttgccttgttccataatcgcacctgacattttagtagggaaaaatcccggcgcaatcgcattaacttgaatattatgctgtccccatttgacagctaaatctttcgtaaacgtaatgaccgctcctttactcgtgttgtacccgattgtatccatgtactgaggatctgttcctccaagaccggcaattgaagcaatgttaataatcttgccagctttttgtttaatcatttgtttcccagcttcttgggacattaaaaacgttcctgtaacattaatattcatcactttttgccatgcttcaagaggcatgtcttcaaccggagcaccccacgtagctccgctgttattaattaaaatatcaatacgttcaaatgtttcaatcgtttgatgcacgacatttttaatatcttcaggctgactgatgtcgcatgctaaagcgagggtttttacgcccatggtggccaatcgatcggccacttgctgacatgcttctttttttctcgaacataggacaatatttgctcctgcctctgccagcccttcggccatttgttctcctaatcctctgcctccgccggtaataatagctgttttcccagttaaatcaaacaaatcatttatgtgcataggtttcctccttttcttgatagggttttaattcaagtcttgcaagctgtgctttgtgcacttcgtctggaccatcagcgaggcgaagagtgcgggcattcgcccaaagtgccgcaagcggcgtgtcttctgaaacacctgctgctccaaatgcttgaatagcgcgatcaatgacttttaaagccatagcaggagccattactttaatcatagcaatttctttccgcgcttttttatttccaactgtgtccatcatataagcagcttttaatgttaataagcgagcttgctcaatttcaatacgcgactctgccacccattcttggatagccccttgctgggaaagcaacttattaaacgtagaacgactttgaatacgcttacataattcttcaagcgctctttccgctgctcctattaaacgcatgcagtgatgaatacgtccaggccccaatctgccttgagcgatagcaaatccttttccttcacctaaaagcatattggacgctggcacacgcacattatcataatgaatttcagcatgtccatgaggagcgtgatcgtatccaaagactggcagcattcgttcaattttaactccaggagtatttaatggaactaaaatcatagactgctgttcatatttagatgcggtaaaatcgctttttcccatgacaatagcaattttgcagcgaggatctcccgcacctgaagaccaccattttcttccgttgattacatattcatcgccttctcttacaatactgcactgaatgtttgtggcatcagaagaacctacatccggttctgtcatagaaaagcaggagcgaatgtctccatttaacagcggctttagccatttttctttttgttcgggcgttccgtatcgaaccagtacttccatattgccggtgtcaggagctccgcagttaaaagcttctggtccaataatagaacggcccataatttcgcaaaggggggcatattcgacatttgttagacccgctccgtattcgctttctggcaaaaataagttccataatccagcttgctttgctttttcttttaactcttccatgatcggaggaacagctgaccatctagatggctgttcattcagctgttgttcgtatagccgttcatttgggtaaatatgctcttccataaaagaggtcaattctttttgcagcttcactactttgtcagagtaagaaaaatacacggtagtccctcactttcatttacttactaaccggttggtatgttacatattcatcataaatgaaggggaataattcagcaagatatttttagaaaaattctaaatattatattatttaaaaataaaaaaagagaggttttaacctctctttttacgcggatgtcatttcctcaaatactgctgataccttttcaaactcatcatcatcttcaattgaagaccattccccgtcatcttcaattttcaaaaagaaaacatcaatttcttcttctgtttcaattaaaacttcttccacaaacgcaacagcaatataatcgtgcccttcaatcgtcatttttccaagtacttcaatatcttgctcttgatcattttcatctaaaattgtaaaaatctctcccatttcaatgcgttccatcttattccctcctattttaacctcattattcgttcactaacatgtattcccctttagaaaaggtttcatgcttataaaagtagaatctactttttaaaaggcaaaagaatgtctacagtagttccttttccaagttcacttacaaagttaatttctcctctatgttctcgaatgatcttatagcacaccatcagtccaagccccgttcctttctctttggtactataaaaaggttttcctaaatgctgcattctttcctgcgtgatacctggcccctcgtcgctaaaccggacaacaaggttctcctgattaaacctttttagttgaatcgttacggttcctccacttggcatagattcgactgcatttttaaatatattgctaaatacctgtttcaactgattttcttcgcataatacgagaggaagatgaagatcaatttctttttttacgtgaattttctctgtaatcccctgcacctcagctagctttaaagtattctctaaaatatcttggacatgtttgtctttgtaggttttcgcctgaggctttgcaagactcaagaactcatcggtaatcaattcaattctatctaactcatgatttatcatttctacatagtaaggctgaccgctcgtttcttttaataactgcataaatccttttaccgccgtcagagggtttcgaatttcgtgagctataccagccgctaactgtccgactaaggaaagctgagcggattcacgcagcaatttttcagtttttttacgttctgtaatatcacgaaacaaaacttgaatggcctgctttcccatatagggaataggaaaggcaatggtttcggcatcaatcgtatgaccgtctttatgaataaacttttcttcctgtaggtctacagatttattttctgttttcattcgataaattcgctgttttaccacatcatagtaatcagggtgaacaaactgataaacacaagctcctaatacgtcttgaggacttttgtatcctagcgctttggctcctgcagggttgatgtaatcaattttcccttcactatggacgataatcgcttccggcgataactcaatcaagcttcggtagcgttcttcgctttcttttaaagccgtttcagcctgcttgcgtgatgttatatctcgatagacaaaagcaatgcatagcggccaatcattcatattttcaacgcggaagagtgtgacgcttacattaattaaatgaccgtctttatgctgtctgaccgtctcaaattccgttttcgattcacctgattgaatggtcttatgaagttcgcacactggctcctttaaaaacgaaggtataatcggaagaggcttttgataaatttcttcaaacgtccagccaaatgtattctcaaacgcagggttcacttgaagcgttttatcttctaagtcaacgacagcaacagcatcggcgttatgataaataaaaggctgaatctgttcttttttctcctgataactagttatattcacgcaatgtcccataatttcaggcttttctgtgtaagataaaggggttaagtttactacatagcgtttatcatttatttgaagctcgtacataagctttttctttttatttagtgcttcgaaaaaatgctcatacgagacccattcttctagaggtattttttgctcatgaacgctttcaccttgatacatactgtaaacaagatggtcatctttttgtttgtaagcaaatacgattcctagcgcctcagctgaatgattttctgcatgtaatcggactatttttttattttcgttcatcgttcatatttacctacccctcactaacatctttcctactcgttctcattctcttaattttacatgaggattttagaatttactagataaagaagccgatattttccattcactcacgcaaaaaaagcgcctgtataggcgctttctttataggaatatgaattattttggatgatgtgttttatgacagtgacgcttcgggataaaaccattttgttccatatgctgatagcgattttccatatgtgaagaaatgttttgactctccgttttgcttagcacgccgtactcgacatattttgaaagtatttctttctttttttcgagcatttctttgtacagcacggacagttcctgcttttgctgagacgtcagctgcacgtcttttgtttctggctgaggattgttttccgctaatacaggcgtcgcgctcataaataaaaaagctgctgctgcacttatcataatctttcgcaaacaatctacttcctttcatcatatagtagctatagtttgcgaacttctatttgttttcattcattctatttgcttaagactcgatagctcctcttacatcatagtcgctaagatcaatttccatttccatttcaagtgctaatttagcaagctctgaaccaagataagggcccgacgttaagcctgaagctccgagaccattcgctactagtattccttcgtaagccggaagagccccaatgactggcaagaagcctggagtaaatggtcgaaaccctacccttgtttctaagactgtgctttctgttaagccgggagcaattgataaggcctttgaaaaaatctcatgaagccccccagcagttactctcaagtcataacccgtgtcgttttcatgtgttgctccaatgacaatttgaccttgttcaaatgaaagaacatattggtcgcttggaggcatcacaacgggccagtcttttgtatctaaatcagggagatgcaagtggacaatttgcgctttttgaaagcttgctaaaaatttcactccaagaggctctagtaattgatttgcccacgctcctgctgttacgattgttgtacttgctagaagggtttgtccatttacggaaacgcccgttacttgattattttcataaagtagttctgcgtttccttctattatttttgcaccgtttttcttcgctgcattcacaagtgcgtttcgaagtgctcttccgttaacgcgagcggctccactaatatgaactgaactgtattcttccgaaagaaccggaaacaaagcctgtgtttctttagcggataaacgtgtaatctcgcctatttcaggagcttcttcccgacgcttatatgctctttcttccatttttgcaagcttttgttcatcagtatgtaagctaattgctcctactcgcttatatcccgtatccgtttctccatcttcttctaattgctgaattaatgtttgatagtacttggcgcccccttttgctaagcggtaccatgctttatttcgacgctgcgaaagccatggacaaacaattcctgctgctgcatcagtagcttgaccagcatccttgcgatctatcaatgtcacatctgctcctgcttttgctaaatgatatgctgtagaagctccaagtatcccagctccaactacgatgtatgttttcataccaaaacacccttttctttcttctaatattctcatgctatatgtacgcaattttagcatagcaaaaaaagaagtcacatactaggcgaagctattttgagcttatttttgagtcttgctgactttgacatatagctcctttcattgtaaacaaaagcgcaataagttcttttacggagattctggtgagatgaagcaaaccacaaatagtgatcgcgcatatttaacactgcgcttaccgcttttttattatggtttctgaataaaaaaatgaaagaataaaaccactataatatgtaaataaaaagaaatagccattattttaaggagagcgtatgcaatcttcatttgtattatttttcatcattcttggtttactatttggcaagtggcgaaggtatcaagaatactatcctactttgctgttttgggtcacggggaatttgctttatgaagtgctgctgtttcatcaccgcgtatgggtatttcaccctgttggtattgatcacctttttctacccgatcacctaatggtttcccttggaataaccttaattatttatccgtttgttataccggtttttttaggaaggctgccgctgcatgtaagcggccggctgtggtggattcttttgtgggcgcttttatttactgtgattgagttcattgcttatgttaatcacagtatcactcatcattatggatggtcgctgctgtgttcttttctcttcaatattgtcacgttctcacttttagtcattcatcagaagacagcactggctgcttggattctatctggaagcttcatagctttcttatttattttttttgatattcctatgccttaacttttcattgactagacggaggaaaaggaaatataataggaattacatttaaatataattttcctctctgagaatagaggtgcatgaaatcaagagtcacttattggagactaatggagtctgtgaagataagtaaaagggatttcgtgccgaagtatataaacatccattgtgttcatatactggttcagtattgaataaatgctgagctgtcacaaaccatttggtttgtggagagctattgaagagatgttgatgcctagaatgtaataatactttattattatgaaaccaagacgcgtgaacatcacttcacgggtcttttttgtgtttttctactgaccatcaaagttcaaagttatagttgaatgatttaaatggagggatacggattatgtacttacatggaacgagtaaaattaacagcagcaatcatttagaaattgggcagtgcgatacggtcgaactgaaaaaacaatacggcactcccctatacatctacgatcaagaattaattgagacgaaatgcaaggccttccattcagcctttcgaagaagcagattttcatatcaaatcgcctatgcagggaaagcatttctttgtatggaaatggctagccttttaacgaagcttgatatgtccctagatgtggtctcaggaggcgaattatttacagcgcttgaagctggatatccagctgaacgcattcattttcacggaaataataaaacgattgaagaaatggaaatggctcttgatgcgaatattggctgttttgttgttgataactttaccgaacttgaagttttgcatgccttagcagctgagcgcaaacagaaagcagctattcttctgcgtgttactccagggattgaagcccatacacatgagtatattatgaccggacaggaagactccaagtttggatttggtctttccaatgaccaagctatgaaagcggtaagttctgcgttagaaaagccttactacgatcttttaggcattcattgtcatattggttcgcaaatttttgaagtagatggtttttctcgcgccattgatattttaactgatttcttattcagtattcgtgataaaatggaatttgaagtaaaagttttaaacgtaggtggtggttttggtattcgttataccgaaagcgactctcctcttccagttgagtattatgtagacgcactgacagaaaagctaagccgcacgttaactgaacagaattatacccttccggaagtctggattgagcctggaagaagcatcgtaggagaagcaggtacaacgctttatacaattggctcaacgaaggagattccaggtgtacgcaaatacgtaggaattgacggcggtatgaccgataatatccgtcctgctctttacgatgcaaaacatgaagctgtcttggctaatagagtcacggataaaaaagatgaaacagtatcaattgcgggtaaatgctgtgaatcaggagatatgcttatttgggatattgatttaccgcgcgttaatcaaggagatttattagcagtgtcctctacaggtgcctacaactattcaatggctagcaattacaaccgtattccgcgccctgctgttgtatttgtaaaaaatggagaagctcgtcttgctgtagagcgagaaacatacgaagatttggtgcgtaaagatgtaaagccagtcgttactacgtatgcaatgagcaaatgatagctgttcttgcgtagtaaagaagctattgttgtttggaggaaatctaactatggttttaagtgtatttaaaacgtacagatcatcgcttattctgcttctcgctattttaattggcgggatagcaggatatgctattggacccgatgtggcagtcgtgcagccttttggtgatttgtttcttaatttgatgttcatgattatcgttcctctcgtcttttttagtgtggcttcggcgattgcaaacatgaacgaaatgaaacgtcttggtaaaattatgctaggtattgccgttgtgtttgtcgccactgctgctgtttcagccgttttaggctttttaggggcatcactttacaatccgctacataatgtagatacttctgccattaaagaattgatgggtgacagtgaaaatacagctgaaaaaatgacgcttttaaatcagcttgttagcacatttactgtacctgattttgttcagttattttcgaaagagcatattttacaattaattgtctttgccgttattttcggtattgctaccacaatggccggtgaaaaaggacagcctatggcgaaatttctgacttcgggtcaagaagtatcgatgaaggttgttaaaattgtgatgtactatgctccaattggtttaggatgctattttgctactgtagtaggagaacttggaccaaagatcttacaagggtacgctagagcatttattctttatttattaattgcaatcgtttactatttcggtttctttactctatacgcatggattgctggcggtaaagcaggaattaagctgttttggaaaaatgcagctgctccttctatcaccgctattgctacctgttcttctgctgcatctattccggtcaatttagatgcaacaaagaaaatgggtgtgccgctggatattgctgaaacggtgattccattaggagcaaacacacataaagatggttctgttatcggtggtattctaaagattgttttcttattcagtttgtttggcaaagatatgacgtctgctacgagtattttgagcattttaggcgtagcctttttagttggagccgtaatgggagcaatccctggaggcggtatgattggcgaaatgttaatcattacaatttatggattttcgccagaagttctgcccattattgcggtcatttccacaattattgacgcccctgctacgcttttaaacagtacgggaaatacagtaacagcgatgcttgttacaaggtttacagaaggaaaagactggattaacaaaattatcaccaccgataaagtcgcttagtaaaaaagcaaagggaacagtcttagggactctccctttgcttttttcgtgtgtagtaatatcgatagcggtgtataaagtctgtaaatacgcacattctataggtatgtttcataaccggactggaggtgtcgtctaatgagtaacgctgcaggaggttcaaagaagaatcaaccgaatgatgcgaatcacgtaagcgcagaaacaaaagctcatcaaaaacgtctcactgagcaaaacaaacaagagcatcaagctgaagaacgaaaataaaattacgtcaaagagcgtttggcacaggccctgcgttctttgacgtaattttatttttagagggagcttcattacgccgctcgttataggtctatcgtacaaccttcttttaaacttttacatattctattaataggtttgtaaaaggaggaatgacatggtgttttcttggctagagattacagccgtagcctttggactttcagttattttgataagttttgcatttttgcccgaacgaacatgcaaaaatctttatatccctcatcagctagtagcaaaatctatgtttctctataaaaaaattattcgttttataaatcaatttcgacagaaactttagttcatttcctttcccttcccttccctgtttttattcattggatatatcctccccctttttaatcagcacatttacagtaaataatttaatggttaaaataaagagtaaagaaaaaggataagcagtttgcagaaatggagtttcacatggaaatcagagacttagaatactttatagaggtagcgaatcataaaaattttacaaaggcagcgctgcaagttcatttgtcacaaacggctttaagtaaagccgtcaaaaaagtagaaaatgaactaggatttgagcttcttgatcgttcaacaagagaattaaagctaaccgatgcaggagaagtcgtgtatcatcaggcaactaaagctctgtcggtgttaaaagacatgcctcacttgttgggagatttaatgaacttgcaaacagggcaaatcaagatgggagtccctccgctcatcgggaccttgtttttcccgaagattgcaaaagcatttaatgaacaataccctaaagtatctctagagcttattgaatttggagcaaaaaaaattgaagcacttgtggaagaggctggtatagatatggggattgttatgcttcctctcacaagcggtcatgatgaacattttcacgtatacccgttcgttaaggagagattccttttatacgcgcataaaaaccatcctttagcgaaacgttcttccgtctggatgaaagaattggagcatgaaaaattcattatgttcagtgaagaatttacgctgcacgaccggttaattcaagatgctttaaaatcaggctttgttccttctatagcgtataaaagttctcaatgggatttaattattgaattaacagcggcagaactaggtattgctattttacccgaatcgctttatgccaaagtgaaagatcccaatattactaccatacctattgcagatcatgaaatgatgtgggaacttggaattattctgttaaaagaacgctacagttcattcgctgtacgagaattgattaattttttaaccgaaaaacaaatgacagataaattggggcctatttaaaaagagtctggaacaaaagtatgttagttgaaggacaatccgaacaagtttggttgagaatccaactcgttcggttttttttagggtgatgatgaacgtaggtttcatgtatgtatttgcttctagctgttgattaaatggatttagttatgtctccgtctctttttatgtgtaatacaaattttatcattcaacaatccctacaatgaatccatcatagcctttgcttccaaccgtttgtatagccgtagcgctgattcgtttttcttgagccagagcattcataaattgacgaattccctttacattttcatcttcactttctgagttcaccacatgcccttgacgaacaacattatcacaaataatcgtacttcctcttttcgataattctagagcccactttaagtaatttgggttattcggcttatcagcgtcaataaagataaggtcaaacggctctgttcccctatcctttaacacagctaatgtatcaagcccggggccgacaatgacttctactaagtggcttactcccgctctttttaaattagctcttgctacttctgcatgttgagcgcttaattcgagcgtaatcagctgtccgtctttcggaagagctctggctagccaaatcgtactgtaccctccaagagtaccaatttccaaaatgcgtttagctccttttaatgaagctaacaaatgcagaaactttccttgactaggcgatacgtcgatggcaggtaatccagcctcttgattcgccttcaatacctcatcaagaatagggtcaggttgtataagcttatcattcatataaagatccacttcattccaaatttcatatatagacattttcatactcctccacataagtaataaaagctttattatttcaaagatacaaatatgtttttcctatatccagattgttgccgtaatggttcgtattatgaatgtgttctagctctctaataaactatcctgctcgctcttaaaaagaattattatatgtccataaaaaaagaccttcagagaggtcttttttatctttagataatcgtaactttactaagatctatcttggcactttttaaaaagttatatgtcagtttatccatttttgcaccttcaaaatccgatttctttaaatctgatcctcgaaactgtacatttagcaaagttgcgcggcgaaatgaggctttttttaatgatgttccttcaaaaattgttccgttaaatgtttcttcgtcaaatacaatgtctgttaaattacattgcttaaagtacgtgttgtcatagatacagcctttaaaactggcctgtttaaaatttgcccatttaaattgtacgcctgttaaattaacgtgatgaaatattgctttcgttaaattgctgcttttaaacatgctgtctgtaagatctgcgtagctaaaatcagattcattcaaattactggcattaaatttccctttatacaccgatacagaacgaaaatcagattttgtaagctcggtctttgaaaaatccatagggacggtttgctttaattcctttgtttctacattcattgattgaatcagttctgtgatatcaccgatagaattgattgtcatataataagcctgttcttcattatgcccgtcttttttgtaatctgtaaatttttcctgcaagttctgtgatagttcttcttctagatcttgaacattttctacatcctgataaggagccaaaatgttatgcacatgattttttattttttcgttcatttataacatcgtcctttcttacaacaataaatcaataatttttttcgcttgctcccaattttctttgttttgtttatatacgctttttccttgttctgtaattttataatattttctgcgaccgccttgtacagcatctccccagtaagaaagaatatggccttctttttccaggcgcttcaagcttgaatacattgtggcttcttttaattcatactgctctttagagtaggtataaataagcttactaatttcataaccatacttatcgccgctgagaagtaatttcaaaatcattgtatctgtatgtccccgaagtaaatctgaagacatttttgcatataccaaagtatcacctctttatgtataatttaaatcatattactatgacagtcaaggtattatattgagtaaaataaactaatatataattggacatatgtaaacagcttaaccagtagaaaatagtcggtagaaacgtaccggctattttctaagagacaccttattcttcgttatagctgagcttaaatactatcggcgtactttctgctgatattttccaaaccatgtgatgataccccttgctccagtaatcttttactaaataatcggggattccaaatatgtttttccatacttcctgagcatttttgtatccgctgtccaaacaaatttttttaatttctctgctttgaagtgtaagcagcatagtatgtaaaagcagtgtccctacaccttttctctggtacttcggatgaacaaaaactgtgccgatttcaatccatccttgcagatctccttttgtacacgccgtaattaattcactagcaggaccatattcaatacagccaataatcttattggtgcacgcatctattccgagccaaaagaatcgatgttttccatcgctatcaaggtcactttttaaatattgttctttactttcaatttctatttgtatatcgttcaccatgtcagatagaccctctttctgaaaggtatctgtgattacttcattaaaaagctcatgaagttctgcacggtcttctatttttggtcttcttatttcaatatgatgcaatgttcattcctccttgttatttcatctccgaatatgaagctttaccactattatttatccatatatgttgataatccttttctctttctacagtttttccaataaaaaagcacgagaaactttgagttctcgtgcttttttataatatagattctacttttctattgggaactgttaatactgattcacaaagctctggattttacatacgaattcagaaagattctcctttatctctttatcctctgttttctctacttgctcctgtatggcatcaatcattaaacgcgctcttttaggatctatagaggccggctggctgctattgtttgatagacttttcaaaatttgattagtcattttgtttttatcatgaatataaaataatatttgaggaacttgattaattaacaaatttacgtatctgcgaaactcctctatctcatataattctcttgaattgcctttaaagccatcaacggaaagcataagactctggtagcctttatcagtgcgttgattaagtgctttaatcactttcaaaaaccgatcgaactttagatagcgtatttcgtctttccttaattctaagaattcaatttctcctttttccaaaaagggatccttgataagactattatcattcatatacattctctccctactaatttattagttgcagagcttgttttgaattcatttgtctatcgttttagtaattgtttaccccttttaggcccattttaaaacctttatttgtaaatcgtttacataaatgttctcaatttcctgacgtgttgacggaattctgcttattatctgataaatgacgaatgaaaaagagctcctttacagaagctcttttttaaaaattataggggtgctgataactttatatcttatttgcttctttcaatactgctaataagtattcccatgtcttaatagtagacggaatgctcaggtgttcatcaggtgtatgaacgtcgtacatatcgggtccgagcgaaatagcgtctaatccagggattttttctaggaaaataccgcattcaattccagcatggatggcgatgatctccgcctcttccccatatttttctttgtaaacctttttacataattcacgaatttttgaatctccattgtacgcccattcaggataattaccttttgtttcaactcttcctccgactacctgagcaagtatgtgcacttgacttactattttttcttttaagctttttactgagctgcgaatttcattttgaaaaacaacctcagactctgtcgtcgtaatcacacctaagttggtagaagattctactaatccttcaatattcatactcatgctttgaacgccgtttggtgttagcataatagctcgtacaattcgttctgtcgtttcttttgtaaaacatttttcaacggaagaagatttgtttatttttacatatacgcttggatcagccgcttgtaattcattttttactatttcgttccactcacgaatcttattttctagctttcctacctcagaaggctcaactgatagaattgcttctgattcacggggaatcgcatttgattttaatcctccactaatgctgcttaaagaatagggaagttcttgttgtaaatcatataaaactctccctagcagtttattagcatttcctctttctttatcaatttccattccagaatgtccgccgcgcaatccaccgatgcttaagctatatgtttctgagttattggaaagcgattccaagtttacgggaatacgaagcacgccttttaccccgcccgcgctgctgacaagcagctttccgtcctcttctgtatcaaggttaataaagatttttccttcaaaatgagctggatttacagcaatggctccgcccatagttgtttcttcctcagtagtaatgactacttcaagagaggggtgatctatatcatgagcatctagtaaagccagtgcatatgcaacggcaatcccgttgtcagctcctagcgtagtaccatttgcgtaaagcatctcttccacaattcgcagttgaagcggatctttttcgaaatcatggacagttcctttatttaactcgcataccatgtccatatgcccttgcaaaatgatggctggggcatgttcatatcctttagttgccggctttttaataattacatttaaagcctcgtcttgtataacttcaaggcttctttcttttgcaaaagaaactaaatagtcactaattttcttttcatttccagattctctaggaataactgaaatttcgttaaaaaaataaaaaaccggatgtttaattaattcatttactgtttgcaccatatgtatcatcctttctaatctgtaggcttttttatcatactatttctctttacaggagaaatagtatcaggcttcttttatgtatagcctagttatattttaacgttgattagctcgatagaatagatataacataaaaaagcataaaggagaccattagactcctttatgcttttaatgacttattctattttttattgagctgtatatccgccgtccattactaccgcttgaccagttacaccttttgctttatcactcgctaagaaaatagcatagtcagcaatttcgctcacgtctagtaatcttttttgagggactaaaggataaataacttcttcaagcacgctctctaatggtacatttcttgttttagctaaaccatctaactgacctctcactagtggtgtatccacatagccaggacaaagtgcattcaccgtaataccgtgtgctgcgccttcaagagcagctacttttgttagcccaattacaccgtgtttagcactgttataagctgctttgcccgcaaaaccgattaaaccgttgatagaagaaacgttaataatacgtccgaacccttgttttttcataatcggaaacgcgtgcttaatcgccataaatggagctgttagcataattttaatcattaactcatatttttcagttggaaactcttcgattggagaaacatgctgcaagccagcgttattaatgaacgtatgaaccgctccaaaatgtgcgtttgctgtttcaattaaatgtttgatttcttcttcttttgttacatcggctttgacaccaagcgcttcaaatccagcttcacgaagattttgtgctgcagcttctacagcagcttgatcaatgtcggataacacaatttttccgccgttttctgcgaatcgtttacctatttcaaacccaattcctcttgctgctcctgtgattacaattacttgattttcaaccatgtgtattctccttctgtttttaaataataccggctgccgctaatgcgactcctgcaaataaagcgattgtcgggatgataaatgcaacaacaaatacatctttatacgtttctttatgctgaagaccagttacggctaacagcgttaacaacgcaccgttatgcggtaaaatagctaattacattcatcgagtcctgctcttcactcgctgtgactgatgattcattaggatcggtaaacccttgatttttagcttttaattttttatcgcgataggctaaccataaatatcctcccaccgccataataagacctgagacaatttcaataatcgagccggacattgcattggttttaaatgtagcagtcgggatcagattttgaatttgaggcgtacctggaatcgctgtcattgtaaacgtaaatgctccgagtgcaatggttgctggcagtaaatttcgcgatacgttgacttctcgaaatagcgcgattgctaaaggataaatcgcaaagacaacaacgaatagactcactccgccgtatgtcaaaatggctgaagtaatcagcacccctaaaatggctcttttacttccaaataatttagcaatacgctgcgcctgtatcttccattagctttccaaagacggctcctaataaaaagatggggaaccattttgcagctaaatttacaaaccctcccatatacacatctgtataagtaggcagtacttttaaaccgctaaaataagcaacgaacgtagctacaacaggtgccacccgaataatagaccatcctagataagcaaaaaacatcaacaataacaatcctacaataataatcatacggtaacctcctttcattttaatatctatacataatggattatttcacaacacaacaagtttacacccgttgtttttataagtaaaatgaataaaaggaatcaaaactatgaataaaagtcgtagttcatttaaaaattcaccctcacttatttttttcctataattttactctgagtagaagctataaaatacacttccttcctttttccttgtacaagctaatttttttctgtcatatcccgctttcttcctttattttcttttcttttataagttttcccgaacatatagatgggtatttgaatgttatgacacagaaaaagaggcgatcttatgctacatttcataacagacttactgaaacaatttggaatttggggacttttaagcggactggccattgaggcttcctccctgccgtttcctggttctcttctcacccttacctacggatacttattaaacatgcacatagtgaaattattattaatcgctcttgcaggaagcgccgtttatacagcttttagctttataccgtatgggataggctataaattagaggataaggtaaagaaaaaattatcaaaaaagaaaaaagcatttgagaaatcacaaaaatggtttaaaaaatgcggattatggagtattgcgattgcccgtcctttagggctcggaaactacatttcctacctttcagggctatctaaagtgaaacctatgccgtttgctctgctcacatttcttggtatctttcctttgaatattgccatgctttggttaggacaaatcggaaactttaagtccattcaatcttttatctcagatgcacaaacctatattttaattgcagcggtagtggctgtatgcggatttttaatttataagttctattttaaaaaaagcagctgcagcgaacagtctagttcaacgtaagagtataaaaaaagacccttcggggtctttttttatcaaatagaaataacacctaaaattaatgaagctattgtcatcactgccgtagttcctagcgcccacttaattaaaaagcgttgcaaatcactaaattcaattcctaccattccaattaataagtgagctgctgctaccaagggacttatcacatgaacaggttgtcctaagatagcagctcttccaatttcagctgcgctaatgccatagctttcggcagcttgagcaataatcggcaatacgccaaaataaaaggcattattagacataaaaaatgtaaaaggagcacttaaaaatgctactacaactggcaaaaaagggcccattgcatctgggattattcctacaagtgtatttgccatagcatcaatcatctttgttccagacataattcctgtaaaaatacctgctgcaataacaattgaaacgacggctaccgcattatttgcatgagatgaaattcgctgctgttgatctttgatgtttggataatttattaataatgcaatagcaaacgctatcatgaataaaagcatcagcgacataaagtccataattaagcacaccataagactaacagtaaggaaaaaattaaaccatactaacttaggacgtcgatagtctgactgctgcgctgttccctctaattcatgtgcatgtgcaatttcatttgcagaatgtttaatattgataactcctaacctttttctttcccttcttccaaggacaacagaaacaaacagcacccatagaagcccaaaacccattacaggtattaaaggcaaaaacaactgagacgaatctaaatttaatgaactcatagccatagcagaagcacctccccacggagtcatattcattactcccatagatagcatcgcaactcctgctaggataagcggattcatttctaggcgtttatataatggaagcaaagaagagaccgttatcatataggtagtagttccatcgccatctaaagcaaccatcattgaaagaacagcagttccgacgacgatttttagaggatctccttttacaacctttaaaatgaatgaaacgagaggatcaaacaatcctgaatcaatcattaatccaaaatataaaatagcaaataaaatcataatagctgtaggagcaatatcttttacaccctctagcatcataggtcccattccactagcaaaaccacctattaaaccaaatataattggaataaggataagagcaaccattggggtaagtcgttttgacataattaaatacatgaatactgcaaccattaaaaatcctaataaagaaagcacggatatttttcctccttttttgataacgttttcatttttgtttgctacacgttactaaaaaggtatcacttgttaaagcaggttcatagataaccaccataagtttaatatcttttataaaagtaattcttttcatttttttcatgcatcatttctacataaaaacgagatagcggttctttgtccgctatctcgtttttatgcaaaattagttactcggtatttccgctcaggcctccctacacttccatacactatttccacctgcatttctttacaagatactaaatactctaaataccttctcattgttgaataactgatacctactagttgagcaaactcatctacattcaagctctgctgaacttcgcggactttatctcttactaaacgaagagtatgtttatcaatccccttagggagttctgttactgcagctgctgattgagtgcggcggttatgatgtgttctaaataagtggtctattttgtcctggttaatcattttattttcggttaattctattctcgtagactgataatgttttaaagtagataaaaatttatcaataattacaggtttcaccaaataaccaaatgctcctcctcttattgcttcccctactgtttcaacatcattggctgccgttattaaaataatatcgattcctcgatacttctttctgatttcccatagcagttccactccgttgatatctggtaaaaagacgtctaataaaattaattgcggggtaaatattgttagtaattctaaagcctgttctccagatcctgctgtcgcaacaacagtgaaatgctctagtttcttagtaaactgttcataaatttgtgcagctgtagaatcatcttctataaccatgacattaatttgattttcagtcatatcgattcttccttttcattttcattatttaatagctttgggataactaatgtaaatcttgctccttgtaacatacttttgcttatgtatagttcacctttaagcagctctacagatcttttaacaatagtcaatccaattccgtgattttcaccttttttcgttgtgtaaccatctatgaaaatcatattttctacttcttttgatatcccttgtccattgtcttccacttcaaaaatcaggtcatttcctacatctgtaaaagataccagcacgttccctttatgctctcgcacagcctcgagcgcattatcaattaaattccccaagatagaaacaacgttttttgcgtcttcgatatctaaagtacttgttaagttactatcttggtcaatttctaaagtaacatctaattctttcgaacgattgatttttccaagtaagcatgccgcaatcaaaggatcctttacagaagacattaaaaaagaaataatatcttggcgttcctttacctctgatgaaatcatttgcatgacatgctcatacttctttaactttaacaatccataaatcacgttcagcttatttaaaaattcatgattttgagcacgcaaattatcagaaaacattttaattttagaaatctcttctgtcaattcttcaatttgagataaagttcttatagtaaggacgataccctgcacttctttttttcttacaataggagataaatctaaaatatactgctgaccatctagtacaagggactggttagaatacacccactgcttttctatcgcttgatcaattagccgtcctaaacgggcgttctttatctctcctcctatttgaagatgaccaaatagttctctagcccttctgttcatcgacgttacatatttttcaacatttacagtaacagtagcatctcgaatagattcaagggtagcctccttttctttaaaaagaaaggaaatctcctccggttccagtccaaatattaatctttttacccgccttgcaatgaaaaaagctccaaatgctccaataagaaaaggaatacaggacaatttaataatttttattctataatcattaatctgtttttctatattgcttacaagaaatcctactgacgaaacgcctattacgtttcctcgactatcccatatgggggtcttcgctttaattgcaaatcctgaaattccttttcctttatagataatggattgatgctcctttaaagaagcttcgttgcttgttttggtatgttttccaatatagctactattgggatgagaatagcggattcctttatcattagcgatggtgacgtaatctgccccagtagtttttcttattttttcggcaacaggctggatgtgcttagaaggatttttattcttaaaagcttttacaatcattttgtcttcagaagctaattttgctactgtcatagcttgcttacctacatatttttcaacaacttcatctatcattgcagaaaataaaatgcatacaagaacggtactcacaagaataactaccgtaataagtaatgtaatttgggcaagtaagctaggtctgctattcacattgagaaaacgcatacattcctccttttaatgaaatgaaatttcggctgttgtttcaagtgtagcataaaagcaaaaaagtttagcacccaacttcaaatgtttataaacagacttctaaagggaaaaacaaatcgaataaacgcttgacttaaagtatactttaacaattataatcaattcgaaaacatcgaaaatggaggaatcaacatgaaatatacagtaatcaccggcgcaagttcaggaattggatatgaaacagctttagcttttgcagcacgcggaaaaaatcttatattggctgcacgtagagaggacaagctagaagagttaaaagaaaagattgaagaactgaatcaagatgtaaaggttattgtccaaacggttgatttatccgtggcagaaaatgctcatacgttttatgagtcactcaaagagtatgaattagaaacttggattaacaatgctggatttggaaactttgcttctgtcggcgaacaaaagttaactaaaattgaaacgatgcttcatttaaatattgaagccttaactattctttcatctttatttgtaagagattatgaaaacgttgaaggtacacagcttattaatgtctcttcgggaggcggctataccattgttgctgatgcagtcacttattgcgcaacaaaattctacgttagtgcatttacagaaggtctttctcaagaattaaaaggaagaggtgcaaaaatgcaggctaaagttctagctccagctgctactgaaacagaatttgcacagcgttcgatggatatggatgattttaaatacgaaggacgagtacctaagtttcatacgtcaaaagaaatggctgcttttatgctagatctttatgatagcaataaaacggtaggacttgtagatggagtgacttacgaatttcaattaaaagatcctatctatccatacgcagacagagcgacaagctcagattcttaaacagaaaacacccttgccagggtgtttttcgtttaaatgagtaactatcttgtttacgtaatgaagatacttaaagataatcttttcctatttatttttcggccctttacttcctaatttttgttttgctttttgcacatactaaccgaacggaggtgacgaaaatgggtacaaaaaaatctgctaaccgcggtcaagtagctcctggagttaaccctcaaggacacggaaaagatgttgaattttcaacagaacctaaaagtgaacttgaaaacaaagcgaaaaagtcaaatacaaaaatttaattaacaaggagaagaccactcttctcctctcttcctcttaattacttttccgaaaacgaaactccccagattgttgactcctttctgcttcttatgaaactgcatcaatagtataaaaaagtatactatacaacaaaaatgtgcgtacttgttagaatgatttatatgatttatgataaatctgcaaacggattttatgacaaattgtatgttaacagttcatcactacatattttttacagaaaggttgtttacacatgaacaatacagataaaaaacaagaaattttagacgtatttaactttcgtcatgctacaaaagagtttgatccaacgaagaaaatttccgatgaagatttccaattcattttagaaacagggcgcttatctccaagctcagtaggttatgagccatggaagtttttagtcgttgaaaataaagatttaaaagaaaaattaaaagctgtttcttggggagcacaaggtcaaattcctacagcaagtcattttgttattattctttctcgtacagacgcaagatatgactctgaatatgtgttgaatcttcaaaaaaacgtaaaagaaatgccggatgatgtattagagacattaatgcctcgttataaagatttccaagaaaatgattttcacttgttcgaaagcaagcgagcactatttgattgggctagcaaacaatcttatattgcactagctaatatgatgacatcagctgctcaaattggtattgattcttgtccgattgaaggatttaactatgaccaagtacatgaaattctaaaagaagaaggattactagaagacggtaagtttgatatttccgttatggttgcgttcggctaccgaattcatgaacctaaacgcggaaaaacaagaagaagtatggatcaagttgtacagtgggtaaaataagaaacgaaggggggacattacttcaccccttcgtttttatatttttatatgctgttataaaggcagaaggatcggtttgtatggtataagcgaacatcccttgatttgtatgtaaatataaaaagccgctgtcttttgaaacacatttgtaagaaatgtccaatacgtcattaatgtgaaagcaatcgttttgtgtttcaatactatcagcgtataagcacatgtcttttgaatgctgaatcgtcaccttttgtgttcgttttatttttctttcaacgtatgtataaggaatcatagaaataatgctcatagcaccgctcaaaccccttcctcatgaatgtttttcttttaaaagtcaaaacaacttgttaacaaaactctatcacttaccaaaaaacaattccagaaatactctttctggaattgttttcaagatttctgctctttattttcttcgcctttgcaaaagtcgatattactgtttgtcatagaggcaatagcaggagagccgtttccaaacgaaaaacaagctcctaccgattttgtatttgccgtgtgactattttgtacaacacagcctacgcttacgttcgaattgtcttttaacccgttagtcacgatattctcaatgttaataatacagcccattttaacacctctttcgtttctattaacgtatgtcatctctgcatatatgtataggatgttcgcctattaatgataagttgtttgctacaaaatagaaaaaaggaatcttcgtataccctttaagcagagaagacactaaaatgatgtcttctccttaagtaaatttaactttttacagctttttcccagtctgatgcaaatttttcaattccttgctctgttaacgggtgttttactaattgttcaattacggcatacggaattgtagcaatatgagccccagcaagagctactcgtgtgacgtgatctgggtgtctgactgacgctgctataatttgtgagtcaatgtgttgaattcgaaatagctctgcaattcgagataccagataaacaccgtcttctgaaatatcgtctaagcgtcctaaaaatggcgatacgtatgtggcaccggcacgagctgctagaagcgcttgattcactgtaaaaattaacgttacgtttgtttttacacctttttcagctagataacgggttgcttccaatccagcaatggtcataggaagtttaatcgttatatttttgtctcctccattaatttttataagctcttctgcttgagcaatcatgtcatctgctgttaccgtgtcgggcgtgacttctgctgaaacggattctacttccgggacggtttttaaaatttcttcgatgcgatcttcaaactttacgccttctttagctactagcgaagggtttgtggtaacacctgacaataccccaattttatatgcttttttaatatcttctaggttagctgtatcaataaaaaatttcatcatgtattcctccactcgttatggtaaaaacagcttttcaggggcttttttgcatgactttatgttcaaatggaattgccctcttcatattgtcttcataaaataaaatttatttcctttcaaatgctgtatgtttttctccaagttttcccttccttaaattcatcggaataacttttatttgcatgtatcatactaatggtgttgaaaaacccctcatctactccactaaaaaaccttcagcatttatgctgaaggttgagatacattctattcttaattttttagtcctctatagcgagctgtttttaattcttgaacgtagggttcaaagtccggcatctctacagctctcgccaattcgatagccttttcaatatcgtatggaatacgtacaaattgaatagaaaatgctgaaggactttcgtcttgatcctttccttctaagataagataggaagcttgtggtaaatcaagcgggtttcctacacttcctacattacatagcgttttccctttaatatgttgaataaatgcattatgtacatctccgtaacagataacatccggctctcttgatccttttatattttccgtatattccgtattagcaaatagactaaggcgcttttcaagtgaatcccagggttgaattcggtcataaagacttctaggtgaagcgtgaaacattctaattaattttccgctcatcataaactcaacagaaaaaggaagttcctttaagtatgcctcttgggctgaacttaacttcttctgatgccatttcaacgcttcaaattccgcaggctttgtaatgaagtcatcccagtttcccattactgttacttcgcacttttcttttatgatatcaatcgttttacttgaatccggtccttttcctactaagtcacctagacaaatgatgcgatggatatctcgttgttgtatgtcagctaaaactgcttctaatgcaggaagatttccgtggatatctgaaataacagcaattttatccattgattcctccactcctttttcatatgtatgtatttaattcttttctttattataacattttataataagaccgtttactaaaacgggtcctcttcatttaacaaacaacggtataattcgaatggacataaaagggaggaataagacgtggatttttatagatcaagaagaagtctgttttccttatttattaacataaaataaaggagtactgtaatatatttatacgagtactcctttattggtagtaaggtagtatagagagtcgtaagatacctcatttatcttgcgacttttggtttataacttattgaacaccgactgcgtcaaatgatttacctactgaaattacttcttgagagcctgaaccgtatagatcagcagcagcttgtactaaacctgcacgcgcttggctaaacgttgtagactgagtgaagtatagcgtattagcacggtaataaatttttcctagcttatctccgccgatgcctgttacagtaaccccgtaatgcgttcctccgttagctagcaagtaggcagctttgttgatgataccgctgtttgtatgaactcctccgttgtcactagaacctgtatagcgctttgaataatgatctggatctccatattttgctgggttgctcattgaacgaagggcatcaccgcttgttccaggcgtataaatatcttctccaatttcccaatctggattgcggttgtcatagtattctaccaatgttccgaaaatatcggaaatcgcttcgtttaatgcacctgattcatattgatagattaaattagaacttctttctgtgaccgcatgcgtcaattcatgtccgataacgtctaatcctcctgataggggaacaaaagtagttccatctccatctccatataccatttgagagccattccaaaacgcattgttgtacccgctgctataatgaacagtcgattttagcggagctcctgcattgtcataggagttgcggttaaatttatttttataataatcatatgtcacgcctgcataatagtgagcatctactgcagctgcatcgcgggttgcattgtacgtattatcggtatctgcccatagtgtacctggaagagatgtacgattttttgcatcgtacgtatagattgtggcccctcttgtattatcttgtaagtagtaagtagaactagataacgttgtctttaaggatttagtatctccaagcactcctttacctgagccaatagcatttgtacctgttacaggtttcgctgccggctttgccgtttgcctcgcatcggcttttggaccagctacggaatcaatcgtattgtacttatctagcactttaccgctaatagcatcaacaaagtaataatagttgcctggttcaggatttaagaaatttagatttactacataagcatatgtagtgtctgaaccattttgataaatatacagttcagatgaaggagatttttcatacgtcggcttaaatcctaagtctttttcagctgcttgaatcgcctttttgctgtcaacttgcttctggccttttagcttttcctttttatctaaatccggagctactgtacctgatacaacttttaaggttccatctttcgctacgtgtgctaattgagtagatccccaaacaggaatattattatatacctgctgcaagcgtacaacggttgcttgttcaacgggatctttcactacttctgtcactttaaatgagttttgagcattttcgtttcctaatttatatttgtctttatttgtattcatatagtgaaatacgacgtcttgagctttctgtgatgatgggcctgaaagttttccagaaataaactcaggagatttaatttctttgttatacttttcggttgaaagtacattatttggcgcggcactgctcgtatgtgcaaaagcaaatgatgaagaaaggataccaactgataataatacctttaaagcctgttttttctttttcatagttttttctccctatccctagtaaatttaatcaccacaatttttctgttaattgtgataatta

SEQ ID NO: 29 - DNA, 57241 bp, Priestia aryabhattai
  source 1..57241: mol_type = genomic DNA
aatcaattcagtaaatctaaatctcttgactatggcctcttttcctatttttatttcaatattttctgaatctttctaccgatgaaggcagctttcgtccgataagattgcctagaaaaatgcatgatttctcacttttttggcatatgatgttatcataaaaagaagaagtatcatcaaaaggaggaaaacaatggttgatacaatcctttattttctattttctttttgctatattgtcctgtttttctttagcatatatgtagtaagaaaaaacacttcgccgttttacatgctttttcttcctttagtaatagctggactaatttacgataatataatgattgggattggttcatttatcggtgaaggcgatactttacgttcactcagcatgcttcgcttttggtttcacgctttatttacccctactttggtgctctttgcgtatggcgtagcgaaatattcgacaattacatgggctaaaaaacctgttgccggcattctttttttgctaaccacgtttgccttaattagctatgaaacaatcgagacgattagtcagcgcatggaagttgtacgtgaatatggcattgttcgctatacattagtgggatcatccggtccccctcttatggttctcattgtggcgattattttgctttttgttggaatttccttatttcgcaagacgcgatggagcagcatgatgattggagtagccgtgatgattgtaggaagtgccgtgtcaattcctataccaagcacagctgtaacaaatacgtttgagcttatttttatcttctctttatttttaactcagcgtcatttagtgaaaatacattaaaaagaagcgattcccttgcttcttttttttatatttgatatcttttacctaacgaccgttagttagattgaggaggagcatttcttgagcgaattatcaactgtagaaaaaattagagctgcagcaatggagctctttggagaaaaaggctatacagaaacatcgcttgctgatatctcatcaaaagtaggcataaaaaaaccttccctgtatgctcattttaagaacaaagacgacttatttttactaaccgtgcatgatttaatgaatttattcctaacaaagttatctgttatatacgaacagcataaaacaaagtctgctaaagaacagcttcactgctttgttgtagatttctgcacgatgattgaaaaagattcttttggccagatgtaccgtcgtcttattttgtttccacctgaacatttgcagtcggaagtaaaagctattttcttaagaagcgaacgattgtctgatcaaattctgcatgctatttttacacagggaatggctgaaagcgaaataattgaacgtccaattgatttgtatatcaatagcttttattgtttaaccgacggactgttcattcagcgcttttattatgaaccagagtattatgaccagaaaatccacgatgcttggacgatattttgggaaggcatacgtgctaaataggccctgtaaaaagggcttattattatgcaaggaggaattaacatggcttggatttaccttattatcgctggtttgcttgagattgtatgggcaattggcttaaaatattcacacggatttactgaagtaactccaacaattattacgatcatcacaattgtcatcagcttttatttcttttcaaatgccttaaaaaaaattgctgtcggaacagcttatgcagtattcactggtataggagctgctggcacagcgatacttggaatgaccgttttagacgaaggaacaaatattggaaagattttatttttaggattaatgatctttggaatcgttggtttaaagttaatttctactgaagaaacagaaggagaggaatcttaacatggcttggattgcattaatagctgccggtttttgtgaagtgggatttgtgatttttttaaaactttcagatgggtttaagcggatgtttccttcgattggatttatccttttcggtgcaggaagtttttatcttctctccttagcattaaaggagatacctattggaacagcttacggcatatggacgggagtaggagctgccggaagcgtacttcttggcatgtttttctttcatgaagcaaaagatatgcgtcgaattttatttattttttgtattgtagcaggtgtaatcggccttaaaatcactggataatgctgtactacttcctttcttttcatgctatactaaacttgtaaacactttcaaaaaataggagacgatgacaatgaaccttgggtttggagaaattgccttaattgtatttgtcgctctattgctttttggcccaaagaaacttccggaattagggaaagctgccggaaaaacgttaaaagagtttaaaaacgctacaaaaggaattatggaagaagacgaaaaagaaaaagctcctcctaaataaggggcttatatctcttttaaaagctgactcaaacgtttgagtcagcttctttgtggtgagaatatactgaaattcgatttcgacccgtacgctttgcttcatacatagattggaatgtagtcccgcgcataaattttaccgttaataaacgtaatttcttcatctactattgaatcttttgaataaacggtgctttctaccgtttttaaaaacctagcaggatctttcaacataggagcgtgagataaaaacagctgattacttttcaatccaacgtattgattaggaggtccgggtatatcaaacatgtcacaaaaagtttgattaataacggctacttcgcgctctggcgtttcaatcatggtacctgtctttgcattttgaaccatcaccgaaatcattttagacagctttttatgctgacttgtcgttactcgagatacatatatatatctacctaccaaatacactagacacccacctataaaagaagcaggcagtaaatagatgataattgtagcagcccgctcgatatctttaaaaagaaaggacaatgagaaaaatacgcaaagcaagctgatagaattcattaattgaaaacgaataaatggacgataaggtaagcgaaccgtccacccagacagtaaagccattacgataattgtagaagcgcttactattccgcttgccgtaattccaaacaaaagcagacgcattacccctataatacaagccgcaatgatagccggtaccattcctgcataaagacaaacaattgtcaccgctaaaaagcgaaggccaagaataatagtagaatctattttaattgtatatatcattaaaatgctgcctaatagtccgtaagaacatccgtaataaattaagcgatacattttgtaccgttttattccttctactctataaatgatttgctctcgaactacactcgcagcaaacatgaaagaaataattaacgtgatattaaagagaagttgactcactttattcttaacctctttccaaaaagctaaaacaaaaaacaataggcttcttagcttacatattgtttactgccgcttttttataaatagtgctgttttatttatcgaacagcactattttttccttcattaattaaaactcttctatcctctattcattgccgagaatcctctctatataaagagtgactatcttccttttatacaagaaattctacttgttagtatactactaaactctatttgcacacatcaccttttacctttttttaaatatttatccattttctattttttgtatttttcactgtaaggtaagtagtggaacttcagcaaaaataaaaaaagagcgtcgatacaacgagcgctcttttttatttatggcgtaaaaattcccaaagtcctggcgttttggaaaaatcaaacgtcttaacagcggaaagaattttaatctttaaatcttgctttatgtcttctctctcatgcagtgaaaagctttggacagctttatttagttttggttccagcttttttaataaacgccttgacgcctcctcatctccagctttcactttatttacaagctcatataaagtttccatttcttcacttctttcttaagtcagttgttaattcttccactttttcttcaagtcgctttatattgttttctacacgcagtaataaataaaaagaaaggacagcgggaaatcctacgtttccaacaagttgaagccactgaggatcaaacatatctatcactcaccttcataatttttttcaacttgcttagcgcacgttgataatgattagaaaccgcttgctgagaaatagaaaaataagcagcgatttctttatgagtccagcgttcgacaataatcaagtgcagcatacactgctgcttggccgttaattggcgaaaagcatgatgaagaatacgattttcaagttgatttcctaaaaattcatgctcccatacagccccgtcctgtactcctagcatatcttcaactgttcgatttccatctagcgcagccggctgctgcaggcgaagaggaatataagaacgctctttttctttgacacgcataacatctctggaataatgtctgcaaagcttgttaatataatgaagcaatctaacttcgctataaaactgatgaaattctttgtttagaagtctttgttcttttgtatcatttttaacaaccgctttttgtaatcgctcatagcgttctggtgtcaaaaatgtattcattatatgagtctgaagagttgcgctgtggtttgtaagaaatgtatgaaaggtacattctttgtcgtgccgcttttcttgctgcgaatagagctgagtcattgtgcaaatctcctcctttttttcttatacttattaaaaagggagaaaagagtaaaataacaacaccaaaaacgaacatttgttcttatataaatttaactatattaggttttttatgtcaatatgatgaaaggctcattaataatagaaaagaatcagtaaaaaacaaaagaggttgagacatacctaaatgaatccaatctaaagacgaacaaataagatacatgagctgaatctcttgttataccgcagttgatttccgtgcaaggcttcgctttccgcaggcggccgctgagcctcctcgtcgcttgcgctcctgcggggtctcacctattccgcttttcccgcaggggtcttcgccttgccctccaatcaactgctagaaggaacgaaacagatgaaatctacgttcagcataacaaaaaaaacgaactactaatcaaacattttgatcagtggttcgtttttcatttcggctaaaatatttttatccctgctctttttatttcttcttcatgtagagattattcttcgcctaagacgcggttaatacgtttgcgaagcatcggcattccatttccacccgcttggaaatgacgaagctgaccttctttatcaaatacataatatgctggtacatatttattttcaaaagcgtctgttaacttatgctcactgtctacgtaaattggctgagtaatatcgtgtcccatggccattgcctcaataacacccatatctaagtcatcttccgaacgaggcatatgaaccgctacaacattcaattgatcatcatactcatcacgaagatcattaacttcaggcattgcttctttacataaatggcagcttactgaccaaaagtggataagcgttgctttatcgcctactaaatcttcctttgttacttcgtcgttaatccaagatgttgctccagttaattcaggcatttgttcacgtaatttcattttaaaatcctccttgttaataaaactgaatattctgtattttttgattagaaaactatcttttctattttaatggcagcagtagaggaatttctcctctactgctgtttattaaagtgttttttgacctggtttccagttagctgggcaaagtccgccagtttgaagtgcttgaagtacacgtaatgtttcttctacgctgcggccgatgttgttatggtttacaactgcgtattgcaattcaccttctggattaataataaacaatccgcgaagcgctacgccttcttcttcaattaacacgccgtaatcacgtgctactgcatgagttggatctgcagccaatggataattcaaatctccaagtccattatctttacgatctgtgttaatccaagctaagtgagtatgaattgtatctgtagaaacacctacaacttcagcatctagatcttcaaactcttcgtagtgatctgatagagctgtaatttctgttggacatacgaatgtaaagtccattggatagaaaaacaatactgtccatttaccgtttttcatattttcttctaaacttacttttccaaattccttatttgcaagtacagcttccatttcgaagcgtggtgcttgttttcctaccatacgttctgccatgtcaaaacctctccttgtacaatgtatttcacaagcttatgcttgtatgtattatttttaatgcaatcaatgacaccttctatttgataacgattattagtatcattataaactagtaatgactattgattacattctttattatacacgagctattattatagtcaatacttttttataatcattttaatctaggattaattatcgaatattttccactctttttattctgtcctttgattaatcctatgtatgcagggatgaataaagatagaagatactaaaaaacttcccttgtttcaacatatttgcttttaaaatgtgctgcagtaagatttcgaatctcaattatgttctttataaccataataaaagagaatgagacataactatctcaatcccatttagagacgaacaaattggaaaatgatctagtatggatgactggttataccgctgttgatttccgtgcaagacttcgttttccgcgggcggccgatgagcctcctcgtcgcttgcgctttttccgcaggaatcttcaccttgccctccaatcaccagctagaagcagcttcatacatgaaacctacgttcaccctatcaatgaaaaaatccgaacgagcttgattctccatcaagaatcaaactcgttcggatctttcttcaactaaactacttttgcccagcctctgttatttatttattatcatttggatatacaagaccgatttgctctcgcactttatccatcacgtgcattgttaaatatgaattctcataagaatttgtgttcgattccatctttccttgctttaacagctctacgaattcatttatttcatagtacatagcaggataaggctgatcgaccgttaactcttctacccgtccgtcattgtatcgaatttctactttttcagcggtatgtattttgtcaataaccatactgcctttttctccttgaatttcacttggcaaatgcgaatttgtaattttagaatacatgatgaccgcgtctcgatcttcgtactctaaagcaactgacccttctccatctactccagattctagcataaacgcagttgcctttattttatgaggtcctccaaacaacgtaatcagaggataaagacaatatacacctaaatccatcagtgaaccattagcaagctctggcttaaaagcattaagcacgataccttctttgtatttatcataacgagaagaatactgacagtaagacgccacgtattttcgaattggaccaattttatgtaagttctcttgaatcactttgaagttaggaagaagagttgatttcattgcttccattagtaacaccttgtgatttttggctgcttgaatcatgcgagttacttctgttgcattggctgcgagcggtttttcacacagtacatgcttgttatttttcaaaaataagatagcttgttccgcatgataagcatttggagtagcaatatacactgcgtcaatttcagaactcgctgccatttcttctaaatcagtaaatatatgaggaatatcatatttacctgcaaattcttctgctttttcaatggttcgagaataaacagctgcaagctgaaagtcgtctacatactgagctgattctaacagtcgatctgttatccagttcgttcctattacgccaaaacgaatcatcttttcatctcctttttatcatctatgttgtattgtatcgtttttaaaaagaaaaacgaagaaataataaaaaatctatacctttttccattgctttatatctgttttgttccataaaaaaacagcttacatcaaatgcaagctgttttcaatatgactcaaacctaagcttatgctttctcacccactacagcaaaacgttcattcacatggtttttattctctaactcatctattaaagcaatcgcgtaatcagcatagctaatatagctttcattttgactatttgtgatcacataatcttttccaaattgataggctcccgtgcgagcaccttctgcatcaaaaaaggctgctgggcttaaataagtccaatttatagtcgacttttcaagttcttttaaacctttacccatgtttgaagccgttggataataagccgctggaaaaccttctgtgctcattaaaggcgttgttttttctgcatctacaaataaacttcccgctccgcccactactgcgagtcgcgtttgaacaccttgaaatactttaataagtgattgtatagactcaacgtggagctgttcgcttccaggaggtgcattaaatgcatctaccacagcatcgaactgttcaatgtcttttgaagtaatggcaaaaatatctttttcaattacgtttgtttgattttttagtttagaagcatttcgaacaacggctgttacttcatgtcctctctgttttgcttcttccataattaattgacctgcttttcctgttgctccaataacaccaattttcatttttattctctccttttattttcgttgtaaccattacagttacatataacacaaaaaaatttgagctttttatagcactgctaattcttcttagctcgttgtaaccattatagttacacatcactcaatttgtcaacctcgctattcatttttttttacgagataaaagattttaatgattgctaaaaattcacaaaacaatagctcatttactatttcaaaatatatccatattttcaacttatttttatctcagagtacttttttatgaaaaaaggtttcttttttataaaaaagtgttataataggtttattatttcttgttcggtgttaacaaatagaaagactttctttaaagtgattcttattgaaattgagcagagatagtaatatattcgtggattttccacacaggaggtactacaatggtacaaggtaaagtaaaatggtttaatgcagaaaaaggttttggattcatcgaagtagaaggacaagacgacgtattcgtacacttctcagctatccaaggcgaaggtttcaaatcacttgaagaaggtcaagaagttacatttgaaatcgaagatggagctcgtggaccacaagctgctaacgttcaaaagtaattgattaagaagctgtcacattagtgacagcttctttttatgtctatttaaccaattaaaatttgattttcctgccaaaggttagtcaagttcgtatcagcgagccgctgatgcgtctcttttacgctaagccagcgatgcttgttgaaaacaaagcgagtttcgggaagttcagtccatatttcctgtacagactggacatttaatagaacaaagtttgcttcgtttccttcctccactccatacttttcttttccaatcagccgggctggtatacttgtaatcattcggagcaactgccgctgatcatccggacttcccatgtgtgcagcataggcagttagtaaccctacttgcagcaagtctgcttttccaaacggatgaaaggggtcgttcacgttatcagatgcagtagcaatcggaatcgctgccttttgtatgtcgcgaatacgcgttacgcctcgtcttacaattcctttatcgtctcttccctgtaaatataaattagaagcaggtaatgtgacaactccaattttcgcttgtttcaaaaggtttaagatttctttcacttttgcatccgtcattcctgcaagcgaacaaagatgccccactaccacttttccttccatatttaattcacttgttctatcagcaatattaattattgtatcaacagatggatcatcgctttcatccacatgtaaatcaagaggtttattataggcttgagccagcgaaaatagagcatcaatctctttttctggatttctagctaaatgaggacagcctccaatcgcatcaatttcaaggtcgaatgctcgttcaattttattcatcttatgcatatcatcaatgtctaagttagagaatagcggaacaacctgcacatccatgtaagggcttaattcatctctcacttcgacagccgcttgtaaacttcgaaataaactatcttcttccatgctgcagtcaaaatcaatatgcgttcgaatcgtagtcgtaccgttagctaatgcctgcaaagcagtttttaacattcgctgcttaatttcttcttctggaaaagccggtaggctgctgctgtaatttttaatggcttcctgaagagttccagatatattgggcacttgaggaagcgaatgagctttgtctaaatgcatatgcatatctacaaatcctggtaatagcacacgcccctgtgcatcaagtgacgtttcttttcctaacacggccgcgtgtagcggaaaaaactcgtcaccttcaagataaccgttttgtaaaacgatagaagtatacattccatttgaaattttcacttcaaaaagagcgtgatcgtgcataattggcaaacgaacattaattaagtgaagcaacataattccctcctcaatttttcaacttcttcatttttcatagaccgctttatcttctctatcatttattgtttaaagcattaattcgccaaatttcgcaaatcaccttctctttagagacctttatttacagagagaaaaaagcgagcgcaaaaaaaagagcagcgtcctcacgctgctcatcaaagaaaaaatgctagaaaatagatagaatgtacttcccatggttaaatgagggcttacagataaagcttcagtgagtgatttcatgctttgcatcgctattctccccagaaagcaatgcagatacaaacaagaaatttccatcactcgctcatactgtaaatagacacataagaaaaagcccaaacaaaggcaggtctctcaaatacaatgagcaaaaacctacccgcctgggcttttatcccttcggtgtcatatccacttcttttcaaaaatgaatatgtgaatcgcttggaccaaactttctactaacgtaaaaatgggaacctagattcactttttactcatagtcctatcatttacggtgataaggtagaaacgtctgagccatattctcaaacatatatgagtgaaccgtatttagctttttcttgtctacaaatatactataggtctttctgtaagtcaactataaacgaataatctttttaataaaattatatatagttcgccttttacaaaagtttacttttttaaaaagtttgttaaactatctaacacagtagttgcatcttcctatgatcctgcttatacttcgaactacttacattacctataaacgtcttcactctgttgaagacaaaaaagcgatctagggttccgtttaacacatgttaaaggctggtccgagagagagcgtacggaatggttccgtatacacggagggataaaagcctgggagaatgacatcattctcccaggcttttcttttttactactataaaatagaggaaagaagggatttatatgaacaaccaaccagcgttaagtaaatcgctaaaggtatatcaaattgtgtttttgggtcttgcctggatgactccgatgattttctttacagtttacggagtagcctacgatacggctggagggcaaatggtccttgcttatttaatcgcttttttagctatcttttttaccgcatatagctatagccgaatggtaaaagcatatccgatagcgggatctgcttttacgtatacgaaaaaagctatacatcctcgccttggctttttagtaggctgggcacttcttttagactatattttctcccctattatcgctattttaacatttggtatttttatgcatacggaatttccttctattcctgtatacgtatgggtcattgtcatgaacattatcttagctttagtcaatattgttggtattaaatctgtagctcgtataagcggcatctctgttatagttcagattctctttataagtttgttttgtttatttatcatcaaagatattgcaacaggtcaagctagttcttctacccttttttcacttcatccttttttggcttcagatgtaccgtttacgactattttttctggagctgcgctcatttgcttttgctttttaggatttgatgcagttacaacaatggcggaagaaacgattcaaccggaaaagacaattccaacagccatttttcttattgtttgtatcgcagctgttatgtacatcgctatctcgtatttcacacagattgcctatccgggattcacgtttactaaccctgataatgcagcctacacccttgtaaaattagtgggcggaaatcttttaagcagtctatttattacggtcttaattattgcaacctttactcaaggagtttcttcagtcacaagcgttactcgctttttatatgctttaggccgtgaatccgtactgcctcaaaaggtattttcatatattcatccaacgtttaaaacgcccgtggtgaatatcttgcttgttaccgctttttcgtttttgggaatgttcattgatttaaacacagccgtcacttttgtcagtttcggtgccttaaccgcttttacatttgttaatatatctgttatcgctcatttttatattaagttaaagaaacgttctttcactgagacgatactttatctagtcttccctctgattggagctggatttattggatggctgctcacactgttaaacaaagacactcttttgatcggtgtcgcctggcttacgattggatttctctatttatttgtaaaatctcgactgacggctccttttgtgaagagagagtcttcaaaagtaacggtccctgaaaaataaactgaaaaatcagttttcgtgtcagatattctaacaaactgcttgtcaactcattttcacccatactatactacgattaatcgaaagccacaaatggataaaggttcttacagccgttaagaacaaaaaagctgtctagggttccgtttaacatatgttaaagactggtccgagagagagcgatatagcgctacgctgtataacacggaaggataaaagcctgggagactactctcctaggcttttatcctttttttattctaaggaggttattttatgagttatatctggaagcaaacaatcccggctggtggaaaatggtcaggccgaattggaagaggaaaatcggtgacgtttaccgcacaagaatccggtgcaaatgtatccgtattattatacaacgcttatgatttaacggaacgatacaatatgcccgataccttaaaagcccagcacactgctcacttaacaaaaggccacgttctgatgagtgacaacggcagagcatttgcgagcatcactgctgacaccaccggctggcatgataccatttcaggctatactacgcgcagcttaactcatcaaaaatacggtgtatctacttatcaagaatctcgaaacgaatggcgaagaaatggcgaagaaaatttttcaatagagcttttgcgcaacggtttaacaacacgggatttagtccctaaccttaacttattttcaaaagtatactgcgacgaaaaaggcaatatgaattttgtttcttctcattgtaaaaaaggagattttattacgcttagaacggaaatggatttgctttttgtactgtctaatacacctaaccctctagacccgagcggaacgtatccttctgttccgattgaaataaccgtcgatgaagcagctcctgtaagctcagacgactactgtttaaattttagacctgaaaataaacgagcgtttgaaaacacatggtcttatgatttattgcttggaaataaaacactatcaacgatttaaaaataaaggaggcttttataatggctgtatttaatcgagtggaaagcaacagaaaaatagagaacgcaatttatgatgaaacggtactggctggggacggctggatacacgagcttaaccccggccaaacgcttagaataatagatgtagaaggcaatcaagcagcggatactttattctttgatgctgaaaacctagaagatcattacagtacagtatctacgattgctaatcaaggaaatatttatttatccaccggcacagtgctgctttctcaatctggcaaagaactagtcaaaattgttgctgacacgtgcggacgccacgataccttaggcggagcttgttcggcacaaagcaacaccgtacgttatgcacatgacacgcttccgatgcataactgccgagatacatttatgcttcagctatcaaaatatgatagccgctacaccaaaagagatttagcaccaaacgtaaacttttttatgaatgtacctgtgacgccaagcggcggattaacgtttaatgacggggtatctgcacctggatactatgtagaaatggaagctatcaatcctacacttgtattgatcagcaactgccctcagcttaacaatccgtgcaacgattataaccctacccctattcgcttagttatttgggattcattataaaaaggagtgttcatctatgtttacaaaagtattaattgcgaaccgaggagcaattgccgttagaattgagcgaacattacgacattttggggtgaaatctgtagctgtttatacagaagctgatcaagacagcctgcacgttgatgaagcagatgaagccattttaattggcagcggcccggtcaaagaaagttatttaaacggagatcttattctagatattgcaaagaaaacaggcgcggaagctattcatccaggctacggttttttaagcgaaaacgcggaatttgctcgtcgctgtcaggctgaaggaattgtatttattggtcctacaccccagcaaatggaaatattcggattaaaacattcagctcgggaaattgcgcaaaaagccgacgtgcctttgctgcccggtacacctcttattacggatgtatcagaagctgtatgtgctgctgaagagattggatatcctgttatgttaaaaagtacagctggcggcggtggaattggaatgcgtgtttgccaagatgaaaaagcgcttcaagcagcttttgactcagtttgtcatttagcgcaaacaaactttaaaaacaggggtgtttttttagagaaatacattcaaaaagctcgccatgtagaagttcaaatcttcgggaattcttttggagaagtagtggctttaggagaacgtgactgctctattcagcgaagaaatcaaaaagtaattgaagaaagcccagctccaaacttcctttcatatatacgggaaaatatgctgaaagcagctacgcgactagctaaagaagtcggatatcgaagcgcaggaacggtagagtttctttatgacgccgaagtggagaaattttattttttagaagtaaatactcgtcttcaagtagagcacggcgttacagaagaagtgttaaacgttgatttagtagaatggatgcttaaagaagcatgcgatgagctagtaaaccttccttctttgcttcctgtgccttcaggtcacagtatccaagctcgtatttatgcagaagattgcttaaatgattttcgtcccagcggcgggcaaatcgaccaagcaattttcgctaaaggtgctcgagttgaaacatgggtacgagacgggattactgtaacatcactttatgatcctatgctggctaaaattatcgttcatggaaaaacacgagaagaagcccttctaaaattgagcgctgctttaaaagagacaagattatacggcgttactactaatcttcaatacttgcagggactgctagaagaaaaagcgtgcaaaacaggcgacgtgtatactcaaatgcttaactcatataatccgggcgaacaagcactcgaagtattagacggaggcgttcagtccactgttcaagattacccgggacgcaccgggcactggaacgtaggggttcctccgtgcggtccaatggatccttttgctttccgcataggaaataaacttctcgggaactcctcggatgcaccagggattgaaatgactctccgaggcggctcttataaatttagagacaatgtatctttttgcattacgggtgctaacatgcatgctacattagacggcgctgaaatccctatgtataagaccattagagcgaagccgggacaaattctttcatttagtgaagcaaccgaaggaatgcgtacgtatttactgattggcggcggacttgatatgcctaaaatattgggcagttcttctacttttacactaggaagcttcggaggacacggaggaagagcacttcgtacgggagatgtactccgtgtctctgaccactctcacgttgaaaatgaacttaccctttcctatcagccagccatgtctaaagaatggacaatcggggtaattccaggacctcattgtacagaagaatttttacagccagagtacttacagcagttaacagatacaaaatgggaagttcattttaacagctctagaacaggcgttaggttaataggtcccgctcctttttggacccgtgaagatggaggcgaagccggtttgcatccatcaaatattcatgataacgcatatgccatcggaaccttagacttaacgggagatatgcctattttacttggcccagacggtccaagtcttggcggctttgtttgtcctgttaccgccgcttcagcagagttttggaaaataggacagcttcatcccggagataaaatttcgtttaaattaattgaccttgaacaagctgaaaaactcaaatgtactcaggaagactttttacagcatatcggaacatctgcatcacttcctgcacttacaaatccattagcacagccgctcaaaagcgattatccgctgctgattaacgaaacggaaaatagacgcttccaattttccgtccgctgctcaggcgatgcgaatatacttgtggaatacggagaaatggagcttgatctgctgcttcgcttccaagtacatgctttaatggaagctatccaaaagcgtgaggatttaccggttctagatttaacgcctggtatccgttctcttcaaattcatactgatgcaacaaaaatgtctattctggaactttgtcagcacatttcggctattgatcgcgcgcttcctcctcttgaagaaatggaagttccgtctcgtattgtaaaacttccactttcatgggatgatcctgcgactcaattagctattgaacgctatcagcaaaacgttcgtccagatgcaccatggtgtccaagcaacctagagtttattcgccgagtaaacggtctggaccaccttgaagatgttaaacgcgttgtatttgacgctaattatcttgtaatgggtcttggagatgtatatttaggcgcacctgttgctacgcctctagaccctcgtcaccgcttagttacaacgaaatataatcccgcccgtacatggacgcctgaaaatgcagttggtattggcggtgcgtatatgtgcgtatacggaatggaaggtcctggcggctatcaatttgtgggacgcacgattcaaatgtggaaccgacttcgtcaaacagaaagttttgaagcagggaaaccgtggcttcttcgtttctttgatcaaattcaattttacccagtagaagcagatgagcttttaaaactgcgcgaagatttccttcgtgggagatttgaagcagatattacggagacaacgtttaaacttggagaatatttagattttctttcatctattgaagaaagcacggctgcttttcgtcatactcagcaggctgcttttcaaacagaacgagaaaattggaaaacacttggtttagctgagtacgtctctgaacatgaaacagctgaagttacggaacaagaactgcccgaaggtacggaagccgcgcgctgtacaatgccgggaagcgtatggaaagttcttgtagaggaaggacaaaaagttgaaaaaggcgatacgttaattatccaagaaagcatgaaaatggagtttccacagctagcacctatggatggatatatcagttctattcatgtgaaacccggcgatgaagtacaagctggacagctgattgccggtataaaagcctttgctccaattactcattaaggacggtggatacaatgaaaacagtgagcttgcctaaaacattttcggttcaatggttacgtgatatgtatatcaaaaaacaattaactccggaagatgtagtacatcaaattcttacgcgtgtagaagctgacaaagacatgaatatttggattacccctcctacactcgttgagttaaaaccttatctggatcgcttagctatgctaagccctgaagcgttacctttgtggggaattccattcgccgttaaagataatatcgatgtagcacatgtaccgacgacagccggatgtaaagaatatacgtacatcccttctgaacatgctacggttgttcaacgccttatcgatgcaggtgctattcctcttggaaagaccaacttggaccaattcgctacaggactggtcgggacacgaagcccgtatggcgaaacgcacaatgcgttaaagccagagctcattagcggcggatcaagctcaggatcagctgtatccgtagctcgggggcatgctgctttttctttaggcaccgatacagcaggttcagggcgggttccagctggtttaaaccgtctaatcggctataaaccttcccttggagcttggccatctgcaggtgtagttccggcatgtaaaagcttagactgcgtcactgcttttgctcatgaatggagtgacgtactgctcgtagattccattattagaggattagacgatcgagacccatggtcacgctctgttgttcgggcttcttcggcgcttcctgaaaaaatttatatggtaaaagaaccgctttcgttttacgggtcgtttgctgagcagtacgaaaaagcgtggaaacaagctgtgaaaaagattgaagatttatctattcccatcgaatacattgacggctcgtatttaagtgaagcagctgctttattatatgacggcccttacgtagcagagcgctgggctgacttaggagaatttatcacttctcatgaagaaacagcctttcctgtaactgagcaagtgcttcgttcaggagctaaatcagaatatgatgctgctgctttatttcaagcttcacataagcttcaatcctttaaacataaagcatatcatcagcttaaaaatgctgttcttgttatgccaacagcaggcggaacgtggacgcgggaacaagtaagagaaaatccaattgaaacaaacagtgacatggggcgttttacaaatcattgtaacttactcgacttgtgtgctgtatctcttccatctcaagatgcagatcttgatttaccgtttggcatttcatttttctctacatttgacggcgaacaattcatttgcggactcagcgaattgttttttaatggtgaacaaacggtgagttcaaaaaatgatgcaacattagtagctgtttgcggtttgcatatgcgcgggtttccacttgaatctcaaatgcgtgaacacggagcttcatttgtacgaaaagaccaaaccgctccttattaccagctttttaaactgcctacttctccagcaaaaccggggctgttgcgaacacatcaacaaggagaaaaaattgaagttgaactttgggaaatgcctttatcactactcggctcttttaccgattctatcccttctcctctcggactaggcaaaatcactcttgaagacggcagtgaagtagcgggttttctttgtgaagctcatgcgacagaagatgcggaggatattacgtcttatagaagctggcgggctctctcaacttactaataaatcgattatttactaagctgttgagtacattctcaacagctctttttcatcaaaccttcaatgtatataaaaataagaacttagcattaattatgacaaggtgaatgtatgatgtcacacttttatatttattcttgattcttgcgtttatcgttttaacagagaatacccccactttaagcttgctaagtggggggtactttaattaaatagacctaaaaggcaagctgcacaatgctctccagagcacctatcgtgtagaatggaaaggcagctgatcttgatgagaaacatacttcttgcgcggatgcttatctaagtattgtttagcagtttgtaaacactggcgcgcaaactcttcatatcctagttcgttagcacgttttacatttggcaactctatggaataaggaacctgcgggatacgattaataatacttgcaacatcaataccttcttcatttaaatacaatcgttcttctctaagaactcgagtcatcccctcctttgaactcggaatttccgcagaagcattgcaaagatgaagatagcgaaaccactcacgaggcacgtcgtccaaatcttccaccttatctcctgatcgatgaaaatggtggatatcaatcataagacctgcattttcacgattagccgtatgaagaacatccattgcgcctttaaggttgtatacgctcgcaataggaacaaattctaattcaatggttaacccaaaaggcttagctagatcacagagttcagcaaagcattcgataccaaaattgcgatcgtccgtccaaatgctgctaaggacgtgacgtcctccaagttcagcagctgcttccattgcaggcaagtaacgttttggatcaactccttcatagatacgtgctaactctatatcaagaagcttcactcctgtatctgacatagcagattttgtttctcgcatcagttgcttattttcagctaacgcatagttaggctctccaggcaaccccatgtaaataggccttaaactaacaaaatcatatcctgccttcgcagccatatacgtcatttcaggcggcgaacatccaagaacagtaagatacgcaagggaaaattgattaggcattttataaattcctcctttattcaaacgaattagatcgatctaattaaaatgacgatatatacttataaacgtcctacatattgatttgattttaattctctgtaggcagtctgaatacaatcatcttcgtttcagtcatttcttcaacggcgtaacgtggaccttctctgccaataccgctgtttttcactccgccatatggccaatgatctaatctaaagttagatgttccattaataactacaccgcccatttcaagagaatgagctactttataagccaaatccattttgttcgtaaaaatccctgcttgcagaccaaaagcagaatcatttgtctcttgaatagcctcttcaatcgaatcgtacggcacaatactaataatagggccaaatacttcttcacaaataactttactttctttagaagggtttagtagaacggtaggttccaccgtagcttcgcggcgctttcctccgcatatcacttgtgcccccgactgtacggcctcatcaatccagcccgtcactcgctcagctgcatggacatctactacgcaccctacatccgtatcaggcaataagggatctccgattttaagtttcagcacctcttcttttaaaagattggtaaactcagagaccacagattgatgtacataaattctctgaacagagatacagctctgcccagaattgctaaatccggttttagcacacatagccgcagcacggtttaaatctgcgtcgttatggacgatcgttgcagcatttcctcctagctctagcaatacttttttcattccagctagctcacaaatgtttttactagctaccgttccacctgtaaatgaaataatgttcacacgatcatcttttacaatttgctgtgcaacctgtcttcgaccaaggaccatatttacagcatctttagggaatcccgcccgcagtagcagctttaagagctctgttgcaattaaagttgtttgcgaagatggctttaaaatcacgctattcccagcagcaaaagccggcccaattttatggcatacaagatttaaaggggcgttaaacggtgtgatagccgctacaacaccaacgggcactcggaaagtagatgcaatagcttgtgcgcctcgttctgaaacgtcgccaggcaatgtttcaccaatcaatctttttgcttcttcccctgacagttccaatgtttcgattgaacggtccacttcgtccagcgtatttttcaaaggctttcctaattctaaagaaataagtcgagcaaatttttctttctcttgttctagtaatagagccgctttctttaaaattttagaacgctggtaagaagaaagggcggcgacatgtttttttgcttcataggctgatgccaatgctttttcaacatcttcttcattcgctaatagctgctcacctatgacttctccagaataggggttttttattaaagcaacttctcgatcttcaataatccatccaccgttaatataaggctgtgatttcttttcaatagtttctatcatgtttagcaccaacttttcatttttattaaacaaacttttatataaaacaaggcctgaacgtttttacatgagaggaagatagatcgatctaatttattttaatttaaacgctctcttcacctcctaaaaggctatcatgttcacggcttagttatactaatttctcttgaacctttggcttggcatgaagttctgaacaagggcctgcttgcagcatatagcttccaccatcatgaccaattacttgcttcacctcttttgctgcttcaataagcttgttaagatcaatgcccgtatgaattcccatttcacttaatccatgaaccagatcttctgtagctatatttccagtggcgcctggagcgtaaggacaccctcctaaaccgataatagaactatcaaaatgaataacaccctgctgcaaagcagccactacattagaaaatgccattcctctcgtattgtgcaaatgcatggagaaaataatgccgggataattttgtttaagaaaccctagcatacgatacacttgctgaggatttgccatccccgttgtatccgctaaagaaatttcttcgacacccatcattctgtatcgttctacaatagaagaaatgcgttctatagcaacttttccttcataaggacatccaaacgctaccgaaattgaacctcccactttaacgttatgcttttccgctaattcgataataggataaaaacctttttgggcttcttctacagaacaatttgcgttagacaagctgtgagaatctgtagctgaaagcataagctttaactttttcactccggcgtcaatggctctctgtgcaccttttacattcggcactaacgcgcgaaatttgatatttgttaaatcttgaacactttctacgacctgctcggcatcctttaactgaggaatcgctctcggatgtacaaaagatgtaatttccattgattgaatgcctgtcttggctagctgacggataatagatattttttcttctgtaggaatccactcatgttcagcttgaaacccatcccttggggctacttcacagattatgactttttccggtaattctattttttgaatagtattcattaaataacccccttttcttttaacacggctaggtcttcacttgataatcccagttttccgcctagaatttcttcattatgttctcccaattcaggggcacgatgacgaattgctcccggtgtatgtgaaaactttggcactactcccggaaccttaatttttcctaggcgggggtgctctacttctacaatgttttctcgttctctatactgaggatcgttaaatatatcttcaatgctgtagataggactaactggcacaccaaatgaatctaacttcgcctgcagctcgtcttgagtgaaggacttaatccattttgacacaatttcctgaacttcatgatcatgttttagacgctctacgtttgtatagtatcgcggatcctttaacatatcttttctttccattgcctctgcaagacgatcaaaggtagagtctgtactgcatactaatacaacaaactttccgtcttttgtttcatatgtgcctgcagggcttgagtgacctgcaagtccagggcttctttctcttacttttccgttttgatcatattcagcgattaaaaactccatcattcgaaaaatagattcatataatcccatttctactacttgaccctccggctgttcgtgtacatctctatgatagatagcgcttacacaagcgaacgcggcatatatgcccgttacataatctagtaaagagtaagaaggactgacgggcggacgatctgaatatccttgtaaataagtatgtccgctaaatgctgtccccggtgtaccgaatccagctttttctcgataaggacctgtttgtccataacctgatacgcgcaccattactagcttagggttaacttttttaagctcttcatatcctaagttccatttttccagtgtacccgggcgaaaattttcaattaaaatgtctactccactaattagctttttgaaaatttctgctccttcttctgatcgaatgtccagcgtaacagactttttattgcgagcaagtccgggccaccttaagggttcagtccctttccaaggccctacagtccgaagcgtatctccttttcccggaagctcaattttggttacttccgcccccaagtccgctagtaaagtagctccaaaaggagcagcaatcatagtagaaatatctagtatttgaactcctgttaaaggtccataatttttggttaacacgttgaatcccctccggtaataactgtttgtatgcttaattaagataattaattagtagatttcctttgatatgttaaaaatgaatactagtagtcaaaatattaagattatttatttttctaaagttaactctttttcttctaattgaatagactctttgctttcaatcgggtctaaatctgttaataagaacgtatagcttaaaattccaaccactaaaaaagcagctgctaaaaggaaagcatacataaatgaacccgtggcttgaacaataaacccagtcgtaataggtgcaacaatagccatcgagttattcccaaatgttaaaagtcccgttaatgttcctaccgttccttttggtgcaataaatgtaggaatgctgtaggcaacagcagatgtgacaacaagacctccaagtgctgttgaaatccaaaatacagctacgttcgcactgtgagtaaacgctgccccaataattgacaaaccaaatatcatacctattactagaaaaaacttgctaacacgcgtccggttataccctttgttaataagacgatcaacaagccagcccccgattactatttcagtaatggtacctacaatccaaggtatagccgagtaccagcctgattttaaaatagacatgttcatttctgttgctaaatatccaggaagccaagtcaagaataaaaaccatgaatagccgtatgccgcaaacccaatgaatactgcccagacttttcttttagttagcaaatatcgaatgttctccattgcactgcctttaacttcttctgaactttgagaaccgccgtgaacaatgtagtcatattcttctttcgtcaaacgctcatcttcatgaggttcacgataccagatccaataaacaatagcatatatgaaactaagaatagcagttgctaagaaaccgcctcgccagccccactctgttacaattagtgctaatataggcgccccgatggcgttggaaagtttggattgagaatcataagctgcgatagcttttccgcgttcctgacgcggaacccaatggctaactgctttagcagcagatggaaagaatggtgcttctccaactcctaacagcacccgagataaaataattaccccccatccatttgctactgcagttaaaagacaagctactgtccatatcacggtcgctacacgcgttacccattttacacctattttatctagcaaaggccctataggaagttgaagtaaagcgtaagaccatgcaaatgctgataggaaaatccccatctgacctgctgtcaagttaaattctttttgtaacaatggcatagcaatggacatattaattcgatcaaaatagtttacaactacaccaaccgcaatcaagaatacaatcgaccaacgatgttttttcattcttttccctcactcataagattttaagtatgcgctttcatttttgtgaaatatttctttgctcagatcccatttataattgcttgcttacataaagtctgtctgaaataaagttgaaagatggcaatgctgaaaacctaatcctctagctgtttacttattcttttatcctttcgtaaaaacattttattagtggaattaaaaaaattaatacaaagttctaattagaacgatctaataattttttattagaacgatctaattccagcgggaatctcttctcatattgcggaatggtgctgtatattttatgatctactcaaatatccgaacatgatgatcaatgtctgcttttttaatttctcattgtaacacctgccttttttcgctaagcgtcatcttttgacacagcctaatataaaatcaattcaaacttgagttttagtatactgaattacatttgcctgcgcaataatatattattaatatatagaaaattgaaataaaaactttttaaatataataaattcaaaaggtaactgtattaattttacacacatttctcttattgtgttaaagaaatagaaaatacagacacttcattcgtacaattttctagtaaggtttgaagatacgagttttcaatattgtaagctcggttcaaacatttgttccttaatatactccacaggcatctcttttcctgtccacaattcaaacgccatggccccttgccagatcatcattcctattccattaatggtgtgacatccaattgattcagcttgttctaacagttttgatctcataggcatatacacgacatcggttacaattaaatcaggacgcagcattgatatatcttcaataatgctgaattcttctaacggtttcattcccactcctgttccatttgtcaaaatatcgctcgttttaatttcttctcttaacctgtctgtatcctcaagagaatacagcttcgctttacatgaaacatgcttcatctcttcattaataatttttacgttttctacagcttttgaataaaattcatcgtgacgagcaaaaattgttaattcttcaagtccttctaaagccgcttgaatagcaataggcgttgctgctccacccgaaccgatcaacgtcatttttttccctgtgatatccacgccgtgctcttttaaatttcgaatgtagcccatgccgtctgtgctatgcccaactagtacgccattatcatttacgacggtattgacagctcctgaaaatttggcgctgtctgctaattcatcaagaaacgggagaatttttgtcttattgggcatggatacattaaaacctttaacatttaacgctctcagccctttaatcgcagcttctaacgagtcatttcctacctcaaaagctaaataagcataatttaatcccagtttcttaaaggccatattatgcatagatggtgataatgaatgtccaattggagttgctaaaaggccgatgagctgagttttgccattaatacgccctacgcttttcatgattttacctcctgttttattaaaatttcagaaatacttgtggtacctaacctgtactttttcagcttattttcagttacgatcaaacacatttcacattcatataatacaggtaattagatcgatctaattttaaactatactcactattcaaccaatctgtaacaagctgcattcaaaaccaaagctgctctactcacatgtaaaaagaaagaaatcgcttacaaatttacggttttaataacatacattcgacacgtactgtacgtcttacctcccttcacaaggcagcatttctcaacattactagaaacaaagctttcacctatacctggcttcttttattaaatgactgcagtaaacactcggtgaaccaagacaactcttagcgaccttatgtatcatagtatcacatttttttaaaaggaaaaatgtttttttgttacttttcagaaaaatctttttatttaaagaatttctttatattaaaataaagctataaccctaattatagctttattcttgagcgtggctttctcttctctttttcatccaccagcctgcaccaactatcactccgattataagaataacaaatattaaacgatcaacatcatgcaaatatttttggattttttcaatatctccaagtcctcctacatagagcaaaaaaacaaaccacggaaaaatgcctaaggtactgtataaaacaaagtccctagatttgattttactaaggcctgccaaataggttatatagtttgcgatactgatgggacgagaaatcgtaatactccattttccatatttatgaaaccatttttgggcacgctttatatttttttcaccaaaccagcgcttggtaatagattcaaacctgtatcccataacgaacggaatatagttgaatgcgatataaataacggtattgacagctgaaacaataaggattttccatattgagagctgcagcaccgagccaataagcaaaatcgataacgtacacggaaaaggaattgccgcagcttcgattgctgtagcaataaagatgcccactatgcctaaattttgtacaacatcaataaacccttgcaccttttttctcctttcaatcatacaaatttcacgttctttcatcataactcaaactattcaaaatttcacgatttcaaagcaattttactagtaaaaaaagctcatacgcacccgtttgctatatttgattatcttctatcatatgcagttcataagtgaagtaacgcaaaaaaagaaaatagcagaaaaaaactcttttattagttgtaataaaagagtcttttctgtcctgctattatttaactttagcaatagttttccctttcacgtggcgttttgaaagctcttctaatgcacttggcacttcttttaacgagatgatgcgctcaatcatcggagctactttcttctctgctactaattctaaaagctcatcgcccatttttgctaaatccgcttgcgcaatcatgtcatcaatgtgttgtgcagcatttaaagctacttcatgataagaaatcacctttgtaaaaggctttacttttttataatcaggtgcaccagcaatatgtgctaaatgtcctctataggcaatcatatctaaagaatccgttgcgttctttgcgctcaccgtgtcaagcacagcatctacgccacggccatttgtcagctccaatactttttccgcgacattttcctcgcgataatcaattacataatcagcggtggattagctatggtcttgaacttcctattatcaggagattttggcggcaacattttaaaaaacgacctgaaattcagcctcatcatgtgattccaaatcttcaaacggtgttaaaagccattcagcatcacatgggaatcagcctgcttccccgctatttaattcaagaagcgcttcgagaaaaaaaagtgaaaatcgaacttgaacatttagcagtaaaaaatcagatctttcttgcttataaacttaagcatcgcgatcatcctactattcaaaaaacgatacgctcgctaaaaaaagaagagggtgagaaataacgacatgaatccattctaaggacgaacaaacaggatatatgagatatatgagctgaaccgcttgtgacaccgcagttgatttccatgcaagacttcgctttccgcgggcggccgatgagcccgcaggagtcttcgccttgccctccaatcaactgctagaaggaacgaaacagatgaaacctacgttcaccataataaaaaaaacgaaccactaatcaaacatcttgatcaatggttcgtttttcacctcgtctaaaatcattttgtcccagcctcttctttttttgacagttgctgtgctgaatctactcctaccaaatctaaaaagaaaataaagataggaataccaagaatcagcccccatacgcccaagaagtgttcaccaaacactaaaatgataaacgtaatgaacgttggcaagtttgttttagatgacatgagctttggatttaatacatagctttcaagtgcgtgaagtactaccaccataattaacacagatagtacttttacaccgcctcctaaactgtaagcgattgtacaaagtggaatgagtgaaacaaataccccaagaaccggcactagccctagtagaaagaccataacgccaagtgcaagcaaattaggaaaccctaacacccacagcgcaataacggataaaatgctgttcacaaaagcgataataaactgaacttctattaccttgccgaaggaattaacaaattttctccccagatagccagcttctttgaaaaaccagcccagcctagattgttccagttggacaaataatcggtaaatccgcgacttttcaagtaaaaagaataggcttaacaagagcgctaagaaaacttgtgcacttacttttccaatattagataaatagctgtatactaaatcaatattctgctgaatattttctggtgatttgaatctctttagattatcgataatataggtgacaaatgtattatcaggggggtgcttgtaaaaatacatcagcttctgtacaagctcagtaacttgcgtcataataaccgggatatatacatatcctacaataccgagggccccaatcagtgcgatatagatgacgatgagtataagcgttgaattaagcggaagctttcttcttaacgtttgttgaaaacgaccaattaaaaaggtaaaaataaacgtaaataacagcagctgaagcatacttctaatgctgacaagtaaaactgtaatgacaataagcgtaatgatgcgaacagtaagtttgttgtgaagccaacttcttgcaatattcatgaaaccttcaattctcctatctctctttttcccaagtcatttgtatacatataaataaaacggatacgctagacgctcatatccgctttcgctatatatagtgtatcatttaatattcaaattttactatatttcggcgctttttagtatgtctttattttctctccgctattctttttcattttcccatacattatgataaattagcttgtctaaatcccttcttttttcccagttagcttgttctaagattggtttctcaggatatttatctgtatagccaattgacatgagcgctacaggatcaatatgaggaggaatatgtaaaatgtcacgtacatcatttttcttataaaaacttacccaccccattgccagtccttctgcatatgaagcaagccacatattttgaatcgcacatgcagttgacatcatatcggtttctggaattgagtttcttccgagaacatgagagcctcctcttgttggatcacacgttacgcaaatagttaatggcgcttcttttaatccttgaacctttagctctaaaaaatcttctttcttttcaccttcataatgaatagccagtgctcttctctctttatctgctgcccaggcaagtttatttttcacttctgtatcagatactaatataaaattccaaggctgcataaacccgacggaaggtccgctgtgagcagcctgtagaatgttataaaccgtttcattaggaatctcatcagacaaaaatgttcgtacatctcttcttccgtaaatcgctttgtatactgcttgcttttcgtcgtttgtaaacgagttcatcttcttcaacctccattaaactctctttttaactatttttctaaaaaaacattaaaaaaatgtgatccaaactttatgttttatcgtattactatatgaatctatcataaaggaggttgcaaacatgttcaacgacgttttaatgaacttatttaacgcggtaagcagcatcattaacacaattggataatttgattgtacatatttagtaagagaggaggcatattacattgctaaacggggtacttatgaacttttttaacgcagtaagcagtatcctctacacaatcggagaaaaaaagcacaaagaaaagggtaactgccattaccaccgtctttatgctttactagttcaaaatcatatattttacaataaaaagaactctttgattaggagttctttttattcatcctaacatgttcccttttatttgtatatatgccttgccatttcaacagattcacttatatgttgcaagcatacacataggtctgcagctcgtagtgcagttcttttaagtcttcagctgcttgagtcaataacttctttcgctgagctgtatacacatctagaatagctctttccacttttaccttttcttcatataaaatatctaacttatcttcatttccttcaagggaaataggctttaacatagcaaattgataaatgggttgtccataatccaattttgttaaaatagaacctactaatacatcctgcgagcattcatatacgaagtttaacagcgtacttaattcttctagacgagaaatatccagctctgcattttcgttgatcacagcccctatatattgaaagcactcttcttctaactcactataaatagttgtgatgcggtgcaacacttcattcaacttcataaagttccccctttacacacgcttcttgatacaaccatatgacaaaacttggtgttttatactaactaaaaagcgaggaatataaacctcgcttcttctttttaccgatacatactggcaatatcttcaataaacataagcggttcttcttctcttagttgtttaattggagaataatcctctccaccaaaactttgatctatgtcttcaataaatgaagaaacttcttccgactcttcacgattagccggcatttcgtatttttgtaattctgtgcgatgcacgacggataaaatatggcgaggaaattgctgcttcgtttttccaaaacagtataccggcttgtgtttcaaaaagcgttctacttcctcttggcggttataaatgcttccatgatcaccccaagctaccacaaccagttcagcatcttccactgctttttgaatatattcacctgttcttgttccaacagcttcttcttttgaaagcatgcgtaaaaacgaaacatgatcggtttgatagctgaataaataaacgatttctaagactccaaatccccacttttgcgctaattctatgcatttggatacagctgtatcgtcgctgtattcatacgtattttctggaaatgacaagataaacgtaagtttacgttcgtttacttcactccatttgcataatagagagtatttgtatgtgcctgtttcatcaaaaataacttcttttttcactacttccatccccctgccttcttacaatcttgttacttatctattgcaaatgagctaagcagtaatcgtaaccttgactgttaaaagttttattttatatgtatttcaaaatcatgtcttcatgacaacttttctgccattttttcaaaaagcaattttttcttctatacatgctttttacagctagtgaacattcacatatacatctttcctcttttcggacctccagtcaaaatagataaaatcaaaagaatggtctataataaagaaataaccaatgactttttcactgatgtttttgacagttacggattttttctcagcaggtatgttcaaaactgatcctctgagaaaatagaagataaatttgtgtaaagaaaggattttgtaaatggctactacacacacatttacaagaggagaagaaattgcaaatgcgattacacacggcattggagccgtactcagcattgttggattaacgcttttaatcgtactttcttcgttagaaggaacgccttggcatgttatcagttttactatttacggagtaaccatgctgcttctctatgtctcctctacgcttgttcatagttttccggaaggtaaggtaaaagatctttttgagatatttgaccactcttctatttatttgtttattgccggtacgtacactccatttttatttatcgcagtaaaaggaaccaccggctggacactttttggaattgtatggggcatcgctcttgcaggaattgtattcaaagctttttttgtgaagaaattcctttttatttccaccattctttacgtatttatgggatggatgattgtgtttgcgtgggattcgttaactcaaaacattgcccatcaaggaattgtccttctcgtagttggaggcgtgttgtatacaatcggagccgttttttacgtatggcgaggatttcgttttcatcatatgatttggcatatgtttgttcttggcgggaccgtactccactttttagcaatcattttatatgtattgcctataaccaactaaaaaagggccttctggcccttttttagttggttatagaattccttaccacagtttggccatttgagccacaagcgtatagactcctagcacagccataataacgaccacaaaaccgccaaaaacggtaagccaagtcggatgcttgtaatcgcccactatcttctttttatacgccgctataagcattgttccgagtgtaataggtaagattaacccatttaatgctcccgctaaaataagcagagtgaccggctgaccaatcgtcaagaaaaccagggttgaaatcgtaataaatacaatgataatccagttttcatatttctcaattcttttgctgaaagatttaataaaggaaaccgatgtatatgccgaaccaataactgaagtgatagccgccgctgccataacgacaccgaataatttatagccaatatcccctgcggctaactgaaaaacagaggcaggtggattatcaggattcagttttaacccttgactcaacacacctaatgtcgctaaaaatagaaaaattcgaatgatcgaagcaatcgtaataccggatactgctcctcttgttacttcaggaatcgcggcttttcctttgattcctgcatctaataaacggtgacctcctgcaaatgtaatatatcctcctactgttcctcctacaagagtaacaatcgccattacgtcaatgtgatccggccaaaatgttttagagactgcttctcctaatggcggagcggaagaaactgcaacatacaccattaaaacaattaatattccgcccattaattgagcaaaacgatccattaattttccggcttctttgactaaaaagattgcgatagaaatgatggctgtaatgactgcacccgctttaggagaaataccaaatagcgcattgaagccaagacctgctcctcctacgtttccaatattaaatgctaagcctccgattacaattaaaatagcaataaataagccgagacctggcaaaacattgttagcgatatcctgtgctcttttttctgaaacggcaataatacgccatacgtttagctgaacgccaatgtctaataaaatcgacagtaaaatgacaaaaccaaaacttgcggcgagagcttgtgtaaagaccgttgtttgagttaaaaaacctggacccactgctgaagtagccattaaaaatgctgctccaagcagcacgctccagttgcgttcttttttcatgatgtcacctcattgtggttgaataatgatttgttcttcttttagcttgtcacaaatagctttggcaaattcaacagcatgtgcaccgtctccatgaatacaaacggtatctgcttgaatgggaatctcttcattttgcacagtgaatactttcttttctttgaccattttaattacttgagaaatagccgcttcttcatcttgaatcacggcgttttcaacgtttctcggcgtcagcatgccgttctgttgataggttcgatctgcaaatacttcctgagacgtacgcaagcctatttcgtttccggctttaatcaattcacttccagccaaaccatatagaatagcttcctcactaacattataaacggcttcagcaatagctttagctatgtcttgatcccctgcagccatattatataaagcgccatgaggtttcacatgatgaagggtccctccttctgcacgtataaaagctgaaagagcccccatttgatacaccattaaatcataagcttctcgaggcgtgattttcatatatctacgtccaaatccagctaaatcttgcaatccggggtgcgcgccaatcgccacattttcactcaaagccagcttaactgtttctctcataaccgaaggatctccggcatgaaagccacaagcaatatttgctgacgttacatagcgtaaaatttctttatcatttcctaatctatagttcccaaagctctcccctaagtcacagttcaaatcaacggtagccatcatcttctctccttatattttcattcgaagtgctcttttaatatgatttattttcttttcctgctccatatataaatgctgcgcttcatccagtgaaattgcttgaaaagaaacctttttccctggagaaatttgcgccagcgctgaaaaatctgcagttgctacctgtccgattctaggatatcctcctgtcgtttgatgatctgctaataaaacaatgggctgtccttcttttggtacttgaatcgtaccgaacgtcacagcgctagagagcagctctttttcttgaccaaggactaatttcttcccttttagcctatagcccatgcggtcagattgaggggtaacgtcaaattcttgattaaagaaatgttgttgactttcttttgtaaaccaatcaaattccgcacctttcatcgtgcggataataggcgtctcgtatgaaggaagaagtttaggatgaatcgtccaaaaagcctgctgaaaagagcggtccgtttgctttttcaccagtttctttatgattgctttccctgtttctgtaggagggcggcttaatacttcgtcccctgactgtaatgctttaccgtgcagcccgcctatccgagcgcgaagtgaagtagatgtacttcccataactgcaggaacattaaaagcaccggaaaccgataaataagaacggcaccctaaagtcggaacaccaaactgtagcacgctcccttttttcacatataaaggccgccacatctttacggcttcatcattaacagttggcgataaatcccctcctgtcagggcaatcaaaacatcttgctgaaattcaatttttggtcccattaacgtaatttcaacaaccggctggttttcttgatttcctactaataagttggcaatccttaaagcaactttgtccattgccccgctgacaatcatgccgtccttttgatatccatgtctgccgatatcttgaatcgttgttaataaaccgggacgtatcactttaatactcatcttcatccacctccttttgggcttcatattccgtttcagaaatggaaacaaatcggatacgatcacctgcttgaagcaagcttggcgaatctttttctgggttaaatagtgtaagaggagtacgcccgattaactgccatcctccaggtgtctcaattgggtacacgccggtttgcattcctgcgatgccaactgacccttttgggatgctgtttctcggtgattcttttcttggggtcgcaatttctttgctcattcctcccaagtaaggaaaaccaggagcaaagcctatcatatacaccaaatattctccatttgtatgaatggagataacttcatcaggcgttaatgaatgaaaagcggctaccctctctaagtccgggccgtactttcctccgtaacacaccggaatttcaatttgtctagcgaccgcttcagatttttcttcctggcggaaaagcagttcttcaatatatgtagatattgctgtgtaaggatttcttcttcctttttcactcattatccaaggatcataatagattgtaactgttgtaaaagccggcacatattcaatcattcccttacataatgattgctctagcacctcagtaaattgctgaatacgtttatgtatgccgaaattaatttcgtctccaaatgaaacgacaacgccgctgtcaccaagaggataaagtcgataatcgtgactcattccgtctcctcctttttacttagtattgtttgagcagctccctttaatgctgtagttagatacattcattagaattactaatggaattgttgtttttaaataacattttcttatatatctaataaaaaaaagaacaataaatctctatcctgtatggataacattatacaaatataaaataatcttatgttctactaaaacaaactccaaagaaaaattcaacctttttaaagttttatcgtcaaaaggatcacgttttttcaattttccccataagaaaaactgctttgttttttataccaaagcagttttttgtaaacatgtacaaaaaggaaaaactcatgggcagtaaaacattatatacctctgcgagcaaaatctacaaaacgaaacttatcaagacgatgacgtgattccgtatattgaaaaaggcttgcatcttctaaatacacatagtttcttactacgacaatatgttcatagtcttttaaatctaagtaacacttatcttcgtccgtcagctcgtcaacggaaatttcttttttggcaaagcttattttcagcccaagatctttttctaagtattcataaatagagcctttgcatatgtcttttgtgaggtgaggaacatactttttatgaaaaaaatctttatctaaaataattttctctccatcgatttcccgcgctcgaatcactttccatatgagatcttttttcgtcaccccaagctgtgtgcacaaatcttgatcggccttaactaattcaaattcttttacaatagtagtcgatgtatgtcctagcttttccgccacttctttgaagctaacaagtcctgatactggaaaatcaaagcgtgatacgtccaatacaaatgagccttttcctttcattttttgaatgtacccattttgtgaaagtaaatttaacgctttccgtatcgtttcacgagacgtttgatactgttcaacaagctcattttcagaaggaagttttgtattggggcgccagtcaccacgtttaattttattgactaactgttcgtagatgctgataaatttattttctttcaattgccatcacctattttactttctatatatacccaattgtataaaaagaacgatagattgtcacccatcgttctttttacttttttctctatttttttaaatgatacacgattgattcatacggccgcagtaagaatcgcttgaattcctttgatgaatcttcgtagttagacaacaatatttcactatgatatccttcaaaagttatatcttctggcagttcaaaggctgtttcgctgccgtagaaattatttatcaccaacagcttttcatctgctccatttcggatataagcgaaaacctgctcgtcttctccaagaatcaattcatagtttccataggtgataatctcgtactgctttcgcagtgcaataagcttttgataaaaataaaaaattgaatcttcatcatctaatgctttttctacattaatttcacggtagttatcggccggattaatccatggctttccttttgtaaaacctgcatttggctcatcgctccattgcaccggtgtacgggaattatctcttgatttatgttttaaaatctccaaaacttcattttcgtccattccttgtgcacgttttatctcatacacatttaatgactccacatctctatattcttcaatagaggaaaacttcgggtttgtcatccctatttcttccccttgataaatataaggtgttccctgcatcagatgaatcgttgcagcgagcattttggcagctttattatgatagagttcatcgtttccatagcgggaaacaacgcgaggctgatcatggttgcaccaaaatagtgcattccatccccctcctttattcatctccgtttgccaagttgatagaatctcttttaatttaatgaaatcaaaatctgctagcgcccacttttctccgtttgggtaatccactttcaaatgatgaaaattaaacgtcatgctaagctcgccccggtccggatgagaatattgaatacagtggtcaacagttgtcgacgacatttccccaacggtcatgctatcgtattttgaaaaaacttcttgattcatttctcgcatatattcgtgaacgcgaggaccatcggtataaaatatccgtccatctcctagcgcgatagaaccatcatcatctaaaaagcgctgatcttttgaaattaagttaataacgtccagacgaaatccatctactcctttttcaaaccaaaacgtcatcatatcgtacacgctgcggcgcacacgctcattttcccagttcaaatccgcttgcgtgacatcaaacaaatgcagataggattgttctgtcagcttatcatgctcccacgccgaacctccaaattttgaaacccaatttgtcggagcacttccatcttctttttgatctttccaaatataaaaatctctgtacgggttatctttcgattttttagcttcttgaaaccattcatgttcagttgacgtatgattaacgacaatatccatgatgattttaagatcccgcttatgcgcttctgttattaaaagatcgaagtcctccattgttccgtattcttcttgaataacaaaataatcacttatatcatatccattatcccgctgcggcgatttataaattggggttagccacacaacgtctacgccaagctttttcaaataatctagcttttcaataatgccagctatatcacccactccgttgccagtcgtatcgtaaaagcttttaggataaatttgatagacaacagattttttccaccaaggttcttgcatttttaacaccaccatttaattctttgaattatgttgaaacgagtctgtacccgcgacagttgatgtaacggttgattttttctgaagctttccaagcgttaacgttagaagaaacggcaccacaattacgatgaccattccaataataaaagctgaccagctctgtggaacaattgataacggagctgggataccaccaattcccaccgatgctgctttcactcctgccacggatatgacgacccctgcaatagctgaaccaattactgcagaaataaaagcaaatctaaagcgtaaattcacaccaaacattgcaggctccgtaatgccaagccacgctgaaatccctgacgttaaagacaatccttttaatttctcatcattttttgaaagaaccattatcgcaaaagccgcagagccttgtgcaatattagataatgctaccattggccataagaacgtacttcctacgcttccaatcagctgtaaatctacggccaaaaatgtatgatgcatgcctgtaataacaaggggagcatataagcctccgtatacaagtcctccaataaatggagccgttttaaacagccatacaactgcacctgtaattacatttcctattgcaaatgtaatcggaccaatcacaataaaagcgagaaaccctgttactaaaagagctacaggcgctacaattaaaagctgaaaaccatccggtattcgttttcgtaaaaacaattcgatttttgctaacacaaacgaagcagctagcacaggtaaaacctgcccttgatagccaactttctcaacgtgcagaccaaataaattccacgtatcaatacttcctttttttaatgcttctccataagaccaggcatttagcaaatcaggatgtaccagcatgagcccaaggacaattccaaataaaggacttcctccaaaacgcgtaacagctgaccatccaataagagccggcaaaaaggcaaaagccgtattggcaattaaattaatcatgctcgcgaagtctttccactgtgtatgaacatctacgattgatttatcatcgtaaaaaattccggctcctgttaatacattattgattcccattaataaacccgcggttacgatggccggtaaaatgggaataaaaatgtcagctaatgtttttattgcgcgctgcagcggatttaagtttttagccgcttcgtttttcacttcctcttttgacagttcacctatacctgtaagcgccaccatttctttatatactttatcaaccgttccttgaccaataacaacttgaaactggccgtttgtagaaaaagatccttttaccaattcgtgctcatctaacatacgttgattgactttaccttcatcttttaaaacaagtcgaagacgcgttacacaatgcgttgcagcagagatattttcttttccgccaacggcttctacaatgcgctcaacagattctcgattcatatcttttcccccttgtttccgttttcattttactcctgtatttcttatcccccatataaatcttatcacaaacctgtatatacaagttttatgtttttattctaacctgtatatacaggttcgtcaacaaaaataaaattacttctttttcatttcatgatatagtcaaaaagcaaagtatatagaaggagacgttacaatgctgcaagtaagattaatggaaaaacaagaagaaattaatgaagcgatcaaacagtttgaacagaactaccatatagaacatcagtcaaaagaatatacgcgaagcgctaatccaaagtatgagcgcaaaaaagatacgcgcgtgtatctttcaatgcatttaaaggagaaataaaaaagaggctgggacataacaaaatgaattcaatctaaaggcgaacaaatgagatacatgagctgaaccgcttgtgacaccgcagttgatctccgtgcaagacttcgctttccgcgggcggacgctgagcctcctcgtcgcttacgcttctgcggggtctcacctgttccgcttttcccgcaggagtctttgccttgccctccaatcaactgctagaaggaacgaaaccgatgaaacctacgttcaccacaacaaaaaaacgaactattaatcaaacatcttgattaatagttcgtttttcattttagctaaaatacttttgtctcaatcttttttttattctatatcgaaccaatttgatggaaatgatagctctcaggatccgtaactttttttgttaactgaattatttttcgtaattcatcaattggaacttgcccaggagctgagctgcttttccctacagcgaaagtaacagaagagccgtacatccacccgacgatccggctaatagctcctaaccctcccatcgacatggtaatgagaggaatgctgagctctttttcagcctctcttgtagcttctaataaagttaaaacatcttgattgttctgaggcatgacagctgctttcgctgcatctgctccgtaaaattcagctagaaataagcttttaaaaatttccgctttaggaggagtaaaagaaaaattatgataagaaagcacaagtttctttttattttccttggaaattttgcgcaaatagcggatatgctctggctgatttgatacttcaaaatcaataattgctacatacgggtgtttacatacctctgcaagtacggctactatttccttttctgataaggaaataggctgccccccttctttttgagaacgtacagtaagcaaaataggagtgcgctcgctattttcatatatatctttagctgcagaaaggacgctgtttatatcttgaatttcttcgtaaaaatctaagcgccattcaattatatccggtttttttaatagaatttccgctagctctgttaaaagctctttgcgatctttgcccactaaaggcgtacaaatagatggagaatgagctccttctcctcgttctaacataggaacagctcctttttatcatagttaaatgtttccgttttcatttcagtatttgttccatacttgttaaacagatacatggtgtactttcttatccggtgagtaaatatccatgatgttccaatgtcctgacgttggtacaggattatttaacatcgctacatcaattacaactggtttattagaagcaatagctctttgaagtgccggtttaaactcttcggctgattgaatctttataccttctactccataagctttagcgatacttgcaaagtcaggagaatatacctctccatctttttcaaataccgtgcctagagtggttccaaaatgggctttttgcagtcccgcgatcgtaccaaacgcaaagttattcataatgatccaaaccactggaatattctcttcggctgctgtagcaagcacagctggattttggccgaatcccccgtctcctactagagaaacaactactttatcaggctgagctacctttgctcctaaagctgccggcgctccaaatcccattgtggcaaaacctcctggagttaatatacttccagcttcatagattggaaactgttgtcctaccccattcttattccagcctacatcagtagtaatataggcatctttcggcaggacttggcgaacttcatttaaaattcgctgcggctgcatcgggaatgaattgtcgtgaatatattcttcattgctagctttaaactcttcacgataagaagcaatctctttgattaatgcttcattttttactccttccggaataagctgtttagctacgcgatttaagactttaagggcttgttttaaatcagccactgcaccgatttcggcagggtaattacgccctatctcgctaggatcaatatcaatatgaattaattttgtttgtgaaaaatcaaacgtatattccggctcccaggagctagaatctgcttctgcaaatcgtgttcctaatgctaaaatataatcagcagtccgacacttttcattaataaacttcgtgccccaaaaaccagtcatccctagagtcaagtcatgatcatctggaagtgctcctttgcccattaaggagtgggctaccggaatgttcaagtggtccacaagctcttttaattcatttgctgcatctgctaatagaatgcctccgcctacatataacactgggtttttagcattaattaatttttgtacaatactctttgccgtttcatcatcgatagaaggttgttgcaaagatttcgtttggcgatgcaatcgatcaaataaagaaacatcgatcttttttgaaaagatatccataggtacagatactaatacggggccaggatttccactttccgctagtaaaaatgctttctctaatatttctggaaataaatctggacggtcaactctccatgcacgtttaacgaagggacgataaatttcatattgcgaagcatcagcatgtaaatttacctcttgatgcggatgctttccataataatgagtaggaacatcgccagcgatgacaaccattggaattgaatctaacgctgcattggctacacctgtagcagcatttgttaagccaggacctaagtgacttaatactactgctgcttttttcgtcacacgtgcatagccatcagctgcatgcgctgcaatttgttcgtgtcgaacgtttataaatttaattttgctttcttctaaggctgttagtaccgctatgtttgtatgaccacacaaaccaaaaatatgctcgatgcctcgttcctcaagataatttactaattgatgtgatattaatttttccattgtatatccccctttaaattcactatatattttttcaggtaataaactcagctacgatagctgcaggacaatcatttttgtttctgtcatatcttcaatcgcaaatcgaggtccttctctaccaacgccgctgtcttttatcccaccgtacggccaatggtcgagtcgaaaattagaggtcccattaatcacaactcctcctacttctaaagattcagcaacacggtaagctaaatccatttgatttgtaaacagccctgcttgcaaaccgaatgatgaatcatttgtttcccgaatagcttcttcaatatcttgataaggaataatgctcaccacagggccgaacacttcttgacacactactttgctttgtttaggaggatttaatagaacagtaggttctatagaagcccctgtctttttgccgccgcatatcagctttgcacctagagcgactgcttcttcaatccaatccaaaactcggtttgcagctttttcatctactaaacatccaacatccgtctgcggcagcagaggattaccaacttttaaagacgttacctcattcttcagaagctctgtaaattcagaaacaactgagtcatgtacataaatacgctgaactgaaatacagctttgaccggagttgctaaaccctgttctcccacacatttcagcagctttcttaacgtcggcatcttcatgaacaatcgttgaagcatttcctcctaattctagaagcacttttttcattccagacagttcacatatatttctacttgccactgttccaccggtaaaagaaattatatttacacggtcatcttttacgatttgctgtcctgtttctactccccctaaaaccatattaatagcgcattcaggcattccagcttctaataatagagctataaattctgaagcaactaaggttgtttgcggagccggttttaaaataacactgttgccagcagcaaaagctggtccaattttgtggcatactaaattcaaaggtgcattaaaaggagtaatagcagcaacaactccgacaggcacacgaaatgtggaagctatcgcttttccccctcgttcggaagcatctcctggtatcgtttcaccgataagccttttcgcttcttccgcagattgctctaatgtttctacagatcgagatacttcatccaacgtattcttcagcggttttcctaactcatttgagatgagagaagcaaatttttctttttgcttttccaaaagccgtgctgcttcttttaaaattttggccctttcataagaagacagactcgcaattgtttttttagcttcataggcggctgatagcgctcgttcaacatcttctggcgttgctataatttgctcaccaattacttcctgcgaatacggacttttaatacttactgctgatcgattaccttcaagccattctttatttacatagggccttgctcgtctaaagctcattgttatctctccttttaacaattgacctgactgctatttttagatcgatctattttcatatttagatcgatctaaaaattaatgcagttttctataaatcctattgatttaaagtaataactcgttttgtaaacgttatcataatcctacaacagaaattttaatctagcaatagtaaattaaagaattttctaaaaatattcattgatcctgggttcagtttgcttatactcgcttacgtagtctcacattcacttcctttttttcttacatacactgtaggagtatgtaagatagcagcactgtcaatatgacaaagatttatgattgtgatcgagcttaactattacttatttgttttcgttacagcgtatcaccatctgttgactaacaaaaattttataaacgtgagctgatacttgcttcttaggacataatatacctttcactgtttttacaaacagtaaaatttgtattataattctaataactaaaatacaaaataataagttttttattgttaaaaacagaaagaggctttgaaaaatgacttacagcgagatgtctcttagagaaaaaagcattgtatttattggctttatgggcgtaggtaaaacaacaatcggcgaactagtcgctaagaaattatacagagattttgtcgatatagaccaagaaatcgaaaaaatgtttcaaatgcctacatcacaaatctttaaagagtttggtgaagagtttttccgaaataaagaaaaagaagtaattagccagttatctcagcagcgtttaaaaattatatccgttggcggaggcgcatttcttcaagaagaaattcaaaaaatatgcttatcaaattgtattgtattctttttagacctttcatgggattcatggaaagagcgcatcagcctcattattgacagtcgccctgttttacaaggaagaagtctagaggatattgaagaattattctatacgcgacaagcaatttattccaaccaccactccaaagtagaaactgacaatttggatattgaagaagtagcaaattatattgttgattccttgaaaatggcttgggatatttatgaaccgtctaaataattcacaaggaaaagaagcagttcattaactgcttcttttttttgatgacgattctcgaacaactaactgaggcgttaaaataatgcgatgatgatgttcttttttatcaacaatttggttatgaagacaccgtgcagcatcttttcctatttgtcttgcaaaagaagagacggttgttagagtagggtgacatacggatgattccatgacattatcaaatcccactaccgctatatcttctcccggaacaatccctttctcttttaaaccttgcataacaccaaatgcaactaagtcgctaaaacaaaaaactgctgttggaggcttagaaatgtccagcacttgacgtgcagcttctacaccgccgcttcttgtcggaccgctcggaataacaagctcttcatcaatagaaattcctgcgttctttagagccgagcggtaaccttccattctttctttccacgttgtagaaccggttgttcctcctaaaaatgcgattcttttgtgtccctgttcaagtaagtgttgaaccgctttttgaacgcctaagctataatctacccctacataatctgactccacctcaggcaattcccttactgctagtactgaaggaacatctaaatgctgaatttttcttatcgtatcttccgaggtacccgcaacaggacataaaataatgcctcctacccgatgctctagcatcgtagaaagcagctgatcctgtcgattatccgaatcaaacgtcgtacctaaaaacaccgtatatccgtctttctcgagctcctcgtgtactccaattaacaattctgtaaaaaacgtattagatatatccgtaataataactccgattgttgatgaagtttgagatcttaaatttgctgcaatacggtcatatacatatcctaactctttcatcgaagctagaacttttttccttgttttttcagaaacacttggactatttcgcacaataagcgaagcggtagctcgagatactcccgcgtgttctgccacttgttgtaaggttacacgtttgcgtttactttgtttcaatttattccaccaaccctttataacgcaccttttataattattttacaattatctaaaataaaagaaaagcttcatcctttcacgatgttctctgacaaggaatcagtaacaaaaaaaagacgcagcgtggggctacgtcttttcttcctaatgcgaactcatataaaaattgataaaaaaggcaatcgtgatcacatacatcatccaatgaatttcgcgatggcgtcctgtaaacagtttaatcgctgtgtatgaaatgaagccgaatgctaaaccttctgcaatgctgtaggttaacggcatcatgacaattgttaagaaagcgggaacaacttcagtaaagtcgtcgaagttaacgtttcgaatgtcacttagcataagcgaaccaataataatgagtgctggagcagtagcaacgcttgggataaattgaataagcggtgcaaaaaacaaggtaaatataaataagatggcaaccgttaatgcctttaagccggtacgccctccttctgcaatacctgttgcattttcaatatacgtatttaacgcagtgcttccaaaaatagcactcgccattgtaccgattgaatccgctgcaagcgcgcgatttaaacctgtaattttaccgtttttatctactaagtttgcttttttagatagtccaatcaatgtcgctagcgtatcaaataattctacgatggtgaaagaaaatacaactgaaaaaatgccgtaggcaactgcaccctttaaatccatttgaaaaaatgtttctccgacgcttggcggcgtagctgaaaagacgtctttcagggaatgaggaactgcttgtactcctacaatcatcgctaatattgtcgtagcaaaaatacttataatgagagcgccttttacatttttagccatcagtacagctgctaatatcagcccaaaaatagccagtaaggggcctttatccatgacatttccaagccctacaaaagtagactcgtttgccacaactaatccagcgtttttcaaaccgataaacgcaacaaaaagaccaattccaactgctatggaagactttagtacgttcggaatggcatcaataatctttccgcgtattcctgttaccgttaaaacaaaaaataagaccccggatataaaaactgctccaagtgccgtttgccatgacaatccttgccctaatactactgaatacgtaaaaaatgcatttaaacccatccctggaccggttacaatcgggaagtttgcccatagagccatcagtaacgtactaaatacaatggcgtaaatggtagctgcaagagccgcttctcgggggatacccgcgtcagacatgataatggggttgacaattaccatataactgaccgtcataaatgttgtaagtcctgctagtatttcttgttttggtgttgtgttgcgctctgatagtttaaacaagcgctctaatattccgttacgctccaacacgcgcgcctccctacttctaaaaaaaataaaaaatcctacctattcaaatgtcctaaaaaggacacgatttaggaggattttacgttgcaaagtaaaatcttttgtcctattatagtcttaatttgtagatatgcaaaggtagaaaacgctatcattataaaaatttttatcttccgttagtttggaattttgaaaatttatttcttctatccctttagtctgtggcaagagtgctctttttaatcatttatacaaaaaaagagattgagacataactaaatcaatcccatctaaagacgaacaaattggacaaatgatctggactgcttgtgacaccgctgttgatctccgtgcaaggcttcgctttccgagggcgggggatgagcctccttgccgcctatgctcctgccggggtctcatcccttccgcttttcccccaggagtctccgccttgtcctccaatcaacagctagaagcaactaaacagattaaacccacgttcatcataacaacaaaaaactcgaattattaatcaataattcgagttttacttcaactaaaatacttttatcccagcctcttctttgttttacatccatgattatgaaattaaaagcgggattctttttaaaagacgatcaatcgaatgatttgcttctttcaatacaattccttggtcaattgttttcagcacgcgattttccatcacaatttctccatcaaccatcgttagttctacatctcctcgcgttgctgaatacacaactctagaaatagggtctacgccgtaagatggaaaggtatgaagctgatttaaatttaaaatagcaagatccgcttttttcccgacctctaaacttccaatttctttttcaagcccaactgctttcgctccgccgattgtagccatttctagcacgtgctttgcattcacggccgttggtccgtacgagggtttatgaatcgtagcggccagcctcatttcgttgaacatatccaaattattattacaaggagcaccgtcagcgccaagacttaaaaatacaccttgctctaataaaccgggcacatctgcgattcccgatgcaagttttaagtttgagccggggcaatgactaacttttactccttgattcttaataatttgcttttcttgatcatttagccacacacagtgcgctaaaataaggcgctcattggctaatcctaaatgatctaagtacatgatatttctcatacccgtttcagcttctacgatgcgaatttcttcttgattctcagaagcatgagtatgtacatggacattatatgcagctgataaatggctcacttcacgcagcaaatcttctgtacacgacagcacaaatcttggggagaatgcgtatcgaatacgaccgttatttgaattatgccatttttcaagcagctctacactttctttgatcgagtcagccgttgtctcctgcagagcttttggcagatcatcgccttttttatccatcattacttttcctgcaagagctcgaatcccgctttgagatatagcttgaaaagcagagtccgtatgatgaacagtttccatatctacaattgttgtagtcccgctttgaatgagttcgccgatccctaacagtgctgaataatagatagattcttcatcatgtgaagcttcaagcggccatattttcttctttagccagtctagcagctctaaatcatctgcttgccctctaaaaagcgtttgacataaatgaatatgagtatgtataaagcccggcacaatcgttttatttgctgcgtcaatgactttatctaccttttccggatgcaggtttttcccaatggctgcaatacgatttccaacaatataaaggtcaccgtaaataatatcattcttctcattcatcgtaataatctctgcatttttaattaatgtgtgcgtcataccttctttcccctctttcgtaacatctatctatttctagctcaagccgaacactaacatcttcaagcaatctttcttacactggtcttaaatatatatggtgcatgctctgagttgaataagtgtaggtaacctcatgcgcgatagagagtttgggtaaaaaaaattcctagctgattatacagctaggaggttggatttatgataaaatcccaagtccctttttcaagaggttatacgaaatcgcaggagaataatgtgatcttgtatttataatatggtgttttcagtctatataccagctttttgtcagaagttctaacattgtttttttattctttttcattatgttacttttcttaacacccttatttttcatgttatgcaatttattttcgtttcttctatgtaatatttcctaaaaataaagaatctatcttctgtttctatacaaaatagaaaagttattttatgatttgtatgattaaaaaactacaaatctatattttaggggcgattaacttggaaaaaataaatgttggctgtcgttttacgctttccgttatgagtgataacttcatcgatattattttaggcgcactaaacgaagtggatatgtctaaagttcagcgaaaaacggaccgtgttagtacgtttattgtaggaactgccaaagacatatttgaagttgtgcaggccgtttataaaagtgctggaaaatcaggaaagcatattgtgctgaatgccacgttttcaacagggcagcacgaagaatattgtgaagaaagaaaaataaaaccaaaagaaaacatgtcttcaaaccaacagctttgtgcttcgttccctgtatccactcaattttctttgtatccattagatacgccgcattatgtagacatcatcaaaagcggaattggcgcagttaaacaacagggagtatttgccgaaaccgtgccttttgcaacagctttagaaggagatgtggacaaagtattcgcttctctatacgaatgttttatgaaatctgtacagcaagctcgtgtcgtgatgacagttaatatgtcagcacacagtccttcttcaaaacgataaattacttcttattgatttataaggatagaatactagaaaggatttatataaatatggctaaaaaaagaacgtttttttcttttttcctaataagtgcgttattatgtctattagtcgtaccaaactctgttatggctagtgaaaaacctgcacatttaacggttgcttcttacacgcagttcttgaaagcgcaaagtgataaaagttcattgtatgaattttcaaaactgtcgcgtcaacaaaaacaaaaagttgtacaatcactaaaggatccatctctgttaaaaatggatattgaagagactagcggcacggtcgaagctgcaagtacagcagcatacggagcaagaacggcttcacctttattcaaaacagcagcttatacggcttcttataaagcggctggatttacaacaacaaaactaacggtgtatgtagactattacacgaaaaactcatcggtgacttcagtcaaaagtgtacgaggcgtcgtcacgaaaaatgtaaacccccttgtgtctatttcaaaaaagagctcaaaatcttgggtgcaaaataatcgagcctacgggcgaattgactggcagtggaaaattgcagctaaaaatgccggaatcaaaagacaaactgcttacggtacagcttccggcgcttcaggcggatcaacagctacagttaattgataaagaggaataaataatgaaaaaaatgatgtggtggattgttggtattacgattggagtacttttactaggaattctggtaggttatttatcattttacagcatataaaaacagcaggtaatttcacctgctgttttttatctaaatgtcatcttcttgtcataaaattaaaacctccacttacagtgtctaagtgcctgtaagaagaggttgggatcacaattattagtaagcctggcctcttcttatctttcaagcactgcttgtgggagttggcacggttctataaagtccgttgccgaggtttcaaagggcctatccctccacctctcttgataagaagtttgtcgaattttgttgataattgttgataagataaatattatgttacatgctgcacaaacagatgtcaactacttttcagaaaattgttttccctctaaaactatgatatcgctaccattactatgacaactaggttacaaatatataaattttttatatttttttattacgcttttacagctgactttttctcaaaagaagtgatagcctcatctagcatacgaatgccgtcatctatctgttcttttgttacagtaagcggaggtaccatgcgaataacttcacttgcatttccgcaaaaataaaataacacgcctttttctaaagctaagtctaaaatctcgaataaggcgtctccatcgccttctcccgtatgcggattaacaatttcaattccaatcataagtcctaaaccacggatatccccaataattgaatgtttgtcctttaaaagatgcagcttttctaacgcataagcgcccatttttttcgtgttatccagcagttgttcttctttgatcacttcaagagttgcaagggctgctgaacatccaataggatttcctccaaatgttgtactatgtgtgccaagaggccactgcttcattaattcttgagaagctaccgttgcactaagcggaattccagaagcaattccttttgctatagccataatatctggcacgacatcaaacgtttgtccagcaaaccattcgccggtacggccaaaccctgtttgcacttcatcgaaaataagtaatattccatgacgatcacaaatctctcttaacttcttcatccaacttttcggaggaataatatagccgccttctcctaacactggttccaaaataacggcagccacttcttcaggcgtgacttggtgcttaaagagtatttcaaaatctttttcaagcttttcagtaaagtacacatcgctgtctagctccgcagggcactcttttggattggcatatggaatctgatacgtcagtcccgaaggctgctgaaattgtctatatttgcttttcgaggttgtaacacttaaagctcccatcgagcggccatgaaaacaccctaaaaaagaaataacatacggacgctttgtgacatgtctcgctaatttcaaggctccttcaattgcttcggtgccactatttccaaagaaaaagcagtctaaattgcccggcgttacttttcctaactcatcggctaactttaatatcgattcgtacataataacacctgaaggaccgtgcaataattggtctgctccgtctttgattgcttttactactttcggatgtctgtgtcctacatttgtcgtagcgattccggaagtaaaatcgagatattctttaccatccaatccataataatagcatccttcttctttcacaacgggcaaattcggatggtctttagccatcgtcggtgctagcaattgaggcattctttcaaataagtgactccagtcttttgacatactacatcctccttgaaattatacaaatcaattaatcttattccgaaatatagttacttattaaacaatat

SEQ ID NO: 30 - DNA, 53974 bp, Priestia aryabhattai
  source 1..53974: mol_type = genomic DNA
caacttacggtaaagtgtacttcgatcaattcctaacaatttagctgcttgagatatattggaatgagtttctgttaaagcaagtaaaatttgctctttttcagattgaagatgattggtggtttctgcttcttcaccgatgtaatttgtttcaaaagcattttcgtttagctgttctttcatatcctgatccgaaactacattatttttactgatcactactaacctttcaataaaatgcatcaattctcttacatttcctttccatttataggtagttaattgtgaataagctttttctgtaatctctatatttttcttttgatagagattcgtataatagactaaaaaatgctgagcaaggtaacgaatatcactttttcttttacggagcggtggaatatttatagttaagaccttaagcctgtaaagtaaatcctctcgaaatttgcctttttctacgacttttaataaatttttgttcgttgctgcaataactcttacatctacaggaatatatttattatcacctaagcgcataacctgtttttcttgtaaaactctaagtaagcgggattgtccatatgtatccatctccgagatttcatccagaaaaatcgttcctcggtgcgccatttcaaacaaaccttgctttcctttccttgtcgctccggtaaaggccccttctacatatccaaataactcactttccagtaaattaggcggaatagctgcacaattaacagcaacaaaaggaccgtttttccgcaaactttctgcatgaatactctgagcaaataattctttcccggtgccggactcaccaaaaattaaaacggttgcatctacagaagacactgtctgcccaatccgtttagcttcacaaatttccttagaatgccctaaaatatcagaaaatgtgtagcgtgtttcaaactttcttgacagtacttcccctctaattttagcttccatttcttgaatacttgtaatatcctgaaaagttatcattgctccgataatgtctttctccactttaattggagcaatattaaatattaaacttttgtttttgatttttttgattatacctaaatgctcttctcctccaaaataatttttaataggtaaaaagggcataacagcatcaatctgcttccctagcacttcttgcctttttaattctagcaagtgctcagcagcatgattaaatacttctacttttttatttcgattaatactaataattccttgtatagaataatcaataagggctttaactgtttgggaacgctctttttcaatttttcttcctaaagaaatctttttagcttctaaaagcgctgtccgaacggcagaatttccagattcaatagaaattgccttaaagccttttctaagtgataaagttgttgttttcattcctccaataacaatatctgtttctcctgaggaaagttgctcaatataagtcggaatatcttcaactgaatcaagaagataaatagaaaggttgatacccaaaatatctgctaaaatttccacatcatttttcatattctgaaatgcgagcatggccactttaggattttctaagtttgttacctgcttgcttttataaaaggcttgagctaaatcttgtcctgaaattggaatttcgactagaggaattccaattacagaatcagtaattaaccttgcagtccctcctctgcaaacgataacatcacagctggattctaatttattggcgagttttacggcgcggcttaaccttgcaaggtagatttcaacctctccttgcaaccctaactcttgaattactctttttccttgtaaaaacagttgtttatctggggcaataaaagcaatttttgacatattcttttcctccttattagttagaatattctagttattataacgtattggtacaacaattgttgctttatgtacaacaattgttgtatatttcatcacttttcttcggtacaaaggcttttttactcgttaaaacacttggcatgcttattgcaataaataaaaatgaacatgtttagaaagaaactaaaaacgattaaggagagataaatcatgtctttgcaaatcaatcaaacagaaaaacccctttatatcaaagtaaatgaaaacgataatgttgctacgattgtaaattcaaaaggattatcgaaaggaactgtgtttccatctgggttagagctaaaagaatatatccctcaaggacataaagtttcattaaaaaactttgagaaaggtgacaaaattattcgctatggagaagttatcggagctgcttcctcagcgatttctcaaggaacttgggtaaaagaatcatatgttaccctacctgatccccctattttagaaaagctgcctttggcaactaaagtttctgcccctttatctcctttagaaggatacacatttgaaggttacaaaaatacaaatggaagtgttggcacaaaaaatatacttgggattacgacaagtgttcaatgtgtagtaggagtacttgattatgcggttaaaaaaatcaaaacagaacttcttccttcttatccaaatgtagatgatgtagtagctttaactcataattatggctgcggagttgccattaatgcaccggacgccatcattccgattcgtacattacaaaatctttctattcatccaaatttcggcggtgaagttctagtagttggcttagggtgtgaaaagctgcttcctgaacgtttgagtccacaagagatttcaggaaatataacacgcttgcaagaccaggcgggttttaagcaaatgattgctacgattatagagatggcagaagaaaaattaattaaactaaatagccggacgcgtgtaacctgccctgtgtctgatttaacggtaggtttacaatgtggaggaagcgatgccttttccggtgttactgccaatccagcagttggatatgcggcagatttactagtaagagcaggcgctactgttttattttctgaagttactgaagttcgagatgctattcatttgttaacgccacgaacaattaataaagaagttggtcaatccctgattaaagaaatgaagtggtatgatcaatatttaaaaagaggcgaagcagatagaagtgcaaatccttcacctggaaataaaaaaggcggacttgtaaacgtagtagaaaaagcacttggctccatagctaaagcgggaacaactccaattgtcgaagttttatcgcctggagaaaaaccgactaaaaaaggcttaatctatgcagcaactccggcgagtgattttgtatgcggaacattacagttagcttctggaatgaacatgcatattttcacaacagggagaggaactccatatggcctggcaatggcacctgttcttaaagtatctactagaagttcattaactgagcaatggcatgatttaatagatttagatgcgggaagaatagcacaaggagaagcaaccattgaggaggttggttgggagctctttcacttaattatagaaattgcaagcggccataagaaaacatggagtgattattgggggttgcataatgatttatgtctgtttaaccctgctcccttaacttaacaagataacgagaacctgcgcttgcgctgtttctaaacaggttctcgttactttatgacaagttgtataactaattggagtttaaatgacctctgtctactgcttctggcggtgtttccaaccagccgttttccatcataatatccgcggtctcctttacaaactttgagatgtttgtcattgattttccgtataaaagcactagatcatgccttccatctataatctcctaattcgatttgttcttaggttggtcttttctatcttatctattcctcaacttttgccctttgttggaagagttaagaatctcaggtgagatatgcaggcttaagcattttaatctacagtcagacctattcacggcaaccactccttctttccgggaaatttactactggtagcttatcctaaatttctcataatataattgagaatcattattccaaaaataaaaaagagctgttttatacgttgtatttctcacgtataaaacagctccgcctgttattcacgtattttcatgaagccctattgtctgcatattattcactgcgttcaattactagttagctggacttctttattatcttcattttcttctattcccgcttcttttatattcacaaaaggttgatcagcaacggtcacaagctcgccgccgcaaacatggcgaacaacggttactagctctggaaaagcggggaatttgccgtataacgtttttaaaggaagtgcgcctttacatatcttactgttatgtggttcataccctttgagcgtatcaagcaataattgttctccgctttcagtcaatttgatgtaggtgtttcttttatcattttctcttttggacaaatgcagatatccttgattttctaattttttcgaaaaattaaacgctgtagagatatgcatagctcctaaattagctaactctgacatagagatttctcccgtgttactagctaaacataaaatatgatgctcatttacgtttagtccataaggtttcacccattgctcccagtcatcttccgcagctctccagatggctttacttacctgcattaattttaatccaaacaatgatgcatcttttattgtgtattcactttcttgttcttgtttcgacatactatcattccttatttgtaggctgttgtaagttagtttatttttaaaacgcgtaaaaacatttttatttcatctaatttatcagtatacctacaaaatcagacgaaaaaatacacgtacagtttaatttattagctttattccacaaaatttctacaattctgaagaagtgtctaccaactaaaaagaggtacttactttatttttattaaaaaaagtaatacgcgtctttttaattactaatagatgatgcggattctaagtgagcaaatgcttgttctaagtctgcaattaaatcttccgtatcttcaattcctacagatatgcgaaccagtccttcagatattccaagggctttacgttcttcaagcgtacattctacgtgactagtcgttcttgctggtccataaattgtttcaaccgctcctaaattaccggctttatttgcatacgttaactttggcagcaaaattttaatagcttccatttctccttttaacacaaagcttaatattccgccaaagcctttcatttgttttttggcaatatgatgatgagggtgtgtttccaatccaggataatagactgcttcaacagcttctttcttttgaagaaatttagcaatttccaaagcgcttcgttcttgttgacgtatacgtaattttaacgttttcattcctcttaaaataagatacgctgacatgggatccatggtcgcgccattgatctcacggtagtgatacacatgctgcattaattctttagagccacatactaccccgcctaaggcatccgcatgtccgcttaaaaattttgtagcgctatggatgataagatctactcctaattgaagagggttttgattaattggtgtcgcaaacgtattatcaataatgacgactgcccctgcagattttcctgcttttgctattctttcaatatcaataattttcatcgtaggatttgtaggtgactctaaatatagcactttacatcctttatttacttccgcttcaatttcttcatgatttcccgtattacataaggttacttcaactccgatgttaggaaggaactcagtgaagattttatttgttcctccatatgtatcttttaccgatacgacgcggtctccaggttttaaaaaagtgtataatgtgctgctaatagccgccatgccggaggaaaatgcgaccgcttcttctgcttcttcaagtatccttactttttcttcaaaagctttaaccgtaggattactcatgcgattatacgtatagcctggtttgtttcctaacgcaacttcttgccattcgtctacatcatcataattgtaagctacgctcaagacgacaggaacttgagtggcattgtaagcaagtgattctttttctcctgcccataccgcttttgttccgtcttgtacatttttaaactgtttgtctgtcatttactcatcacctctgattttattaattagataatgattagattatatattgtatacaatatactgtatatagtacagaataatctgataataaaataaccatacttaccttattaaatttaaagaggtcgagacataacgaaatgaatctaatctaaagacgaacaaataggatacatgagctgaaccgcgtgtgacacggcagttgatttccgtgcaagacttcgctttccgcgggcgggcgctgagcctcctcgtcgcatacgctcctgtgggtctcacctgttccgcttttcccgcaggagtcttcgtcttgccctccaatcaactgctagaaggacgtaaacaaatcgaacctacgttcaccctaacaaaaaaacgaaccactaatcaaaaattttgatcaatggttcgtttttacttcgtctaaaatacctttgtcccagcctctttttttattcagctttcaccaaaattttcacctgttctttttcttttaacaatgtctcaaaaccttcttcaattacattctctagcttgatacgttttgtcaccagtttatcagcagaaaaatagccttttgccattaaactaataaccgctggaaatacatcgcggtagccaataatacctgttactgtacgctcttgtaaaacgattgtttggggatgaatggacgcttctttttcaaatatgctaacaatcattgtctccccaccacttttggtagaattaatggcttgagttaaaactaagggaacacccgtcacttcataggaaacatccacacctccacctgtgcgcttatgtacttctgctacggggtcgtattcttgcggattaatcacaatcgccccaagttcttcagctttctgtctgcgctgttccgatagttcgatcgcataaatttcagaggcacccgatgcttttaacgcttcaataactagcaaaccgattggccccgtcccaaatacggcggctttatctcctacctttagtttgctttgacgcacagcatgaagagcgacagctgaaggctctacgagagctccttgctcgtaagacaccacttccggtattttatgaatcatttctaccggtatggaggcatactcagaaaaacctcccccacctccggcaagaccataaaaccccattttattacaaagattatactttccttgtttacagttttcacactctccgcatgcatagataggttctaccactactctgtccccgacttttacattcgtaataccttctccgatttctacaacttgtccagaaaattcatgccccagcacaaccggcgctttatctttgcttaatggatggggttcttctgtaggaataaaaatgggtcctgccgtgtactcatgcaaatcacttccgcaaattccacaccattctactttaattttaactttcccttgagagacagtaggttctgcaatatgttctaaccttacatctttaacgccatgccatcttaatgctttcattctactcatctcctttccttatttaaaaatttaaaacagctacgaactctcagcttacaaattgaatttttttaatctgttataaaatgtacttcttggtatatctaacagcttagcggcaagtgacacatttccctgtgttttacgtaaagcatccatcattaagtctttttgaactttttcacgaaatgtgagtgcgggtagggacatagaatcattgttttctatttcttgtgaagtatccgagtgagagatgttcttctggccaccaagatttaaagaactcaaatcattcaatatcttctctttttctgcttctgttttaagcgagatcttcaagcgttcaagtacattaaataattctcgaatattgccgggccactgataatctattaatttatctactaattccttgggaaaattcatattccaagcattcttttgacaaaagtatcgcatcagatgtggaatatcttctttcctttctcgcaaaggcggaacatgcacgggatacacgtgaagccggtaatataaatcttctcgaaacttcccttcactgacaagttgacgaagatctcgatgagtagcggtaataatccggatgtctaccggaatttcctgattgcttccaacaggtgttaccttgcgctcttgcaatactcttaacaaagaaacttgcatagaatgaggaagttcacctatttcatcaagaaaaatcgtaccgtgattagcctgctcaaactttccttgatatccttgacgccgtgctcctgtaaatgctccttccacatagccaaataattcactttccataagttctttcggaatggcaccacaattaagagcaataaaaggtccgtttttacgtgaactgttttcatgaattgtttgagctattacttcttttccagtacctgtttcccctaaaatatagaccgttgtatccgtaggagccgcatgctttatttcttctagtgtttgctgaaaggaacggcttatgcctacttctcctttaaaagaaaatgattgagcagggatctgtgtagttgtttggttatggtgcgcttcctctgatagataaataatctttccaatagaatgaccgtgtctttttgaaatgacaggcacttccatcactatacgaaatccctgttgtacaatcgtatttaactgcaggcctgaccattttggtatacattctcgcacggttttgcttgctcccacaatcacttctttgtaattgcaaagcagcaagagctgtttgctatcaacaaaattcatagaagcatgaaccaactcaatttcgtctttgtgcattcgaatgcttaactcccgctcaattgtatacgcaatggacgtaaccattccaagtgtataagggtgagctctgtttacaggacaagaaatattaataatcccaattaaatttccgtcgtcatttcgaactggtgctgctgaacagctccattgatgcgaagcaattgaataatgttctgtacccgttatcataatgggctcttccgtttgcagagccgtaccgattgcatttgtgcctacttctttttctgtccaacaggcaccttccacaaaattaattttccttgcttcattcagtgtaagtctatttcctgtaatagataaaatatagccttctgggtcaattaataaagcaaccattcctaagtccgccgctgattgtctgattctttctaagtgcggcaaagccgtctcaagaaataaagagttcattttttttcgagaatgaaaggcttcatttcttaaaatcgatctgcctttatctaggtaaggattaacatctgcgcttttacaacgatgccatgactttacaataatgtcgtttaaccttgaagattcaagtgctccttcttttacaaaacgtttccatgtgtttaaagaaagtgtggattccatttcttacctctcccctataaacttaattgaatatagtaaatcaaggcttgttaccattattataaatcacaaagaaaacgttatcattaccaaatgatagatttttaaactcacgttatgtaaaaattaataaagaaactagacgaggatgcaggaaaactcctataccgcttccgtgattccttcatcctctagttatctttttgaatcattcatttttacttttcatcctcaaagagtttaataacttgggcatctgcgtaatcaggagtgaacggcctgacccgccgactgcaaaagagcttcgtgaatggcttcagataatgtagggtgggcagcgataaagtcttccattatatctgtggtcaactctccgtggagcataatggttccttgtccaattaactctgtggcatgtgaacctacaatggaaagcccaataatttcattaaactgcggttctacgattactttcacttttccaacggactcattggcaatcatcgctttgccgtttgctgtaaacgagaattctccgacgcgaatatctccgtattcttgtcgggcctgcttttctgtcacaccgacacttgcaatttcagggtgagtatagatgcagcgtggtacagctcggtaattcacgctcttatcttttccacatgcgtgcaaagcagcaactgtgccttcatgaaaggctacatgagcaagctgaattccgccaactacatctccacaagcatagatattaggtatattcgtttgcatatgctcattaacattaattccttgtttggaaaaatgtacgccaacctgttctaaacccaaacctagcactctaggttttcttccaattgaaattaatgcatagtcagcttgcagttcatgcagctcctctttatgtttaaataaagccgttttatcttctggctgcatttctgttaacgaagaggatgtataaattgctacgccttttttctctaattcttcctgtaacgtaaatgcgatgtcggcatcttcaccaggaagcagctgatctgccgcttccacaatcgttacttttgcgcccatttgactgtaaatgcttgcaaattcacatccaattacaccccctcctactattagaagagttgaagggatagcaggcagcgacattgcttgtttactgtgaatgatccactttccatcaaaaggagcaaatggcaggctagcaggttctgaacccgcagcaataataaactgttcagcctctacctcttctaagtgattgtcgtttcgcacggctagacgatgatttgtcaaaaaagaagcttctcctttcatgactttaatactgttctttttcatcaaatagccaattcccctgaccaagtttttaacaatagctgttttatgatgctgaacaccatcccagttaattttcacttgttctaaaggaagagtgatgccgaattgctcagctttcttaattttctcataggtttccgcgcttgctaataatgacttcgttggcatacagccttcatttaaacatgttccacctaaatctttttgttcgatcaacgtaactttctttccttgccgggcggcggtaattgccgccacatatcctgcaggaccgccaccaatgacaactaaagttttcacgggatgcaccatctttctataagagtagtaaaataggctgttctaagtattgtttaatagttccaaggaaattagctgcaggtgatccgtccagtacgcgatgatcaaacgtcaggcttaaaggcagcaggtttcttctttgtaattcgtctccttgatacatcggtacatcttctgtagctccaacaccaagaattcctgtttcaggcgggtttaatacaggtgtaaaatactctactccgtaagcaccgagattagtaatagtaaatgtggaaccttgcattctatcagtactcagctggccttgccgagcatccgctgctcgtgttttgatctctgcagctaattcaactaacgacatcttttcagcatgttgcataacaggaacaactaacccattttctaaagctacggccattccaagatgaacatgattatagagatgaatttcgttatcgctataggcactgttcatttgtttatgttcttgaagtgaaagaacaacagctcgagcaataaaatcagttagagatatcttcaccccatggcgttgctgggtcacatctttaatttctcgctgaagagacagcaagtccgtcacgtcagctttcatattaatcgttaattgagcactgtttaataaactgttatgcattcgacttgcaatgacttttctcatgcccgctactggaagcgtttctttttttagagctttatctatttctgctggtgggtgactcgcttctgaagctcttttcgccagcacattctctacatctgctttggtgattcttccttttggtcctgtgcctttaatcgtttcaatattaaggttttcagattctgctattttccgtgcaattggtgaaatgcgcacagtttctttattcttttttgctgtagctgcgtttgctggtggctcttctaaagagatagcagccgctacctcgtttttaggcgcttgcagctcatttgctgaacggttctgctcagtgagctgctcgtttggctttccaacataacagataatcgttccaggaggcactcctacatcttcttgtacaagaatatcaagaatcacaccgtcctgcggcgcttcaatatccatttcgattttttcagaattaatgcttgcaatcatatctccttttgaaacggagtctccaacttttttgttccacgtcgaaacggttccttctttcattgccatacctagttttggcattacaacctctgcagccatttgcttcctcctccttttctttaattacacgcttagaagcgatttatctcctagtaactccgatacaacttcaattactttttgtggtgtcggcagataaatatcttctaatggaggtgaaaacggcacaggtgtatgtggtgctgtaattcgtttaataggtgcatcaagcatgtcaaatcctttatcagcaactagcgcagcaatatctgttgctatgctgcatcttggattggcttcgtcaataacaattaatcgattcgttttttcgacagaagaaagaatggtctcttcatcaaaaggtgatagacttcgcggatcgactacctctacgtcaattcccttatgagacagttgatctgctgccgtaagtgcagtatttacttgttttccaatcgctacaatggttaaatctgttccttcgcgtttcacgtcagctttccctaatggaatcgtatagtagccttccggaacctctcctttcatgttgtacaatgttttgtcttcaaaaaagataaccggatcattgtcttcaattgctgctaacaataatccttttgcatcgtaagggttagaaggcaccactactttaatgccaggaatactagtgaacaaagcatacaagctctgagaatgctgagctgcagccctaaatcctgctccatgagtcgttcgaatcgtgacgggcacttcagcttttcctccaaacatgtatctaaatttcgcgccttgattcagcacttgatccaggcagcagccaataaagtcattaaacattaattctgcaaccggtcttaatcctgtagctgccgctcccattgcagctcctatataagctgcttctgaaataggcgtatcaagaattctttcacgtccaaattcttgtacaagtccctttgtcactccaaggaccccgccccacgcctcatcatcttgcaggtggtcaatttccgctccgccagctacatcttctcccaaaagaattacattctcatcttttcgcatcgccagtttcattgcttcattgatagcttcagacatacttaattttctagtcattttcttttccccctttaattagtaagatacataaacatccgttaatagttccgaagcatcaggataatcgcttgtttctgctagctcaactgcgcgttttactgctttttctacattacctttaatatctctgagctctttttctgttactacttgttctgaaagcaagtagttttcaaaaagagcaatagcatctttttcctggagatgttctttcttttcacctcctgatttatacgtttgagcatcgccttcaaaatgtccgtaatttcgatacgttacacattcaattaacgttggcccttcccctctgcgtgctcgttgaatagcttctgcagctgcttcataaactgccatcacgtcttttccatccactcgtacccctggaatgttataagatgcggcacggtctgcaatcgcgctgcagctcgaagcataagaaaatggagttgcctctccgtagccattattttcagcaacaaaaacaaccggcagtttccaaatcgctgctaagttaattccttcatgaaacgtcccctcattgcccgctccgtctccaaaaaagcaaacgcttacatcttttgtctttttatatttagcagttaaagcagaaccgcatgcaagcggaaagcctcctcctacaattccatttgcccctaaaattcctttatctaaatccgcgatatgcatggatccgccttttcctttgcctaacccggttacctttccaaaaagctcagccatcattccatctaaatcgccgcctttagcaatacaatgaccgtgtccgcgatgagtactcgtaatactgtcactgtcattaaggtgagcgcacattccaaccgctaccgcttcttcacctgcatacagatgaacaaaaccaggcagtaccccttttgcgaaaatttgatgtacttcatcttcaaactttcgaatttctaccattttctgatacatccagctggctttttctttcgtaagcttttctgttttgttttgagcagttttcattatggtaagcctcctcatttgattatcaaacttcacttaactaccattgcaagtaccgtgccaatagtaaaatcgctttatactagcgatctattgttgtatttggcctcataaagttagacaaaattgtacactgttccaattttgtctaactttgtccgatctcaggggaaccaattatgtaaactgaatttaaggtgcataataaacgtgcaggatgaaaatcgcattgaataatcaacaagaaagcttttatataaatatgatataatgctgaaggaatcgtcttcattttgaagaatactaaagctcctaaaggaggttggttaaagcaaaacgggctttatagaagttttaccgtaaagttggatgtaaattaaacgatgaaagatgaggtgaaaacctggaaaacatccaaagtttttgtcatctacacttcgtgatgtctagatgatatatcgccaggttactgttatgcacaatgcaattcaacacattacaagttttcatgtatacgcagccattattatatttatcattacatattttttgattatgaccgaaaagatcaaccgcgcttcggcagctcttttaggtgctatattgatgattttgttaggtattgttgactttaataaggccattatggaacacattcagtgggaaacgattgtccttcttatgggtatgatgattttagtcggcatcacaaacaaaacaggcgtgtttcaatacgcagccattaaggctgctaaaatcgctaaaggtgatcctgttcgcattctagttattttatcgattttaacaggcgtcggatcagcttttttagacaacgtaacaaccgtgttattaattgtgcccgttacattttccatcactactattctgaatattaatccctttccgtttcttatatcagaagtgctgttttcaaatattggaggaacggcaactttaataggcgacccgcctaatattatgattggggcagcgaaccctcatcttgattttaatgcttttttattaaatttaactcctgcagtactgattatcggtgttgttacgctggggattcttgttcttatctatcgtaaaaagttaaaagtagaagatagtaaaaaactggagctaatgagtttaaatgaaaaagattatattcaagattctgttttaatgaaaaaatcgttaactgtattagtcttaacgattctaggttttaccctgcattccgttttacatatcgatgccgccatggtagccattacgggtgcagctatattattggtaattggattaagaactcatgacgaagtagaaagtgcgtttgattctgttgagtggacaacgattattttctttgctggtttatttattcttgtcggagggttaatcgatgtaggcattattaaaaagctggctgctggcgctttaaacgttacagacggaaatattgcactgtcagcctatctcattttatggattagcggaattgcttcagctgttattgacaatattccttttgttgctacaatgattccgcttattcaagatatggctcacggaatgggaatgagccctgattctgctcaaattaatgtactatggtggtcactagctctaggagcatgcttgggaggaaacggtacgttaattggagcgtctgccaatgtaattgtagctggcatggctgtgaaaaaaggacataaattttcgtttatggactttttgaaaattggagctccaatcatgctcgtatccctgttgatttcaacggtatatatcttccttcgctaccttttatttctgtaaggaaagagcaattaaaatctacacgaacagcaaaaaagacttctcagttgagaagtcttttttgctctagatatatccactcaagacgcccaaacgaagttgataataaaagcggcgctaataatgtacataatccagtgaatttccttggccttgccggctagcaatttaacgaatgtataagataaaaaccctagcgctaagccttcgccgatactaaacgttaacggcatcaaaataatggtacaaaaagcaggtacagcatctgttatctcgtctaaaggaatgtttttaatttctgttaacatcagagctccaaccataattaaaataggcgctgtagcaaaagcaggaataatgctaattaatggcgtaaatacaatacttactaaaaacaacatggcaacaaccagtgctttaagacccgttttgcctccttctgcaattcccgcagcattttctacatatgcgttcatcgcagtagatcccatagcagcactggctacagtcgcaagagaatcagccataagcgctttatctaatcctttaatttctccttttccatccattaatccagcttttttagacagtccaatcatcgatcctaaattatcaaacagctccacaagtgtaaatgaaaaaataatagagaaaagaccataatggagagctgatttaatatccatttgtaaaaaagtttccgacatgcttggcattgaaaacgatacgacgctgctgatgcttttaggtgcttctactatgcccagcaccatcccggcaattgatactagcaaaatgctaatcagggcagctcctttaatttttcgagcagttaatacagttaccgcgataaaacctaataaagcaagtaatgggcccggttttgtaagctgaccaagggctactaaattttctttgttgcttacaataattcctgcttgcttaaaaccgataaaagcaataaatagaccgattccaacagaaatagcactttttaaaatagcgggtatcccttcaataatcttcttgcgtaagcctgttatggttaaaataaaaaatacaacccctgaaataaatacggctcctaaacctgtttgccacgttaacccttcacccaataccactgtatacgcgaaaaaagcgtttagccccattcctggtgctactgcaataggcatgttcgcccacagtgcaaacaaaagagtagcaaacacagtggcaaaaatcgtcgccgcaattgctgcttcttttggaatgcctgcatctgctaaaatcgtcgggttaacaaagataatatagctcatcgtcacaaaagtagtaattccagcaagaatttctgtttttatatctgttttgcgttcggttaagtgaaacagcttatccaaccatgaagggttaggtgctgatttttttgttagttccatatgctgagcttcaactttttcatttatcgccacttgcttttcactcctttaatcttcgattcatcttcttttaactcgcttttacagctcctctataaaacagtttgtttttaaccatttcccctctctttttatggaaatatctataaaaagagccgtgaaaacagaagggaatccttctatcttcacggctctttgcttctgtaaacagaagataagcatccgttttttacgtgttttgcacaacaaacgatttcatcgaacgttttgcaatttatatagagaagttatttaaagcaaataaccgtacaagaattctctgtaacaggatcataatctctaaataaagaaatgacctggatatcaaagaaaagctccactttttcctttagcatttttttatatttagtcgacaaagcggcatcaagagacatcactaattctctatattcttcactgaggacttctagtgccggcattctttttgattgagctagtataagaattttattatcaataatatctattttttgagtattcacgcctacataaaaaatttcttggctaatttgagtatacaaagtagctatcttctttttagagatcggctccatatgcttcacctttttcattgttaaaaatatgtttttgctatattgttttcacttgattattgtcctttgaccagctgccgacaaattcaggctcatcatagtcaaagaaattggttaaattctcatggcgattatcaataaaaagctgattggcgacttctgagacgagctttggtatcgcatattttagccctgaaagagcggatgcagaaattccacagctaattaaagcggaataattaaaagcaaaaaggccatataccattttttgaccttccctattacgatttaaaaaagcaaagccgttactgaggtaaggatgggcatccaatactgggttggcgatttcatgcggtgctttgtaatgatccttccagcgggcgatgtgtctttcaacaagtcgcaattctggacgcagagccggatctgttagaagcccggtgctaataattaaatagtcaaacataaacgttccctgaggagcggttacaactgctttgttgtgtttttcctcgacatcgagccatggggcatgtacgtgcagatgaaaacctggccatgaggaagcgcgtccaaatgtatcattcgtaggcggctgattgtattcgaaaaaatgagccatcacttcatatttttcagcatctgatagagcatggaaacgttcaatcattcctgaagcttccatttgtctgattggattaatacggggaagttcttttcgtcgaacaaatacatgagcttcagcaaccccttcggaaagcgcatagttggcgttatcaaacgcggaagctcctcctcctaaaacagctacttttttgttcttcaacgtagtaaaatcaatggtttgtgaagtgtgagaataaagatgaggcggcaatttttcagaaatcataggcggaacatgccattctcctcctccttgaattcctgtagctagtataactttacgtgccatcagtgtaggacacacggctccattcccttcaatatgcaaacgatggatacctgtttctgcaggctcaattaacgttaattttatttcatttgccacaggaaggttaagaatgttccggtaccagcgcaaataattcatccagtctcctcttgggattttgtcaagagcttcccagccttctgagccgaattgtgcttcccaccacgcttgaaacgtaagcgaaggcatacctaaatcgatagacgttaagtttttgggcgttcttagcgtaatcattcgcgcatacgtttcccacggaccttctaaacccgaacggttttcatcaataacaagaatattcgacacgcgttctcgcagcaagccaaaggccgttcctaaaccgctttgacctcctccaataatgattacatcgtatacgtgtccgctcttagggataattggctgtacctctgttggtttcctgaaggaaaggtaagaaagatcggtttctactcttttatttaaagcttctaagctcatcgttatctctcctttcaataaagtttctccatgataaaaagtttattttgtacctaacacaaaatgataggttttataacatcatttgatttatatttatattatcacttttggaatatgattgtatctccattctctctaaagttttttttgcaaattgtataaaatcactaatataatttttttatatcttatgtatggaaccatatttacatcgtttaaaaggaaaaaaacattacaaagtttaaggaagaaagcttttctgacatcaattttaaagagagcgtgtgtaagtttgtgacagttatttgttaattacgctctactacttgactatcgtattcatcaaatctatagtcataattagtaactcagcaaagggagtcaacgtatgagaaatttatttaaaataacagctatatttacaacgattgtcatgtttattttgatgattgccggcagccttgtaacaaccacaggatctggattaggatgcggaaacgagtggccactgtgtaacgggcagttaataccggaatacgcagtagcaacaatgattgaatatacgcatcgtttgattaccgcatttgcaggtcttcttgttttagcattttctatttgggcttggattcgttaccgcagaaaccgtgaagtgaaaattttagcgattatgagtattgcatttatcgttattgagtcattactcggggcttctgcagttatttggcctcagtcagctgaagcgctagcgcttcatttcggtctttcgcttattgcgtttaccggcgtatttttactttcgatgtttgttattcaaaaggaccgttcggatcattttattaaaggagcggttacaggcaaatttaaatggctcgcatggtttacgcttatatttacctattgcgatatttatttaggtgcatatgtgcgtcacaaaggtgctagcttagcatgtacaagctttcctgcttgttatggcaatacgcttattccaaaactttcaggaacaacaggtattcattttgcccaccgatttgctgctcttgtgctgtttgttcttatcatttggattatggtatctgccatcaaacagtataaagaaacccgccgtgatatttactacgcgtccatcattgcggtttctttaaccattgctcaaatattcagcggtatctttgttgtcatgtctcgtttaaatgtctttgctacgctgtctcactcggcatttattacagcgttattcgctacgcttagctacatttgtgtacagactttaaaaggtaaaagacaataaaatcaaaaaacacgtgcagttcataactgcacgtgtttttttgagttaagctagttctattccacctgtaatcccgtaaacttgagctgttacgtagcttgcatccgttgaagctaaaaatacgtatacatttgctaactctaccggctgaccagcacgctgcaacggtgtatcttgtccaaagcctgggatagcgtcgcttggctgccctccagaaatttgcagcggcgtccagataggtcctggagcaacggaattgacgcgaataccttttggagctaattgcttggctagtccgcgagtgaatccgttaatggcaaactttgtagctgcataatctaataaattaggacttgggctatagccttgtacagaacttgttgtaataatagaagcacctgccggtaaataaggcagcgctgcttttacggtccaatataaagagaatacatttacttcaaaggttttacgcagttggtccgtttctaaatcagcaagatcttctactgcctgctgtttgccagctacgagcgctagaacgtctaaaccatctaattctttataagctttttctactagctctttgcaaaaagattcttcgcctacatcaccaggtatgagcacggcttttcttccttctgcttcaataagcttttgtacttcttctgcatctgcttgctcttgtggcaagtaattaagcgcaacgtctgccccttctcttgcgtaagcgatcgctgctgcccggccaatacctgaatctccacccgtcacaagagcttttctgccttttaatttacctgcacctatgtaactattctccccgcagtctggaatgacattcatttctttttgtacaccaggcggttcttgatactgttttggatagtcttcatggaaatattgagttaatggattgtttagttttgacatattcgtcactcctttatgaatgaatccttaaccaactaaggaaaagttttctatatacttgttcttcccgtctgcttctttagtaaacatgtttgatgtgctctattatcctcacttttctttcattacccttccccttcaatcaacagctagaaacaactgcatacatgaaacctacgttcaccatcacaataaaaaaatccgaacgagtcgaattctctattaagaatctcgattcctcgttcggatcttctttcaactaaaatgcatttatcccccctctttaaataaatggtgagagctttgtattttgctgtgaacaataagctttctttctcttctgtcctgctactctgttagttccacttgtaaaggctttgattcttcttcggcttctttaggagtgcgaacgattaacacatcacatttggcatagcgtaaaatatgctgagatacgctaccgattaaaatgcgctctacggcgtttaaccccgtcgcaccgcatacaattaaatcaacgtgcttatcgggagcaatttttttaggtatttttgttttaggagaaccgtgttcaattaatgtctcgactttcgttactccagccttaatagctaggttactatagttggtcaaaagttcttcagcaaatttctctgcatcttgaaagcgtgtatccgtatagaatgcataaggtgatggacttaacgcctgtatgtcgataacgtgacaaactatcaaatgagcgttattttttttcgtgctgttaactgcttttttgaatgcccactctgcttctacagaaccgtctactgctacgaggatgttacgataagccatattcatcataatctctcctttgtctttcgtttataaagaactttccttgctacacttttattttacttcttgcgcaaacgaaagtatgtgatttttatcacaaggtagggaaattaataaaaatggagccgtgtgtagtgcacggctccatttttattgaacttgagagttaaaagtcattatcaaaatcgatcctgctacaatcgtaataacaaaaacgattccaagtattaaagccatcacattataacgtggcttctctccgtctttaatatgcatgaagaaaaacagttgaatgaaaaattgaagcacggccattcctagaatactagctagtaatatattttgagcaaatacatggtttaataccagcatcagaggaataacggttaaaataatcgagaaaataaatcctattgtataagcttttaacgacccatggttctccatctacatcacccccattaaatacacaactgtgtaaagaaagatccagacagcatcaagaaaatgccagtataagctaataatcgtcacttttcgctttgttatagaggtaattccgtatcgttttaattggattgtaattgaaatcatccaaatgatgccgacagaaacgtgcagcccgtgcgtactaactagcgtatagaaagctgtaaaaaatgcgctggtggaaatggttgctcctctatgaaccattgtttgaaattcatgaatttcaaggccaacaaagcacatacctaaaagcagagttacgattagccagccaattaaaagctttatttttcccttatgcatgctcagcacagctaatccgctcgtaaagctgctcgttaataagataaacgtttcagaaacaaatcctggaacttcaaaaaattcctttcctgtaaggcctcccgcagtatgattaacaagaacagcatacgtagcaaataatgctccaaataagatgcagtccgttacgaggaaaagccaaaaatccataactttgatttcttcatcatgttcatcatgatgttcttcgtggtgcgctgtcgcataggccatgtcagccaaccctccctactgaatcttctgtatgtcgaatttcatccaccggaatataatagtccgagttgtattgaaaagaacgagctagtaaacaagctccgactcctgtcaaaccgaatatcgccatccgcacccagtggaacgttaatccaaaaccagcaatgaaccagaaaaccgacatgataaatggaatacctgaattcttaggcatatgaattggagaaaaagcagctgtttccttcgcttttttcttttttctttcttctttcttcttttattgtccaccacgcatcttgccccgttactgtcggaatcactgcaaaattgtagtgcggcggtgaagggatggaccattctaatgtacgtccattccaaggatcccctgttacatcttgttctccgtacttaatgccatgaagaatctgccatgtttgaaagataaaccctatgcccataaagaaagctccgactgtagagataacgttcagcggtccccatcccatgtcaaagtcgtacgtataaatacggcgcgtcattcccataaatcctaatgcgtattgaggcatgaagcatacataaaaaccaatattccacgtccaaaacgcccatttaccaagacggtcatttagtttaaagccaaacatttttggccaccaatagtacaaacctgcaaaaaagccgaatacaacgccaccgattaacacttggtgaaagtgtgcaactaaaaagtagctattatgatactgatagtctgcgggagctgctgaaagcatcacccccgttgctcctcccacaacaaagcacgggataaaagcaattgtccatagcattggctgcgtcatttgaatacggccgcggaacatcgtaaataaccagttgaacactttaacacccgtgggaattccgatagccatcgtcgtaatagcaaaaaacacattcacattagcacctgcacccatcgtaaagaaatgatgcacccatgtgaaatacgatagaacgctaataatcatcattgaaaaaaccatagacttatagccaaatatcttcttttgagctttctcacctaagctcagtctcccttcctctaaatctctgtacataataatgatatataaacgttcatattagagatgcatctcaacggatcaaaaggctaataacctcctaacatattgaagtttgtcatgacatattacttactcctaaaaaattatcatgttgtgttgttaaagggtgtgatatttatcacacttgaagcgatttttatgtagtttaaatggctttaccataatttcgtcacatatttgggtaattgtggggaataaaaggtgccttgtgactagcctaataaaagaaaaaaactcttccagtttttattaactgaaagagttttttataagtactagatgaagtattgagctttaacacttactgatttgcttgtttgacctgctgaaacagccaatcaatcattttctgattttgatacgcgggaacccatgaagcatgatcatactttaattctttaggatattccgtatatagtgggtgccccccagctttctttatagcctctattatattccttgaataggtaacaggaataatagaatcgtcttcagcatgaaatgcccatattggtttgtgggtaagaaggtgcgctttagctggatcggctcctcccgctattggaaccatagcagcaaacaaattagggtgttctatatttaagttaaatgtgccaaaccctccctgagatagtcctgtagaataaaggcgattactatctatattgtaggcttttcttacactttgtagaatttcataagctgttttcaaatcctctgatgtttcgaatacttttgctaagtcgactttgttgttatcgtctcttgtaacagtgaagcctccgcttggtacattccgagcttgaggagctaaaacaaaagcgggatgctttcgttgattttctgctgaagcccaaacgatagctccgtcgttgctaagaagctgttttttattatcatttcctcgttcaccacctccatgtaaaaatagcaccaagggatatgattttgtagaatcatagtctttaggcacataaagtcggtagggcattgctttataagtgaatgataaaaattgagtagctatagattctctgctttcaaatgaataagtaaatatagctagatcactatgattcttatttttcgcgtttcctcttatggaaattgctttaagcaccgtatcattattaataataattgggtttgtatactgagtgcttttagtagtcggagtgctcccgtcaagtgtatagtaagtcttcgcccctggtgtgtttgtctttaattcaaccttctgctccaaataataagtacctgataaaactgaagaggttggtttttttacgtttctataattattttcttcttttgccgcaacaatatttaaaggaaggaaagctagaataagaactcctatagtaataaaacttagaactttttgtattgacgtattgttcactgataaagtacctcctttatactattattcaaatgtctacttccatttctagaagggcataacttaaactctttccgtgcgtatccattcctaaagaagtagtgactccaccaagtaacgcgcggtggcatacaaattgaaatgctgatatattaggaacttcgtagcgaacaatgtctccttctacaatatttcttaagtgttttttcacttccaaagcagtcactttttcacatagcaagaaatagtctttttcgtcatatggaattagtgatagcataagcgtgtttcctttatctccagctcgactgtgagcaagttcatataatttctttttcatttgttacgctctcctttaatgtaaggtgtgtttctattttgttacgtgaaatcaacgtagaaataattcctactacctcattaacatactttcttgctccgcctccgcctgcgggtccatttgtataaagagcttctacctcttctccgactttagcagcttcctttgaagtaagacatttccctgctactctcagcctaatttcataaggagctgattcttgaaaagagactctatgaacggaagaaataccaatataatcaattcttaagtcgactactttattttttaaacgcttatataaaatttcaccagctagcttagctctttctagagcatgggatccggcgtaggaaatttccccttctccaataacacctgcttcgtaacctacgctgacttttaacgtttcaggccttggtatacctgttccaccagacacttgaatttggttcaatttaatttcctgtaaatgaacggaagtaaaatctgcaatgacatccggtgttatatattgatgggggttagttacttcgtagagaagctgttcttttacagtagctaagttaatgactcctcctgtcccttctactttagtaatgatggctgtcccatcttctttaacatcagcaaatggaaaacctaattcagcaagctttgggacttctttttttccgggatcagcaaaataaccaccagctacctgccccccacactccaataagtgtccaattactgttccctgagcaattttatctacgtcgtctaaagaccatccaaagtggtgtaccattggagcaacaaataaagacggatctgctactctaccagtaataataacttgagcctctgtctctagagctggcaatattgtttctacccctaggtaagcgtttgcggatatgacgttatcaaaatgagatatcggttcatttgtttctagagtcagtccatttctatctatcaactttagtacatcatctcccgttacggctgctacctttatctcaatgtttagtcggttagctatttcaacaactttttcagcagcacctattggattggctgctcccatatttgtaataatccgcactttctttttcttaataataggtaagagaatctctagtctttcttctaacaagggatcgtaacccattaaagaattttgactttttcttttttgagcaagtgcgattgttctttcagctaaacattctaatactaaataatctaaatttcctttttcagccaatataacagccggttctaatcgatctcctgaaaaacccgcgcctgatccaattcttatcattttcatcacctcaaatagtaattgctcccgttattaatgccacaattgtcataacaatggtcgttccaaacgcccacttaaagataaaacgctgatgatcgcctaaatttacacccgctaacccgacaagaataaaagttgaggcggttaaaggacttaatggaaacccagttgtcatctgtcctaaaatagctgctctgccaatttcaattggatcgataccaaagttagaagccgtttggctaataataggtaatactccaaaatagtaagcatccggtgtaaacactaaactaagaggcatacttgtaaccgctactagtacaggtaagtaagaagctagtgattcagggataatactaaccattgcagaagccattctatctatcatctttgttcctgttagaatacccgtaaaaatgcctgcagcaaaaatcatcgtagaaacaattaacacgttgtttgcgtggcttagtaagcgtttttgctgctcttctggatttggataattcactaaaagagcaattacaaaagccacaataaataaaatcggtaaaggtagccatactttaattaacgcgataagcagcaaaattgttaaagcaagattaaacctaaaaagccgtggtccttttgcttctagagcagctgcatgttctgtaaacccttgtacatgtgcttccagttcaatgactcctagcctctgcctctcctttttcccaagccaaaaagcagctcctaacacccatacaatcccagcaatcattgcgggaataacagggttaaataattgagaagaatctgcattaaatgtagtcatggctctagcagtagggcctccccaaggagctaagttcataacccctgctcctaaagcaaccactcctgataaaataagagggttcatctttaatctcttataaagaggtagcagcgctgtaattgtaatcataaaagtagatgcaccgtctccgtctaatgacacaagcattgtgacgatagctgtccctacgactacttttaacggatctcctttaactagacgaagcattttagaaatcataggattaaataggcctgtatcaatcattaaaccgaagtacaaaactgcaaaaacaatcataatacctgtaggcgctacttttataataccttctaacatcatgtctcccatttctagcccaaatccgcctatcaacgcaaaaacagttggtacgagaactaaggcaatcaatacagataaacgattggtcataattaaaaataaaaatacgccaataattaaaaatcctaacaatgctaacatgtaatcccccctgccctaaattcacagattcaaaaatcttagatgtgaaaaccttcggtactttttgttctcgcaggattcatgccaagaatatataaaaatggaaacaaacctttattaaaccccttcaacatgtattgaaaaaaatttacgacacaacaaaaagaaagcgttaacaattaaactgctttctttttttgtttttgtaatctaaattctactattttagaaataatcattgcccagtaaaaaaataggcttcttaatacatattcttctgtatttctaaaaaactagacatctttctaaagtcttagaaatgaatatgatattttttcattttattgtataaagtagctaaagaaatatctaaaacctctgctgttttcctttttccttcaatattatttggatattttcttaatatttcctgaataaatgcgcgctctttatcttgtgtagcttgttgcagtgtttgactgattttttctgttttacctgcaacgcctgaaaatcttttttcatttttaatcataaattctggaaggtgatgaaataaaatatctgtaccttccgtcatacatgtggcgtagtcaattacattttttaattctcttacgttgccaggccaatgataggattgaagaaagtctagtgtatattcgtcaattgtgtaggaagtatttgtgatcgagtgctcaataaaagaatagacaagtttacgtatatcttctttcctttctcttaaaggaggtatttctaattgaatgacattaagtctataaaataaatcttctcgaaattgtttcttattcacaagctgctgtaggttacggtgcgtagcagcaatgatccttacgtcaactgcacgttcagtagcttctcctacccttctgatctttttctcttgcagaactcttaacaacttagcttgaagatcataggacatatctccaatttcatctaaaaatacagttccgttgtttgctatttcgaatagtccagccttcccgccttttttagcatttgtaaaagcaccgtctccatatccaaaaagttcactttctaacagagacgaaggaatagccgcacaatttacaggtataaaaggaccatgcttgcgctcacttttattatgtatagcctgtgaaaataattcttttcccgtgccgctttctcccgtcacaagaataggaaattgagattctgctactttttcagctatataaacaacgtgccttaaccctccttccccaccaattatttgttcaaatgtatattttgcttcatagatagaatccattcggttttctaaattctttaacttttcggtttgtcttcttaattcctttgataacttgtcaacttcattgagacttttacaaaccgatacggctcctgcaactttaccttctattataattggagccatgtcaaccatatattcccgatttttttcttttcgatatacgcctactctgcattgttgatcttttagggtattggttaactgagcacccgggcgatattctattagtggttttccgataatatcactttttactcctgtaatctttgtatactctgggttaataaatctaacaatcccttctttgtcgataactagaataccatcatttatcgaatttataactgcatgccaccagttaaagtttttagaagagcagtcgacctctatgtgctcttggaatgtattcttcacagtattataagctcctttctataataacttgagagtagattcttgctttatttataattatcaactaattttctcttttttgaaacagagtccgctcaattaatttgaataatctgatttatataagtgaatataacctcgctttctccattattaatgtgtaaattcattgtaccgttatttatatttaagatgaaacactcctcgtaaagaaaactatatttctattttcaaagagacttatcactatagcaatatcttttaaaaaagctatccactttcttcataaagattacatattaaaaacacctaaagatagttaggtgtttttgaaagttttatattcatcttttctctaagtaaaagctcaatggttatatggccttcttactctttgaagccccttgtttttttctccacatattttccatttgttcgagagttctaccttttgtttcaggaacaaatttccagataaataaagcagaaagtacactcattaaaccgtaaaaaccatatgttaatcctccgctatattccatcatcacgggatatgtagaggaaataaaatagttagccgcccactgagcagctacggcaatagctacagcacgacctctaattttattaggaaaaatctctgaaatgagcacccaacaaattggtccccatgacatcataaaggaagctgtataaataatgataaatacaagcgtccctataccaatgatgtttgaaaaagccatgcttgctacaccgaacattccaatggccattccgatagaccctgttattaataaaggttttcttcccaaacgatcaactgtcaaaattgcaattactgtaaaaataacgtttactaatcccataataatggtttgcagcatagaagaacctttagctgctcccatgctttcaaaaatacgcggagcataatatagagctacattgattcctacaaactgttgaaatacagaaagcagtatacctacaacgataactaattttccatatgccaataatttttcagacgaaacattggtagaaattgtttgtttaatatcgtctaaaattgatttcgcttctgaagatccattaattttagttagtatggctaaagctttttgatcttgattctgtatagctaagtagcgaggcgtttcaggaactaaaaacaagagtgctgcaaagagtaaagctggaatagctcctgaagcaaacatgtatctccaacctacatcattaatccattctaaggtttccccatttgcaataccccaattcacgaagtaaacgactaacattccaaaaataatcataaattgattgaatgataccaatctgccgcgaatatctgccggtgcaatttctcctatatagatgggacaaatggctgatgctaagccaacaccaatcccacctataatgcggtagaagttaaaagctagtaacaaagagagtgtcggttccccttttgtgaaaaataaaaactcaggataagaagcgcctaacgctgagactataaaaagaatagctgctaatataagtgattgtttgcgtcctagtttcgtcgcaaaataaccagataccaatcctccaataatacatcctattaaagcacttgatacagtaacaccgtgtgctaaagatcctaaccctaagctgtcaataagatacacctttaatgattcttcagctccagatattacagctgtatcatatccaaacagtaaccctccgatagcggcaactaaggtaatagaaaaaatatataatgagtttcgattttgtttcatgcgttgttaaaagcagttaaaacagtagaagttctatttctaactgagttcacacttatttgaatgcgttttcaaatccttggaacaccaaagaaattttcttcgtccattcgactaactgctcttatcctcccctctaatgtacgtatttttctattgaatcaaatcttactacagcattttctatacttccttttgtgtcaggtatatcgatatacaaccataatcaattgatacaagctactttcatataaagctcctttttaaagtaaggttgcatgttttgcaacctattacttccttttaaattcgcctagctttttacttaagtcgtttgtttgaaggtagacttctttatataattcataaagctgtttatagacttgtacatgttctgcgttaggataatatgtttttgaagacgtaataaatacgtttgcgcactcttccaatgagttataccagccacagccataagctgctagcatggctgctcctaaagccgggccttgttcagtagacaactttacgatttttgcattaaaaacgtctgcttgaatttgaagccaatgatcattttttgctcctccgccaattgatacaatagacgtaatttcctttccgctttctcgaaagatttcaattgattcacataatgaaaatgtaataccttcaataactgctcgcgtaaagtctctctttttatgagaggcgtccattcctataaaacttccgcgaatcgtagcatctgcatgcggtgtacgctccccaactaagtaaggggtaaataaaaggccgtttgagccgattggtacattttttaggtcagccaacaattcttcaaacgtgttgttttctgcgaaattttccttaaaccagcttaaactgtgacccgcagatagcgtaacgcccatcgtataaaaggcattttcttttccatgattaaaataatggacttttccattaaagtctctatcgcttcgttcctcataagaaagaacaacacccgatgttccaatgctacatagtgtttcccctggcgataaaatgccggcgccaattgctccgcaagcattatcagctccacctgcaaatacttttgttgaagtagctaatcccgttttttgagagaacgattcactaatattgcctatgcattcactagattcgactagtggcggacaaaggttaatattgactcctactaattggcaaagctcaccatcccattttttcttgctaatgtttaataataatgtaccggcagcatctgaatattcactatgaataaagccagtcatcttaaaacgcaaatagtctttgggcaacataaatacagctgttttttcaaatatctccggttcatactcttttacccacaataacttaggaagagtaaatccttctaaagcctggttttttgttatttctaaaagacgtttttctccaatcactttatagagatgatgacattgttctgttgttcttgtgtcattccacaaaatggcgttacgtaataggttatagtttttatccagcagcacaaggccatgcatctgtccagaataactaattccttctatatcttcgggttttatattagcgttagcaattaattcatttaaagcactagccgtctgctgaacccattcttctggattctgttcgctataccctgttttttcatgaaggagaggataatttttagaaactacagcgcagatctcgccttttgtatcaactaaaaccgtttttacggcgcttgttcctagatcaattccaattacatatttcatcttgatacctccgcgtttataaacgagagtagaaattgtttctactctcgtttgtcctttaaacttccaaaatatattgatttaaaatggcctttaatcgttcttgtcttcctgatttattcacaatattcgaatttttaaacgcatactgctccagtgtatggaagttagcttttccttccacaatctcaagcccaattccctctttaaagctgctgtagcgctcgttgataacattttcgaaaacacgatcttctactaatttatgtgctactttcaatcctcgagcaaacgcatccattcctgctacatgagcatagagtaaatcgtcttgttcaaaagaacctctgcgtactttggcatcaaagtttaatcctccgctgcccagccctccattttgcaggatttcatacattgctagcgttgtagaatataaatccgttgggaattcatctgtatcccagcctaaaagagggtcaccttggtttgcatccactgatcctaagaagccttgtactctagctactcgtaattcgtgttcaaatgtatgcccagctaacgttgcgtggttagcttctagattaagtttgaagtatttatctaatccgtattgtcttaaaaatgaaatagttgttgctgcatcggtatcatactgatgtgtcgtaggctctttaggtttaggttcaattaaaaactgccccgtatatccaatttcggttgcgtaatctacagccatatgcataaatctggctaagttatctaactctaactgtaaatttgtgttaagcagtgtttcatatccctcacggccgccccagaatacataattttctgcgcctagttcttttgctgtttcaagccccttttttacttgagcagccgcataagcaaatacatctgcattacaagaagtagctgcaccatgaacgaaccggggatttgtaaacatattcgctgtgttccataataactttacgttacttgtttgcatgtattctttgatcatagtgactataacatcaagatttttatttgtttcttgcaacgtactcccctcaggagcaatgtctcgatcatgaaatgcaaagaatggaacatttaatgtttcaaaaagttgaaaagctgcttcaactctcgcttttgctaaatccattccatcatatctatcccaggatctttgcatagtagctgcaccaaaaggatccgtaccatctgctgtaaacgtgtgccagtaagcaacagaaaaacgcagctgatctttcatcgttttaccgccaactacttcttcagggttatagtatttaaaagctaaaggatttttagaatctttaccttcgtataaaactttgtttacgctttcaaaaaaattaattttattagtactagtttggaccatttgtcatttcctccttcgatttaagtgaacaagtttatccattaactatcttaattcagttagtttgtttatccaataaactaactttatttcatcatatacaaaataaatgtttatttcaatgttttttttagaaaatttagttataatattaggtatgatactttcaattatctaattcaagcttcataaaaaaacaacttagttcgacaggtaaacaaaggagtggttattattcaaattgcagatcaagctttagtaaaaaaaatgaatcaaaaattaatattagatgaaattttaaagaactcccctatctccagggcaactctctctgagattacaggattaaacaagtctactgtctcctctcaagtaaatacactgcttgaaaaagattttatttttgaaattggggcaggacaatccagaggcggcagaagacctgtaatgcttgtttttaataagaatgcaggctactcgatcggtatcgatataggagtcgactatcttaacggaattctaaccgacttagaaggaaatattattctcgagaagacttctgacttatctagttcttctgctagtgaagtaaaagagattttatttggacttattcatggttttgtaacccatatgcctgagtccccttatggtctagtgggaataggaatttgtgttccaggtcttgtagatcgtcatcaccaaattatttttatgcctaacttaaattggaatatcaaagatttgcagtttttaattgagagtgagtttaatgttccggtttttgttgaaaatgaagctaatgcaggagcatacggtgaaaaagtatttggtatgacaaaaaactacgaaaacatcgtttacatcagtattaatgtcggaattggaattggacttgttattaacaacgaattatataaaggtgttcagggtttttctggggaaatgggtcatatgacgatagattttaatggacccaaatgcagctgtggaaatcgaggctgttgggaattatatgcttctgaaaaagcgttactggttttgctttctaaagaagaaaagaatatttctcgaaaagagattgtggaacgcgcaaataaaaatgatgtagaaatgttaaatgcacttcaaaactttggcttttatatcggaattggattaaccaatattcttaatacatttgatgtagaagctgttatcttgagaaatcatataattgaatctcatcccattgttttaaatacgattaaaaacgaagtttcttctagagtccattctcatttagacaataaatgtgaactattgccttcttcgttaggaaaaaatgcacctgctttaggagcggtttctatcgttattgattcttttttaagtgttgcccctataagctagttaagtgaacgcaaaagttagcaaactatatcacgtttaatcttaagaatgaaacagctattttcgattaattgattttctatctaagggaaagaataaccctcttctaataagagtgttatgtctgtctccaccctcacctttttcatcccatgcagccagtcacctatcataacggcaactggctgtttatatgttattggcaacctgctcttttctaaactacggagagtcttgccttttgggttagtttacctgcttttcaaattatgaagcatgtcttgtaagagtagttatgacttccttatattcctctaactctttggtctgtgcgagagtattgattttctctagcgataaaagagagctctgaataataaatgtacgaggctccgtatcattttgcagtaattcatcagatataaacgtcacaaattccagactcttcttttgttcctcttcatttgttagtttattttcaatcacctgttttaacttcgcggttacgcgcgtaagctcagtcgaaaaatgactttctgttttctcattaaataccacagagtaaacggaaggattaaataactgttctttttgttctgctacttcgattacgatttcctctgtacgcttcatacaataagtgacaatttgttcgataggcaatggatagtttagtgctttattcattttaaatatattgttaagcattccttctagcagcacagctccatcaaataaataaggagaagtcttagacgggaaaatctgctgcaaacgttcatatatccaggtgaatgttgctgcttttaactcctctatatatcgaaatgttttaacttcatttaaaacgagtgtactttcaatcatttcaggaattttgttttgctctgcaaagttcagcataaaaattatctgttcttcaaataccttctgattatctcctttatattcaatggctactttttctctttgtagaataagtgattcttgcaaagacgaaagtaatgagagaagcagttcgcttttagatgaaaaatatttataaaatgttccttttgaaataccgcttctttctaatatatcttgtaccgaagtgtctacgtatcctttttccataaaaagctggtgcgtatgccctaaaatatcgagctgtttttgattcattgctgctactcctctgtttacagtttactttttatttagtataacttatctgccttttcctacgtgaattttatccttttcccttgataaacaactaaaaataattatatactattagtacatttttatacacttagtataaaaatgtactaatagtatacgttaattcaacaaagtaattatttatctagcaagtaacaactactaagcgctatgtagctagtagattccaaatttatacctattctgaaggaggaataagatcatatgaacaaagaagtcattcccgttacagaaattccaaaattccaatcacgtgcagaagagtttttccctatccaatggtataaagaaatgctgaacaaccaccccgtttattttcatgaagaaacaaacacatggaatgtattccaatacgaccatgttaaacaagtcttgagcaactacgaatttttttcaagcgatggacaaagaaccactatttttgtgggagataatagtaagaaaaaaagcacatctccaattaccaatcttacaaacttagatcctcctgaccaccggaaagcgcgatctttgcttgctgcagcctttacccctcgcagtttaaagaactgggaaccgcgaatcaaacaaattgcagcagaccttgtagaagcgatacaaaagaattcaactattaatattgttgacgatttatcttctccttttcctagtttagttatagcagatctattcggtgtaccggtaaaagaccgatatcagttcaaaaaatgggtagatattctgtttcagccttatgaccaagaaagattagaagagattgaacaagaaaagcaacgtgcaggagctgaatattttcaatacctctacccgattgtcattgaaaagcgctacaacctttctgatgatattatctcagacttaattcaagccgaagttgatggtgaaacattcacagatgaagaaattgtacacgctaccatgctgcttttaggtgcaggagttgaaaccacaagtcacgccattgcaaatatgttttattcttttttatatgacgacaagtcgttatacagcgagctgagaaacaatagagaattagctccaaaagcagtagaagaaatgcttcgatatcggtttcacatctccagacgagatcggacagttaaacaagataacgatttattaggcgttaagctaaaaaaaggagatgtcgttattgcgtggatgagtgcatgtaatatggatgaaaatatgtttaaaaaccctttttctgtagacattcaccgtccaactaataaaaagcacttaacattcggaaacggacctcatttttgtttgggcgcccctcttgctcgacttgaaatgacaatcatattagaagcatttttagaggccttttctcatatcgaaccatttgaagattttgaattagaatcgaatttaacagcttcagctaccggtcaatctttaacatatttgccaatgaaggtgtacagataaaggttatgtacatgacaaaaaagagagccgtgaaagaggtttatcatctccctcacgtttctcttttttgttattccgttatttatcaggattttattatttcatttaagtatttatgtaccaagtttgagaggccttttatatgatttaaatcctcatcccaaaaatctttattccctaggatattttcaacaagttgcaagagagacatccggtttttttgatatttcaaccactggtctctataaaattctaaaacatattcttcatcttttaatatatatggggagcccttaaaatcttctcctgtccaagtgcttttaagcttttctattttataaaaacgaataagcatcgcaaaggcttgaacgattccaagtggaagtgctccgtttaggtcgacgtagctttttaaagtaggcagtagacgatgtttaaattttgataagctgtttaatgaaatatcagcaagacgatgatgaataaatggattggtgaatcgttcaaatacctcttctgcgtatactatattttcattaaaattaccttggatagaaggaataacttctttttttattacttcatgcagaaagtgtttaaaattggagttgtccatgaattcttttactgtttccactcctgacaaaatcccatttagtaccataagtgtatgagccccatttaagatacggacttttcgtgtttggtaaggacctaaatcctctacccaatgcacatttaaaccggattttttaaaaggaaggcgataatctaattcactgtttccttctatagcccaaaaatgataaggttccgctgtattcagtaaggaatccttatatccccattctgtaaataaagaatctgcttctgccttaggaaagcctgtgactattcgatctaccaacgaattaaggaataaattatgttcttttatccattttataaatgcttcaggtaactcccactctttactataacggagcacgcattcttttaaggtatctccatttctttcaacaagttcacatggaagcatagtcaaccctttttctgtatttccactgaaatgcaaatagcgatggtacaaaaagagtgttaattttccaggaaatgattgaattgggacaccttcttctaataaagttggctgatagttaagtcccgcttctgtagtattagagattacaaattccaatatagggttttctgctaattgtaggaaggtatcccactcttcgtatgggttaatgacttgggagaaaacagaaattacttcactagacgtaaccgtatctccatttttcactccacgtgtaagcaaggtatagaggccatcttgctccttcaatttgtctattttctctttgcccgcaggtcgaggctgcgtaacagcaatacttccttgaaaataacctttcttgttacattgatgaatcatccagtcacagaagccacgcagaaaatttccttccccaatctgtaacactcttacaggatattcgaagccggcagagttatcttgaataggagtgatctttttattaagtggatttaaggtattttgtgaattattcaaggtagattcctcctttgtatgattaagtgcttagttttttatagtaattgattatatttctacaatagctttaatcacatttgattcaggatttaaccagtcttcaaactgttcaattaattgatcaaactgtgctcgatgggtaatataacgatttaaatctactttcttgcgtttaagagtgtctactacataatgaaaatcttctaacgtagcattcctgcttcccatcagcgtcagctcctttttatggaattctggatcgttaaatgagatgtctgctttcgctagacctacgtatattaattttccgccatgagccgaatagttaaatgcctctgtcattgatttagcattacccgtcgcgtcaaatactgttgttggcatctctccctttgttaactctactaatttatcaaatggattattaagaacatttaacgtataatccactttagcccattcattagcaaactctaagcgttcgttatttacatccattgctatgacctttgctcctcggtctttagcaaatgccatcacccctaaaccaatagggccagcaccaatgactaagacaaactctccttgctgaatctcagcgcgtctaactgcatgagctcctatacttaatggttccaccattgcagcttgatcaagtgttagtcccttagttctcactaaatgcgtataaggaaccgtaatccactcactcattcctccttcaatatgtacacctaatactttcatatctgtacagcaatttgtttttccatttctacaagcaatgcattttccacattccatataagggataatagagacttggtcaccagcttttaatcccaactcattgtgaggaataaattcaatgtatcctgataattcatgaccgagtacacgagggtaagtgaaaaagggctggtttcctccataggcatgaatgtctgtaccgcatatcccaatacgttgaatacgaactaatgcttctcctgcttgggggacaggccttttactttccacttttttcaactggttgggctgttcacatacaatgcttttcatactttatctctccatttcaatttgaaatttttttattcaataaacacatatcagagaataacgccttctttaaaaatactaatttctcgaaagcctaaacgttcattatttgtgtgagtttgacctgaagcaacattcaaaatatattgcaataaatcatgctttagctcatctatggtttgattttcaattagtctccctgcattgtaatcaatccaatgttttttacgatatgccaactcggagtttgtagatatcttcactgtaggtacaggacctccaaatggtgtacctctcccggttgtaaacaatacaatatgagcacccgctgcagctaatgctgttacggaaatcaaatcatttccaggggcatctactaggttcaatcctgatttgcttaccctctcaccatatggaacaacatcttcaactctagaatgccctcctttttgtgtacaaccaagagatttttcctctagagtgctaattccaccgtctttatttcctggagatggattttcataaatttcttgattgtgccgaataaaatattctttaaaattattaactaggtttgtaattttattaaacgtttcttcattcttagcccggctcattagaatcgtttccgcaccaaacatttctggtacttctgttaaaatagctgttccgccactagcaacgactatatcagaaactgctccaactaacgggttcgctgtaatgcctgagaaaccatctgatcctccacacttcaaacctatttttagttttgaaagaggaataggttggcgttcatattgattagcatgggctactaactccgaaataagggatattcctttttctaattcgtcttcaacttcttgtgctttaaggaatttaatacgatctgtcgcatattcaccgataacctctttaaacgcttcaatttgattattttcacaacctaatccaacgactaggatacccgcagcatttggatgctgcgttaaagcagctaaaagcttttgtgtatttgtcagatcatctcctaattgcgagcagccatatggatgaggaaaatgataaattccatccactctttcatctctgaactgttcagtcgccattttagctaaaaattcacatgttttattaatgcacccaaccgtattaataatccaaatttcattacgaattccgacttcgccattttcacgaatatacccttgaaacgtataattcaaggcttttggaatatttggttgagtaattggctggtactcgtaatgtaaaataccacttaatccggattgtaaattatgagtatgaatccactctccttcttctaaatcttttttagcttttccgattgagtatccatatttaaagatgtcctcaccttttttacaaggcttcactaaaattttatgacctctaggaatatcagtacgaataggaatttcaatgctgttttgaccctcgccttgtacgtttataacttcacctttgacaatctcatttatagaaatgacaacactgtcttttgaatgtaattgaataaccttactcatttttcaccctccattttcctcttatttagatgcttttaaaaaagataacgttttcattttacgaatatatttatatagtatcatcaatatttgagataaaaattgcgatttttgctgtatttatactgttttttgatataaattagtaaaaagaggagagggatttcatgagtaacttaaaaaatgaattacacagcaattttccgtttttatttgtctataaggatacgaagagtcctcaaaaagaattatctaaccatatgcatgattattatgagattgtgtacgtttatggagggaacggaactttttttataggtgatatttttcatgaaatgaatcaaggagatgtttttttaattcctaataatacaattcaccgagcaatgccagataaagaaacccctgtaacgtctactgttctttttttagccctatgttaatctataaagatttaattaacgattctttttcttattttagtgtgtttgatgtagtaaaaaaaagtaaaaactataaaatttcgctgcaccccgaggaaaaacagcaaattgaaaaattgcttatacaactttatgaggaagtaactaacgaagaaccgggttctaagcattatgtcttactaattattcatcaaataatgctagagttatatcgtactcacaccaaaagcaaggaaagaataaaagataatacgtataaggtagattggattgcagacattttgctttatataaacgaacatctacatgaacctctctcattgacaactcttgcagataaatgtttagtcagtccttctcacttcagcagggtttttaaagaaacaacagggataggattaactgtctatatcaacacaaagcgaattattaaatcgaaagaccttttactagaaaccgattatacaatttctcacatcgctgaaaaatgtggatttgaaagtaatcctcatttttatcgaatgtttaaaaaatatatgaatacaactccagcctcctatagaaagaaaaatgatataagcaacatataaacaaagtaatgtaaaaaagagtacaagcaaataagtgacgatgtgcttgtactcttttacctaattctatacccctgtcttagaagttaaattaacatcttttggtacaagttgtgatgctggttttacaattggacgtacaaatcgaataaccgcaagggaggcaaatactgctagtcctcccgcaagtaaaaaggcagcagtgtaagttcctgatctctcaacaaggaaaccggttaatgtaggcccaatgattcctgctgtattagccaagaagtgcatgaaccctcctacggatccaacgttatttttgtctactacatcgttaacgattgcccagtaaatagctcctgttaaatacagaaagaacacggaaagggcaacgagtgtgaccgcactgactgtagttgttacaaggcctgctacacctatgcaaacggctgataaaaacaaacatgtgacaagtaccagtttacgcgaaaacagcactcctttttgagcgaattttttggagaagaaatctgatacgaagcctcctagagcaaggcctataaaaccgagaatccaaggaatgacggtagtaatactcatctcttttacactcaggccacgcgcatctactaagtaacttggaaaccaagttaggaaaaagaacaaaatgtagttgtaagcaaaaaatgcaaatgctgtgaataacacagttctatgttttaagtaaaaagttagcttcaatttactttctgttgctacaggaagttcttgcgtttttagctcttctgatgtatccaaaggtttttctttaacaaatttccaccagcaaacagcccaaataatcccaattaacataatggcaataaaggaaactttccagccatatgcaattgcaataaaaccaacaattggaccagagatagcgcctccaagaggtgtaccgctgttagtcaaaccaataacagtcgcacgattacttgatggaaaccagttatttaccattttacttattgtagcagagagtggaccttcacccatcccaaataaaactcgaatagcaatcatacttgcaaagcctacagcaatgaccagagcaccgctaaatattgaccacacaatcatagctacaaaaagagtcaacttagcaccgtatttgtcagaagccattcctccaagaaaattgaaaattgcatagcctacagagaaactactaaaaataattcccatctcagtgggcgtaagagataaatcatcttgaataaaaggagctgcaattgataatgcagaacgatctaagtaattaataattcctgctaaaaataaaaataaaatgacaatacctttcccttgtgaaaacataaataccccccttgtttgtaaagcccttgctttctattgaaagcgttatcattatgaagcaaagctaaataatttctttcttcaatcaagatcattttgtaaagtaaatcgatttactaagaatcaagcaaaaaagtacttcttttttgcttgatggtttctaacaagaagttccaagaagcagaattggtttcaaacgatggatgctggtatcgattttatccgttttattaatttgattaaaaagaagctctgctgctaaattcgccatctgtacggtaggctgtttaatagttgtaatcgttggcgtataaagctttgcaaacgatacctcgtcaataccaataacagctaggtcttgtggtattcttaaattttctttttttatatattgcagaacttcattaagaacaatatcgttccctgctaaaattgccttaggcggctgggatagaatgaatagctcagaaagcgcttctgaaatcttttctatatctgctgttttaatataattttcattgggacttattccatgtgataacaatgatgatttatacccttcaattctctcgacccgcggactaatatttcgaatgatggaggtagttacaatggcaatatctttgtatcctttttcaacaaagtgatcaattgccagcttagccgctaagtgattatcaagcatgaccgtagcaatttcaggttctgtaatggttcgatccataaacacaatagggaaattttcttttttcatttgcttatataagtctggattgccccctgtagggaaaataatcataccatctacttgttttgcttttaacatttgaatataatttttttctttatcaggctcatcgtcagcgttacaaacaataatatggaatccatggttgtaaaaatagttctctatcgcacgaatgatttgagttgaaaacgtatggagtatattggcgacaacaactcctactgtaaacgtcgatttttgctttaaactacgggctaaaatattgggttcatagtttaaatctttaattgcttcttcaatcttttttctggtcttttcactcatatgttcgtatcgcttgttcaaatattgagagattgtacttttggatatcttagcatgtttagctacatctgcaatagttactttggccataacattcatccctaacttataaagagtagttgatccaagattcatgtaatcaaacaatattttattgtattaggaatatattcacaattatttgttgatagtttttatttctacggctccatttgataaggaatgtgatagtctaaacgcccgcgtaagccatgaaccctccatcaactggtactgtgatacccgtaacgaagccggaatacgtttcatctgcaagccaaagtagcgttcctagtaaatcctctggttttccaaaccgcttcattggtgtcgaagtaataattttgttggatctttctgttaagcttccatcattattaagcaataaatttcgattctgttttgttaaaaagaatcctggagcgatagcgtttactcgtaaaccagcttcagcaaaatgaacagccatccacatggtaaagttattaatagaagctttagcagcactatacgccggtactttggtcatcggtgcatatgaactcatagaagaaatgttaataataacgggagaccttgcttctaataaagcttttccaaaaacttgactagctaaaaacgttcctatgaaattactagaaaacacttgtgaaaaaccattttcatctaaatcaaaaaatgtttttccctccaccttttcactatacttttctccctctgtaatagcatcaggatggttcccgccggcgccgttaataagtaaatcaatatggccaaatgttttaagaatttcctctcttgcatgtaataaagaatctctatctaatacatcggccttaacagaaatagctattccacctaattccttgatctcattaactatttctcttcctttatcgatagttctgttcaagatagctactttcataccttgactcgctaactcttgtgccattttagaacaaagaacaccgctacccccagtaattacagcaactcttccagttaaattttcgtgaattgaacccattctttctcccctaccttattgacttgatgcgcatcccatagaccaagtaagtacatgattcctaaagctcgatcatataacccgtagccagggcgacaaacttctccccaaatatgacgaccatgatcaggtcttacgtaaccgctatagttttgattgcttaattcttctacaacaccttgaatgttgatggatccatcttgtgtataatgagaagtctctacaaagtcgccgttctcatagatttttacattgcgaacatgggcaaaaggcgaacgggaagcatattttttagcaatctccaccatattatttttaggattagcgcccattgatcctgtacataaagtgaatgcgttagatggtgaatcggatatagccatcaacttttcatagcttgtttcgcctgtaataatacgcggtaatccaaagattgaccaaggtggatcatccggatgaatggctaatttaattccacattcctctgctacaggtaacacttctctaaggaaaaattctatattcgcccataataaatcttcatttatctttttgtacgcctcaaataactccgaaatgtgatccagtttttcaggctcccacccaggtaacgtcagatctgaggctgctgttacagtacgaattagctctttaggatcaatattttctacttttcctttttcataaaataaggcagtagatccatccgctaaaggatgaaacatttcagtacgagtccaatcaaagattggcataaagttataacaaatgactttgacaccaaattctgcgagattacgaattgtctgtttatagttctcaatataaaattctcgctctgcattccctaatttaatagattcgtgaacgttaacgctttcaacaacatccgtatgaaaaccaaatgatcgaatatactcgatttctttttggatttcttctatttcccatacatcccctacaggcttttcatgcaatgcccaaacaattccttttacaccgggaatttgtttaacctgttctaaagtaactgtatcatttccttttccataccatctaaaagtaatattcatgataacacctccgttagtgcgctacacttttctatatatttctcacttaatttaacaacagcttcataccctcgattttgataggctttgtttaaatcactcccaatgccaatagctacagcacctgcgtttatccattcttccatgttatctaagttaattccgcctgtaggcatgattttcacgttaggtagcggaccatttacagctttaataaaagatggatcaaagtggcctgcaggaaatagtttaagaatgtcgcatcctagttcaagagcactagccatttctcgaatgctcatacatccggggatataaggaataccgtatcgattacaaagtttagccacatcttcaacaaagtgagaacttacaataaattttgcaccatttaaaatagcatgacgagctgtttctgaatctagtacagaacctgctcctaaaagcacatctagcccttttaaggatctaaatgtatcttcaatttgaggagtagtatacgttaactcgattgctttaatgccgccttctaccgccgctttagacaattcagttgcttcactcgcatctttcccgcgaatgacagcgaccacctttgtactcgttaatgcgttaatagttgaatatttattcattttttcctccttagtcaaatacgataatggctttacgaacttgttctggatgtgcttctacaaaattaaacgcctcttgtacttcatctaatgcaaattgatgcgttattaaaccgttatgacaaagcttcttttcatttaatagttgaacaattttaggaaattgatttgtttgcaagcgcgatcctgttactgttatttcttttttagtaataggcagctgcgggatagcagaaggcctttcgtcaaatccaagcacgactacacttcctgcagccgatactacttcaaaggacaattcaaatgtatttggtaagcacacggcatcaattactacgtttgctccttttccattcgtccattctttaactcgatctcgaacgtcttcacgcgcagcatgaacggtaacatcagctccattttcattcgcaaaccctaatcgctcttcacttaagtctgtcatcattacagttgctccttgaagtttggctaattttaatatacaaattccaataggtcctgctccctgaatgagtaccgtatctcctttttctacctcacctctccaaacagcttgggcacctatagtgtaaggttctgccaatacgatttcttcccagggaagagttgagtctacaacatgaagctgcttctctggaagtacgaaccattccctcatgcctccatcttcatgaacaccgaatacagatagattttcacacacgttcggcctctttttttggcatgcgtagcactccccacagtaattaatgggttctacaactacatgatcaccgatttggataccggtaactctcttaccaatctccataacttctcccgctacttcatgaccaacgacacgtggtaaagtagcaagagggtttgtaccatgatagatatgcatatcagatccgcaaattcctactcgttttgtcttaactaaaacatctgtaggatttaaaatttttggcctttcagtttcttggataacgagtttatgagcttgtttaatttgaaccgctttcattttttcacctactcctttagaaattcgtatacgcttgaggcgatcgtaatcccttgttctaggtttctttcttcatgtaactgttcaatttcccccggcacatatacacgttcagttgctggagcgggcggtacttgctgtagctcttctatcatttgatccatttgttctaaaaagtgatttttatctgtaaagaaagaagggtttattacacaaaaatagtgaccaagctttctttttttatcaaggtccccgtacattttactaatgtgagggccaaatgcagctccggctagtaagccagaaaatacatctacaatcacagataaaccgtaccctttaggcccgccgaatgtagaaagagaaacgaccttattaggatctgttacaggaatgccattctcatctactccccaacttgcaggaatttcttttccttcttcacgggcttgaagaatttttccgaaagctacattggaagtagccatatcaagaataaaaggcttttttgtttttgcaggtataccataagcaattggatttgttccaagaaaagatgcttttcctccaaacggtacaacaatcttatcggtgtgtgtcatggccattccaattaattcagcttctgttgctttttgaacaaaataacttaatgcaccgcagtggctgctgtttataacagtaatcatgccaactccattttcaccggccatcttaatcgcatgatcaacagcaatgttgccaattacatgaccaaacccgtcatctccgtcaacaattccagttacaggtcccgtagaacgaaaagaaatgttagcatcaggattaatcccacccgctcgcaaacgatttatgtagtgctctgttcttaatacaccatgtgaatttacatttctcaaatctgcgtgagtcaatacgtctgcgatttgttctgcatacgctttgtttaccttttccttagttaactttttaataactagctgtttaacttcttccacttgtacagttactgtggacatttttaccccccctacatgataaaaaagtttgatgaattcaacttatcattttaatagttagaataattagatttttattctgataacttctattaatctacctttcaataatcgcttctttctgcataaaagctgaaacttcttctaagtaaggcagcccttcattatctcctgatacagtcgtaactagagctcctacactattcccaagttctaatctttcatctaaagataatccatgtaaatatccatagacatacccagcatcaaaaccatctcctgcaccgactgtgtctatcgctttaactttaaaagcattctttcgataccattttccattgctgtataccttcgaaccattcgcaccgtctttaattacaagttgatcgatactgtaatgtctggctaggcttgctaactcactttcagaattacttcctgtgatcatatttatttcatcaagtccagttagcaaaatatcaacatgtggaaaaatttcaaaataaatggatcgcgcctcttcaattgtccataacttcagtcttatattaggatcgaatgaaacagggattcttttttttgccgcaatttcaattatccttttgacaatttcaatatttttatagtctatagctaagaacacacctgttatatgtattaaatgaatgttctcaaacatcgtctcctgaatatcttctggttctaatgttaaaatgggagactgatgtcgataataaaaagtttttcctgaaccatcttctctaatttctttaaaatttagagatgtagaaaagccatttataaacgaaacgtattccatatctattccttcaccacgtgcaaagttataaatgaaacgcccaaattcatcttttcctaaacgactcagccattttgtacgtagcccaagtcgtgcgcagccaacagcaaaattaagttcagcccctcccacttttcgttcaaaatttggaacaaatcgcaaaggtcctgttatggaaggattgagagtaatcatagcatcacctaaagtgaaaacaccacatgtagaggacattgaatcgcctgcctttctgactagatataactttcttatatgatgtactagctaatctggttaaagccacatgggcaattaagtgtatctgaagttaaacaaagttttaaagtaaatcggttttgtaaaccggttttgt

SEQ ID NO: 31 - DNA, 50968 bp, Priestia aryabhattai
  source 1..50968: mol_type = genomic DNA
ttctatataaaaaaagatattggggccttagctcagctgggagagcgcctgccttgcacgcaggaggtcagcggttcgatcccgctaggctccaccatacatataaaagtacaacctttaagcaatttgcttaaaggtttttttgtgtaacttctacaaaatagaattgtatatatattcaaaaaagtgtcgagttgagccatcgctcatttagccgttacaataggagagtagcaacatttgtgatggggggacatattatgaataagctttcaattattggagtaccaatggatttaggtcaaactcgccgaggggtcgatatggggccaagtgcgatacgatatgcaggtgttattgaacgcatcgagaatattggatatagtgtagaagataaagggaatattgaaattgccttagctgaacgagtacatagtgatgaaaatacaaacttaaagaatttaaaagctgtagcagatgctagcgagaggcttgctcagaccgtaagtgatgttattacaaataaaaggtttcctttagtgctagggggagatcacagcatcgctatcggaacactagcaggagtaagtcgtcattataaaaacttgggcgtgatttggtatgatgcacacggagatttgaatacagcagatacgtctccttcaggaaatattcacggtatgccattggcggcaagtataggtataggagacgacgcattgactcgaattggtggttatacacctaaagtcaagcctgaaaatattgtgattatcggagcacgttctttagatgaaggagaaaaagagttaataaaggaaaaagggattaaagtgtatacgatgcatgagatagatcgaatgggtatgacaaaagtaatggaagaaacaattttatatttgcgtgataaaacagatggcgttcatctatcactcgatttagatggattggatccacatgatgcacctggagtaggaacgccggttatcggtggaataagctacagagaaagtcatttagctatggagatgttagcagaatctcagctaattacttctgctgagtttgtggaagtgaatcctattttagatgaacggaataaaacagctaccgtagctgttgcattaatgggctcacttttaggagagaaattagtataaaacattagtacctaccaaaaggtacatgaaatatatatgaagataaaaaaaagaagctcttagttcggattcgagagcttctttatatagagaaaaacttttcatattcatttaataaaccatctagctctgaacttactctcactacttttagtgatgataaagggttttctgctgcaagagtgaccatgttatttctgcattcttcaatttgattcaaaaggttctcttttgtatgagtcaagctttccactcctcttcttttcatctatactaattacataacctacgtacgatctttttaaacgtatttgacaaatttttgttaaaataattaagcataagtgaaactttatgataaagtacacgtatatatactatcccgcaatgggcggaggtaaccgttacatggatttattattaaaaagaaaaataaaaaaagtaaaaaaaggtgaccaggatgcatttactgacatagtagaatatcacaaggataaactttttcatctatgttatcgaatgttaggaaaccgggaagaagcgcaagacgctgcccaagaagcgtttattcgagcctatgtaaatattcatagctatgacacgagtaaaaagttttccacctggttatatcgaattgctacaaatctttgtattgatcgaattcgtaaaaaaaagccagactattatttagatgcagaagtagccgggaccgacgggttaaatatgtactctcaaatagctgccgatcaggccttaccagaggaagaactagagcaagtagaattgcaagaattcattcagtcggaaatattaaagctacctgagaaatatcgaactgtcattgtcctaaaatatatagatgagctgtcgttaaaagaaatcagcgatattttagacctgcctcttggtacggtaaagactagaattcacagaggacgtgaagctttaagaaatcgacttcgccacttgtaaggagtgaactaagaatgaaatgtccaaaaatgtatgtaaatctcattcatgaacatttagatggagatattacaaaagaaaatgaactgttattaaaagagcatttgcatcaatgcaaaggttgtcagcagcatatgcatcagttaaaaagaaccattgcatttgtgcaaagcacttctcatatagaattacctatgaactttacagcaggtgtcatggctgggttaccacgtgagaagaatcgaattcgaatgaatagatggtttacaaaccacccgattcttagtgcagctgctgtatttgtgctgttaatgtccggcaccgtgttttcagcttgggaaacggatgaagacttttctgtttcaaagcagccgaacttggtcattcacgataaaacagtcgttgtaccaaaaggtgagaccgtcaaaggtgatattactgtgagaaatggcgatattaaaattgaaggaaaagtagatggaaacgttactgttatacatggtgataagtatctagcttctgcaggagaagtgacaggcaatattgaagagttagacaagatttttgactgggtatggtataacgtcaaaactcatgccaaacaagctgttgacttttaatagttgaaacataaaaccgtccgcttatcttgttagagaggaacagtggacggttttatttatataaaaagaaggctacattatataggaacaaggatttaaaaataagatgtaatttacagtgtaattttgttttatggtataataaaacggttatgttatctttattacatatatagaggaagtgagaagatgcctattggagacctgccaatcctctcatatttaggaaaaattgttgatgttctcctggtatggttcgtcatatataaattaattatggtcataagaggtacaaaagcagtacagcttttaaaaggaatcacggtgattttagttgtccgctttataagtaacttccttggactaaatacgctgcaatggttaatggaccaagcgttaacgtatgggtttttagctatcattattatcttccagccagagctgcgccgagcgcttgaacagcttgggagaggacgtttgttttcacgtagtaatttgcctgaagaagatgaacgtatcgttacgattgaggcgattataaaagcaacgcattatatggctaaaagacgcataggtgcattgatctcaatcgaaagagagacgggtatgggtgattatattgaaacaggtataccgctcaactctaatatttcttctgaattattaatcaacttatttataccaaatacaccacttcatgatggagcggttattttacagcgggatcaagtagccgctgcagcatgttacttacctttatctgaaagtccttttatttcaaaagaattaggtactcgccatcgtgctgctgtaggaataagtgaagtaacagatagtgtgactgttattgtatccgaagaaactggaggcatttccgttaccaaaaatggtgaattgtatcgtgaattgacaattgatacattgagagaaatgctagaaaaagaattagtcacaacttctaaagcaacttcttccactcgttggcaatggaggttgaagaagaatggataaattgatgaatcgatcgtgggttatgaaaattatcgcgttgctgttagccttcatgttatatttatctgttaatttagatgatggtgccagttcatcaaataagattctgaaccgaagcagttctgccaacactggagtagaaacattaacagatgttccggttcaaatatcctataatgagaagaacagaattgtaagaggtgttccggatacggttattatgacgctggaaggtcctaaaaatattttggctcaaacaaagttacaaaaagattatcaagcttatattgaccttgataatttaagcttagggcagcatagagtcaaggttcagtatcgaaatatctctgataatttaaacgtagtggttaagcctgatattgtaaacgtaacaattgaagaacgcgattcaaaacagttttcagtagaggcaagctatgataaaaacaaggtcaagaatggatatgaagcaggggaagcaaccgttagtccaagagctgtcacggtaacgggcgcatcaagtcaattggatcaagttgcttatgtgaaagctattattgatttagataatgcttcaaaaacagtgacgaaacaagcaactgttgtcgcactagataagaatttaaataaattgaatgtaacagttcaaccagaaacggtcaatgtaacaatcccagtgagaaatattagtaaaaaagtgccgatcgatgtgattcaagaaggcacgccaggcgacggtgtcaacattacgaagctagagcctaaaacagatacagtgaaaattatcggtccatctgattctttagaaaaaattgacaaaattgataatattccagtcgatgttaccggtattacgaaatctaaagatattaaggtgaacgtccctgttccagacggaatagatagtgtaagtcctaaacaaattaccgttcatgtggaagtagacaaacaaggtgatgagaaagacgcagaagaaacagacgcaagtgcagctgagactaagtcatttaagaatttaccggtttctttaactggtcaatcctcaaagtacacgtatgaactgctttctcctacttcagtagatgcggatgtaaaaggaccaaaatctgatttagataagttgacgaaaagcggcattagcttgtcagcgaatgtagggaatttatctgccggggagcacacggttcctattataataaatagtcccgactccgttacatcaactctatcgactaaacaggcgaaagttcgtgtaacagcgaaaaaacaatcagggacaaatgatgagcaaacagataaagaaacaagtggaagcacgagcgataaagaaacaaagccagacacgggaactggatcaggaacaaatcctgggacgggaaattcaggtgattcaggtgattcaggtgattcagatgattcaggtgattcagctgataaaccaaacgaagagactgatacacctgaagacaatacagatacaccaacagatagtacagaaactggtgacgacagtagtaatcaaagtgatgaaaattctacacccgtagatggacagacagataatacatcaggaaactaaatgttttgacatgaaggagagaaaattaatgggtaagtattttggaacagacggagtacgaggagttgctaatagtgaattaactcctgagcttgcttttaaaattggacgcttaggtggttacgttctaacaaaagattcagagcgaccaaaagtattaatcggacgcgatacacgcgtttctggtcatatgttagaaggagcgcttgttgcaggattgctttcaattggagcagaagttatgcgactaggcgttatttcaactccaggggtagcgtatttaacaaaagcacttggcgcacaagcaggagtcatgatctctgcttcgcataacccagttcaagataacggaattaaattctttggtccagatggatttaaactttcagatgcccaagagaatgaaattgaagcgttaatggatagtgacacagatcaattaccaagacctgttgggggagacttaggtcaggtaaatgactacttcgaaggtggacaaaaatatcttcaatacttaaaacaaacggttgatgaagacttctcaggtattcatgtggcattagactgtgcgcacggggcaacgtcatctttagcagcacatttatttgcagatctagatgcagatatctctacaatgggggcatctccaaacggattaaacatcaatgacggtgtaggatctacacatccggaagcattaagtgccttcttaaaagaaaaaggagcggatgttgggttagcatttgatggagacggagatcgtttaattgcaatcgatgaaaaaggcgagattgtagacggtgatcaaatcatgttcatctgtgcaaaatacttgtatgaacaaggacgtttaaagaaaaatacgcttgtttctaccgttatgagtaacttaggcttctataaagcactagaagctagcgggattgaaagtgcacaaactggtgtaggcgaccgttatgtagtagaagaaatgaaagctaatcaatataacctaggtggagaacagtcaggtcatattattttcttagattacaacacaacaggtgacggtatgctttcagctattcagcttgtaaacattatgcaagcaacgaaaaagcctttatcagaattagcagctgaaatgaagaaatatcctcagcttcttgtaaatgttaaagtaacagataagcatcatgttacagataacgagaaggtaaaagtggttattgaagaagtggaaaaagaaatgaacggtaatggccgagtacttgtacgcccttcaggaacagagccgttagtacgtgtaatggttgaagcacaaacacaagaagaatgtgaaacttatgtaacgcgtatcgtagaagtagtaaaagaagaaatgggcttagagtaattcattaattatatgcataagcggtgacgtttcaagccgtttatgcatatttttatattgttgagaaaaattcttggaaattatctgatgctaaaggctgtttttacagatagtaaagaagataattgacgttttctcacttcttattgtaatattaaatctgttcgtctcttaatttatgtaaaggagtgaacaatctagtttaaaagtgaatacaaagcgcctgaactaagtaaagggacggaaacgacttagttgacgaggaggaggtttatcgaagtatcggcggatgcctcccggttgttgattatcacggccgaaaacttgatgtgaaaaacaatgaggtgacttattggacaaaagcattgagatgataatcattgatgatgaaaagagactctcttttcatacatgaaggaggattttatctatgtgcggaattgtaggatatattggaacagaagattcgaaagaaattttattacgtggtcttgaaaagttagaatatcgtggctatgactcagcaggtattgcagttgttaacaatgaaggcgtacacgtattcaaagaaaaaggccgtattgcagaattgcgtcaggcagtagataacagtgttgtagcaccagcaggtatcggtcatacgcgttgggcaactcatggtgtaccaagccaagaaaatgctcatccgcatcaaagtacatctggacgcttcacacttgtgcataacggtgtaattgaaaactacgctattttaaaacgtgaatatttacaaaatgtaacgttcaaaagcgaaacggatacagaagtaatcgttcagttaattgaaaaaatcgcagcagaaggcttagatgtagaagaagcgttccgtaagacagtgagcttgcttcacggttcttatgcactagctcttgttgataacgaagataaaaatacaatctacgtagctaaaaacaaaagcccgcttcttgtaggtgttggcgaaggatttaacgttgtagcgagcgatgctatggcaatgcttcaagtaacagatcagtacgtagaattaatggataaagaaacagtaattgttacaaaagaaggcgtaacaattaaaacgcttgatggtgaagtggtagaaagagcaccttatacagcagagcttgatgcaagtgatattgaaaaaggtacgtaccctcactatatgttaaaagaaattgatgagcagcctttagttgttcgtaaaatcattcaagagtatcaaaatgagaacaatgaactgcacattgatgcagacattttaggagcaatggatgaagcagaccgcatctatatcgtagcatgtggaacaagctatcatgcaggcctagtaggtaaacaattcattgaaacgtgggcgaaggttccagtagaagtgcacgtagcaagtgaattctcttataacatgccgcttttatctgaaaagccattgtttatctttatctctcaaagtggagaaacagctgacagccgtgcagtattagttcaaattaaagaattaggttacaaagcgttaacaatcacaaacgttccgggatcaacattatctcgtgaatctgattatacgttattacttcatgcaggtccggaaattgctgtagcatcaacaaaagcttatacagctcaattagcagtgctatcaattctagcggctgtaacagcaaaaacacgcggcattgaattagaatttgatttagttcaagagttagcaatcgtagcaaacacaatggaagtactttgcgacgataaagaagaaatggaaagtattgctcttcaattcttagcaacaactcgcaacgcattctttattggacgttctgttgattattatgtaggtttagaaggtgcgttgaaactaaaagaaatctcttacatccaagcagaaggatttgctggaggagagcttaagcacggaacaatcgctttaattgaaaacaatacgccaattattgcattagcaacacaagagcatgtaaacttaagcatccgcggtaacgtaaaagaagtagtagcacgtggagctaatccttgtatcatttcaatgaaaggattagaaacagaagaagatcgctacgtgattccgaaagttcacgaaacactttcaccgctagcagtggttattcctttacaattaatctcttactatgctgcattgcaccgcgattgcgatgtagataaaccacgtaacttagctaaatcagttactgtagaataataaggttctagacacccttctactatagaagggtgtttttgtatgtctgagaaagagaacaaacaccgtttatgctagaagtttcattgagctaaaaaatatatttgcttgctccatttattttatataatgaaataggtaaaggaacgaacctcagctattaaaaaggatgtggaaagcattagtggattggctcaaagtataaagtacgtgctgcgaggcatcttttttgtcttgtattttcccttttattttgtatctcaagtcttttgtaaagtatggatatatttcatcgctcagcccctcatgtggatagggaaaagaattattcaacccgtcatttatttcatttggatatatatcatacgttttctgttcgtctaccctatttcttggctatggaatgagataatatatccttttattctctttgtttggaaacggtgttttttgcctataactagatttatatggagatatgccgtttaccctattttgtatctaatttgctacccctgttatctgttatggaaatatcttgtgctgcctttttacaatgaaattattcttcctgtgctttcattgtgtcagcgtatctttttctgtttctggaagggatttaagtggattggaattcatataatctattaccctttacgctggttttgggtgacatgtatatataaaccgtttaaaaaagtatatatcaaaatcattcagcctgttctcaaatggttttctcatttatttagttaacgaaatataccaaaagattgcttttcttttttaagtattaaactcgaaagataagagggaattgatgtataataaaaacggatatatcattgcctatttattttattagattcaattttgaaagagagtgaaacaatatgggccgtaagtggaacaatattaaagaaaagaaagcgtcaaaagatgctaatacaagtcgtatatatgccaagtttggccgtgagatttatgtggctgcgaaacaaggcgagccagatccagaatcaaaccaagcgttaaaagttgtattagaacgcgcgaaaacatacaatgtgccaaaagcaattattgaccgtgcaattgaaaaagcaaaaggcggatcagaagaaaattacgataatcttcgttacgaaggttttggaccaaatggatcaatggttatcgtagatgctcttacgaataacgtaaacagaacagcttcagacgtgcgtgctgcctttggtaaaaacggcggtaatatgggagtaagcggatcagtagcgtacatgtttgatccaacagctgttattggtgtagaaggtaaggatgaagaagagacgctagaactgttaatggaagcagatgtagacgtgcgtgacattttagaagaagaagattctgtaattgtttatgctgatccagatcaattccatgcggtacaaaaagcgttcaacgatgctggtattacggaatttacagtagctgagcaaacgatgcttgctcaaaatgatgtaactcttcctgaagatgcacaagctcagtttgaaaaaatgattgatgcattagaggacttagaagatgtgcagcaagtatatcataacgttgatttaggataatagtgaaagaggcagacctatcaaagaggtctgtctctttttataggccgtgtgaaaagcatctattgaccctttcccttcgtttggaatatggtaagataatgaattaagaatagaaaatagaaaatagtagaattttataagagataaatggagggaaagcagttgaaaaaattaatggtggggatggcattaacagctacacttgcaacggctgtaacgcctgggtttggctcaattgggggaaatcaaggaaaggcatatgcagcggcagttacatataaagtaacggcaagcaagttaaatgtgagaagcggagcgggaacgacttacgggattatcggcagcgtagcgaaaagtcaaacgttatctgtaatgagcaaaagcggaagctggtacaaaattaactataacggccgcacgggctacgtaagcagcgattatgtacaagcatcaggaacaacaacgccgccagcagaaagcacaacgtatacagtaacagcaagcacgctgaatgtaagaagcggagcgggcactaactatgcatccataggaagtgtgacaaaaggccagaagctgtctgtggtgagcaaaagcggaagctggtacaaaattaattacagcggccgcacgggctacgtaagcagcgattatgtacaagcatcaggaacaacagcgccgccagcagaaagcacaacgtatacagtaacggcaagcacgctgaatgtaagaagcggagcgggcactagctatgcatccataggaagtgtgacaaaaggccagaagctgtctgtggtgagcaaaagcggaagctggtacaaaattaattacagcggccgcacaggctatgtaagcagtgattatgtacaggcttcagctaccacatcgccaaagctcgtagttgattcatttaaaacgttaggtaacgctcagcaagtcatcttggttacagcagataaccacgatacgaagtctgctaaaattcaaacgtttgaaaaagctgatgggaaatggaagcaagttttaaccgcgaacggtgtacttggacaaaaaggattcgctttatcgaaaaaagaaggagatatggaatctccgacagggaaatatacaattggtacagcattcggacgctatgcaaatcctggaactaagcttccatatcgaaagattacagcaaatgatgtgtgggtagacgattcaaaaagctctctatataatacgtggcagcaaaagccggctaatggccgctggacgagcgctgagaacatggacatcccggcttacgactatgggtttgtcattaattataatgaatctagaacgccaggaaagggaagtgcaatcttcttccatgtaggaacaaattatactgcaggatgtacggctacttctaaagaacaagttgtctctattttaaaatggttaaatccagagaaaaatccggttattattcaatctcctgtaagtgaattagataaatattaagttagaaagcagctgaactcttacagttcagttgcttttttatgtaattaaaagctttgtctgtccgtggtacgacaaagttagttttcctattcattgaatgaaagcgtttaatctcttacgattaaagtatcatcacgtagagaaaggaagagagcaaatggctcaatctaatataaaagtagctgtacaaaagtttgggaactttctaagttcaatggttatgccaaatatcggagcatttattgcatggggacttattactgctttatttattcccacaggcttttttccaaatgaaagccttgccaaactagtggatccaatggtcaagtatttgcttccgctgctaatcggctacacaggaggaaagcttgtacacgatcagcgcggaggcgttgtaggtgctatcgcgaccatgggcgtcatcgttgggtctgatattccgatgtttctaggcgctatgattatgggaccgcttggcggttatatcatcaagaagtttgatcagtttattgaaggtaaagtcaaaacaggatttgagatgttaattaataatttctcagcaggtattcttggaggaattctagcaattctagcctttttaggagttagtccagccgtggacggatttacaggtgcgcttgtagtgggtgtagattggatggttgcacatggccttcttccacttacaagtattctaattgaaccagctaaaattttattcttaaacaatgctattaatcacggtatcttatctccgatcggagcagaacaaattcgaacaaatggacagtccattctattgttattagaaacaaaccctggtccggggttaggaattctgttagcgtattgcttctttggaaaaggaacagcaaaacagtcagcgccgggagcggccatcattcattttattggcggaattcacgaaatttacttcccttacgttttaatgcgtccgcttctaatcattgcggctattttaggaggaatgagcggcgtatttacatttgttcttttaggcggaggcttacaagcggttgcttcaccaggaagtattttggctattttagctgctacaccaggtaatgcaggcagctatgttgcaaatatctcaggtgttctcgttgcagccatcgtatcgtttattgtaggttcgttaattttaaaaacaggcaagcaaacagaagatttggacgaagcagctcgcaaaatgcaagagatgaagggcaagaagagttctgtagcaggaagctttacaaaacagcaaggcgaagtaccagcaagcgttcagaaaattgtttttgcctgtgacgcaggtatgggatcaagtgcgatgggcgcctctcttcttcgcaagaaagttaaacaagcagatttaaatatttcggtaacgaatacagcgatcagtaatattccaagtgatgctcaaatcgttattacacaggaagaactaacgccaagagctcaaaacaaagttccagatgcgtatcatatctcggttgataactttctatctagtccagaatatgacaaactaattgatcaactaaaaaatgatcatactacttctaaagcggaagaagaaaagagagtatctgcagaaaataatacagatagtaatgatggtttattaaaagaagaaaatgttttcttgaatcagcacttttcttctaaggaagaagcaattcgatttgcaggaagcgtgttagtaaaaggcggatatgtagaagaaaactacgttgaagcgatgattgagcgcgacaatatgacttctacttatatgggaaatgacgtggcgattccgcacggtacggaagaagcgaaaaagaacgttttaagatcgggttttacagtgattcaagtgccagaaggcgttgattttgatggtgagaaggttcgtttgatttttggaattgctggaaaagacggcacccatttagaaattttatctggtatcgcgattacatgttccgatatggacaatattgaaaagatggttcatgccaaatcagctaaagaattaatggctattattcaacataactaacgggatagaaaggcatgaagatgcctttttatcctttgtttataaataagaaaagagttgatgttcttgtttattacttcaagagaaaaatcaatcattgagttaattattaaaacggcaggaaagcatacagccctaacacttgctacttttttgaatgtaagtgtaagaaccgttcaccgagatttgaaggcaattgaatcaatacttgaaaaatttgatttgaagctgattcgtacacaagatgaaggactaatgattgaaggtaaaaatgaacaaatttttcgtcttatccaagagctgatgaagattaaaacgacggatcagtctccacaggaaagaaaattaattcttttaattcttcttctagaagaaggagattcatttaaattacaaacgctggctaaagacttagaagtaagtattactacactaactgcttatttagatgaattaacagagtggttaacaacatttgacgttttccttcatcgaaagagaggggtgggagtagaggttcaagctactgaagccaataaacgaaaagcattagctaattattttcttgtttactttaatgaagagttaattgagtgcttgtttttagcagaaaatcagcagcatacggatgaaacgattttgcattatttttatccggattatttagcagaagtagaccgaattgtacatcaagcgattaatcagcatcattctaagctggccgacagcgattatatagggctcattgttcatatttgcattatgatacagcgaacgaaaaagcaaatgtatctagaagacgacggccgccaaacggaagaactggcgagtgaaatgttcttaatgaaggatatttgccgcgaaattgaacgggtattttctctttcttttacagaaaaagatattcatttcttagcagtgcggctgcgtgcagcaaagttccaaactactagagacgtatattacgacagcgtagtggttgggcagattattaagaatatgattgctcatgtttctgttcagcttaacaccgacttaaccggtgatttttccctttaccaagggctgcttgctcatatggaaccggcaatttttcgtcttaagcaaaaaatggagctttttaatccattaacagaagagattaagaaaaagtaccctgttttatttatggctgtgagaaacagtatcgatcaagagctgccggatttagtttttccagatgatgaagtagcatatcttgttttgcattttggttcaacgctagtgctaaaagaagaagtcatggaaattcaggcactgattgtctgtccaactggaattggcacctcgaaaatgttagctagccgtattcgtaaagagattcccgagattaattcagttgtcattaaatcggtaaaagaaatcaaagaagccgcccttgaagggtatgacgtagtgatttcaacagtaagactgccttttttaaatgtagattacattttagtcaatccactcttaaccgaagaggatattcaatccgtccagaattttttacagaaaaacattcaaaagttaaccaaggataaggactatcgttcgttccaatataaaaataagaccgtttctacagaaaaaccgtcttttgaggaaacgatgaaacaaattaaagatgtgcatggaagtatcgaatcaattcttcaaaaccttagaatgtatcgattttcggatgcagtgagtcacgatcaagtgatttcgcacgtagtaaaagccgctgaaaaagaacgtttgataaccaatgccaactgcgttattcatcagcttaaggaacgagaaaacaaaggcggtttaggcattccgcaaacgagtatggcactgttccattgccgtgaacatcacgtgaaagagctgatttttcaagtttcacatttagaacagccttgcacagttaaaggcatggacggaacaaacatgcaggcgcgtaaccttctattaatgctcgcacctgaagagttaagtgaagcacagcaagaaatcttaagtttaattagtaccagtttaattgaagaccatgaagcaatgatgattttttcatcttcgaacgaagagataattcgcaaaaagctagaggatacgtttcatgagtaccttcgaaataatttgataaaggaatgatttttgtgaagcaagcagttcattttggagcaggcaatattggtcgaggattcattggggcattgttttctcaaagcaactatcacgtcacattcgtagatattgctgagaaggttattaatcagttaaacgcagataaagggtataacgtagtgacagctgcagagcacccggagacattagctgttcaaaacgtatctggtttaaataatctggcacaagaacaagcggtcattaaagcgattaaagaagcaacgtacattacgacggccattggaccgaacgttctgccccgaattgctcctttaattgctaaaggtttggctgaacgtgtaaaaacaagcgacgaaaatgtatatgtgattgcatgtgaaaatcaaatctctgcgacagatttattaaaaggctatatttttgacgcgctggatgaagatacaaaagctcatatgataaataaggtctttttctttaattcagctgtagatcgtatcgtccctattcagcataaccaaggttcgcttgatgttttagtagaatcctattatgaatgggtagtagaggcacctgaagatattccttttgtagaaggaatgaccattgtgcctgaccttgctccttttattgaaagaaagttatttacagtgaatacgggacacgcggtaattgcatattttggttatttaaaaggaaaagaaacgattgatcaaacgttaagagattcagatatttacgaacaagtacagcaaacgctacaagaaacaggaaactatctaattaaaagatatgacttagatagagaggaacacgaagcctatattactaaaatcattgaacgctttaaaaatcctcatttaaatgattcagttaaaagggtaggaagagcaccaattcgcaagcttggacctcaggatcgcttgattcgtccagcgctagaagcaaaaaaagcgggcctttcttacacctacttggcaaaggctatcgccgctgcgcttttatttgacccgcaagaagataaagaggctatgaagcttcaagcgaatattcatgagtatggtattgagtacgtgttaaaagaggttagtgggttagagacaagtgatgatttaacaaaagaaatcattgctcaatataatgctttaaagtcgtgaatgaatttagtgcgtgtaaacagtccattttaaatgggctgtttttcttttagcagaaagggaatgtttgtgtataggaggatgataaaatggtagctattacacacgttgggttagctgtgcctgatgtagaagaagccgtgcagtggtatgaaaaagttttaggttttaagctgattgctggtccctatacgtttaatatggagggagaacaagctgaaaatatgactcaagatttactggggtctcatatcaaaaaaatgaaaaatgctcacatgacagctgacaaccaggtaggtattgaactgtttgaatttaataagccgcaaatgccgcttgtattaaaagacagcgatgagcagtatcaaagttattttcacatgtgtttaatagccgatgacgtggaaaaattagcggataaaattgaacaatcaggcggtaaaaagcgcagccaagtatggaatacaagacctggaaaaccttattacttaatttattgcgaagatccgtttgggaatattattgagctatattcacacagtacggagctcatgtatgggaatagagaagaataaaagcttatccagatttcttggataagcttttattctttcatggctgcccgtagctgtatacctttgccagctcttcgaaggtttttgatgaataggtaatagttacagatgttcctaatgccactttatcaaataattcttcgacatccgcattatgcattcgtacgcagccgtggcttacatatttgccgatgctatcttctgagttattgccgtgaatagcgtatgtgtcgccggttgtgctgtttgcattaagccctagccagcgagagccaagaggattattagaagcgcctcctgcaatatgccctgtatagtaagggcgatttttaattttgttaacaatcttgaaaaagcctaccggcgtatcgctccatgtttttcccgtagctactgaatacgtcttttctaactttccattatgaaaataagcaagctgatttgtttttttattaataataattaaatctccacttgctgcgttttcacttgcattcgccgcacttgctgtataagaaatgctgataatagctgcgaggcataaagcagctgctcgcagtataatttttctcacgttctagccatctcctctattgttcgtttacatatttgatgaattacatgctattagtgtataaaaggaaaatggactgaatatgaatctttcctgaatgaaaactgaaagtgcattttatttataagcgaatataaagtgaaaatctgggcagaaatacaactaaaggtctggtacatatctcatgaaaaagagaaaagtgaaaatgcaccttgtatgtttaatttaggatgtattatcataaaagtttgaaatgaagggcaggaggtggaagaaacagatgcttaaagaatttaaagagtttgctttgcgaggaaatgtattggatttagctgtcggtgtgattattggagcggcatttgggaaaattgtaacgtctcttgtaaatgatattattatgccgctgattggtttgttgttagcagggatagactttaaagatttatccttcacggttggagatgctacggtattatatggatcttttattcaaacaattgttgatttcttaattgtcgcattctcgattttcttatttgttcgtgtctttaatcgttttaagagaaaagaagaagagaaagtagaggaagaagtggctgttctgtcaaaagaagaagagatcttaacagaaattcgtgatctgctaaaagcagaagcagtgaaagagcgtccataacagcaatttttacatacgcataaaacggctaagaggcccgtcttttcataagaaaagcgggcttttttcgtgtgaaatttctcgggaaatgttagtggtataatcatgggaaaattaggcgtgaaagcgagagagataggaatgttaaaatcatattaaaagtgttaagatattgtaaataggaggcttaaggttatgtttaaacatttgtatcgttccttgccaatgctggcagcgtatggcctgcttagcgtttttttatacagtgttgttatgtttaatgtatcaaatgacacaaaaatgttgtttgactgggcccaaatccatacagctgggttcgtagtattaatagggggatgctcacttgtcttatgggcgctcactttctatttgctacttcgatttaatcagatagagagaatacaaggttcgcagtggtatgccatttttacggcaattgtgttttcaattgcggtagcagccgtttctgctatggtttttgttatatatcatattgatatacataatccaggcaaaacaatagagtggatgcaagcatatcccgaacgctatctttttacagtatttttattgtcgctgttaacactagcgatcattatgctagtaggggaagcttatttaggggctgggattacctttgttctgtattttattttagctcttgtaaactattataaaaaaatctttcgaaatgaaccattgttcccgaacgattttattcaggcaagtcagttaaaagaagttattccgatgattaaagattcgatttcaattcctattgtaataggagttattggatctattgtcgtactgatcgctctttggtttttcttgcccaaaattaaaattcgatggtttcttcgaattattatgattctgccgctcatctttttaatgaaatcatttttattctttgaacactcgtttgctcaaaaatattatgatcaatatgctgcgctgatgccttggaatcagcaaaataattattactataatggacctgttattggcatgatttcaaatgttaaaacagatgtgctgcaagagccggatgactactcacaggaagtgatggccaaagtggcaaagcgcattcagtcaaaggaagagaaaacacaagaaagcaaggctgaagtcaaaccaaacgtcgtgtttgtgatgaacgaaacgttttgggacccaacaaagcttaacgtgacgttctctgaagatccaatgaaaaatacaagagaacttcaaaagaaatatccttctgggtggtctttaagtccttcatttggcggggagacagctaatgtggaatttgaagcgctgacgagctattctttgtctttctttaaccctggaggccttccttatcagcatgtattgagtaaaaaagaatatccgtcttttgtttcttatttagaaaaacaaggctatgctacaacagctatgcatccaaacagcggtatgctttatatgaggcaaaatgtgtatccaaatttgggatttgatcaagtgaagtttattgatcaaatgaagcatacgcaaaaagataacaaagaatttgtttccgatgaagcggtagttgatgaagtactcgatacgcttcgtcagtcgaaaaagcctgcatttgtgcatgctgtaacgattgcaaatcatcttccttattcagcggataagtataatggtcaggaaaccattaaagtaaccggtaaagggttatcaccggaaatgcaaaaggaaattgaaatttatgctgaaggaattaaacgttcagatgctgctttaaaacgattgaacgatgaaattcaaaagctggacgagccgaccattgtagtattttggggagatcatttgccagcacttggacaaaaccttcaagcttacaaagaaacgggttttggaaacgagaaaacgcagcaaacatctcaaaaattttatgagacgccgctcttatttttatctaattacgatacgaaaatagataaaaatctcggtacgatgagtcctatttatattgctccgacgcttgctcaatctcttggttacaaaagtaatctgttctacgatcagttgaatcaaatgaaaacagaagtgccggcttttcgttcaaatatgtatatagattcaaaaggaaagctagtggatgatccggcagctctatctaaaaaagctgcaaaagaccttcaagattaccatgaagttgagtttgatacattatctgggaaacagtacgaaacgcataagttgtataaataaaaataaaaactccttttaaataaaaggagtttttattttttaagtgtttaaggttgtactaaaaaataattcatgtataatattttaaggttaaaagtaaactttaagttaagtaaaacaaaacttgagtttggaacagcatgaacaatcattcatgctgtttgctaattttaaatacagttgaggatcgagagtatggaaataggaaagaaaattaaaaatttacgattaaaaaaaggtttaacacaagaagagctaggagaacgtactgatttaagcaaaggctatatttcgcagctagagcgcgatttaagttcgccgtctttagaaacattttttagtattttggaagtgctagggtgcgaaccgaaagaattcttcgaaattgatacgcatgttcaaaaggttgtatacagagaggaagactacacgagttattgcgaagatgaaaaaggttaccatattcagtggcttgtgcatgaatcaaatgaaaaagaaatggagccaattcgtcttattcttcatgaaaaaggtgcatttaagagatttgagccttccctttcagaaacgtttggctacattttgcgcgggtgtgtgaaggtgaagcttggaggcagaatatatgaagccaaacaaggagaaaccatctattttcaagcttctgaagaacatcagattttaaatgctcatgacggaataacagagttaattatcgtggcgacagagtcttatttatagaacaaaagaggtgaagtgaaatgacatctacgaatacaattattcaatttgaaaatgtgaccaagcaatatgataatgattcagttgtattggatcacgtaagctttgaaattgaaaaagggaaattttataccctcttaggtccatcgggatgtggaaagacaacgattttacgattaattgcaggctttacggaagcctcaagcggaacgatttattttaatgggaaaagaattaatgatgtcccggctaacaaacgtcaggttaatacggtgtttcaagactacgcgcttttcccccatttgaatgtatttgaaaatgtagcatttggtcttcgaatcaagaagctgaaaaatgctgatattgcaataaaagttaaagaagctcttcgttttgttaacttagaaggatatgaaaacagagaaataaaggaaatgtcgggcggccaaagacagcgcgtagcaattgcacgagcaattgtaaatcagcccgaagtcattttgctggacgagccgctttcagctcttgatctaaaattgcgtacggaaatgcaatacgagttaagagaattacagcgtcgtctaggtattacgttcatttttgttacgcacgatcaagaagaagcgcttgcgatgtccgatgaaatctttgttttgaataaaggaagaattcagcagagcggggaacctacagatatttatgatgagccaattaatcgttttgttgccgattttattggtgaatcaaatattgtaccaggtaaaatgattgctgactttttagtggagtttggcggccagcaatttgaatgtgtcgatcaaggattaaaccaaaatgagcaggttgaaattgtgattcgccctgaagatttagccattacaagctccgatcaaggaaagctgcaggttcgtgtagattcacagctgttcagaggagtccattatgaaattttaggctatgaccatgcagggaatgagtggctcgttcactctacgaaaaaggcaacggttggcgaagaaattggtttatattttgaacctgaagctattcatgttatgcgatttaatgaaacggaagaagaattcgataagcgactcgaaggttatgaagaggattacgatgcaaactaaatcaagaaatatttacttagtcccgtacgtgttatggattttgctttttgtagttgctcccattgtattagttgtctattattcttttttcaacatcgataatgagctgacgcttgaaaactataagaaattttttaccccagtttatttacagatgacgctgagttcattttggtatgcctttttaattacgttattttcattatttttttcttatcctacagcttatttactaacgaagcttaagcacaagcagctgtggcttctactgattattttaccgacgtggattaacctattattaaaagcttatgcttttttaggtatatttggcacgtatggtacggttaataagtttactgaatttctgggacttggtactcaccaaattttatttactgactttagttttgtatttgtatcggtgtatatttttatcccctttatgattttgccgatctttaactctttagaagaacttaatccctcgcttatctacgcttcgcgagacttgggggcatcttcatgggtgacatttaagcgcgtggtatttccgctaacgctagaaggggttaaatcaggttgtcaggctgtttttattccagcactatcactctttatgattacgcgtttaattgctggaaaccgcgtcattacactggggacagcgattgaacaacattttttagtgacgcaggattggggcatgggcgccacaatagccgtctttttaattattgcgatggccgttatgatgctcataacaggcactggaaagagaggtgtgtaaaatgaagagaaagtggaagttcagccacctttatttattttttgtgtttttcattttatacgcgcccattttttatttaatgtattactcttttaacagcggaggaaacatgcgtgaatttgaagggtttacgttagattggtacaaagaagtctttcaagacacacgtttgcttattattgtcttgaatacccttattattgctctattgtcttcggttatttcaactattattggcgtgataggggcacttgctatcgtatacgtgaagcgcagacgtgttcaaaatacgctgttaacatttaataatgtgttaattgtgagtccagatgttattattggcgcatcttttttaattctatttaccattatcggtataaagctcggatttatatcggtattattagcgcatattgcattcagtgtaccgattgtggtcatcatggttctgcctaagctgcaggaaatgagtccgacactgctcgatgcagcccgtgatttgggcgcaagccgctttgaagtactttcgaaagtggtattgccatttattcgtccgggtatctttgcaggcttttttatggctttaacttactctttggatgactttgcggttacgttctttgtgaccgggaacggtttttctacgctttcagtagaaatttattcgttagcaagaagaggggtctcgctgaaaatcaatgctctttctactcttattttcatgtttaccgtgcttattgtaattggttattactttatcagtcagcgatatagcaataaagtgaaaggggtggcgactggaaaatgaagcaattagcaaagccgtttatcttcatcgtcatcctttctttcgttcttatgtatgtggttcatcatttgaacaatgccgaagggtactctggaggagatacgctgactgtctataattggggagattatattgatcctgatttagtgaatcagtttgaaaaagaaaccggaattaaagtcatttatcagacctttgattcgaatgaagcaatgatgaccaaaattgaacaaggcggtacgacatttgatattgctgtgccttctgagtacgcgattagcaagatgcgtgaagaaaatttactattgccaattgatcattcgaagctgcctaatttaaaatacattaatccgcgttttttagacttatcctttgatcctggcaataagtactctattccttatttttggggaactgtgggtattgtgtataactctgatatgattcatggtaagaagataaaaagttggaatgatttatgggatcctaagctgaaaaatcaaattttacttgcagatggcgctagagaagtgatgggaatggggctaaacagcttaaattattcattaaatgatacgaataaagcccatcttcaagaagcaaaaagaaagcttgatacattaacaccaaatgttaaagccattgtaggagacgagattaagatgctcctagcaaatgaagaagcggcaattggtgttgtttggtcaggcgatgcttctgagattatgagtgaaaacgataagctgaattacgttgttccagaagaaggttcgaatttatggtttgataacatggttattccaaaaacggctaaaaacgtagaaggcgcacataaattcatgaactttatgctagatcctaaacacgctgctcaaaatgcggaatatgtagggtattctactcctaataaaaaagcgttagattatttgccgaaagaagtagcggaagatgaacgtttttatccagaggaagaactaacaaaaaagcttgaagtatataataacttaggcaaacgaatgcttgcttattacaatgaattatttttagaatttaaaatgcaccgtaaataaaaggaacttaattgagtctttgtactcaagttctttattgtttttgtaaattcagttgcgtgatagcaagaggaaagataaaatacaaaatacaaacgagtaaagctaataacatttattttatgttattagcttttttatttgtaaaacgggaaagataagaaaaaattgaatgttctattattcatctagaatttatatttcacattatataggagagaaaaagtgaagcaaaaacaaaagcagcatattcaatccatttattttttacgattattcgctatgatgatggttgtgctcgtacacgtaacagcagcatatgcaacagtactgccatttgcaagcgaagcttatcaaaaatatcattttcttaaccgaattgttcgtattgaagcagggatctttattgttatcacaggtttagttttcttttatagctatattaacaagccgttaacaaagactttatggaaaacgtactatgctcgaagggtaacgtatattttggtcccttatgttatttgggcacttatttatgaattttattcgtactatgtgggagcaacagaattaaatgcagctgacattgtgaaacgtattttgcgtggagagtcttactatcagcttcattttatctttttaattgtacaagtatatctcgtgctgccaatttttgtatggttagcacagaaagtaactatttttaaaaaatatatgtggctgtttggcattatcattcagcttggttatttaatgcttaatgatacgtatcatattacctcatttaatttatttttaaatacgatggctacgtttttacttggcggttggattggcatttattatcgcgaacaagtggataaaaagtacagtcgttcgaatattgtattatttctagtgacgctcggatcgggaatagctatttcactgttaaattatcatttgtacacaatgaagacaatccaaatttcaggctttacgtatgaggctgttaatacgctttatttggtcgctggaagttatttcttcttccggattgcagagatattagctgaaaagctttctgtgaagtccgtgacgattgttaaaaatattgccatgtactcgtttggattttacttgattcacccactggttttaaactttgtggcaaaagcagtaccaatacagggcaactatatgtttcactttgaaatcttggcacgctatattttaacgttagcgggctgttaccttatcatttggggatgtcatcgtcttctaccgtttgctagcttcttgtttggtaaactgccaaaagaagcggtattcatttaccgacgtcctgatcataaatagagtctagttaaaagttatgcctgcttgcaggcataactttttttataaagtataagagatgataacacagtagttttaaactatttttaaaagtgacatgctaagctaagataatgattatttaggtaatcacaaaagggggaatctgatatgcatgtacttgtgatagaagatgatgcttcattattacacggtatcgtagaaagcttaaaagaagaaggctatgaagttgactgtgcgtctgaaggtgatgaaggattatttttagcagagcagaacatttatgatgctttaattttagatattatgctcccaggtatgacagggcttgacatactaaaaaagttaagaaaacaaaaggtgctgacgaaagttatttttctcactgcaaaagatagtgtagaagatcgagtgaaagggcttgattatggagctgatgattatttggttaagccttttgcaatggctgaactttttgcgaggttaagggtaatgctcagagacttgcaggcagaagaaggcatgatttcatatggcccaatttctataagagaagccaatcatgaggtcatgattaatggaagtgtcttaacattaacgattaaagaatttcagcttttggaatactttattcgaaataaagaacaaattcttattcgagatcaaatttttaatcgggtatggggatttacatccgatgtaggagtaggcgtagtagatgtctatgttcaccatttaagaaagaagcttcagccttttaattgtgacggttatatacgtacagttagaggtgtaggattcatgttaaaaggggaagagcatgtttaaaaagacgagaatcaggcttgtgttattcaacacaatggtgctgatggctattttgagcatcttcagtttagttctatatttttacatacagcatgttatttttttaaacccagacaatcggttaagtgagatgagcgaacaagtaaaaaaaagaaacttacatgaaattcaggaaaataatgaaagagaaacagaaaggcgcgttgcgtttttactttggagcagtgataaaaaactaataaaaatcacgcctaaaaaaggattatatacaaacgatattgacgactttaagcctgcgctgtctgaagggaaagctcaaacggcacaagaggtaaacggtcatgcttatcgagttatgaatgtgaaaaacaaaggctatataaaagataaagacgtttcaaccattcaacttgtcttaaatgtcgatccagaaactcaaaccttagagcatcttgctttccttctaatcatttcagcttttattggactgcttctttcgcttgtagctggcctgtttttagctaatcgagcgcttgtacctatacaaaagtcgtggaataaacaggtcgaatttattgcagatgcatctcatgaattaagaacgcctctttctgtgatgcaaacgcatctcgagctattgtttagacgaccaaatcataccatcgagcaagaaagcgaaaatatttatcaaagcttaaatgaagtgaagcggatgacgaagctggtgggcaacttattaacactggctagatctgattcaagtgcacagctgctaaataaaacggtttttaatatgggagagctggttgataaagtagctaatcagtttgagcccatatttgaactaaaggagcttcatttcacaagggaaattgaatcgttaatgtgcggaggagatcaagaacgaattcatcagctatgtatgattttattagataatgcttttaagtacaccccatctggagaaagcattcatgtcagtctaaagaaacatcatcactctatgatattaattgtcagagacacgggcgttggaattgaagcggaagatcttccgtatgtattcgatcgcttttatcgaagtgataagagccgagcccgtgctgaaggaggatcaggcttaggtcttgcgattgccaagtggattgtacaagctcatgacggagaaatgaaggtttttagtcaaaaaaacgtaggtgcggaattttatgtgaaaattccgctatgaaaaaagctgcctatcattaggcagcttttttcaccacttttttattggtagtcttccacgctttccaggcattagcaagtaacagaccaattaataaataggcaagtccgccaaaaagcaaataatctacagcgctaatcgcccctgcaatcaatccaaatttaatttggtctttatatttggcaggagaagtaggagggtctgtcaccataaagaaggctagaaataaagcagaattgacaaaaggagctcgtaaagcatccgctacatcgcctatccctattagtgacataatcgtaaaaatagcaaaatacacgcttaaaaaagcaaatacttgagggaatttatttactttgcttgtcacaaggtaacccgtcacaaacacgaatacaatgagccatacggggagtaaagataagcttccccaccagctttggccgcttgaaaagacaataagtgaaaagagaagaccaaaagtggcagggttaaaaataggcttcttttttacttttactaagtgtttcgataaaatcgcaacagctacagtgcaaaatgtgacccaagcaggtgtagaggtgctgagcactaaggcaataattaatccagtaataattccgccgtcgggaagctgaattttctttttataggcaaaagaaaatcctaaatctaaggcggccgccgagcatacggcaagcagtaggtgtcctaatccttgaaaggcagaagagttgaattcacctaataaggttaacagcagcagcatagccatcacgtatcttttaggtgttttaactagctgcgcccaaggacttatttcttttggtttgttttcatctacaataatataaccttttggtgtgctaatatatttaacaccgcttcttcgttcagaacgtgtggtcataattcattaattcctccatatctgatgtaaaaaaaggagtgaaactagaatcgaagagtacgccgcgtatgtcggcatcattcaataaatttactcctttttccgctcctaaaataaaagctgacgtagataatgcatcggctagcatggcagaaggagcaatagctgtacaactcattagactgcttcgagtgaatggagataagggattaaccaaatgatgcatggatggttgcgtcttagtttttctagcataatttcctgatgtgcagacagccgtatctgttacacgtaaagtcagtaataactgtgtttgaataccagggtgctgaatcccgactttccataactctccgtgttgattgcgtcctttaactaggatgtctcctcctgcattaatcataaaatgctgataaggaagggagcgggcagccaaatcaatcgccaacccttttgcgaccgctccaagatctataatcatcggtttttgtaaacaaaccgtttttttatgtgtatccaatacgatgtctttataacttccaaaatcgactgcttcgttcacttgtacaggctttccatataagtagtgttcgttaaaaccgcggttttctaattgctttcctaccgttgggtcaaagattccatgcgtttcatttgctactaagacagcgaaatgaagggcttcaaataatagaggactaacagaaacaggctctttgacatgtctaattagtttcataacttcgctttttgcatcaaatcgactgcatgtcgtttcaacggtcttaaaaatagtaaatgcctttgagatatggtgaaggacatttgcttcttctgattggggagcaattacttggagtgacacggttgttcccatacataatacagagcggctatacgtttttatggacatcattcgtttctcctttatgcattcattgcttgctgaagtgcgtcatccacggcattttgaaaatcttctgtactaagcgttgctccactgacgacgtcgacgtctgagctttgtctttgtacgacttgagacggaaggccctcaatgtaactttgagaatagtgagtatccgcttctgtaatttcaactgtatcaattcggtcgtttttaatgttcacggatacgtagacagttccgatacggttgcttccttggccagaatatgttccatctttgtattttgttttaggagcagaactttcggcattcgctgatgactgtttcttattagagggagcaatatcttctccccagctgtcattgacaatcgtttggttgtctgtctgatccgtcgttttcttctgatgatgagccggtgtgacttgaacagcttgtgcatcagatagagtgtttatataaccagttgcataaatacttcctatggctacgctgcatgcagcaatcatcttctttcccattttactcatgtttgttgaacctcctgatttgtaccagaacgatagtttcaattattgatggttgtctttagcataaataaactttacaaataaacttttaaaaaagatttaaaatcaagaaagttttttcaaaaacaaatgagccaaaggaaaagatgattctaagtaataaaggtaggcgatggaatttctttcacaagcctagctattttgacatacgtaataatagttaatatttctgtttactatctaaacgtgcatgataaaatagaaaagatgaatatgtgttaggaggaacatcagtgaaaattaagcttggccttttatacggaggaaaatccgctgaacataaagtatctttacaaacagctctagcagtttcaaaagcaattaaccacgataaatatgaagtgcatccaatttacattacagaaacaggaaagtggattcgcggcacacagctgactggtccgcttgaaacagttgctcaattagaaattcaagataacggaactgctatttcaccagtttcattgaatacggaaatgtttgcattaacagattcaaaaacagatgatcagctagatgttattttcccacttcttcatggtccaaatggagaagatggtacggtacaaggattattagaattattgaatattccttatgttggaaacggtgtattagcttcagcagctggtatggataaagttgtaatgaagcagctgtttgcacaggcaggtctccctcaagtagagtacgtatcatttatccgccgcgagtgggaagcagatcgaacggctgcttatgaaaaagtagaaacacttggatacccttgctttgttaaaccagcaaacttaggttcaagcgttgggattagcaaatgtgataaccgcgaagagttagaagcggcatttgttgaagctttcttattcgatcggaaaatcattgtagaagcagcagcagttggtcgtgaagttgaaattggtgtgttagggaatgacgaagcagcttgttcagtagttggagaaatcttacctaaaaaagcgttttacgattacaaagccaaatatgaagacggcgatacaggccttattattccagctgaaattacagaagaacagcatcaagaaatgtcagcactagcaatcaaagcatttaaagcaattgatggatctggtcttgtacgtgcagatttcttcttaacatcagaaggtaaattcattattaatgaagtgaatacgatgcctggttttacacctttcagtatgttcccgttattgtggaaacacgcaggtgttgaatatccagatttaatcgaaaaacttgtatcactagcaattgaacgtcataccgaaaagcagcaaattaaacacacaatgtaactcacacaacactattcatcatgaatagtgtttctgtgtttagtttcaattaatgttatccatagtttactttatatcgagaggagcaaaccaacgatgattaaacgtacgcttacacagctagctacaatgattccaggaagtgtatttcatagcggaaacgaagaagctgtaattgagggagtctcaattgatacgagaaccattcagcaaggtaatttatatatcccaattaaaggggaacgctttaacgggcatacatttgtcaataaagcaattgaaaacggagcggtcgctacactgtggaacaaagatgaagaaaatccaccgacagacattagtgttattttagtcgatgatacgctagaagctcttcagcaattagcgaaatcctatcgtcacgagttagatattaaagtagtgggcattacaggaagtaacggaaaaacaacggcaaaagacatggtgaaagctgtgctcgatacaacttaccgtgttctgaaaacagatggaaactttaataatcatattggcatgccgcttactattttgcgtttagatgaaactcatgatattgcagttttagaaatgggcatgagcagccgaggggaaattgagtttctttctaatttagcggagcctgatgtggccattattacaaatatcggagaatcgcaccttcaagacttaggaagccgtgatggaattgcggaggcaaaattagaaattacaagcggcttagcgccaacaggtcagcttgtctataatggtgatgagccacttttaacgtcgcgcgttgttaatccagtatttgaaacggtgacatttggcagctcagaacaaaacgatttgtatccaagtgctatttcagctgaagagttaggcacaacattcactgtttcacgtgaaacagcatattcattctttatcccggtattaggtaaacataatgttcacaatgcgctttctgctattgcggtaggtcattattttggactagacaatgaaacaatcgctaagggattaaaagaattaaagctaaccaatatgcgtatggagctcgtgaaaagaacagatggcctgaccttcattaatgacgcatataatgcaagcccaacgtccgttaaagctgctatcacgttgatgcatgatttagaaggctataagcaaaaaattcttgttctcggcgatatgcttgaattaggagatcaggaaaaagagttccacaaagaagtgggagagtttattcaagcagaaaaaattgattatgttctaacatacggccccttatctgttgaaattgagcaaggagcaaaaaataattttgcagaagataaggtaatgcactttgaggagaaagatgagcttgttaaaaaattaacagcgattacaacaagagaagatgtggttttagtgaaagcatctcgagggatgaagcttgaggaagttatctcaaaaatgatgcataaattaccgtgatattaaaaagagtataagtaagctctattgcaaacggaaagccatagtgttatgatgtagtctgagtgtcttgaggcgcttatactctaaacgttgaatttattgaagtagtcgtttagagcattttccgtttcctcggagaatgcttttttttgtaaaatatagatagtctaaatataaaaggagtttgaaaaacttggcattatttcaagatttaggattaagtcaacagcttaataaagctgtgagtaaaatgggttttgaagaagcaacaccaattcaatcagaaactatcccattagcactagaaggtcacgatttgatcggacaagcacaaacaggaacaggtaaaacagcggcatttggtattcctcttattgaaaaagttgatgtaaacgtagatgcaattcaagggttaattattgctcctactcgtgaacttgctgtacaggtatctgaagaactttacaaaattggtcaaacaaagcgcgtacgcgtgctatcaatttacggtggtcaagatatcagtcgtcaaattcgtgcattgaaaaagcaccctcatatcatcgtagggacaccagggcgtatgctagatcatattaatcgtcgtacacttcgtctacaagatgttcacacagttattttagatgaagcagatgaaatgttaaacatgggattcatcgaagacattgaaaaaatcttatcaaacgtacctgagaaccaccaaacacttttattctcagcaacaatgcctactccaatccgtcgcattgctgaaaaattcatgaacgaaccaaaagtggtaaaagtaaaagcaaaagaagtaacgatgccaaacattacgcagtattatttagaagtacaagaaaagcgtaaatttgatatccttactcgtcttttagatatgcaatcacctgaattagctatcatctttggtcgtacaaagcgccgtgttgatgagctatcagaagcattaaatatgcgtggttattctgcacaaggtatccatggtgacttgacgcaatcgaaacgtctatctgtactacgtcaatttaaagaaggttctattgatgtattagttgcgacggacgtagctgcacgcggacttgatatttctggtgttactcatgtatacaactttgatatccctcaagatccagagagctatgtacaccgtatcggacgtacaggacgtgctggtaaaatgggtgctgctataacatttgtaacgccaagagaaactggacagttacacaatattgagcgtacaacaaaacgtaaaatggagcgtatgactcctccaacgcttgatgaagcaatggaaggtcaacagcgtattgcagctgacaaattaacagaatctgtgacacaaggcaacttatcttactataaacagttggcagaagagttacttgaagagcacgattcagtttcattagtggcagcggcaatcaaattatttacaaaagaaccaaacgaatcaccaattcaattaactgctgaaccaccggtaattgcaaaaggtgataaaaacaaacgtggaaatggcggaggccgttcacgttctaactctaaaaactactcacagcaaaatcgtcgtggaaactcaaagcgttttggtgacaagcgtcgcggtggaagcaacggcagtgataatagaaatcgcaatagcagcagcaatcgtaaagattctcgcagcaaagcgtaaaataaaaacgagccttaacaggctcgtttttttatgtgttaattgctattttattggtgcacactatgagtaaaataaaatggggtgttcactgatgtcgaccattgttcggttaggttatgtggcgatgagcgttcatttggaaaatagttctccttctcaaacaatgacttttgcacaatttcagcgtgtgaaagatcatgaagcggccattcgcaagctcgaacgtattgcaatatccaacttagaaaactgcttacggttattaaaacataatgcgtggagtgaaattgagttttttcgattcagttctaagttaattccattagctaaccatgatgcgctaaaagagtggaactacatagctcctttaaaggatgctcttcagcgtatttctgtatttttgaaggaacatccaatgagagtagattttcacccggatcattttgttgttttaaactcaacggataaagaggtttttaagcattctatccaaactcttcgcatgcatcaaaagttgctgaaaggaatggatatttcgcttcaaaatcgctgtgttttacatgttggaggagcttataatgataaagaaaaagcactggagcagtttattcataattgggggcttgtacctcaatcccttcagcaaatgattatgttagaaaacgacgatacaacctttcatataaaggacgtcttgtatttatgtgaaaaactaaatgtcccaatcatttttgatcttcatcatcatcaggcaaacaacgatgaaacttcatggcaagagcattgggaccgtatcattagaacatgggaacatgaaacgctccctttaaaaatgcatatatctagtcctaaaagtgataaagaatttagagctcatgcggattatatcgatgttaatcggttttacagctttttaaaagaagtaaatggaacgataccgcaaattgattgcatgattgaagctaagaaaaaagatgaagcgctctttcagttagtaagagacttgaagtcttatgaagatgtggaatttattaactcatccaccttttatattaaatcctaaagcaggcctcatatctgtggcttgtttttctgtttgaacgcaagaaaagcgagaagaaatccagcaatacctccaacgaaatgagctgtattgttggttcctggcgttagcagacctgaaagtaatccaataattaaaaagacgataatgatttgctggttactttgagaaagcatgtgcttttgttttattacaaggtagaggtaaaacccaagcagtccgaaaatggcaccagatgcacccacatggctgtagaaagaagattggattagaaatgtaacgatatttccaagcaatccacacgtaaggtagaatagaagaaacttataagaagaaagaatacgctcagcacctggccctaacaagaacaatgaaaatgagttgaaaagaaggtgtgaaaagcttagatgcaaaaagataggtgtgaaaagtcgccagtagtctccttgagaaattaagctattcacgccaataagctgatgtataaaagattctgcaaggtgtgagggaagagcggcaagtaaccatagcgcaatgtggatgcagataagcgtgaaggtaacagggtaaaaacgtttaaattcagctgcattttctgtgcgtacgaacatatttgtcactcctttttataaaggcatttttatatactattctgtaagagaggattaaatgaaaatgattataggaactggaattgatattacagagttagagcgggttgaaaaaatggtgcagcgtcaaagcgcttttattactcggattttaacaaaaaatgaaaaagaacgctatgaaaagctatcaagccggcgtagggtcgaatttttagcaggaagatttgctgtgaaggaagcatattcgaaagctcttggaacaggaataggaaaagatttcagcttccaagatatcgaaatcgtgaatgatgaaagaggaaaaccccacattgttacaaaacaaccactggacgcgtccgtacacgtatctatttcccacagtgcgcactatgcaattgctcaagtaattattgaacgcttgtcaagctagtctgcatattcactatttcttgttcatatattcatagtgtggatagggagacaagatatgttcttgcttctccgtttagctgtgaatatacgaaataaaggagttggggaaatgcataaaaaatggattggcttatttgtttgcgccttttttctcttagccttatcagcatgcggtgaaaaaagtcagcaggatgtaacagatgcattggatgccaaagtacaagaaatgacggggtataaatcagatgctaagatgacattgaatacagggaaagatgctcaagtatacgatgtagagatttggcatagtaagcctatgtattatcgagtgaatttgaaaaatacaaagaaagatcaaagccaaatgattttgcgtaatgatgaaggggtttttgttttaacgcctgccttaaataaaagctttcgttttcaaagtgactggccgcaaaatagcagtcaagcttatttgtatgaatcccttgtccaagatattgtgaaggatgaaaaggcaagttttaaatcaacggataagcattatatttttgaaacaaaaaccaactatcaaaatagcacgatgcttcctaaacaagaaattacgctgaacaaaagtgacttagcgcctgtttcagttaaaattatggatacggataataaagtgttaataaaagttgatttctctaaggtcaaattcgattctaagtttgataaaggggcttttgatacaaaaagaaatatgacaagtgcaaagattgacgttccgacattagctcagcaaaaatcatttagcgtcctttatcctaaggatgttccaaaaggtacaaagctgtccaaggaaaagaaaattgagacagaaaatggcgaaagagtcgttttaatgtacaaaggagaaaagccgtttacgcttgtgcaagaaaaagcgcaagtagctaaaacagcaacatctacagttactgccggagagccatttgatttaggttttactgtgggagctttgacggataaaagtctatcttggacatataatggagtagactttatgctggcttctgatcagctaacaccagatgaattgagtacagttgctagatctgtgcaaagtcagatgggaaaataagagaagcttacaagcctgcatatatgtaggcttgttcttgcttaatttgaataaagatcgagatgaagtttggctatagatgtattatactaacagaggaaagtacgtttagaatggttctgaaaaaaggaagtgtcgtagtaatggatgcattttatagagaaacatgggcagaaattgatgtagaagccatttttcaaaatgttaatcatgtaagagaactgataccggggcataaaacgttaatggccgtagtgaaggcgaatgcgtacgggcatggagataaagaagtagcagagattgcgcttcaagctggtgctgatatgctagctgtagcttttttggatgaagctattgctcttcggaaaaaaggaataaaggaatccattttagtattaggagccgtgcctatcctacacattcaaactgcattggagtgggatgtaacggtcactgcttatagcaaagcttggattgaagaagcggcgtccattctaggtgaaaacagtcagctgcatatgcatttaaaaatagatacaggcatgggtcgcttgggagttagaacaaaagaagaattacacgaaacgatgaaaatcatcgcttctcattcgggattcgtgctggatggagtgtttacacactttgcaacagcagacgagctaaactcatcttattttgaagaacaatacacattcttcgaagaaatggttcgaattgtgaaagaatataattttacacctccgatgattcactgtgcaaatagcgcggccttgcttcgtcgtccgaaagatatctttaatggcgtacgcttaggtatctctatgtatggcttgagtccttctgaggaattaaaagaagtcttgccaattccgttaaaacaagctttttcgctgcacagccgtatcgtgcatgttaaaaaagtcaaaaaagggagtcatatcagttacggagctacttatgaagctaaagaagatgaatggattgctactatcccattaggatacgcagacggctggattcgtaaattaagtaattttgaagtattaatagatggagttaaagtgccaattgttggtagaatctgcatggatcaattgatgattaaattacctaaaatgtataaaatgggtacaaaagtaacatttattgggaaacaaaaagatgctgaaattacaattgatgaagtagcgaagcatcttgaaacaattaattatgaaatcccttgcatgattgcagcaagggttccgagggtttatacaagagatttgcagcatattgatgttaataattatatcttgcgctgaatatacatcttcctgagtcaacataaaaagtctgagaacaaaagacaataaaataataacttccatgcataaaagagggtatcaattgacgataatagtgtagaaattgacagaattaactttccattaaagctaatcaatgttatgataaggaaagatgagactattggtgtgtgtattgatgttggaggtgtatgtttgtgtctgaagcgagcgcaactacagaaatcctagtaagattaccgaaaaatttagtatcggagctcgatcttatggttaaacaagaaaatggcaaccgaagtgattttattcaccaagcaacaaaattgtaccttcgtgagcgaaaaaaacgccatattcgcgaatcaatgagacgtggatatatggagatggcaaagataaacttaaatattgcttccgaggcttttctagcagagtatgaagctgatcatactgtggatcgtttagtaagcggggggtaatgacttggtagtcaaacgtggcgacgtttattttgctgacctatctcctgttgttggctcagaacaaggaggcgttcgccctgtacttgtcattcaaaatgatataggcaatcgttttagcccaactgttattgtagctgcgatcactgctcaaattcaaaaggcaaagttacctacgcatgttgaaattgatgcaaagcgctatggatttgagcgagattcagttattttactagaacaaattcgtactattgataaacagaggctaacagacaagattacccatttagatgatgaaatgatggacagagtggatgaagccttgcaaatcagtgtaggacttatcgacttttagaattatacttccatttatgctaagttgctcctttatgagcaacttttttaatttgactaggaataatcagtaaacgtatattgtaataagaaacgttttaaaaatgataatatatatatagatataaatgagtgtattgactcacaaggaggacctcatgaatcaagatttattcaactatatacaaaatcataaatcagaaatttttgatcgatggctagtgttaatgaatgatgcggaaacagagcggattaaaaacattgtatccgagcaagtgtacgtaaatgtaagctctgattttgtaaatttacttttggcaaaagcattccgtgatcaggaaaattttgcagaggaactagaggaagtagtaggacgagttgtgagtttaggatggcctcttgcttatttgacacagggtgtacgtaacttgggtcacgtagtggttgaagggtatgtaaacagtgaacatgtgaaggctgaccaaactcattctgaattattctatcggtttgacaagtggttaagccctatttataacaaaatagtagaacaatactccaactcgtgggaaaatacagttatgttgcaaaaagttgcacttcaagaattgtctgctccattaataccggtatttgataaaattacagtaatgccgcttgtaggaacaattgacactgatcgtgcaaagaaaattatggaaaatttactgcaaggtgtcgtaaagcaccgatcagaggtcgtattaatagatattaccggagtaccagtagtggatacgatggttgcccatcatatcattcaagctgctgaagccgtacgtttggttggagccaagtgtttgttagtaggaattcgtccggaaattgctcagactattgtgaacttaggtattaacttaaacgaaattattacgaaaaactcattaaaaaaaggcgtagagtttgcgttagaaatgactgagcggaaaatagttgatatagaatcggaggaataaacgtgagaatacccattttgaaattgtacgactatttattggtatccattcaatgggagctggatgatcaaacggctattcaattccaagaagatttgctaagtaaaattcatcaaactggagcaaaaggagtggtaatcgatttaacttcaattgatatgatcgattcattcatcgcaaaagtgttaggtgacgtggttagcatgtctaatttgatgggggctagagtagtattaacaggtatccagcctgcagtagctattacacttgttgagttaggtattggcctaaatgatgttcttactgcactcgatttagaaaaaggtcttgagaaactccaatcggaattgggggattagtatatggaattccaatccagcgtaaaaatcgtaacagaatgggacatcgtagcggcacgccaattaggtagaaatgtgtcgaaagagctagggtttggaacagttgaccaagctcgtattacaaccgccatttctgaattagctcgtaatatttacctatatgcgggtaagggtcaaatctatattgagaaattaaatcgtggaggaaaaaacggtcttcttgtcgtagcaacagatgaagggccaggtatccccgacgttcgcaaagtaatggaagatggatactcaacatcgggtggactaggagctgggcttcctggggtaaaacgattgatggatgagtttgacatcgaaacaaatgtcggagaaggtactgagattaaagcagttaagtggctccggtaggaggaaatagataatgtcttttgataaagagatgagagatttatacaaagatattttggggaactatatccaaacacaaaatgaacaaattttgtatcaaggacaaaaattaagtagaaaatctttagagaatgaaatatcgccagaagatattgtgagtattcataaagaagtgattaaagaaatttattctgatattccagaaaaagtgctgcattctctggactttttacttgaggtaatgattagctacggtcttgctcttcgtgagcatcaaacattaaaaaataagcagcgggaacttcgttctgaaattgaagttgccgctaacgtccagcagacgctgttggggacaaaggttccggctagttcaactttagaaattggtgcgattagcgtaccggctaaacagatgaacggagattattttcactttgtagaagaagagcatggtgggttaagtattgccattgccgatgtgattggaaaaggaattccagctgcaatgtgtatgtctatgatcaagtatgcaatggacagcttaccggactcaagaaaaaatccaagttatgtattagaaaacttgaataatattgtagagcgaaacgtagatccaagtatgtttattacgatgttctacggaagctataatcccgagacgaacttatttgattatgcatctgcagggcatgaaccaggtttttattatgatgccaaagctgattcatttgaagatttggaagcaaaaggactcgtgctaggagtcgatcgccatgtgaaatatcttcagtacgagcagcagctttcaaaaggcgatatgattgttctgttaacagatggcgtaacagaatgcagaactgaagaaggatttattgaaagattggacatcataaaattaattcgaaaatacatgcatttgtctcctcaagaaattgtagaatctgtatataaagagctggaaaaattacagcactttcaattgagagatgactttacattgattattttgaagagtttagtttaagtattctaaataagggtaaagaaaagatagcacaaaattagagggggtctactaatacgatgaatttaaaaatagatatacaaaaggacggtcaagcatatcgtattaagctggctggagagattgacgcatatacagcacctaagctaaaagaaaagttcatggaaattactgaacatactgaaccggaaattatagtcgatttaaccgatgtatcatacatggatagtacaggactaggtgtatttattgcattattaaaagccaataagaaaaataacggctctttgaaatttgttggtgtatcagagcgcatcaagcgcttatttgatattacgggcctcacagacattttaaacgtgaattcacaagtagaaggtggcgtaaaatgaaacagccttatgactttgttgagatgaagattcctgctaagccagactacgtagcgattattcgactgacgctgtctggtgtagcgaaccggatgggtttttcttatgatgaaattgaagatatgaaaattgctgtgagtgaggcatgtacaaatgccgtacagcatgcttacaagaatgaagaaaatggtgaagtgagagtaggttttggtttatttgatgaccgtttagaaatcatggtggtcgataaaggtgaaagctttaattttgaagagcttaaggaacatataggaccttatgaaacatcaaaagaagttgaatttcttcctgaaggtggacttggtttatatttaattgaaacactaatggacgaagtgaaaatggtcaattcaaaaggtgtaacgctaatgatgactaagtatgtgcaaagagagcaggtggagagtgatgaaaacacagtctcaacctatgaaattaactaaagaacaggttcaggaacgaattgagcgctttcaaaaaacgcaggatgaagaagcacaaagtgatctagtagtacattacaagaaccttgttgaatctattgcacgtcgttattcaaaaggcagaagcttacatgaagatattgtgcaggtagggatgctaggactgttaggagctattagaaggtatgatgcttcatttggaagaagctttgaatcgtttgctgttcctacaatcattggagagattaagcgatttttacgcgataaaacgtggagtgttcacgtaccgcgccgcatcaaagaattaggtcctaaaattaaagcagctgtcgaagagctaacaacccgtttacagcgatctcctcaagtgaaagaaattgctgatcatatcggagtgacagaggaagaaattttagaaacgatggagatggggcaaagttatcaagcgttgtctgttgatcattccattgaagcagactctgatggaagtactgttacaatccttgatttagtaggtgaacaagagtcaggttatgagaaaactgatcaacgcttagtgttagaaaagattcttcatgtattaagcgatagagaaaaagaagtgattcgctatacatttattgaaaatctgagtcaaaaagatgccggtgagaaattagggatttctcaaatgcatgtatctcgactgcaaagaagagctcttgataagctaaggactgcagctcgctcagattctaacgattcggagtatatgtcgtgatgacagtagaccctaatacaaagttgattcaaactcatatataccaagagccaaagcaagggaaggtatgttgtggagatagttactatgtcaaagaaacggatgactattttctatgtgcagtggcagatggattaggaagcggtgaacaagctagagccgcttctgtagctgttacggatgtcgcgaaagctcatcatcatctagatgtggatgagatcatttctaagtgcaacaaagctactcggcatacaagaggcgcggcagtagctattttgaaaattgataaaaaacataacgaatttcattatacaaatgtaggtaatatccgcttttatctgtattctccggaggggaaattaacgtaccctctgccaattcaaggttttttatcagggaaaattcaaaagttccgcacacaaaccttcccatatgactccggttctaaatttttgattcatacagatggcttagaattaaaagagattaaatctgtttttgctaactcgatgaatgtagatcaattgtcgacacggctacaggcagcaattcgatctcataatgacgatattacgtatatcgctggtcatcttccaactgcatagcctttctttttagctcacatgtgttattgcatgtgagttttgttacaatagagacaaagtttcatttaggtaggaggataagctgtgtctgtcgcaacgaaattagataatcaaattgttcaacgtgtaagtaaagaggtggagatttcacaaaagcaagtacaaaacgtaattgctttagtagaagacggtaatacagttccctttattgctcgatatagaaaagaacaaactggtgctttggatgaagtccaaatccggaatattttagattcctggaactacttaatgaatttagaggagcgtaaagaggaagttcttcgattaattgaagagcaagggaaattaactgaggaactggctgctcaaattcatcaagcgaagaaattgcagcaagtagaagatttataccgcccttttaagcaaaaacgacgtacaaaagcaactgtagcaaaagaaaaaggtcttgaaccattagcagagtggctgctaagttttccacgttctgacgtgaagaatgaagcacaaacatacataaatgaagaagcgggagttcaatcttctgacgaagctattcagggagccctagacattgtagcggaacaaatttctgacgaagcgtcttatcgtcaatggattcgtacgaccactgtaaaagatggcataattgttacttcagtcaaagatccggaaaaagatgaaaaaaatatctatgaaatgtactatgaatatacagaagcggtaaagcgaatcgttcctcatcgtatcttagctatgaatagaggagaaaaagacggtattttaaaagtgagtattgatgcgcctacagatcgtattctttcatatttacataaacaagtaatcaaaaaaagggattcttcagccgaaagttatatcatctcagctacagaagatgcttataaacgcttaatagaaccatctattgaacgcgaaatccgtaaagagctatcagaaaaagcggaagaaagagccattcacatcttttctgaaaacttacgaaaacttcttctccaacctccattgaaagggaaagtggtattaggagtagatccagcttttcgaacaggttgcaaattagctgtagtagatgaaacaggcaaggtattaaaaattgatgttatttatccacatcctcctgtgagaaaagcagctgaagcgcaaaataaattaaagaaaatgttcgctgaataccctattgaagtagtagccattggaaacggaacggcatctcgcgaaacggagcaatttgtagcggatgttcttaaagaaattgaaaactcagtttattatttgattgtgaatgaagcgggagcaagcgtgtattcggcctctgatgttgctagagaggaatttcctgattttcaagtagaagagcgaagcgctgtatcaattgccagaaggctgcaagatccgctggctgaacttgtgaaaatcgatcctaagtcggtaggagtagggcagtatcagcatgatgtgtctcaaaagcaattaaatgattcactgacttttattgtagagacagtagtaaatcaggtaggagtaaatgcaaacacggcttctgcttcgcttctccaatacgttgctggtctaaataagacagttgctcaaaacattgtaaaatatcgggatgaaaacggaaaattctctaaccgaaaacagttgaagaaaattccgcgtctaggcgctaaaacgtatgagcagtgtattgggtttttacgtattatagaaggtgaagaacctttagacagaacgggtatccatcctgaaacatatggagacgttaaaaagcttttaaagaaagctgaagtgaaagagactgagcttggaacggagaaagtaaaagaagcattaaaacatatttctttacccgaaatatcagaagaactaagtataggggagcttactttaaaagacattatagaagcgctcgtaagaccggaaagagatcctcgtgatgaactgccaaaacctttgctccgtcaggatattttgaagctagaggaccttgctaaaggtattcagcttgaaggtacggtgcgaaacgtcgtagacttcggagcgttcatcgatataggagttaagcaagacggcctagtccatatttctaaattaacgaatcggtacgttaagcaccccctcgatgtcatttcagtaggcgatttggtgaatgtgtgggtagaagacgtagatatgaaaaaaggaagagtcgcactgacgatgattccgccccatcaataataaaattgccttttcagattttctgaaaaggcaattttatttgtaaaaagaagtgatttaagaagcggaattatttttttgataaaaaaaccaacattgattgagcaattttatttgtgcacggtctttttcagaataagcgcgcctcatttgtttttgtagccacattggcataaggacaatcactccttttcatttatgataaggtgaatagtgagtatgtaatgaagtgtatgcccaaagagctagtcaggtgatttcatacagtagaggagtatataaaatgaatgataaggatttacaaatacttgtaggagaaatttcattgaagctgtttcacaaaccatttcgtcatgaagccacttttaattctcgtttacgtacgacaggtggaaggtatttgttacgtacatctaatatagaagtaaactacaaatactttgaacaatatggcagacaagaaatagtagaaattattaaacatgagctctgtcactatcatttgcatattgaggggaaagggtataagcatggagatcaagactttaaaaggctaatgaaagaagtaggcgccccccgcttttgtcaggcattgaaaaaagaaagtgatggaaagaaaaaagagtacatatatgtatgtatgcagtgtgatcaaaaatatgttcgaaaaagaaaagtgaacacggttaaatatgtttgtggcaagtgtaaaggtaaattaaaaaaaatgtagaagatgcttgactaaaatagattgattatgataaattaataaagccgtctcaaataaacggcaaagaaattacaaaaacttattgacattacatataatgtcgattacaatgtaagaagtctgataaatattattccacagtagctcagtggtagagctatcggctgttaaccgatcggtcgtaggttcgagtcctacctgtggagccatatggagaagtactcaagtggctgaagaggcgcccctgctaagggtgtaggtcgtgtaagcggcgcgagggttcaaatccctccttctccgccattttataatggcccgttggtcaagcggttaagacaccgccctttcacggcggtaacacgggttcgaatcccgtacgggtcaccatttatttttatttacatactctgtggaggattagctcagctgggagagcacctgccttacaagcagggggtcggcggttcgatcccgtcatcctccaccatttgactgttttatacataattttggatggtcccgtggtgtagcggttaacatgcctgcctgtcacgcaggagatcgcgggttcgattcccgtcgggaccgccattttaaattattgggctatcgccaagcggtaaggcaacggattttgattccgtcatgcgttggttcgaatccagctagcccagccataaagagccattagctcagttggtagagcatctgacttttaatcagagggtcgaaggttcgagtccttcatggctcattttcatttcttgcgggtgtggcggaattggcagacgcgctagacttaggatctagtgtcttacgacgtgggggttcaagtcccttcacccgcatcttattcattttatgtatttagcggtcgtggcggaatggcagacgcgctaggttgagggcctagtgggggcgaccccgtggaggttcaagtcctctcggccgcaccaaaaaaactttttaaaaagtgttgacataagaaggtagaaatgatattataataaagtcgccaaaacaacggtggtaaacatcataagaagcgcccgtagctcaattggatagagcgtttgactacggatcaaaaggttaggggttcgactcctctcgggcgcgccatattgcgggtgtagtttagtggtaaaacctcagccttccaagctgatgtcgtgagttcgattctcatcacccgctccaaacatattgaactttgaaaactgaacaaagcgacaaacgtcaacgttaatttttatttttaaat

SEQ ID NO: 32 - DNA, 49729 bp, Priestia aryabhattai
  source 1..49729: mol_type = genomic DNA
caaataaattaaaataaaacattagttcaaacgcctcttaataaattctagtagtatatttttaaaaataaattatactattcagtagagaaaattttataaagcaagaaagggacttagtcatgaaagacatacagtgggtacagcaaactttatttaataccggtaagtggattgacattagtgaagtaattataaagattatcttgattttcattattgctcaaatcgttatcaggtttgctcgtagtgtaattaataaaatctttgatttcagatttaaaactaaactgctgaggtacaatgaacgtaaagaaataacgctgaaaaagctttgtctgagcattgtcatgtacgtagtatattttattgtacttattacgtccttagaggcaattggaattaatatgaaagcactcttagctggtattagcgtagcaggatttattacaggcttaggtgcacaaaatttgattaaagatattttaaacggtttttttattctatttgaagatcaattctcagtaggagatcacgtatccataaatgatacgaaaggaactgttgaagaaattggattgcgcacgacaaaaattcgcggagttgacggagagttttacttctttgctaatagtaacattacaaaagtagcgaactatacgcttggtgaaattcccgaagtacataagcctgaacaaataaaaactcgtgaagaatagcttcacgagtttttatttacgacagttttaaaaaattgatcgtatgatgtaaggtgataatctgcttcaatgtcgtcattttgaaatgcacatgttttgattcccagttcacgggcaggttttaaatcaagctcgcgatctccaatcactaaatcgagctgatacttattgtgaagatatgcataagcgccgctatcaggctttcgtttatagccatcatcttttgtaataatctccgtaaaatagtgctccatattaaaaaatgcaagaatatcaagagtagactgtctagatttatgcgtaacaattacatttgtatccgcaaagctcagtacgtcttctacgtgaggaaaagcaggcttatctttaggattgattttctgttcgagcacatggaagtgattatcaaacaaagacttttcaatatcgaagtgcttaattgctacgtcagaagatatcttcatctgttttaaaatatcatcttctgagatcgtttgatctgttagtaattctttgaatgcttttacaattgttggataggtatcaaagatggttccatcaaagtcccataaaatattcattttcgctgtctctcctttttaaaaacgtaacgattatacgaaatttttcattgcttgtcagtgaacctttttgccatcgttgcatttaaagtaaaaaaactcgttttatacgagtttttttactttattagctgctgctgcacccactcccgcagctagagctgctgcagtttgaactcgaacagctgctgccgctgtcatgatggtgatgacctccatcgtggtggtgatggtggcgattgtcttcccatggacttgaacagctgtagccgctgtacgaggctgtatctcccgcatagattgtctttttgtatagcagcagttcattcatatgtcttgaaaagtcagtagcttcgtaaagtgaataaaaaacaaagccttgaaaaagaagttcgtttgatacattccctttttttaatgcttttttaaagtacgacgatcctcccgatttcattcgtttttttgcatccttaatttcttcttttaacgtttgaatcagggctctctgttgtttttcccatttgccgtttcttaaaaaatagcgatctagcaattcatcttctgataacctttgaaaatcttgaagtgtacttttatcaagaggatgctgaaaaaatttcccccaaagcagtcggctgttgcccgttatgtcaaacaaatgagcatacatccaatcgaagaacgctcgcttatccggctgtggagatggagttgtatttacatttggctggtgatgcaaaaagcggctgaaaaagtgttctgtaaaacgctcataatctactgtaaacataatcatttcgtgccacacttcatccactttttcactaaacatcggtacatctttgatgactgcatttaataaaaagtaacgcttcatctcaaaaaacgtccactccacttcatcgtcttttatgctgctcccttttatacgctgttttacttgctgaacataggctgtcggtaacgaatcttctagtgaatgaacaatatcttcaaacccatgatctttatgtattccaagctcacctggaagctcctctttgtacaagcgaaatccccttggctttgcaattcctttaataatcaaagctaaaagaattactgctcctactataattgctgctatcatcttcttccccctgtatcgtatctatatattcaatattttaccacattcgtaaaatacaaaaaaagagctcaattaacttgagctctcgtcatcatcgggtatctcgtctaccttttctactttgactagacctttcgtgctgtattcaagatcaaagtatgctttaacaatatccccttttttcaaattgcttggaatcggttcatttaaatttttatcggaaaatttaatgcccgttccttcttttgttgttccgctgtatgtaccattttcgattttttcaatagtaatataatacactcgatatttgtgcgcttcctcgtcgcctttcgctttttctttaacggtttcttgttcaggaagtttactcagtgtttcttgggcttgttcagaagtcggctctgctgatcgatttatgaattgcatcacaactaacactaaacatataactactaaaactaataataatatcttttttgctgataaagacaatgaactgtgcctccttacacctttatgtatatcatgctgcacacaagagattatacacgataaaggattagaaattggaataaattctataaaaatagtaaaaatatgagaaagtacctagaattttttacgcttttctgcacttttttgagataaaaaagaaatttggtaccttatccttaaattgtaactgattcacttcattttcgaaaagagttttgcccattttgtcgtaaaaaagtcataataagaaggaatatcacaccatattgtcgaacgtatgtatatacttataatgaactgccgaactgcttttctctaccctcattgttgaggcaatatggcaactgaaacagcttgctgttaaattcagattacacatctatactcaggaggtggaatgcaaaatgatgtttgcacttattgttgtggttggtatcgtagcacttggcgtagctagcttctacgtcattaagcggcctcaaggcgctgttgatcctgaggatcgcaaaccgcttgtttctgtaaacgggcatgttaaatttgcagaaggaattaatcaaatttctatatctaaaattgacatgtacgatcagcgtcttgttatcaatcaagtagctattattccatttaaccgtattcaacgagcagaattttcaaaggttgtcaaaaatgaaaaaggccttcacggagctcctgttcaacgctatttcggtgagttaaccattcatttcacagacaagaacgggcaagaaacatacattcgctgtgaaacaccgaaaaaaaatcaatttcacctcatctaccagtacgatttaatgaaaagacaattaaataagcgtcttggtcttgaagatcagcagccttaccttactctccaagaaccatacgaactataagagaaaacctccctttttcacatattatttcacttccctgtacatactagaagcgaaactgaaaatgggaggtcattccaatggatttcgtccgttttttgcaatatttttgttcaatcgccggtgctctatgcttagggtttacctactatcacatgtttaagcgtgacgctctggttaaaaaagaagaatcacagcaaggtggaactgattaacgttcaccttgttttttatgtgcaggcatgtgtacttcgcattctgtggttgaaagttagatcactttaatcatttgtaaaatcacgggtgacttttctaaaggaatatcctctgtgttaataataagaagtcctttttggacgctgtaattggaggaaggctgtaacataccgtttatgaatagattactgtatgagtagctctcaggatccaatatatgctgagtgccgtattcttttaacgcatcttgatctgtaaagatgcgcttgctgcctccggctacggtatagtattcaaagatgcgaacttttttcgggaacatatacctaaattcctgctgaggccacacgggaagcttaataaaagatgttgaataagagggtgcatactgatcgcagccgtaagatttttttttcaagaaaaactctccttcacagatgtacaaacttaaaagtgataaagtgaagattatgctatcgttttgttttaaagcgtaatagcgtgtaagatatataaatcttagttttagagaaattttgcggtcataataaaagcttctgcggatgtagcgcagaagcttttattattgttatttatttaattcaaaacgcccagtttccttttctaaacacaggctcgcttgtaccgtcagctttaatgccgtcgatgtccatttcagctgagccaatcatgaagtcaacgtgggtgatgctgtcgtttgctccgttttgtgatagctcttctttagacatcgtttttccgccttctaaacagaaagaatacgagctgccgatggctaagtgattggatgcattttcgtcaaacagcgtgttgtagaagatgatgtttgactgagaaattggcgattgatgcggtactaaggctacttctcctaagtatttggcaccttcatctgtttcaattaggtgctttaacgtttcttcgccttcttctgcttttacatcaacaatttttccgttttcaaatgttagcgtgaagttttcaattaagtttcctgcatagctaagcggttttgtgcttgttacttgaccgtttacgccgtctttttttggaagtgtaaatacttcttctgttggcatattggccatgaacgagttaccgtcctcattaacactgcctgcgccaacccaaatatgtttgtcaggaagctcaattgttaaatccgttcctggcgctttatagtgaagcttagcaaatttcttttcatttaaaatgtctacttttttatgtaatgaagcgttatgctcttcccatgcagccactggatcttcttggtctacgcgcacggatttgaaaatagcttcccacagtttttcttgctgctgttcttctggaacgtcaggaaatactttagctgcccagtcttttgaaggaacagctacaatggaccagctgattttatcggattggatcgcttcacggaattttttcattacttttccgcttactttttggaacgcagcaatacgtttgccgtctactccttttagtaagtcaggaccgcttgaaattacagataaaacagcgcctccgtttttcacaagctcttctcttgcttgagctttccaagcaggaaattcattaaatacagattcatccgctttttcatatttcaaacgaactaaatgatcgtcatgccagtctacatcaacagactttgctccggcttcgtacgcttttttcgcaatttcacgaacaaaatcagcggaagaaatatcggcattaatgtttaatacttgccctttttgaatgtttacaccgacttttacagctagctcggcgtatttttcaatattgcgctcaaactgttccataatttatctcctttacgtatatattctaacgactttattgtatcatgaataaaacatcaattgaaaatcctagcctatagtttacataatataattacgttattttacagattattatatagcaaaagtttgttctctaagaatcagaacaaacttttgtttttcacagattcagttttgtagccgagccgctccgaaatgttcttgcctatatcaaccatgcgttcttgaagatacgttaatcgctcatttgtcatacgcatcgtagcaccggaaatgctgactgcggcaacgacctgaccaaggtgatcaaaaatgggcgctgcgatgcaggtaattccatattcattttcttctaaatccagcgcatatcctttttgttttacttctgaaagttctcgaagaaagctttcttcatctgtaatggtgtgatcggtatgagctggtaagccttttctttcaagaatgcttgttaccgtgttaagcggtaaaaaagctaggatagctttaccgacagacgtacagtgcataggcgctcttttccccacttttgaatgcatgcgcagcgtctgattgccttctaatttttcaatatacactacttcaccttgatcgtagacaacaagatgaataacttcatttgtttcactttcaagttcttgcaaaaacggctttgcttccgttcgtagatcaatagaatctaaaagttttgaacttacttctaaaaacttatacccaagcttgtaccgcccggtttcttgatcttgttcaatatagccgtactgagcaagagtagttagaatacggtatacggagcttttattgatgtccatttgctttgcaatttctgtgacgcctaccccttctctttccatgctgacaattgtgacgatatccaacgcccggcttacagacttcaccatgttttctctctccatttttctctctcctttatgtgtcgtgttactgccgggcattttttatcactcttatacgtttacacgttctttctctgcaacaaacggattttggagggttccaatttctcggatggtgcattcaatgacatcgtttgcgcttaccagctccgcaccgaccggacttcctgttaaaaccacatctcccggcttaagggtcataacagtagaaaggtaagcaatcatttgctcaacggaaataatcattaaatctgtcgagctgttttgtttttcaacgccatttaaaaacgcttttacatgaatggatttaaaatcaagttccgtttcgattacggggccaagaggcgtaaatgaatcaaaggattttccaatggtccagtgcccgtcttcatgaaaataatccggagccgttacatcgtttccaattgtatatccaaatatatagtccagcacgtcttcttttgcgatgttctttgcttcttttccaataataactgcaagctcagactcaaacttgacgtgcttaatcgcagttggaatgacaatgtcttcgtttggaccaatcacagaggatacgggcttaaaaaagaagacaggaatagaaggaagttctcttggcagctccgacttcgcggctgcataatttgcacctattccaataatttgactcggctctaaaggagccaaaagccttacttcactcagtgaaaaagtctgtcctgtatagtcccatttctcaaatatatttcctttaatgacgctaatcgtatcctcttttagtacacctgtatgacggctatcttgtacagcgaaccttacaaatttcatgacataactccttttcccatttgcttgattttattaaggatagtagatagtcagattcttaagatgcaagtacagcctgccatctctatgctgacaggccgttttttttactgttttatagctgcttttgcctttgcttcaatacggcggcggtgtaaaactggctctgtatagccgtttggctgatcatagccttgaaatactaaatcgcaggctgcctgaaaagcaatggatgtgctgtagttcgatgccattggctgatacagaggatcattttcattttgttgatccactacttttgccattcgctttagcgtttcagttacttgttcttttgtacaaattccatgatgaagccagttagctacgtgctgactggaaatacgaagcgttgcccggtcttccattagccctacattattaatatccggtacttttgagcaccctactccttggtcgacccatctcactacatacccaagtattccttgagcgttgttgtcgagctcctgctgaatttcatctttgctccaatttggtgtttctgctacaggaatttgcaaaatgtcatcttgtaaatcagtagactgagtaagcaattcgttttgaacatctcttacatcaatttgatgatagtgaagagcatgaagcgttgctgcggttggtgaaggcacccatgccgtattcgctcctgcttttaaatgccccactttttgtttaagcatttccgccatcatatccggcatcgcccacattccttttccaatttgagcgcgaccttggaatccgcttgctaatcctatatttacattagactgctcatagccttgaagccatttagacgttttcatatcatttttacggataacagcgcccgcttccattgaggtatgaatttcgtcacctgttcgatccaagaatccagtattaataaaagccactcggtcttttacttctttgatacacgcttttaaattaagcgtcgtgcggcgctcttcgtccattacgccaattttaatcgtatgacgctcaagccctagcatatcttcaattgaattaaataacgtattggcaaaagccacttctttggagccgtgcattttcggtttaacaatataaatagagctctttttagaattttgatacgtaccgtttttaagtaaggtgtgtttggcaattaaactagtaatcacgctgtctaaaataccttcatagatttcgttgccatttcgatctaaaacagcgctgtttgtcattaaatgcccaacgtttcgaacaaacataagcgaacggccaggcagtgaaatctttttcttgtcgggagaaacataggtacggtctgggtttaaacgccttgtcatgttttgacttccttttttaaaagtagacgtcaaatcacctttcattaatcctagccagttacggtaaacatctactttatcttctgcgtctactgcggctaccgaatcttcacagtccataatcgtcgtaagagctgcttccattaaaatatcttttacacccgcctcgtctgttttaccaatcgaatccgtacgatcaatttgaacttcaaaatgcaggccgttgtttttgaataaaagagcatcagggctttcttcttctccttgataccctacaaatttctcttcttcctgtaattcggttaaactgccatcgtttaattgggctacaagctttccattttcaaagctgtactgaaccacttccgcatgagaagactgaacgagcggaacaacttcatcaagaaaattcttcgcaaacgcaataactttttctcctcgaattggattataagaactcgtgcgcgaagctccattttcttcgctgattgcatcagtgccgtaaagagcatcatagaggcttccccaacgtgcattagcagcgttaatggcgtaccgggcgttgtttactggtacaacaagctgcggtcccgcttgataggcaatttcattatctacgccttctgtgccaataagaaagtcttctgtcttatcttctaaatagccaattctcgttaaaaacgatttgtattcgttaaagtcaccgtcaggattctcttgatgccacgtattaatttgagcttgcagctgatcacgcttttctaacaaacgtttatttacgggtgttaactcggttactaacgcttcaaaatcagaccaaaaattttctgtacttaggccgctgcccggaagagcttcctcattgataaattgatagagaactggagctactttcagatttccaacttgtttgtagtttgtcaccgtctgtttcctcctcttactcttttccatttttaaatttgggcgcgctttcatttctttttgccaaaatgattaagacgaacatatgcggtactgtttcttattacaaaacagcgttttattttgttaaaaaaatcatatcatcgagtgaatatattttcaagaattttctaaaaatattctatttttttcattttttttttgacttcagcgcagcggctcggacttggaaacagctttcctgcatttaatagatttttaggattaaatacttctcgtatattcgtttgtgcttgaatttcatcttcattgaaaacaaatcgcatttcttcttttttttcaatgcccacgccgtgttcgccggtaatcgttcctcctacttctgcacatacttgcaaacatgcgcttccggcgtctagtgctttttcagtttccccgggctttctagcatcaaataatacaagcggatgcaagttcccgtctccggcgtgaaaaatattggcaatgcgaaggccagattcttcgctaattttgttaattcgcttcagcacttgaggcagtttacttcttggaataacgccgtcttgtacgagatagtcaggggatatagctcccatcgctccaaatcctgttttacgatttgcccaccacctcgcgcgctcttcttcactttcagctactttcacttcccgtacgttttgttttttacatacgtctaaaatacgaaggatttgctcttcgataccggctgaaatgccgtctacttcaattaataaaagagcttcaatatctctagggtgtccgactggaaacgcagcagcttccactccttcaatggcggttttatccatcatttcaagcgcagcaggcacaatgccggctgatataatgtctgataccgcttggctgccgtcttctacgcggtcgaaataggcaagaaccgtttgttttgcttcggggtttttcaaaatgcgtaccgcaatttttgtaacgattcctaacgtcccttctgatcctgttaaaagccctaataaatcgtatcctggttcatctggaataccttgcttgccaagctcaatcacatttccatttggaagtaccacctctagccctaaaatatggttggtagttactccatatttaagacagtgtgcccctcctgcgttttccgctacatttccaccaatggtgcagcaatattgactcgaaggatccggtgcataataatatcctttttcagagattgaattggttaatttaagattaataaatcccggctctacaacggcacgcctgttttcatagtcgacgctaagaaggcgcttcattttcactaaactaataaccacttcattattaagaggaatcgctcctccgctcagacctgtccctgctcctcttgcgagaaaaggcaaatcatgttcattgcagtatttaataacgctagaaacttccttcgtattttgaggaaataacaccgctttaggcaaatgcctatgaatagtaaacccatcgcagtcgtacgcaagcaaatcttctttatgatgcaaaatagaatgagcatctactagttgagaaagattttttacgtgaagatcttttattctatttttcttcaacacgatgtgcttcctcctcttctttttgataggcccactccaaaagctgtaccgtgtgaacaatttgctgacttcgtccatattttttcactcctactgccatctgcagcatgcatcccgggtttcccattgaaatcatttctacgtcatgaggcacgtgttccattttacgttgaagcacagctcccgccatatcaggatttgttaaattataaattcctgcacttccacagcatcggtccgcattagccatatgaaccatttccactcccggaatagaaagcaaaatatctcttggttcttctctaactccttgaccatgagctaaatggcaagcgtcgtgatacgtaatgcgcttatgcagctttgtctgcgggggtcgatatcccgtatcgtgaaggtattttgaaatatcctggactttttcagcaaagacttcggctttttcaagccattcttgctcttcttctctaaatagttcaggatactcttttaacatgcagccgcatcctgcagcgttcacaataacggtatcggcatgctgaaacgcctctatattttttttggcaagctgtcttcccatgtctcggtctcctgcatgaacgtgcaaagcaccacagcacgtttgagatggaggaataacgacgtcgtttccatttcttcgtaatacattaagagtcgcttcattaatatcactgaacatgacgtccatgatgcagccggttaaaaaagcaacttctgcttttctttcggcttttgcttttagaacgcgtttctttttatatttttttcgaacagaacgggtaattttaggcattacatgttccatttccgctagatgtgtcggcatcatatttaacatgcctgttgtgcgcatcattttttgcattccgcttttttgatacagcttcaataagcttcctgcagcttctaagcgatgagagtgaggaaaaagttcttttagaaaaaacttgctgatcatgcctttccatcccgtcaaaggcattgcctgacgaatttggccgcgagcttcttcaatgagtccgccaacgtctacatttgcagggcaagcagttgtacaggcccggcaatccaaacaggcaaacacagggtctgtaaactgctcattcacgcttatttttccttctgctaccgatttgataaggtgtacgcgacctcttggtgaatgctgttcttgccccgttatttcataagtaggacaagactccaagcacattccgcagtgtacacaatctgcccattttttttcgtctggcgcgtctttccacaaataattgctggcgctttgacatggagcatctttgatatccgctttcgctgaattcacttagattcctcctataaatcgtttatagttaagcacgtttttagcgtccatctttgctttaattcctgctagtaacggaaaatgagaaggttcttctccccatacatttactttttggcgtagtataaaaggcaaatgtttaacgaccacatatcctccgtacgttttagcagtttcagtaaatgaagtaataacggaaagaatggcatcttctgagccttttatgtagaccgaacaaagaccgtgtccaactcctccatgtgcttttattagtattggacgggacgtttttaatgcagtacttttgtttattacatcgagcacattcatatttggtacgccaatttttagcgcggcttccgttttctcttcggaagaacagcatgcaccatttggactaatgttactaaaaaatccccaaaacacttcggcttctttttcatgtagcacttttaaaatcgtatcagacggctgaatacttttgatgtaattctcttgataatgaacggaactttccacatcttcaaagctgattacaagtgtaaacagatgctgccctattatatcttcagctagagaaggatttaataattccaaagcaatgggctctatcatggaatctaagactttgctaacaaaggcatgaatttcttcgatattgcttgttgaaaaagaaataaagacaatgctttgatacttgggcagcggacgcagctttaacgttatttcggatataacgccgagcgttcccattgaaccaataaacagcttattcatatcatagcccgccacgttcttgacgacttttccccctgaacgaacaatggttccatctgaatatacgactctcataccgattactgcatctcgagccgatccataagataagcgctttggaccactttcattcgctgcaataactccgccgattgtagcgtagtctcctagagctggatcaagtgaaacttgctgattgtgcgtttttaaatacgtttggagctctccaaacggcgtaccagcttttacagtaaccgtcatatcacctactgtatgttcaacaattccgctgtattcagtcagcgaaagcaaaaggtctgctgtatctataagcccgccaaaccctttttttgtaccgttcccttcaatgacgactttttttccgtgttccgtcgcatactttaaaacggctgctatttcttgttctgaagttggcttaacatgcagggacccgttatttccaaggaagtgattcatatgctgttcttcaagtgtggaaggatgagataaaatggattttaaatgacctggaagcttcaacgtactcaataaattgactcctctcgttttgtaatagcaaacaacgtttcactaataacataaagaagtgccatgtataatacggctaaaagtagtagattaataagaagaataattagtagaatagatgaaaagatatattttaagcgcttacaatcattaaatcacctattcttgggattttcaaccagtattttcttcttatcaacaaaaaaatgtccgttcttttgaaaaaaagtttcttttagtacttgcctatcataaaaggattagaatataatgtaagcgaattcatttttccataagtcatcagatgaccttatcatcgtagttttaatagttttgttttactaaatttatagttcactaatttgaaaatgaggtgttagttatgacatggacacggcagttcactcctgtaggaaacagcgtcatttggtcttcattaatcgctttgattcctattctttacttcttttgggctctggctattaaacgaatgaaaggttatatggctggagttacaactttactggtcgcacttgccattgcaatatttgcttataaaatgccggctagcatggcttttatgtcagccagtcaaggagccgtatacggtatactgccgattggatggattatcattacgtccgtttttctttacaaactaaccgtaaaaaccggtcagtttgatattattcgtacctctgtcgtatctattacagaagatcgcagacttcaagctttgttggttgctttttcgtttggggcttttcttgaaggggccgctggtttcggcgcacctgttgctatttcagcagctttgctggtaggtttaggatttaatccgctgtatgccgctggcttatgtttattagcaaacacagcacccgttgcttttggtgcaatcggtattcctatcacggctatggaaggtcctactggagtagcggcaatggaaatctctaaaatggtaggccgccagcttccttttatttctgtatttattccgctctatttggtttttgtaatggcaggatttaagaaaacattagaagtactccctgctattctagtatccggcatctcttttgcccttacccagtttgtcagctctaactttttaggacccgaacttcccgatattttatcggcactcgtttccctttttgcgctcgctattttcttaaaattctggaaaccgaaaacaacgtttcgctttcaatctgaaaaagcagcacatgaagtagcttccgcttcagctgagccaagagaaactcaagttcaacccgcattcacgggggctcgaattgcaaaggcgtggtcaccttttttaattttaacgatctttatttctatatggggaattcctcaaattaaaaccgctttgacaggacattatgaaggagctaacgcttttttgagcgctatcaatttcatcggacattatttaacgtttatgccagaagtaccttggttaaataatttaattttaaatggaaatggagaacctattgcggcagtgtataagctagaattactaggtgctgccggtacagctatcctgttgtctgctgttgtcacaaaatttatcgtcaacatctcttggaaagactggtttattacgtttaacgagacgtgcaaagaattagcgttgccgctgcttaccattatgtccgttgtggcatttgcttacgtgacaaatgcgtctggaatgagtacaaccttaggactactattagcaaaaacaggcgcgttatttcccttcttctctcctgtactcggctggctcggtgtttttattacaggatcagatacatcagccaacttattgttcggcaacttgcaaaaaatcacggctacgtctattggaatggatccgcttcttgcgcttgcagcaaactcttctggtggagtaaccggtaaaatgatttcaccgcagtccatcgccgttgcctgtgctgcggttggattggctggaaaagagtccgatttgcttcgtttcacggtgaagcatagcttatttttactgctgattgtctgcgtattaacatttttacaatccaatgtattatcgtggatgattccttaatcaaaaaaagcttccgtatctagaggtacccctctgaacggaagctttttttcttttatttaagatcgattaatggcatatacaacaaataaaactatgtctagcaaaatcattataacaccgacaagcagccagatgtttccttgagtctttttctctccttcttgcatttcaaacgctcgaatagcaaatacaattccaagggtaaacacaagaaaaaacagctgacggtaatcgaaaaacgacagtacaacaaaaattaaagtaaaaaacaccataatcatttctaagatccgataaggctgcttttgacatgctaataatagtttcatttcttgacctactttcagcccgtttttaatagtgttattttactattaattttaaatgagatgttggtgtttcaggcactgttcactgttttgtaacaaaaaaagcgtacgttagttaaacgcacgcttcttttttattcatttacatttggattcattggattatccatccctgttttatcttgaatttttttatagataaaataagtgtagacggcaattaaaatggagaatgcccacgtaacggcctgacggaatacaatcatgttcccgtacccttctactccgtacttttgaatcaatacgtattttacaattgctaaaaatacatagcggcctgcgaacagtactgtaagccagttcatcattttgaataaatcaggctggtggaagagttttagagagtcttctcgcttatagcccattaagtaagccgtatctacaaaaaagtacaaaccaattggcttttttatcacaatggtaaaaaggacaactacagccagtccaatcataaagtatacttgattgtttaacattgttgctgcgtttcctgaaattaaatcaataatggtacgtgccagcagcgtaatgacaataaacaatcctgttacgttaaactggcgatctttaataaatgtataaatggtatacacaaacgctggtgctgttgaaagcaaaatggcatagtaatcaccaataatgtcttttccttggttccatattaggtaaggaatagcgatataaaaaagtaaatcaaaccatactcgttttgtattgttcatatataactcctttaaaaacgttgttcctgctattatatgggatactacgcaagaaaaaaaggcttttacctggaatgttatgaaattttaatcatttaatgtttagatccagagcgacagggaaaacaatttctagaaagacttcaagaattataaacatccaaacacttgagcagcaacacatgtgccacaagtgaaaaatgctgaaaggattgattcattatcgcacttcacctaacgtacacgtcagaaatggaaaaggccatgcagctttctcacggcgtggggtatgctgaatatagccgtaaactagacaaacgtttacaggtggaaaaagaacgagaaaaggattatcaggccagcaaagatatactgcgtgatattaaccagcaccgataataaaaagccgcttgctacttttagtagcaagcggctttttatttacaaacgaaccaaaattatacataataaggaagtgcatgtattgaagaaaggaacttgcttattatgatggaaaaattactgattatttgtgtgtttgtaggcattattcacatgattgaaacactagcctactctgtgagacttgcgggcttgaaaactgggaagctagtcgtggctttatctctttttaatattattgttattgtgtcaagaacagctaatatggtgcaagccccgttgactggaaaattaggagatgcagttcagtctaaagaagatctgcccgttctgcttcatcagcttcaaaccatcttgcttgcggcttctattgggacaattgcaggcgcccttttacttcctagctttgtgtcgatcttctcccgaatgatttcgcacttagaagtatcgggttctgtacctcaaatgatgaaaagcattacttctatacatacgctggaaaaagcaaaaaaacacgtgaagcgtcctaggtggatcatgctttctcagctgcgaattggcggagttcccaagcggttgctgcttttgaatttaatggctacgaccatttatacagtaggtgttctttccactctttatgcttctacacttgagcctactctttctaaatcaattctgatgtcttccggtcttattaacggactagcgatgattacccttgctgtgtttgtagatccgcaagtagccattttaactgaaaaggtaatgaaaggtgaatctactaagcaatctatgaacaaaatggttggtacacttgtcatctctcgtttgtgcgggacagtatgtgcccagattctcttagtccccgctgctctttatattgcatggatttgcaaattaatcccttaaaaaaaagacttcgttaaagaagtctttttatacatattccacttttttgtatctacgaacagcagcgattaaaagaaaaaagctgctcattaacgtaacaactacggtataggtgacactttgtgaccagtgcaattgttcaagcaggcgagccgcgtattgtgacagcgctgcaggactccactttaattgattcgtaaacaaagtgctcaaaaatgaaagtaacgcaatgatcaaaatacttactccagcaatccctccgctttgtaaaagaaatgttcctgctgccactaaaacggacaagataaaaatcagccacaggctgtataaaagaaagctaactagtatatgagtccaatccacatgtgaaaataaaagatttgtataatgccacgctgctatatagcttataaatattgagccaatgaccagtacgatttgcgcagcccatttactcataatgtattgaatgacgctcaccggtctcatcataacaagtacagcagtatgattttgtcgttcatttgaaatcatattcatgcttgctagtacaatcagtaaggttcctattgtgctatattgtgaaaggacaccttgcattacttcttgaccggtgggcgtaggaagttgaataattgctccttttggtaaattccctgccacgttaatgatttgtggcatataatgattcgttaaaggctgtgtgatgcctagtaaaattagagagattggcagccaaattcctttgccgttcgcaaataattcatgcagttcctttttaaataagactccaaatgtgttcatttgttcatcacctctagatacacatcttcgagagaatgctgttttcgttcaaataaaacaaggtttgcttgttgatcaacaagcagttgaagcagttgctgctgctgagatgtatcttttacacctacagtggctttataaggagaatgaaacagcacctgttcacttggcagactgctaagagatgcaggaagcctttcttctgtttcaatcgtaaaagcaggagccgtaaactcttggcgcagcgaactctttgttccattccatttcatacgtccgtttttaatcataataatgttatcgcatatttgttctgcatcatgcaaaatgtgagttgaaaaaaggatggtcgtatctttttttaatgtttcgataatcattaggacatcttttcggccttcaggatccaaagccgaaaccggttcatctagaattagcagttcaggtttatgtaacaaggcttgagccaagcccaaacgttgtttcattcctccagaaaagccagcaattttctgctttccctttccttttaaacctacagtttcaagtacttcatctattcgttgggaaagcacattttttgaaatgttagataaaagacctaaaaaagttaaatactgctgaggcgtcatccaattaaaaaacgtaggatgctgtggcagaaagccaataaatgatcgtacgtcttgaagttgtttatcttcaaaagaaattttccctttattaggtgcagtaagacctgcaatcatatgcaaagtagtcgtcttacctgcaccgttagggcctaacaacgctgcacattttcctttgtcgagattaaatgaaaggttattcacaacagttatattacgatacgcttttgtcagtctttctacttgcataaacatcttagctccacctcactgttttttacgtcctaaaacaaaatataaaacggggccaactgtacttacacataaaatgatgagtccccataaccattttggcccgtttgtctcttcttgctttatgcagcttatcaatgctggaatcattaaaagcaattgtaataatagaattggagcaattaacaaccagttaatgtccttcatttacatccccctttttcttcgtgctggaagccaaataataaaaaaccaataaaacagcgttggcattggaatttgaatcagtccccatattccccaaaaccatggatgagcgccgcgtttttttgcattgataaaaagtagaaagctttgaagaaggagaaatggtgaaataaacagcacaagaatccatttttcattcattataaaaacatctccttttttcgtttatagtgaaaaacgataaaagaaataggagcaacaatgatcccaattacttcaatggcgataaataaggcaggtatttgtaaaatagcagttgccattaccgttaaaataacaagtgctgttaatgtaaataagcataactctttccggaaagcttttttctgcttttgtttttgaatgagaagctgttcttgaattgcatgaagagaaatacgttcatgacttgctaaactctctagctgctcccaatctttttttaaagaatgtaaggactgattgtcattttcttctctcattctttccactcctttctcagtatgtttactcctttatttactcttgatttgaccgttcctgctcgcatattcagcatatgggcaatctcatcgtatgtatatccgtaataatgtcgaagcaagacaggaattcgaaagcgcgaatcgagttcattaaaatcggaaaacatctcgctccattccactcctttatatttagctttccactgaagctggtgcgataaagactgctttattcgctggagactgcttttttcacgtttttgcttacgcaaataatccatgtacagtcttgaagcaatggatatcatccaagtcgaaaactttgcttcatttttgtatgaagaaagattcacgtaacacttcatcattgcttcctgacacaattcactgcataagtcctcatctaatgtcagctttaaaaggtatttatataaaaatgaatgatagcgctgaaataataatgaaaaggcatcatcatcaccttgtaatgctttttggacaaggataaaatcatcttgttccaaagcggtcacccctcctttttgtttcatcacctacctatatgacgctttagcgattgaaatcgttcattttatatataaaaaaaacgccccgcaggacgtttttatttagtacgaagcatttttaatccttcttcatcttcttctaatgaatagacttcatcgtttttagcgaataaaacaccgtggaagatttgaagatcatcatcacaggcctcgcaaaattccttttcgccttcgttccaaaagctaaagagcgctagttcatcacttcgcacgcttgcgtatttttgatgaaattcataaatcatcatcgcgtagtagcgaagcgcttcttcttttttttcaaattcaatggtttcaataatatctttttcccagccttctaaaaacagccaaggttcacaatcactttttattttatgaactctccatttatctgtcatgattgaacatctccttacttacagcttacttctaaaaattctcttttccttattattcagcaaaaataactttgaatcaagtaaaacggaaaaaaacgcctattttcaggaaatagacgccaacaaggtagcttaatctgaacttcttttttatattaataatagctccttaaactataaggaactaaactgcccgtataatactgggtaacaggagggaaaacgccggctgaaggcgtaattttcccccaccaatatggttttttgccccatcagttatccatcgctccatcaggtgacatgacaaatccaattggacgtgcaaaagaaggcataaaatacggataaaacgaatactgaaaaggcgtgtagaaagaagagtaaaacatcctttccttatccgtttccgaagccgttttggtcagaaccatcgggatcgagcgtatttgtattagaaagtcccgaatttgtatttacacaaattcctgtatttgaagaccctgaaccttgtgcagttttactgttactttttggagaaacatagtacgtgtcgccaaacgtaacgactcctcctgtaacgtttggaatcactacatgattaataacaatcggcattatcctcaccctttttattttcatcgtgatgtaatatatgaacgatttaccaaaagggttataaattaatggatgcaaataaaaaatcccccagcagaatggggtatttttacgcgtttatctcttttttagaatggcttaattcatctcttaaaatatcaaaatctctttctgctacttcttcaattttagtatacaattcatcccctgtgaggagtcctttttcttcaagtaattctacaagagccttaaactttattctagataaaagcatttcgtttaccttgctctctgttgactgttcattttttactggttcttttgttttaacaggttcttgctgcagcttcactctgaaaacaatatttgtatgatctgtaatttcaggtgactgataaaatgtactatgcgaaatattttttaacgtcagcgtttcttttgtctccatattcgttacttcaaagtatggatcttcaaaaaatgcatcatatttatcataagctgctttgcctacaaccgaaaaagaaaagtttagccttttcaactcttcacctgtattcgcatcagtaatcattttttcttcaaacatatcaacgtgaaaactcacgttattaatcattagttgtgtcaattcaatcgcctccttctttattaatacgacatggagtgacaagttccctgttttttatataaaaaaacatctcccaaaaatggggatgtttttcaaggagctagaagaattctctttttcgctctacaattcttcttctgctttgtcatatttgcgttcatgcgccgtatcttcttcgttatcacgaatggttttttgaagcacaaaagcagactgatatgactactaataaatgttgatataacagctttccgtatttaatttaagcttatcttatcattgacgtggtctttttatcaatagaattatactaaaaatctttcgacaaattccattgctatttaaaagtagcagccgttataatttaagtaaagtacttggaaattttttctttgcaaaattaaactcaaaggagtaataatcatgaataaaatccctaggcatatatcttacaatttggctggaacactcactcaactaaaccagtttgaacattataacaaactcattgaaaaaatgatcgcctcaagtaatcctgatgagtttaataaagaaggaattgatcccttacttagaacgaacgaatatcggcatgaaatagtttttcctatacttcatcgaaagtccatgtttatatctgtattctcttttatagaacgagaactattattgattgcttctttgtatgaaaaaagcttctctaaatttaatcctttggtaaaaactaaaaatttaggaattgataaagctaaaactttttttaaagaaaatatacacataagcattaacaagttagatgattggaataaattaaaagactatcaaagcgttagaaatttcttcgttcacaatccttatgaagcaattcgcgccgatcataaatcatttgctgccttccaaagacttaattctattaatctaacaaaatatgatttagatgataatacttcctcgtacagcattgagattacttcacaactctgccttgatttattagacttagcccactctttctttaatgatttttataggttgcttgagaagccaaaataaagcctttatttaaaagggctttattttttattgtttaatttaccaatctcaataattccttcaaggattaaagcatctatgtataaactcacacattttttcttaagtgaaataagctcttcatcactcagtttaatttttgatggtgcggttgacaatgtaatctgatattctttcttcttctccatttaattttcctttttggctttcccagatcttctgtttatataattcctcatcatatcctcacttttaccttcttgttttaactttctttcttcttttactgcgttctctgcataattcatcatcattatttcagcaatatttaaaaattcctcatatttcgcttctctgtatttttcatctaacgtttcgttaattattattcttgctgattttaaacgattagtttttcccattattatcttcgactttctcctcttcatctggttttctatttatgtaatccatcatcattatttcaataatttcaagtatttctcttctctttccttcggttggttctaatacagttatctttcccattttcaatttattagtttttcccacgatgtacttacctcctgttgttgaattcaagtatcaagaataaatggcacctaagtgtttgtcaaatgatggattttttaacatttataattaatttacttttatttaacgccataataggctttcaaagcatttataatctctttttaataactttatctttcaaaactggttgaaattacatgaaaatagagtgttttttgtggaaaatggctatataaatgtagttttataattaatttacttttaattgaaaaagaacagcccaatttgagctgcactagaagtagctttttataaaatcttgtatgtcctttgcctgatatacacctaaattacctgtatcaatgttgtatcgtgtctcagaaagaattagaataaaaggaaattgttcagtaaaccttttccactccttactgtcataataagcctgataacggtctatctttgcttgcattacttttaaagtgtatctgtttctctgtaattcaatgaacataggcgcaccattccatacagcatagatgtctggttctattgttcctttagcacctaatttcatttccacttcaaatatcgatggtttagtgaattgagataaatcaagataagtttgtgtgatagctttgaaatgagggattttagtactgttaagcttcatgttagtttcattatggaaataattataagggcgagtaatacgttctactttgactaatcctttagaggttaacctgttcataatacgattacatgttgtaataggttgtttctgttcttgaaaatgtagttgaattaattgatctctatccagtacatagaacttcttaagattctctaatatctcctgatctctcttgttcatttgcgtattcctccaatagtcggtaactgagcaatatcaggtgctattaaattctctaaaggttctactgctacctcaatatcattattttcgtctggtaatagttctatcttataaggttcaagtaacttcttggcttcttttttatcgagaaaaggaacttgaatgaatttttcttctccatttatagataaagccattcttcctgcgatagtaatatccttactacttttaagcccagctattttagcatttacttcatttgattgtttacctgaaatgcgaccattcatattatttagcaattgaccacctagctctttagctgctgaacgctgcatagcaagaattaaatgaattgaagcactacgacctagacaagatatgttggttaatatcttcatgattttatcattgtctgttagtaaaaatacctcatcgatgactatcattataattggcaatttctcttctaactctgacacatgttctacatcatattgatcaagaagcttacttctgcgtttcatttctgtttctatagcacgcaattcagctaataaaggtttctgttccatatggatgcatttaacatgaggaatatttctgaatatcccaaactcactattttttaaatcagacattataaattggatttcgtcaggtgttttattaaaaatcaatgaacaaatcattgaacgaaaaagactacttttacccgcaccagtactacctgtaagtatgatatgatgcaattcttttaagtccaacacgtttaagaaattctgattatcataccctgtaacaattggaactaaagctttctccatacaaggctcaatctttttgaaatcataattaaccttagttggcattccttttgaatacacagataaaataaatctcttgtatttacctgacagctctatattttctccaaatgtctgtttaaacagccatatattattaaggactaactctggattcatgccgtttttcaatgtaaaaacaaatctataatttttcttctttaagtctatatcgatattatgaattgttggataatattcgtttcgatgagagccatgtttgacagttttaactatccctccgtctttgaaacatttcataagtttacctctccacttcattttgtgccatttagtttgtagccactccattacatccaccccactaatggtaaatgagttaaaacgtaaataagactacctatcgttaaaagaggaaacaaaatatgaacgacactttgaattaccatagcaatatcgacattaccttgacgaattaagaacttttcagttagagctagacctagaatactcccaccaatgatacaaactgtaggatcgaagagtacaactgggttaatgtacaaggagtaagctctcgtaggcttcttttctcgtacagccttctgataacttctatctatgaaatcggaaaagctgatagtgtgtacacatttcataagttcatacctccatcaaaatcttttaaattatttttgattctcatgtataaattttttagatatgtgcattggtcgctttcattcgcttcgctccctcactcctaacaaatcctgtaaaacttgataaatcaacataaaaataagcgactgatatattagtgctgatatagtagatggtatggtaggtggtatagtaaaccttttaatataatgtattagatagactcgtctgacttaacttgtctttcaaaatattattgaattttttttcaaaaatgatggcaaaggtattttgttaaatttgaagaatagttgtactaggtgataaaaaatgaagagcaaaattggtgaaattatagacaagcgaggatacaaaaagaaatatgtagctgaaaaaatggacattactcaaagtcagttaagtaattggataagtggaagagcctatccaccaatggataaagcatttaagttagctaaggttttagatgttaaagtggatgatttatatgaggaaattgagaagtaaaaataatcaataaaaataattctaaaatctgtaaattcaatataggataatatgagtaaatttaaaggagcgattcttatgtttgacttatactatattgttttgtttacagaagaggatggcttagtaggtactcattccatttttataaatgaagatgacgacttagaaaaagaattactaaaaaacattaatacctatagaaaatcgtttcgatctacaaaagaaaagctatttatgttcaacaaaaaaagagaacaagtcacagatgtcacagataaatttaaacacctttttgaaggaaatgaaaaggataaccaaataaaaaagtggatagaagacactcttgataaactatggagagttggtcaggtgaaaatcgaaaatggatactttcaaagtgcgtttattcaacacgtgcataaggttgatgacaagcttgaacagtattcatatgagttgcacgaagactatacagtcttcacttataaacataagagtattattatgttgggcgatgaagaatatgaacctaatgaagagaacacctatgaaactagataattttattagagagggatttatactccctctctttttaaaccatatatcaaaacaacatgctccacgtaacttttccaacaattccatctaccgctaaacctttacgcttttgatactcttttactttctgttctgttactttgccgaaaatcccatctggattagttcctactgcacgttggattctttctacatcaattcctttagcacctaacttaataatcttattaggatatggaacaattggtctgtcttcatagctttcttcaggtactttacttacattttgtgcaggtgtaacttctacttttggagaagctggtgggcgtttacctgcttgaagttgtttaagagttaaaccgaatgtcatttgtaagtggggtgggtcgtaaaaagaccaccgtaagccagcctcaaagcccattccttctgcgatttctacaacacgtttccaatctttatttacagtccaacaaggttgtttcttatcattgaaaatacaaaaatccactgctaaaccatagttatgtattgactgtccacccttggcattggtaactttagttcccttaactgtacgtccgatagcataaagcttattttgttcagcaattgaacggtaaccttggacaatagcaattccaatcccctcatcatacatcttcttaattagttcttttgctttctctacaacagtgggatgtacaccaactaactccttttcgctacgattcattaaatactgaaaatctaccattttaaagcatctccatttcattatttttatttttcaattcgctctcgaatatctttgatttcttcctgcatacctgatacgctctgttcaatttgtttcaaagtatctgtagtacgttctacatgattcataagcctttcttcacgatcttttgaatctttcatagtcttaaaaaatagccaaataaagagcgcagcatagcccccttgtttgatcaacatatctaggattgtttgatccattattatcaccacctcaatttagacataaaaataacgctcaaggcgttttctgttttattgcatatattagcctaatgcagtatcttcacgttttaacacaggcatttctaattgatccatgagtccctcaaagataatacgatatccttcatcatttggatgcaaagcatctttagttaaagaaacgatggaaactgttggattgatttgtaagtaacggattaaaggcttgtagttagacgcaaagtaaacaccgtctactcttgctaagtctctgaaagctgtatccatatcaatcagtttaaaataagtagaagctgcatcgttttcagttcgtacaggttgagaagatgaaataataatctctttccctagcccttttacatattcaatgaaatagcgatgaagttcttttaatccttcaattggcattgtacttcggtcattaacacccatttgtgaccaaacaattgtgtcgtctgcttcaattaaactactcatattagataatagccatgacatatatgtaccactaacagcccagttctttacaatagcctttttagggaatacaacagattcaataatcattcgtcctgttgtggcatcaagtccattttgaataggtgtgataactacttcatgataccctgttcctagtcctgttttagtatatagattactataggtagtcgttgggtctgtagcagtgatagtgtctacttgtgctcccttatcaaatgataaagccatattataaacacttgatccttttgtgtagtacatactaaaagaatcaccataaaacggaatagtgattttagtattcattccaaataaacgtctcatcattcccaaacgtgtacttgttgaagtagaaaaacgagaagagcctgaaacttctacaccttcaccttcaattttaaagaaacggttatcaattcccacttcattagctgatttgttgtaggttgtttcaatgtactttttaagttgattcacccaacaaaaccctgcttcatttgctttgtaactagtagcgccaatttgttcaccacttggactataacctgtcccaccattaccagctactgaagaagagccaagaattttaatctttactggtttagatggatgttctagttcatcacgtaaaaattgtgcaaacgtctttcttgttcctgcttttactttatctatcaataccgaacttaaattcttttcttctataacacttaatcctaaattttcattctgaactaacgcaccaaatgcagaatatgcagttttcttagttccttcttctatttgataagtaggtacatttgtttttaaaacagatactcttgtgtatgcagcatttgcaggtgacacacctacataatccacgtttgaaggattaaatcctgaaataaacgttttacttgaatcataccaagcagattgatatgccgttgtaaaggaataagatgtactagcttttacaggtatccaatcactagctacatatgcctgcgatggactatcaaccattaatccagaagtccaactaatatatttatttgtgtacgttgcatttttatcaaataagtttttacttttcataccagacacagcagggaaagaaagttttgcaggtgttacggttccatctgctggaacagcattgataggtgtattccctgccatcatttgttttacttcttctgatagatgaatttgtttgattttatcaacatcgtttgttgtttttaatcttgaagctgaaatttctttttttgcatcatcatctagacgagcttttaaagaactatgtacaacaccgtttacgtccattcttgcatcgtttgcttgtacttctttactagatgcatttacaacgacattttctatacgcttatcaacttctttaatatcactttcgatatcaagtaggttttgattgtctgttaaacgtgcatctcttgataatgagtttgttttttgtttgtaaggatatttcattcgcttacctcactttctgtagtttcagggatgtctgctgtgtctgtttcggtatcttgtactggcaattccaatagcaccaagtcaggcttaaagccgttcaatacaattttgaaactctccataccattgtctattatgtgttgtgctgttttctcatccttaataaaaaagaagtctgctggttcagtacgaacaacaaactcccctatttcacatgatgttgttttcccattttcatctactgttatgaatatttggtattgtttatccataagtatctccttactgctgtagccaacagcgaattttacgaacattaactgctttacctgctgtgttacttttaattcgaacgtatactgaacgaagtccacctgtaggagtgcctaagtcaacaacaaaatctttaccaaacgtggcatagtcattattaattccatgacttgtatcaaaagttatatagtttgttccactcgttgcacctgatccatctatatatagtgttccagtgtttgcagtttcaacatagaaagctaaattcatatatagataacgtgctgagtgtctgaatgagaaatatcctgcatcacctttatctgtgctagtagttgttctccaacgtcctacttctgttactccacctgataaatggaaaggtgtggcttcgtcaacactaaaatcaaagtttgcataaccattattaattaattcaaatccgtctggacgtttgattgtaattgcacctttcgatacatatagaccgtcagagtttaatcgtacaaatttattagcatcattggcatctattgcaatcaaataatttccatcccaataaaaaagattatcgtttccgacaatctggatgttagtagttttaacctgtcctgcaactaataactgcgtattgattccattaggtgtaattgcattatcataggtaactccgccattagttgtaattcctattcctgctgatgtgaatttggtgtatcggttatagtcatttgggtcacgcccaataattcctccacctacaggatattcaagctctgtaatagaattgttgattaagtccgttgcttgctttgtagcttcaggtaaaatatcacttttaatacgacctttattagaatcaaaaatagtatcaagttgtgattttgttgcattaaaagaagcttcaccaaacgtttcacgactattacctaacacaactgtcggtgatttatcttgttcagggtattcatctatttccataatacgaatgtcaggaacagttagatttagaggttcacaaatgaaaggcatactgtctcctatttgtggaattgggacattgtaacctgcctttttcaaatcgttaaatgaggcttcataactaatctcaattttggagtttaactgctctcttatgtaagatgtgagatagtcgctatttgtaaatcgttcatcataaattggtgcttgatgtctaataccgtatttatcagctagaggggaagtgtattcagcaactgcataatatttttcattgtccttacgtaagcgatatggcttaaatgtttttaacacatctgtatcagaacgtcttacccaacctcttgattttcctttaccagttgaagggacgttcttttcatcgtcacccataaaggtagcaacaatttcatggtctttttcttctgcatccataaataaatcaacactttgtaaacttgctgttttaccccaacaactcaatgtagctgttgtatctgtcccatctaatttaaattcccatacaccaccatcaggactttgtagatagtaaaatttaattccagttccagtccaacgcattttaaaagtacgtcctacttcatccgtataccaccaaggatcggtaatatcagcccaaccagttgaacgttcttgaaagttgattgaatcacctgtgagtatgttttggtcttcatactctttaccgaatcctctaacatatgtgcttaaattacgacttgaaccctttttcataatatcgctgatgttgtgtttatatctaagtggataagctagttgtgagccaattcggtcataaatccgaatatctttacctaccacagtaaattcaaatttaaatgtatctattaatttattaaataaagctaatggattatctccaccaaagttttcaatttcttttgtatcgaatgagctaataattgaaaatgtataacctacatttggagtgataaatgacatgtattcatttagcgaccttttagaagtaggtaatgtagtataaacaaattggtcacgcataactgtaaaaaattcatgttccgttgtaatgattacctctccgtcatcaccaaaaggctgactatctatatctttaattctgtatgtaacaccaccgtattcaatccagccttcttcttcaatcaattcaaatgcaggcttattaattttattacgccatgttgtgaatgtgatgtatggtaagtcattaactttaaactttcgagttaagtctgcatattgagcaagacgttcctttttcgttttcaatacattgctgattaacatgttccaccgtcctctctataggtaataaaatcgattgataaatttaacccttgatatcccactgttacgtgatatagtgttataaccattatttaaagtgataagtccaaagttagtctttaagctaactgaagctccgcctgttaaagtctgaacaccgtccaattgaaataattgacctgctgtagtagcacctgtataactccatgtttcacttgtagtattgttagtcaagctcattgtaatgttgctagatgtttgagcagcagttacttcaattgtcaaaggaagttctcgtggatcaatttttatatcaccagcattgtaaacttgaaaactagcagcagtactgtcataaattaagtcttctgtaattaacccctgaccatattgccaagcatcaaaatctccatttgcaatgtcttgagttgttccaatactttcgctatagggtgaatcagagaaaaattcaatatcgaattgaaccttacgtccctttgtttgttcaatatcataattactattaacttttaccttccacctcttacctgcttctctactgtctactaaatacagatagtccaatccattgaacaatctgaagagttgatttcgtataagtagaaaatcatacttatcttcaccagaaacaagaaaggacacactcaaagtgcgcccttctagtaatgttcctactgtaagtgaaccatgccttgaatccacttttgttctttcatgaactggtgctggagaagagatagtaagattcaaagtcgttatgtttaaagattccaagtcaatcttagtgaaatccttagtgtaaaaatccactctcacttataacccttctttccgtatatatctttcacatcttttgtcattgcatttttcacacttgcttcaacaactttagctaactgtttcaaatcctctttggatgtactaccgtgatactctaacgggacagttacattgatgattgtattgccttgcttacttccattagactgtaaactgctactattatttgaaataggtgatttaggtgattgtgcgtttaatgatgaacccattccaattgcatccatagcttggaaaatcaatgatttagcacgatttctatactttggttcagttggaatgatgaattctttatatccattctcagcaagggtagcgatttgtggattttctgctactccaccactgaagaattgaccgccaaatctcctaatattagcagtaacctttctaacgtagtcattagtctctttaagtttgtaagctctaccatttaacacgttccctggtcccgcattataaccacgtaaagccttatcaagatttccattaaacattttgagcattgacttgatgtacttagtaccaccatcaatgttttgctcaggattacgaggatttttaacgcccatagaacgggcagtagcaggcatcaattgcattaaaccagttgcacctacaggacttcgagcgtttggattccattgtgattcctgttgaatgataccagcgattaaagcaggactaacgctatatttagcagctttggatttgataatgcctttatattgaccgttccaagaaccgcctgtaacacctgcaccaccactaccagcagccatttcttttaataccttaaatgggtctatatacctagaaccttcctgaatcttcaaatccaaatgtgccccacttgatcttcctgtgcttcccacatgcccaatcaattgtcccattgaaactttctgtcctgttttaacaggtggtaaatccctcatgtgaatgtaactgtatgtacgattaccagtcttgatacgcacaccatttccagcagtagggttattggctaatacctgagaaacgataccatcagttaatgatttgataggtttacccattgctccacctgatgttttaccagccaagtcaatacctttatgtccaccactatgccatccatcattcaatcccttgttagggctaaatggtgtactaacacggaagttatctaaatagtattgagcaacagaactacttccaccgccaccgaagtcaggcatcatttcattcattttgttagcgatatgatccataagcttatctttggctttaccaattaaggctttaccaatcttaccgaacgcacctgctactttaggtaatgtaggagtgaagttttcaaatgccatttttgctaatttagttgggttactcgcatattcccaaatatctgatactttaccaaccatagcttttgcacctgatacagccttatctttcactgcaacagcagtatcaactactttatcttttgctttacttgctcccttaacaactttcttacctgctgatttaaagaaatcaccaagagtactgttaccactgtcatatttagtagcagtcttcatgatttgttcagtgttctcaccactccatacccttgtaccctttttcatccaaactagggtatcagttgcaggagacatgtagtaactgccatcagggtcttgcatgagttcttctttcttaccatctccaactacagcgaatccgtcttctggatgtccttctgtaccatttttgtatttaggtggagtccaagttttaagttgacttttcttatctactccgattttatctagcacccagtttacaccgtttatcgcaccgtttacccctgtagcaagtaatccgaccatgtgattagctagttttttgattccgtcactggctttgtctttcattttagctataccgtcaccgagtctttgaggaagatttcgggctgcttctactgtgtcatcaaagaattttttaccttttgtgtagaatgatttaaagaaacctgtgctatcatttacgaaatttttcataccaccaagagttttagtccatccaccttttaaagtgctaccaaacgctttaacgaatccgacaataccttttccaattcgtccaataaaagataaattaattaatccccatgctgcctcaatcccaccgaaaaatatgtccttgactccctgccaaagtttagacatgtcacctgtaaagacaccactaaatacccgaattaagccttttatgacgcgaaggctgccgtctatgacatttctaatgctgccccaaacggatttgatgactgcaagtacagcaggcatgataaactccacaattttcttgataatcgtgaatgcattttgtactgcttgaacaaattgagcaccgtctgtatcccaaaatttcttgatttcctttattttttctcccacatacgaagatactgcttgaatcgctggctgtacaaaagttttcaatttttggaatcctgcaattacatcatctttaaaattactaatcaaaacttgagatactttgatagagttacgccatattagaaacttattaacgatatcaagaatccagtgaacagcaggcgcagcaactacagctatcaacttaattgcatcaccgataatgcccatagtgttcttaaagatactacctaacaatggtgcatttacttttgtgtattctaagaatgctttgaatccgttgttctcgcctaatttagcagaccaatcagcaaatgctttggacatactgactaatccattttcagtagatttcattagaggagtgaatgcttggaagaagctgaagatacctttagttaaataacctgccattgtgacaagactcttaatggagtttgcagaagttgtctcaatccatttgaaaattgaatcaaactgacctgtgtttaattgttgattgaacgtatcgattaagccttgaacagcaggaattgttgctctaatgatcggtttgactttatcaagtaaattgattgcaatttgtaatcctgtagtcattccttttgcaataggcttttcaaattccttagctaactccatatacttgccttttagcttgtttagggattcagcagcctttagaattattggactctgctcacgatataattgtgctaaacgtaattcagcagcagtttttgcttttgctcctgcaccatcatcattcataatgtcgttgtactctttaattttactagcagtgtcgccaatttctttacctacgggaatagcagccatagctaatgcagcaagtccaccagaagctgataaagcactagcaccaattgcaccaacaagaccagctacaggagttgcagcagcaccaatacctgcaatggctgctgtgtatttagctgacttagcagtcatactcaccatagaagaagtagtatctgtgattgcactgcccattctccctaaactccttgtaaatctacctagagaagagtcacttctatctaattctgattgccaacgtctcattctatctgataatgattctgtcgcacgtcctgcattacccatactgttagacatatcatttgtattttgtgatatgcttcttgttctgtttgaaaattgttctaacccccttgttgcattagccaaagctcgcataagggggttagcattaccgtcaatatttacctgaagtctatttaaaccatctgccattgtgtcacctctttttatagtcctttgatttggtcaagagttatctcttccgtatcatctagagcagacttaggtttactgtcttcctcaccttgattattcattttcaggtgtgaagcccaaagagcatctatttttcgttgagttgaacgccaaaacttctcatcactcatacgtaaaggcacagtcgcaatgtagtaataatcctcaattggatattcctcttcctgcgactgtgctgttagtttttttcgtcttcctcaacttgagcagtttgttgttcttgatctaatgcagcttgtttagcatcttcaggaatgaagtcttgtaaacctttcattactttatcaattaaatcttcgaacaattcacgctcattcatcatagctatacccattaaacgtccgacagtatctacgtctaactcgaattttttcttcttagctaatgctcctgctttcattgaagcgtatactaatactttctgtgcttctaagtcaccttcatccattccaacgaatgcaatgaaagggtctttataagtctcttgtactgcacataaagcgttataatcaaatgtaatgtaacgtttcttatcaaaagtaacctcgtaaatttctgcatctttcatgtatttagctaatcccatattaaattccacctttagttttttagtttagttttttcataaaaaaagagagtaccgtttagatactccccatcaatcattattctgttggttctatttcctcttcttctactgtcggctcttcactagtacttgataccccaccaagatcagccgacatcatcatgacttggggttgttcagggtgtagctggtgttggagctgtgcctgctactgtttcgaagaatgcatcaattttctcaggagtcatacctgtgtcagtagaatcagcacgttttctccatacattatctgtaacacgagcaatgaaacgaccagataattcttgagtaattacttctacaccgttttcttcagttttaaattcctctgaaattggctcgaaataaccttttgttaaccaaaccatacgcttacctgttttaccaataccgccttcaaaaccgaaagctacccaactttgctcatcatcagtagagtcaacagttaaaccttgctcatctacagatttattgaataagtaacgatagtcttcaagtaacatctctttgattacaagcgttactgtacactcttcaaatttagtgtatttgtcatttacagagttatctgcatagaaaaactctgttgtttcttttacttccatgtttgcacttactgcaccacttaacttcttgatttcaccatatcctacagtgccatcatctttaagtaattttgatacatgcacgttactaagttttgctaatgccattattaatttccttctttcggtttagtttgtttataaagacacatagaatctgaatcgaataattccatgacgaaaatcatcaggatcatcgattacatccatgaattctttcttgagtaggtacaacaaaaaaccactatctaaagacagtgggttgcttaatgcttccatcattaaattgaaaatctcatacacttctgactttcctttatggtctgaccatacgtgaagcgtaaaagttacttgttcgccatcatgtaactgttcaaatccccaatcaataactgtaggattaccaatagctacataaggtgtttcaattgcatttgttttgtcttcattgagcacaggaacatagtcaaatacccctgtaattttatccattaagggttgatgattagttaatgcagtaattatgtacttttgaacagcaccaagtgacgttttcatcatgggttactattcgctatccgtctcatatctgcttcaaactcattcttttcttcttctgctgctggaaataggaagggttgtgcctgttgatagcgtgttccatattctacgtgttcaacatagtccacatcttctttatcaacgtacactgaagcgctttttctatcgggggatatatcaaccttaatgtttcgttttaaatgacctgtttcaactggtgctctttgttttgcgttggcttgaatcctatatgcagtttcagctactttgtctgctacaccttcttctacatcttgaccatattgttcaagttgattgataagatgttcaattccatcaagatttatgttcatttgatatcactaccttcacacattaaaacaaggatttcacctagtccaccttgatcaattggagctttaattttcaagattttattaccatagcgaacccttagtgttgaattaatctcttcatcaaattccataaacactttataagtgattttagattggtattgttgtgcctgaatgtaagaatcacccgttaaaggttgtacttgtgcgtatgcttctttgaagtcaacccacgttaccttgtatccacccattccatcagatactctagtctctttttcaaacatgattaagtgttcaaattcattcatactttaatcctgttataaggttctaatagtttcataattgattgtggaaaatcggtatcgtatgaataggctacttctccaaatgtacgactagatacacctgctttatttaggttatattcaatcattttggcaacagcaatttttgctccacctcgtaatttcacttcaccattagcatctagaaaactattgttgcaatgatcctgaacaaattcagtaaatagctcaagagcagtatagatgtaggtatcgtgcttatcggacgtttgaccaagaatatcttttacttcttgtaatgtcatcatttacatcactctttttcagaagcttttttagctttagtttttggagctttcttaggctcaactttcttttcttcttgctttttctcatgataacgtctgagcatcatatagaatcacttccttactaagaaagggagcatatagcccccttcattttgattaagcttgtactttgatttcaactacaccagaatcattgtaaaggttaacagtgtagtagtggtttcctgctaatacaacagtacgttttaagatatcagcgtctttttgaatctctacgccacgtttcataacgatttcaacagcaccttgtttttgtaggtaagaagtaccttcaggaaggcgtttagttttaacaatagtagaaacaccaacaagttcagatacttgacctttagttaatgctgtttgaccaacttgaccgttgttagttagtaatgatttaacaagtttagtgtaatctttgttattgataaataagatgtagttgccttcatcttcatcattgaatacatctactgcatcgataattgagttagcagaagtagctgtaccattgaattttaatagagttgtacctaatgctgctaaataatcgatttcaattttatctgcaatagctaatttgatttggttttccatttgaccaactgtaccacttacgtttgttaaaactgctttttctgatacttcagttgaaatacctgcttctttaacagttacttgagtagtagtcatgctcattttctttggttccattggtacgccttctgttaaatcttcggctgcgccaatgtaagcgtacttaggacgagtaattgtatctcctgctgtccctactaatgtagaatcgactgtcgcataaggtgcgaaacgaattgcttgtggtaattgtgctgaaattgcgtctgccataacctctggattgattaaatctaatgcttttgtagttgccataataattttcctcttttcgatagttttagtttagttttttaattggtttactttgctaatttgttgtacaactctggattttcagttgctaacttgttacgttcttcataactcaatgttaagaacttttcttttgtcatgccttttgatgcatcaccacctgaagggggagtatatgaaccttttagtctttcttctacttgtgctgttacatatgcttgcattgcttcttcgaatgcagttaaattagatactgttgagtcttcatcttgaccaataaagaattcaagaatgttagttggtaacttcttctcagtcgcaacggttaaagccttattttttagtgtttctcgtgtttttgcgttctccaattcagcaaattgagcttttaacttttcaatttctagttgctcaggagttttgtcaggattacgctttttcaattcttctgcaatgatcgattctaaattgtttgttttccaagtctctaaacctttagagaaatgcttatcacgttgagaatcaaaccatttcttaccttcttcgtgctctagagcgaacttttgtaaatcttcaacacttggttgcgattgatagccctgtaaaaatacctttacgtcctcttgccctttgttttcgtcaataaaacttttgatttcttctaagttcattacaattaacctccatatgccctcaaaacgttattcacccaatgagtgcaagataatttattaattaatttacttataacctttttctttcgcccattcgttgtattgcttgtatgggattaactcttttgtttcattatcctttttaaactttggtttccatccatcaatgtaagggacaatatcagacctacacccaatatgtgtatcttcaggtatgcgtggatgcttaccaaattcataaaccttgccatcatgtgctcgacagtattttgaagtcttactatctaaagttgcgtcaaacatgaccttcttaactacaccagacttttcataaacttggtcttgtgcttgtcgggaaactcgtgtaacttcattattaataagtcgttgagactcataagcagatgttccaaaaatgtctttcacttgtttggctaatttgcgtggatcagtaccttttaacatggcttcttcaaaactatatctaatttgcttgactagtttctctttgttgttccatatacggtctgaatacattttctcttcaataggagtgttcactattgctttaatctcattggctttcaatggattcacgtttaatacttttgctacacctgcttcaatgataaaagcagtttgataaaaggattcagtcgtagtttcattaagaatcttacttgttacctctaaatccttcttaccgattattttagcttgtttattcagaacggtgtttagcttgttcactaacttatggcgttcttttctaggaacatctatctttccatctgatacgaaactgattaataagttattgatttcctttatgatttcagtcatggcagccttaaacactttgagtagttcaggagtacttttttcgattatcttatcaagaaattcacgtattacttgaaggtagttattcaactacttcttcctcttgttcatcttctggaatagcatctaaatcaacttgtttatccattgcatcgttacgttctgcaagatacttcttatattcaagtgcaggattctcaacgaatgggaataagctgtacaatgtttccagtgagacaacatcttttagtttggaagcaacatctgctaagttcaacaagtctgttggtacattcatcgtgaattttgttcggattaatctatactcgtaaactagattttctttcacctttaaaatgtagaaatactcattcaagcgttcttttaagttctgttcaagcattgtatggattgttgaacatttaccttccaacgttagtaatcgtccacgtaatgctgcaccacttgtattactttgaagtttctcgtttgtgtcgatatgacctgataaacgatagatattttccttgatttcagctaatgtgctgtttgcgaatgcatcaggtagatttttgattagataatcaatctcagcaccagtttgtaactgaataacacccttttcaatgactgctttgatatcctcatcatcttcaaacttagtaccgatgactttaaggaatgccatacggaaatcagctaattcattaaccatattggatagagttgtattataagcgtccattgaaggcttaatgtcatctaacatactcttacgttcaagattagttcctactatagaaacaggaacgttagggaatggatgtggactttcaccttttaacaccaatgcttcatcttcaatcgcataatgctgtactttcagtggtaaatacacatctaccatttcaggagcatcagcagataaatcattttccttataaaagtgcatagctaactgaactgttctatctgcatcgttaccttccaatacaaaacagtttaatggagttaatacagttgctttgaactcaacatcttttagatatcgtaattcatatgcataaccaaatattccagcattgagcattaatcgataattatgtaccttttcccatgtggagaaatcaagatcaatacgttctgtaacagctttattaccttgcttttcaatatagttgactggattactaagtgaataagatagttcattacgtaggaacattctaaaccagttcacagtcattttaatgtttgaccgattctctgaaaactcatagtcagtcaaaatgtcatgcttaccatcgtagtaattttgatacacttgcttttctgcttgctgtactctgaatcgttctaagcacaattgcaataattctggtgtaatttccattcgtacactcctttctataaacctaaagaagccctattgaatatcttaatgggcttgatgacttggattaattcaattctatttgcaaactctgctaatacatcgggagcatcatcatgtagtgaaaacttttgtcctgcgaagtccataacttgtgctaagaactcaggttgagtccgtttttcacagaatatgattcttccattgtttacatcagatacaattgtagaaatcttttcatctttgttctttcgttgcatttcattgataaattcgatgtttcttgatgccaattctttgtctttttcaactttttgcttaatatcgtcacagtcgagtccgttataggtgtttttctcgatgaatacatgagtaatatccttaaattccttcagtaattcaattacatggttgatatactcactaaattcatcaaatttcttcaattcagctctacgaatatacttaaaatcgttctctgagactgaaccaacaacaaatccgaatgaatctgatcgttttgaatccttatttttaacacctgccgtatcaattgtaagcatagtcttcttaaacacgttatcttctatttgttcttgaggtttagtgatattagacttaaaccatttgtctccaatattctctacatcacacattaactcttgcataaagactaatcgtttattgaagtagtcctttgctaattcccaacaattgtactttctccaaatcgtttcaaacttcatttcatctatatttttagcatagaactctttagcatcctctaatggaaactcacgtttatcatcaaaatagatacgtttgaactcttgccacaattcgttattctcaaagtaatcgtcaacatcaaacggaataactggtctatggaatgttctatagtcagggctattctttattctgtcgatgaaatcacctttagctaatggagtgcctagaatgatgaatttacttgcggatttaaccactttaccatcacgaataacttctttttctcctacttcttccacttcttttaaccaacgcatgtatttcttttctttactctcatctgtgagaatatcagcttctgaaatgtaatcatcggctaatatagttgtcggtcttgatctacccttagatgaggtataggaaacaccacgaactgaagtttgagaagagaaggcttgaatcttagtatcgttatctaattcaagttctaatttatttactgtacgtttctttggagcgactaattcaccaaacgtgtgcttaatatatggagtctgtaatgctatcttagtctgttcaacgaagttagttgcatctaattcacgattagccaatacaagtgtgaaaattgatttcctataacagtgaatccaacaacttaatgccatatcaataatagaagtcttagctgaaccacgaggaagaataaactgttgcttattgtgcgtattattaacatacatatcctctaatactttccatacttgataatgaacatctgctaatggttctgctgtattcgtaggtttaggaacgaagaagtcttgaaggaaatgtaagcagaaatattcaaaactacgtgaccctaaagaatatgcgagtccattattaacgaatagattaccattatgtttagccattaatttaccgacttgttgaagtgcgatagttttatcaataccttgtgataggaaatttttgtatagatactttcgtaataagtcacgattctctttagtatcgatagttccagcattatccacttatattccccccttttcggaaagtgataaatttgttatataattttgtgatagcccccatgaaatttttttcaatttcgaatttagaagtacccccaccttgaatttttcaattttattttttcattcgactcgaaatattttttgtatactcttgcataaagaatcgttattttcaaatggaatacacattccataagcaaattggttccgagaacatatcttatgtaaactataaataattcccattcgttttcaatccttgatatatcaacgtttatctgtaaagtatctacacttgatagtaaaatacactactttaaataaaatgaacactttatacatttcaccttacaaacgttgatattaaagccttccttaatgcataaacacatttgttcttttgttattccatttcttacttaatcaatcattcgttaacaatcattgcataaaagaatgtataaactattcctgtttatcttcttcattcattgttaataagaactcttgttgttccatatctaacacatcaccatcaatcttattactctttgtatcagtgttaactgtaacctcagtcttatctactggcttacctagtgcacggtctatgaagtactctagtgccttaccacgtgcgttgtcattacgtgaggtggtggctaatccccaataggtgtggactgcatcatgtaatttagaggtgatcaacatttcaccaaagtctttaaattcttgtacacgcctgtctacctcggcattaaaataatccttcttcaaccaattgtatagggtcgctctcgatacaccacattctaatgcaatttccttacgttctatgccaccttgagctaataattgacatgctaataattgttgttgtgtaagcttttcatttatcataattaccctttcacctacctttaaagttagacataatatatcttttttatttactccctttttcataaaccaatttatcaatagtttagattttttggataaataaccatcttttacaacaaattattttctatttttgttataatattactattattaagactgagggggctatttgaatgacttacgaagaagctgaagagttgtcacgtgaatggaaggaaaaagggaaccctccctgtgatcattcaaacattgatagagaatatatgtatggtgctcacagtgactatgtgtgcactacttgtggcgcaagaagatttaataaagctgatttttataagtaatagaggctggtatataccagctttttttatttatttttcagcacatatttcaggcaaaataaaaagccactctaatttttagagcgacttaacgttaagtattaaaatgttggatgagtaaactcattttaaaaaacaacgactttaattgtcttttactttctgagtaagcatgttttgaatgcgtaaaagcaatccaattattgccccagcaaatatagttaaagcaatatatggagtccaatctccattaaataaggcttccattactacgaatattactacacaaactattacacttgctagaatgtacaataggttcttcattaaaccactcctatataacaataaaattctaatgagctacaacaatagtcatagctcattgactaactaattaatagtaaaataaaatcattggaggtgtcatctcttttttagaaagatttcctcccacactaatgctaccagtttttatcgtaattgaaccagtaagtccaactgttacgtgtgtatagtgtccatacgcgttagctcttacatcatttttgttaccttttttcacttgtatagagatatagccgtgatggttgtacggtggtttatttgatccaccttttttcaggttgaattttttagcaatacctgttgcgctattagttgtagaactagctttaagagaatgagttcctacaccatctgtatacttgtatgaaaacccgtccgtgcctggaactttaactgcactagcagaatgtgtaatcccaactacatctgtaagagcaaactcaggactctttatccaagtaaatgagtttttaagtaacgtatttccatttgataactttgaagaagttaaagtcatcttaagtaaacctgtagttttagttgaactctgacttttagcagccattgtagaaaatacaggtttttcttgttgttgagcttggtttactgcttcactctcagttatttcctcaatatcagttacattaccatctttgtctgctgtaacctcataataattctcttcagaagatgtgagtttaccatctagagttttgtatttgttgtattcttcaatcgacatgctatctatatcatcgtctgtaaaacctaattctttcatctcttctttttgttgttcatttaaagagactggttcaatgatttgatctgttcctgcatcctcttcaattacttcagttgtttcagcttgttcactatctgttgactctgcttttgctacactaggaatcacagatcctgctacaagcatagctataagtatactagaaaacttgtttttcaacataaaagtactcccttagtttaaaaagtattaataatgcgcgctattattaatcttgcaattccatttaatttccaacgaaatcacgcatcctatatactaaaatacaattct

SEQ ID NO: 33 - DNA, 49295 bp, Priestia aryabhattai
  source 1..49295: mol_type = genomic DNA
cctaaaaaggactagctattttagctagtctttttttattattcacagagtataagctatctacataaaatggggtaaatgaactgcataaagaagttacaacttgtcgatacttatttagtggaggtggagagtaatggaaaaacaaattaaaacatgttccgtttgtcatgaacagcatacaaagggtattgaggtgttttccagctttatatgccaacactgcgaggtagagattgtagaggtggattcatctcattttcgttatcaattgttagtagatcaattaaagagaatatcaggagcgttttcttactaaaagcccttttttataagggcttctttatatggttcaaaaaaatcatctaagtttgttataatgaaagaaaaatgaattttgataggaaaaatacttacatattcttttatcaagttaacaatgttatatttacaaaaagtaaggaatggatatatggatacatatttacctttatataaccgtttagtaaggcacagcgaaaagaggtcactctcttatcacgtgcccggccataaaaatggtcaaattctaccttcacatattcagtcttcttacgcagactttttgcaatacgatctaaccgaaattagcggattagatgatttacatgaagcagaatctgttattaaagaagcacaagagttaacggcaaagttgtatggagtagatgaaagcttttttttagttaatggttctactgtaggcaatctcgccgcgattttatctctttgtcaagaaggagataaaattgctgtccaaagagattctcataaatctatttttaatgctattgctttatcaaaggcatcacctatttttttagctcctgaaatagattcaaaaacatatcttagtacaggtgtatccattaaaacaattaaagcggctttagagcattctgaggatataaaagcatttgtattaacaaatcctacttactacggggtggcgcgagatttaaaggagattattgactttattcatagctacaatattcctataattattgatgaagctcatggagcccattttattttaggcaatccttttccttcttcagctgttacgtatggagcggatcttgttgttcagtcagcacataaaacgctgccagctatgacgatgggttcttatttacatatgcaggggacattgataaataagaaaagcgttcggcattacctacaagtactgcagtcaagcagtccctcatatcctattatggcttctctcgatttagcacgatattatctgcagcagtttactcagcatgatattgatagaatgactgacaatattcattcgtttgctgaaaagattaatgagattgatacactttcaactattgatgtggaaacagatcaaactgctaccgaccttttgaaaatgacgttgacttgttcggcggcaacaggatatcatttgcaaaaggaactggaaaagcaagatatttatacagaactagctgacgttaactatgtattgtttgttctacctttgagcagcagttgggattttaatgatacaattaagcgggttggacaagcagtagagaatatacagcgtaagtcatatgaaaaaccaataatcaaaccatttcgtttttcaagagcaacggttctcctgcctatggaagaaagaaaactaaggacaaagcatatgtgttcgtttgaagaagcgattgggtgtgtaagcgcacaatctgttattccatatcctcctggaattcctattttaatggagggagaaacgattacgagcaatcatattgactatattttgcatattcaaaggttaaacggtcatattcaaggcggctcttgtatggaagaaggaaagatagaagtatttaaatagagaaaggaatttatacatgtcaggaacgtttattacattcgaaggcccagagggtgctggtaagacgaccatcatccatatggttcaacaaaaattaatacaagagggctataccattgtattaacaagagagcctggaggcatacgaattgctgaacaaattcgtgaaatcatcttaaatccatctaacacggaaatggatgccagaaccgaagcacttctttacgctgcggctagaagacaacatcttgtggaaaaagtgattcctgagctaaataaagggaatatagtattatgtgaccgttttattgatagctcacttgcttatcaaggaaatgcgcggggtataggcgtagaagatatttttgctatcaatcaatttgctattgagcaaacgatgccacaggccactttatattttgatattgagcctgaggtaggattagaaagaattaataaaggtcgaaaagatgagattaatcgattagatttagaatccttagactttcattacaaagtacgagatggatatttatctcttttgagtgaatttccagagcgtattcgacgaattgatgcaaatcaatccgttgaaaaagtctgtgaagaagcttataaacaaataaaattgattttaaaataaatacagatgatcgttattcttgctatactattcttaacaaaaaagtaaaatgaggtgttattcatgaaattagtaatggccgttattcaagattcagatagctcaaagcttttaaatgcacttgtagaaagagggtttcgttcaacaaaattatcaagtacgggcggatttttaaaatcagggaatacaacaattatgattggtacagatgatcataaagtagatgaagtacttgatattattaagggccaatgtgaaaaccgcagacagatgatttctcctgtggcaccgatgggcggtaatgcagattcatacattccgtatcctgttgaagttgaagtgggcggagctacagtattcgtactaccagtagatcaatttcatcaattttgagagagaagattttaaatagaaagtgatgattgaatgagaaatacatgggaacagcttgaagctcttcagccgaacgtattaaagattttgcaaaacagcttacttaaagagcgagttgctcatgcttatttatttgaaggaagcaaaggaacaggtaaaaaacaaattagttttttgtttgctaaagcgctattttgccaaaatccagttaatcataggccatgtcatgagtgcagtaactgccggcgaattgattcaggtaatcatccagatattcacttgattgagccagctggtctatcgattaaaaaagagcaaattcaattcttgcaatcagaattcacaaaaaccggtgttgaatctaataaaaagttatatattgtgaatcatgttgataaaatgacagtaagcgcagcaaatagtttactgaaatttttagaagagcctggcaacggaacgtatgcaattttattaacagaaaatatacagcgcttattagatacgattatctcacgttgccaagtaatatcatttcgatctcttacaccagaacagttagctgaaaaactagtaaaaaatggcctttccgcagtagatgcgtccatcttgtctaatttaacaaacagcattgatgaagcaattgaattaagtaaagatgaatggtttggacttgcaataaagttagtgatacaattatatgaagtgttaacaacgagacctcaacaagctcttctttttattcatgaaaagtgggtaacacattttaaagaaaaagaacaagctcatattggtttaactttattgatgcttctttatcgtgatttgttgacgctgcaagttggacaagagtctaaaatcgtctatcgtcataaaatagaagaattaaaacagcaagctcttcagacaacgcaggaaaaagcgatttatcgcttagaggttatcttgaaggccaaaaataaattaaattcaaatatgaatctacagttattaatggaacagctggtgttggatttgcaggagggataaaagcttgtatgatgtagtaggcgttcgctttaaaaaagcgggaaaaatatattattttgaccctggagaacttacaattccagatggtgagtttgttattgtagaaacagttcgtggtgttgaatttggcagagtggttattaataaaaagcaagtaagtgaacacgatgtcgtacttcctttgaaaaaagtaatccgcattgccgaacaaaaagacaggctgattgtggatgaaaataaacaagctgctagagaagcgtatgacgtatgcgtgcaaaaaattcaatcacacgatttagatatgaagttagtagatgtagaatatacgtttgatcgtaataaagtcattttttattttacagcagacggccgtattgattttagagagttagttaaagatttagctgctattttccgtacgcgaattgagcttcgtcaaatcggtgtacgagacgaggcaaagctgttgggcgggataggcccttgtggacgtatgctatgttgctcaacgtttttaggtgattttgagccggtttctattaagatggccaaagaccaaaacctatcgcttaatccaacgaaaatctctggtttatgcggacgtttgatgtgttgtttaaaatatgaaaatgatgagtatgaaacggcaaaagaacagcttcctgatataggctcaacaattaaaacttcagatggttcaggacgtgtagtgggtttgaatattttggaaagaattattcaagtggaactgtcagatcacgaacaaattttagagtatactctggatgagatcaataatgaaggtgctgtttcgtttcaagccacagattaacgaggtgggcaaaggtggataaaaaagagatttttgattcggtgacaaacatggaggaacaaattggtcatttatataagcagttaggtgagttgaaagagcatcttgctgagctaattgaagaaaatcatcacctgcaaatagaaaatgatcatttgcgccgtcgccttgaccagacaaacttcgaaacgaagctgaaaaatagacattcaaaagcaagcgctcaaacaaaagagcaaaaacaaattgatatcggagaaggatatgacaatttggctcgcctttaccaagagggttttcatatttgtaacattcattatggaagtgtgcgtaaagatggagactgtttgttttgcttgtcatttttaaataaaaagtaacaacacctctcccttttggagaggttctttttatgagtaaaagatataaataatagatgtacaaggagaagaacgactatggttgagttatatggagatgaacgtttagattatctattagccgatgaggagatgcgcattattcaaagtccgtctgtcttttccttttcattggatgctgtgcttttatctcactttgcttatgtcccaattcgtaaaggtaacttggttgatttatgttcaggaaacggtgtaatcccactgtttttatctaaacgaacaaagggaaaaatcattggtgtagaaattcaagagcggctacatagtatggcgcaaagaagtattgcgtataatcagctggacgggcagattaaaatgatacatggtgatttaaaaaatgcgcctcaagaactgggttatggaaaatatgatgttgtaacatgtaatcctccttatttcaccacatccaataaagaagagataaatgaaaacgaacactttgcaatcgctcgccacgagattcattgttcgttggaagatgtgattagagccagcagtcaactagtgaagcaaggcggaaaagtggcattagttcaccgtccaggaagactattagatatcgttacgttaatgaggcagtaccgtttagagccaaagagacttcagtttgtctatcctaaagatgggaaagaagcaaatacacttttaattgaaggtacgaaggatggaagtccagatttaaagattcttcctccgctggtggtctaccaaaataatgatgaatacacggacgaattaaaaaggattttatatggaacaaaataatcattatttttatgtagttgaatgcaaggactgtacgtattacgctggttacacgaataatttgcaaaaacgtatttctgtccataatgaaggaaaaggggcaaaatatacgagagcaagaaggcctgttttattaatttggcatgaggtgtttacttctaaaacagaagctatgcaaaaagaatattggttcaaacagttaagcagagtgcaaaaacaggcttacattcgaagggagcaagaaaagcagaatgaaatcacaaaaaagttatgatgtatcgaatgaacgaggcgttttatatttagttcccactcctattggaaacttagaggatatgacatttcgtgcgattcgaattttaaaagaagttgattatattgccgcagaagatacgagacaaacgaaaaaactatgtaaccactttgagatcgatacgcctattacaagttatcatgaacataataaacatacaaaaagtgaacagctgttaagcgacttagacagtgaaaaaaatattgctttagtaagcgacgcgggcatgccttgtatttcagatcctggttatgagttagtggtagctgccgttaaagaagggtatacggttgttccgctgccggggcctaacgcagcattaacagctttaattgcttcgggactacctacggggcagttttatttttatggatttttaaccagaaataaaaaacagcgtaaagaacaacttcaagagcttcagtatattaaggaaagcatgatattttatgaagcccctcatcgattaaaagaaacactaaagagtatagaagaaattttagggaaccgatctattgtgttatgtagagagttaacaaaacgctatgaagaatttttaagaggaagtgtattagaagcaattgaatggacaaatgccacagatattagaggcgaattctgcttaattcttgaagggacaaatgaagaagcgccagatgaaagtaatctatggtgggaacagctcaccattatcgagcatgttgatcactatgtagaagaaggactttcaaacaaagaagctattaagcaagtggcaaaagaccgagatgtgtcaaagcgagaaatttatagtgaatatcacgtacattaaaaaaagctgtctatcatagacagcttttcgttttatttagaagcttgtaaagaatcttgaagttctttcatgatttgttctgcaccttcacggcttagaattaatttgccgctagcaagttgaatgttatcatcagatacttcacctgttacttggcaagtcatgtttggtttgtatttttttaagatgatgcgctcttcatctacatagatttctagagcatctttctctgcaattcctaatgtacgacgtaattcaattggaattactacgcgtcctaattcatcaactttacgaacaatacctgtagatttcatgttaatcgttctcctctcagtaatcatttttctatgttattactttcgtcattattcgacaatttcaacgtactttcataataccagcgtttccaaaactagtcaatcattttatatgtaaaaaaatgtagctgggaaaaatttttttctcgacttgtttacaagctaattgtgaccgtcagtcaaggaatgacaaggggtttcattggaaaaaagattaatcgtctaaatagcttgatattaactattttgaagatagggtaaatgtaattcgacataaaacgacaaaattagacctatttgtcgttttcatcaaagtgactttttgaatgagggtatattttatataaaaatagggcgaagctgatacaattaacaggattattttttggaaaaataacgattatttaaaaatgaagtgaatccgtcatattcccgtgtatataggaagagaatgttttgaaattatcatgtaaaatagtatgataggtagtagaataagaagacagggtttatatgattacatacatataaatcaaaatgttgaaatggaatgttggaggttatgaacatggcagatggaaataatacattttatattactacgccgatttattatccgagtggtaaattacatatagggcatgcatacacgacggtagcgggagatgcaatggctcgttataaacgtttgagagggtttgatgtacgttatttaacaggtacagatgaacatggtcaaaaaattcagagaaaagcagaagagaaaaacgtgacacctcagcaatacgtagatgatattgtatctggaatcaaagagctgtgggataagatggatatttcgtatgatgattttatccgtacaacagaaccaagacataaagaaatcgtggaaaagattttcgcgcgccttttagaacaaggtgatatttatcttgatgagtatgaaggttggtattcagttcccgatgagacgtactatacagagcatcaactagtagatccaatcgttgaaaatggaaaagttgtaggcggaaaaagcccggatagcggacaccctgtagagctcgttcgagaagagtcctatttctttaaaatggggaaatacgtagatcgtttactagctttttatgaagaaaacccttcatttattcaaccagagtcccgtaaaaacgaaatgatcaataattttattaagcctggccttgaagacttagctgtttctcgtacgacgtttgattggggggtaaaagttccaggtaacccaaaacacgttatttacgtatggattgatgcgctttctaactatatcacctctcttgggtatgatacagaaaatgatgaaaactatcgaaaatattggccggctaacgtacatttagtaggaaaagaaatcgtacgtttccatactatttattggccaatcatgttgatggcacttgatttgccacttcctaagaaagtatttgctcacggctggttattaatgaaagatggaaagatgtcgaagtcaaaagggaatgtagtagacccagtgacattgattgaccgctatggactagatgcccttcgttactacttgcttcgtgaagtcccattcggttcagacggtgtattcacaccagaagcgtttgttgaacgtattaactttgacttagcaaatgaccttgggaacttagttaatcgtacagtggcgatgattaataagtattttgatggtgttattccgacttatgaaggcaatgtaacagagtttgatgcacttatcgtccaagctcaaaaagatacagtgaataaatatgaagaagcgatggaagatatggagttttcagtggctcttgcttctatctggcaatatgtaagccgcacgaataaatacattgatgaaacgcagccttgggcgttagcaaaagatgagaataagcgtgcagaacttgcttccgttatgacacatctagctgaatcaattcgtcacattgcggtattactgcagccattcttaacgcgtacgcctgagaaaatttttgctcagattggtgtaaaagaagatgtattaaaaacgtgggaaagcacgacgcgttttaatatgcttaaagaagggacaaaagtagaaaaaggtgagccaatgttccctcgtctagatcgagaagaagaggtagcgtttattaaagagcagatgcaaggaagtgctcaaaaggaagaaaaacctgttgtgaaggaagagccttctgaagagattataattgatgatttcatgaaagtagagcttcgtgtagcgcaagttacgcaagtagaaccagttaaaaaggcagataaactattaaagctgcagcttgatcttggctatgaaaaacgccaggttgtatcaggtattgccaagttttataagcctgaagaattagtaggtcgaaaagtaatttgtgtaaccaacttaaaacctgtgaaactgcgcggtgaactatcacaaggaatgattttagcgggggaagatgagaatggtctttcactagcaagcgtagatcaaaacttagcaaacggcacgaagataaaataagtataggtaaaaggggtgtttcacgtgtaacatgcgaggacccccttttattcatggaaaggatcgattagatgttatttgatacacatgttcatttaaacgcagaacagtatgaagatgatttgcaagaagtaattaatcgtgcgttagaaaaaggtgttcaaaacatggtagttgttggattcgatgaacctaccatcaaaaaggctattcaaatagctgaaacgtatgactttatctatgctagtgtaggatggcatccagtagatgcagttgatatgacggatgagcacttagcttggattgaagagttagctcagcatccgaaagttgttgctttaggagaaatgggattagactaccattgggataaatcccctaaagaagttcaaaaagacgtatttcgccgtcaaattcgcttagctcgcaaagtgaatttacctatcattattcataatcgtgatgcaacggaagacgtggtaaccattttaaaagaagagcacgtagaagaagtaggtgggattatgcattgcttcacgggcagtattgaagtagcgaatcagtgtatggatatgaatatgtatatttcttttggcggacctgttacttttaaaaatgcgaaaaagccaaaagaagttgctacagagcttcctttagataaactattaattgaaacagactgtccttatctgactcctcatccattccgcggcaagcgcaatgaacctggttatgtttcatacgtagcagagcaaattgcagagttaaaaggtataacgtatgaagaattagctgatattacaacaggtaacgccaaaaagctatttggcattaatgattaaaactttttctcatataacaatcattttcgtgttaaagtaaagataggcgcagaggagaatgttatcctctgcctttttcagttaaaataacaggtaaatgctttttaatttagttgataataagataaaacgttgatttcatagaagaaaaatgatgtgcgtaacgatcatttcatttttactgaaaagcaaatgaacaaaactgaatgttttggaggaagcaatgaagattaaagaaattattgtagtagaaggccgagatgacactgtagcgattaaacgtgcagtggatgcggataccatcgagacaaatggatcagctgtaaatgaagaaactattgagaaagtaaaattagctcaaaaaacaagaggcgtgattatttttacagatccagattatccaggacagcgaattcgaaatattgtttcagaacgtgttcccggatgtaaacatgcattcttagataaagaagaggctcgccctaaaaatggcaaaggtattggagttgaacatgcttctattgcgtctattcaaaaagcactaaaagatgtgaagcaagagtggatgggggcagctatcgagatttctcaagaggatttaatcgtagctcgtttgataggagatagtaaagccaagtctcgacgtgaaagaatagggaagttattaaaaattggctatgccaacggaaagcagctccataaacgattacagatgttccaaatttcaaaagaggactttatcagagctgttgagcagataaataaggaggaaaagggatcgtgttaaaagatattgcaacgcctaatcgaaccaaggaaattttaaagaaatacggttttacatttaaaaagagtttgggacaaaattttttaattgatacaaacattttacatcgtattgttgatcatgcggaaataacagaagaaacgggagctattgaaattggacctggtatcggggccttaactgaacagctagcaaagcgcgcaaaaaaagtactggcatttgaaatcgaccagcgtttgcttccgattttagctgatactctttctccttactcaaatgcaaaagtcattcatcaagatgtgttaaaagcggatttaaaagggacgctcgaacaagaattcgaaaacatagaagatttaatggtcgttgcgaatttaccctattacgtgacgacacccattttgatgaaattattagaagagcaaatcccggtacgtggaatcgtcgttatgcttcaaaaagaagttgccgatcgtatagcagctaaaccgggaacaaaagagtacggttcactttctattgcgattcaatactatacagaggctgagacggttatgatcgtgcctaaaacagtgtttaatccgcagcctaatgtagattcagctgttattcgattgttgagaagaccaaagcccgcggtagaagtacaagatgaagcattcttcttccaagttgtacgagcaagttttggacaacgccgaaaaacaattttaaacaatctagtgaacaacttgccaaatgggaagcagaaaaaagcggacattgagcaagcactttcaactgctgaaattgatccgaaacgaagaggcgaaacgttatctattcaagaatttggaaagctaagtgatcaacttttaaaatcatttcgctaaatcatcacatttttatcatgaagtcataggctatgaagagaatttatttttgaagtagcaaagacggagtgaagcatatgaacatcaagattggtgatatagttacacgaccttcttatcaaagagatttgctttttcgtgttatagctattaatgacagcgaagcggggaaatatgcgactttaataggagaagacgttcggttgattgccgacgctccttgtacagatctagaggttgtggatgctaaagaacaggatcaaagaaaaaaacaagaagaagaacttttagaaagatccttggagcttattcaacaggattatcggctcgttcgagagaaaactgaatatagcatgacaaatggatacagccattcacatcgcttatttcaaattccaggaaaggtcctgcacgtagacggagaccctaattatttacgtaaatgtttgttggtttacgaaaaaattggtgttcctgtttatggtgttcattgcgtcgagtcagaaatgccggagaaagttggaaagctaattgaggatgtaagacccgatattctggtgctgacaggccatgatgcctattccaaaggaaaaggaaataaagatgatctccttgcttatagacattccaagcactatattcaaacagtccaagaagcaagaaaaagagttggtaatttagatcagctggtgatctttgcaggtgcctgtcaatcgcattttgaattattgattcaagctggagcaaactttgctagttcaccttcacgtgtaaatattcatgcgcttgaccctgtgtatgtagtagcaaaactaagttttactcctttcacggatcgtattaatgtatgggacgtcttacgtaatacattaacgggtgctaaaggtttaggaggagtagaaacaaaagggctgcttcgcactggcatgccttatgaaagcgatgagtagacataaaaacaactggttacagcatgtgcacgcatgatgtgcaaccagttgttttttcgtatgaagccaaagtatacgcttaattacacaaaatcattttcaatatttgctaaagatatacatatttcgttgaaaaacgagcatactaacagcgaaatgtagattcatgttgaaaattatttattgacacaatcagagatagattgttataattttatgtttttgactatttttctaacatgtgttacactatacatagtgaggtggaccaatatggcgaaaactttgtctgatattaagcaagcgctggatttgcacctaggccaacgattaactttaaaagcaaacggtggtcgtagaaaaacagtagaacgttcaggtgtattaacagaaacgtacccatctgtttttatcgttgaattagatcaagaggaaaactctttggagcgcgtttcgtatagttacgcagatgtgttaacggaaacagtgcaactaaaatttttctaagaatgacataggcaatatagcaagtggtgatgagcagtggacattggtttactgcttttttattggtctttttttcaaattatatatgcattattttttatacatactatacatatcgtcctcgcgtttcttatgtaaaagagcgaggagattcaggttggaatttcattttatacgtaaaggagccatgtgcaatgtcaaggcgtagagggattatgtcatcgaagctgaaagaagaactggctaaagaacttggtttttacgatactgtacaagcagaaggctggggcgctattcgggcaaaagacgcaggcaatatggtgaagcgagctgtagagcttgcacagcagcagctaaagcaatagcatagtaaaaatcaatgcttatacgactatttaaagtgaaatgaggaaaaccgaagtgtataaccgcttcggtttttttgtcccaaaatgaaagacaaaacagaggattaaacaaagatgtttaaatgaacagctatatcttgttcattttatgataaaatagcgttaaactcgataagatgaagtaggtgaagtaagttgaaattaatggtgaaagcaccggctaaaataaatttgtcacttgatgtgttacgtaaacgtccagatggttaccatgaagttaagatgattatgacaacaattgatttagcggacagaattgaactttctgaccgtgaagatggacgaattgttatctattctcataatcgctttgttccagatgaccagcgaaatctcgcttatcaggcagcgcagattttgaagcgacgttataacatttcaaaaggtgtaaatatattaattgataaacatattccagtagctgctggattagctggaggcagcagtgacgcggctgctacattacgcggtttaaatacgttatgggaattagggttatcattagacacacttgcagaaataggagctgagattggctctgacgtatctttttgcgtgtacggagggacagcccttgctacagggcgcggagagattgtagagcatattgaggcacctccaagctgctgggtgattttggctaagcctgaaataggtgtttctacagcagatgtatatcgaaacttaaaaattgaagagatggatcatcctaaagtagttgagatggttcacgccatacaatcaggaaattatgatcaaatgtgtagccttgtaggaaatgtattggaagcagtaacgctgaaaatgcatccggaagtagctctcattaaagaacaaataaagcgttttggcgccgatgctgtgctcatgagcggcagtgggccaactgtatttggacttgtacagcatgattcacgtatgcatcgcatttataatggattacgtggcttttgtgataaagtttatgcagttaggctactaggtgaacgaataacgcttgaataaatccgtatgttaatgttatatttacattacaatattcggatttcaggaggatgttatgaagtttcgacgtagtggacgattaattgatatgaccaactatttcattcaaaaccctcagcgccttatccctcttacgtattttgcagataaatacgattccgcaaaatcatctattagcgaagatatggcgattattaaacaaacttttgaacagcagggtatcggaactttggttacgctaccaggggctgccggcggagttaaattcattccaaagatgacgaatgaagaagccggtcagcttgttcaagaattatgtgggttgattgaaaaacctgagcgtttactgccaggtggatatttatatttaactgatattttagggaacccccgcgttgtgaataaaatcggtcgcttgtatgcatcgctttttgctaaccgcaaaatcgatgtggtgatgactgtagcaacaaaaggtattcctattgcgtatgcggttgctcagtatttagacgtgcccgttgttattgtgcgcagagacagtaaagtaactgaaggatcgaccgttagtattaactacgtgtcgggttcatctaagcgcattcaaacaatgctgttagctaaaagaagtttagcggtggggtcaaatgtactcatcattgatgatttcatgaaagctggcggtactgtaaatggaatggttagcttgcttgaagagttcgatgcaactgttgctggtattggagttttagtagaatcagaagatattgaagaacgtttagtggatgagtatgtgtcccttgtacaattaacagatgtaaatattaaagataaacaaattcgtgtacaagaaggcaattacttaaaatatatttgatcgagtaagggagaggaacatatgttacaggttcaaacaaaaaatgcaccgcaagctattggtccatattcacagggaattgttgtgaataacttgttttacagttcaggtcaaattccacttcgtccagatggtacgttggtcgaaggagatgttcaagtacaaactacgcaagtatttgaaaatctaaaagcagttcttggagaagctggagcttctctaaatacagttgtaaaggcaaccgtgttcattaaagatatgaacgacttcgcagcgttaaatgaagtctatggcgactactttggcgaccataagccggcacgttcatgtgtagaagtagcgagactacctaaagatgtacttgttgaaattgaagttattgcgctcgttaaagggtaattaaattaacaaatttctaacaaaaagcaagtaacttccaattgttcactttttttgcgaaaattttctaaaaattttttctgaatagcaggaaaacacaaaattctgtggaattaagtatgtaaagcttcgcatagaaaaaggtggtgaacaagatggaagtaactgacgtaagattacgccgcgtgaacactgaaggacgtatgagagcgattgcttcaatcacattagatggtgaatttgttgttcatgatattcgtgtgattgatggtaataatggcttatttgtagccatgccaagtaaacgtacaccggatggtgagttccgtgatattgcacatccaatcaattcaaatactcgcggaaagattcaagatgctgttctagcagaatatcatcgtttaggtgaggtagaagttgaattcgaagaagcgggtgcttcgtaaacatatgatacattaagagtctactgaaaagtaggctcttttctttttgattaccacttatataatttcacacctttgtaaaactttagcattaccaaaaaataaaattcatgacttataaatgattccttgaaatgctgtcatttttgatataatattcttaatggataaaaaggtaaaattggaggcctgttatgtcaaaaagatatgcagtcatattggcagctggtcagggtacacgtatgaagtcatctttatataaagtgttacaccctgtgtgtggcaaaccgatggtgcaacacgtaattgatcagttatcacgtttggatttaacaaatttaattacagttgtaggtcacggtgccgaaaaagtgaaatcacatgttggagataaaagcttatttgctttacaagaagagcagttaggaacagctcatgcagtaatgcaagcagaatctttacttgcacatgaaaaaggtacgacaattgttgtatgtggagatactccgcttattacagctgaaacaattgaatctttattaaagcatcatgaagcaacaaatgcaatggcaactattttaacagctcatgcagaagatccaacaggatatggacgcatcattcgaaatgaacaagggtctgttgaaaagattgttgagcataaagatgccacggaacaagagcgtcttgtacaggaaattaatactggtacgtattgttttgataatgagaaattatttgagacactttcaaaagtttcaaatgataatgtacagggagagtattatttacctgatgttatcgaaattctaaaaaatgaaggtcaaattatttctgcatatcaaacatccgattttgctgaaacattgggcgttaatgatcgatttgctctgtctcaagcagaagaaacaatgaaaaagcgcatcaacaagcagcatatgttaaatggagtgacgattgtggatccttctaacacgtacatttcagcagatgctgtcattggcagagatacgattatttatcctggtacggttattcaaggaacagttgtaattggagagaattgtgaagtaggacctaacagtgaaattaaagattgcaaaataggtaataatacttctattcgccattctgttgctcacgatagtgaaattggtcacgaagtcacaattggcccatttgcacatattcgtcctcaatcattaattggagatgaagtgcgcgtaggaaactttgtagaaattaaaaaagcatcttttggcaaaggtagcaaagcttctcatttaagttatattggagacgcagaggtcggaaaaggtgtaaacttagggtgcggatctattacagttaactacgatgggaaaaataaatttttaacaaagattgaagatggggcattcgtaggatgtaactcaaacttaattgcacctgtaacaattggtgaaggcgcctatgttgcagctggttcaaccgtaacggatgatgtgccaggaaaagcattatcaattgctcgtgcgaaacaggtaaataaagaaaactatgctgaaaagcttgatattaataaaaaatcctgacggaggtttcacaataaaatgtcaaatgtatatgctgatgaaaatttaaagttatttacgctaaattcaaacaaggctttagctgaagagatcgcaaaagtaattggtgtggaattaggtaaatgttcggttgatcgtttcagtgacggtgaaattcaaattaacattgaagaaagtatccgtggttgtgatgtatttatcattcaatcaacaagtgctccagttaacgaacacttaatggaattattaattatgattgatgcattaaaacgtgcatcagctaaaacaattaacatcgttatgccttactatggctatgctcgtcaggatcgtaaagctcgtgcacgtgaaccaatcactgccaaattagcagcaaatatcattgaaaaagcgggagctactcgtattatcacattagatttacatgctcctcaaattcaaggtttcttcgatattccaattgaccatttagtaggtgttccaattttaggtgaatacttcaagagtaaaaaccttgatgacgttgttgttgtatctccggaccacggtggcgtaacgcgtgctcgccgtttagcggaacgtctaaaagcgccgatcgctatcattgacaaacgtcgcccacgtccaaacgtagcagaagttatgaacattgttggacaagtggaaggcaaaacagcaatcttgattgatgacatgattgatacagctggtacaattacaattggtgcaagtgcattaattgaagcaggtgcaaaagaagtatatgcttgttgtacacacccagtgctttcaggccctgcgattgagcgtattcaaaactctacaatcaaagagctagctgtaacaaactctattgctttaacagaagataagaaaattgataaagtaacagaactttcagtagctccgttaatcggtgaagcgattattcgtgttcacgaagagcaatcagttagtacattatttgattgataaacagaacctctttccaaatggaaagaggtttttttgaaaaaaatttaaatgtgctaacccttgattttaaagcgctttggacggaaggaacaaagatatattactgttcaaactgggtttcatgtttagcaaccttctaaaaagggtacattttaagtagaaaacatactggaaggtgaataaaatgagtatttcaattcaagcaaataaaagaacggatttcaaaaattctacaaatagaaagattcgcgacgaaggaaacttcccagccgttgtttacggaaataaaacagaatccacacctatttacttaaacagtgctgattttattaagactattcgtgaagcaggacgcaatggagtgttaacattacaagtggataagcaaaaatattccgtaatgttacatgacattcaaactgatccattaaaaaacgaaattgtccacgccgatttccaagtggtcgacatgaagaaagaaattgatactgaagtttctttatctctagtaggagaagcaaaaggaacaaaagaaggcggcgtattacagcagtctctatatgaaatttcattaaaaggcttgccgcaagatatcccatcatctattgatgtagatgtatcagatttaggaattaatgatacaatcacagtagcggatattaaggtaggtaaaaagctagaaattaagcatgatgcagaagatacagttgcttctgtcctacctcctcagcaggaagaagagccggacagcggcgaagttcaggatgctaaaggcgatgttgaagcaacaaaagaaaaagataacgaagaataatataaaaagacgtaaccaaaaggttacgtctttttgtgtgaattgattataataaaagtgatactatatagtaatgtaaaacattaaagacatttacctattatgtacaacttacatagagtggaaaggagtatctattttgaaattaatcgttggtttagggaatcctggaaaagaatatgaccgtactcgtcataacataggatttatggcaattgataaaattgctgaacagtttatgatttcattagataaaacaaagtttaacggaatatatggaacaggtataataaaaggagaaaaagtcatattattaaagcctctaacatatatgaatttatcaggagaaagtattcgcccgttaatggactattttgatatagacgtcgaagacttgcttgttatttacgatgacttagatttaccgtgcggaaaagtaagattgcgtacaaaaggaagtccgggcggccataacggaataaaatcaattattcagcatttaaaaacccaagagtttaaccgaattcgtattggaattgatcgtccgaaaaacggtatgaaagtagttgattacgtactagggcgctttacagaagatgaaatggttcatatggaagaagcgatgaaaacgtctgtacacgcgagtgaagattttttaggtaaaccgttcttagaagtaatgaatcgctataattaagtagaataaaatttctctcaatcgtccatactaacactaaaagatttgggaggatttgtatgtctattcattatttctgtagacattgtggcgcaaaagtcggtatgatagaaaagacagctcacaatacagaagcactcggttttaatcacctaaccgcagatgaacgaaaagactttattcactaccataatagtggagatatcgtggttaaaattatttgtgaagactgtcaagaagcgctagaacgaaatccagactatcatcagtacgaaacatttatacaataaaaagctttggtctcaaaccaaagcgtttttctgtttagtttagacatatcatgggaggagggaattcctttgcgagggattagacagcaatttgaagaaaataaagaaattggagctgttgtcagcagtttagaagaaggtttgaaagaacagttagtaacgggaatttccggttcagctcgatctgtattaatggcactcttaaatgaggataaaaaataccccttattagtagtgactcataatttatatcaagctcaaaaagtgtatgaagaccttttgcatcttttaccggaaaaagacgttttcttataccctgttaacgatttagttgctacagaagtggggattgcaagtccagaattaaaggctcagcgaattgaagtactcaattattggagtcaacatacaggtggagtagttgtaacaccgcttgcaggaattcgaaagctgctgcctcctaaagcaagatgggagcaaacacagctgccgtttcaaatgggaattgacatcgacgttgatcattatttaaaaaggttagttgagttgggctatgagcgggcatcgatggtttcagctccgggtgagtttagtgtgcgcggaggaatcattgatatttatccgttaacagaagagctacctgtccgaattgaactatttgatacggagattgattccattcgtacttttacaatcgaggatcaacgctctcaagagcagttaaaagaaatttcaatcggccctgctacggaaatcattgtgaaccaaaatgaagtggcccaaggaattgaagaactagaagcacagctggcttcgacgctgcaacaagtgaaaaacgcggcgctaaaagctaccttaacagaaaatattaaaggtgaaatcgaacagctgcgtcaaggtcaacttcttgaaaatatgttcaagtatttatcattcttctacgaatcgcctgctagtttactagattatttaccagaaggcggccttgtcatctttgatgagaccactcgaattcaagaaacgtctgatcagcttgaaacagaggaagctgaatggataaccgaattattaggacaggggcaaattgttcgagacgttcaattatctcataagctcccatctcttattcagcgagcaaaacatcagtttttatacttatcgttatttttgaagcacgtatcgtatacgagtccgcaaaatattattaatatttcatgtaagcagatgcagcagttttacggccaaatgaacttattaaaaagtgaaattgaacgttggaaaaatgctaattatacggtagtcctcttaggagcagataaagagcgagtgaaaaaacttgaaggtgtgctagcagattatgatattgattcatctattttagatggaaatggtcagcttgtgccaggtcttgttcaaattattgaaggcgatttacaaatgggctttgaactgccgatgcaaaaattagctgttttaaccgaggaagaattgtttaaaaaacgggtaaagaaatcaaagcgtcgtcaaaagctctccaatgcagagcgtattaaaagctattcagagttaaacgtaggtgactatgtcgttcacgtgaaccacggtattggccgttatttaggaatggaaacgttagagattaacggtaatcataaagattatatccatatcaaatatgaaggctctgacaagctgtacgttcctgttgaacagattgatcaagtacaaaaatatgtaggctctgaagggaaagagccaaaagtatataaacttggcggaaatgactggaagaaagtgaaacgaaaagttgagtcttctgttcaagacatcgctgatgacttaattaaactgtatgcagagcgtgaagcaagtaaaggttatgcattttccccggatggcgatttacagagagaatttgaaacagctttcccttatcaagaaaccgaagatcagcttcgttctgtacaagaaattaaaaaggatatggaacatgaaagaccaatggatcgtctgctttgtggagacgttggatatggaaaaacagaagtagccattcgtgctgcatttaaagctgtgacagatggaaaacaagtggctattttagtgccaaccactattttagctcagcagcactatgaaaccatccgtgagcgttttcaagactatccaatcaacattgggctattgagccgctttcgcagccgtaaacaacagcaagaaacaattaaagggctaaaaaacgggaccgtagatgtagtgattggtacacatcgtttactatctaaagacgtgatttataaagatttagggttgttagttatcgatgaagagcagcgttttggtgtaacgcacaaggaaaaaatcaagcaaatgaaagcaaacgttgatgtccttacacttacagcaacacctattccacgaacattacatatgtctatgttgggcgtaagggatctgtctgttattgaaacgccgcctgaaaatcgttttccggttcaaacatatgtagtggagtataatccggttttagttcgtgaagcgattgagcgtgagttagcgcgtgatggccaagtttactttttatataatcgcgtagaagatattgaacgaaaagcagaagaaatttcgatgctcgtgcctgatgctagggtaacgtatgcccacggaaaaatgaacgaaaccgaactcgaagcggttatcttaagctttttagaaggcgaatatgatgtgattgtgagtacaaccattatcgaaacaggagtagatattcccaatgtaaatacgcttattgtcaataatgctgataagatgggattatcacaactgtatcaattaagagggcgtgtaggtcgttcaaatcgcgtggcatatgcgtactttacgtatcacaaagacaaagtactgacagaagtagctgaaaagcgtctgcaagctattaaagaattcaccgaattaggttctggttttaaaattgctatgcgtgatctttcaatacgtggtgccggaaacttactgggtgctcagcagcatggatttatcgattctgtcggcttcgatctctactcacaaatgcttaaagaagcgatagaggaaagacgcgggtctgacggagaaagtgtgaaatttaatgtggaaatgaatctggacttagacgcttatattcctgatcagtacattacagacggccgcttgaaaattgagatgtataagcgctttagaggaattgaagcactagaagatattcaagaattgcaggatgaaatgattgatcgttttggagagtatccggctgaggttgagtatttgtttaaagtagctgaaacaaaagtatatgcaacgcagaacttagtagaatctattcttcagtcaaaacaagaaatttctattctgctgtctgaagaagcgagctcaacggtagacggccaaaaattattcatgctaggtgatcaatttggcagaatggtcagcttaggcatggaaggcaagaaagtaaaattagtggttaatgtaaaaggacttgctcaaaaagaatggctcaatattgtgtatcagttagtaaaaggagtagccactgttaaaaaagaacaagttacgaattaaaacaggcaagacaaaagtattttagttaaaggaaaatccgaacgatgaattgaggttcttgataaagaatccaactcgttcggtttttttattgatatggtgatcaccggccgcccgcggaaagcgaagtcttgcacgtaaatcagtagcggtgtctcaagcggttcacctcatttctcctatttattcgtctttaggcgagataggtttagttatgtcccagcctcttttgtatagtcagaataaaaatatccaaatccccatgttttggcggttttttggacatttttttaataaaagcacactttttaacaaaaaaagagatggttggtgaatagaagttgtagagtgaagaatactaacctcaacaaaggtgaaccttttatcatatagccatcagtgatattcaccaactattttaatcatcatatgaaagagaggcttcaatgaatgaaagcaacaggtattgttcgtcgtattgatgatttgggtcgcgttgtgattccaaaagaaattagaagaacgcttcgcatccgagagggagatccgctagagattttcgtcgatcgggatggagaagttattttaaagaaatattcgccaattagtgaattgggagactttgcaaaagagtatggcgaagcgctatacgatagcttaggtcatcctgtacttatttgtgaccgcgatgtatttattgcggtagcaggaagttctaaaaaagaatacttaaataaaaacattagttcgttagtggaatctgttatggaaagccgcagttcttctttagtaactgatgggaaaaaccttgaatttgtcgatggatacgaagaaaatatttcttcttacacaatcggtccgattattgcaaatggagatccgattggagctgttgtcattttctcgaaagataagtctcttggtgaagtagagcataaagcagccgaaacagcagctagcttcttatctcgtcaaatggagcagtaagcgtaattatctttattttacattatttactgaaaaggtagcagtttctgctgccttttttcatgctgtcttaccttagaaataaagagaacatgatataatggtacggtattttatttattggaaagtgcaggatgttttataagaacaaagctctattctattgcggttagcggctaataaaaagagttgttcatatcattacaagctgcaggtgaaaggtgtaggaatgcagaaacaatcaaagctctattctatttttaatggcgccgttattttaacgctcgcaggtttatttacgaaaatcttaagtgccacttatcgtattccatatcaccatatcgcgggagatatagggttttatatctatcagcaagtttatccgctatatggaattgcgctacagctaggtacatatggtttccctgtaattatttcaaagttagtagctgagtatgcggtaacaaatcggagaaaggaaatccgaggaatacttcaagtttcgtttgcttttttgtttgtagtaggctgcacgatatttgcgttcgaatatattttcgcagaaacgattgccgagtggatgggagatcgtaagttaacgattctcattcaaattatttcattttcctttttacttattccatttattgccgttattcgtggttattatcaaggattacataatatgtttcctacagcgctgtctcaaattgcagaacaagttgtacgggtagggactattttgtatctatctattttcttgatccaacatggttatgatttatatactgcaggggcgggagctatttttggttctataacaggcggtataacatcccttattattttatttttatttgtttttagaacaaagacaaattctaaggggatatttcaacgcataaaaaaagcagacatcaagagaatatttaaaatccttgttattcaaggcttattaatttgtattagcggtatgggtctgctgtttatccagcttattgactcctttactttatattctagtctaacggcgcacggcatggctgaagaagcagcacaaattttaaaaggtatttacgaccgcggtcttccgttgattcaattaggtacagtagtaggtacagctttttcgctttcgcttgtacctgttatttcttcagccattgcgaaaaagaacctgtcatttgtggttgaaaaagttcagctgtctctccgtctatcgcttgtagttggagttggagcagcttttggcttgattgcgctgatgaaacccattaatatgcttttatacggtgactcccacggaacggacgttttacaaattttgagcttgttagttatatttacaacagtagcagcaactgctggagctgtgctgcaggggatgggcgctgttttcgcgcctgtaatagccgtcatcgctggcatggcagtcaaactgatattgaatctttggctaataccagattttcaaaccataggagcagccattgcttcctcaactggattcgctatcgttgcagcaatcaatctattttgtctgtataaaaagctagctgtacctcttgttccgaaaaaggcgagtggaggtatttttataacgggcatagcaatggtcgttcttttgcaaagctatttattttgtttacatcactttgtatggtctaatggtttagatacaagcaaacaagtgggtgaaacaggagcgggtgttttaataggcagtttgttttatttgtttatcattatgaaacaacatatttttaccgaagaggaattacgtttacttccaatgggaagtgttttagctaaatacgtattaaaaaataaataagaaggtgaagcaatgacaggtaaagtaacagttattggtttaggagcaggcgatttagcacagctacctgtaggcatttatcgcttgctacagcaggaaaagcatatttatatgcgcacaaaagaacatcctgtaatcaaagaattagaaagtgaaggcttgacgtatgtatcctatgatgacgtatacgaatcttatgatgcatttgaagaggtatatgaacatatatcaaatgatttaatcgataaagcttcaatagaagaagtggtgtatgccgttccggggcaccctttagtggcagaacgtacggttcaattacttttacaaaaaggaaaagaacgaggcattcctgttgaaattaaaggaggacaaagcttcttagacccaatttttggtgcgctaaagatcgatcctatcgaagggtttcagctgctagacggaacagatttaaagcgaagcgaaatagagttaaccggtcatgttctaattgctcaagtgtacgatcagttcgttgcctcagaggtaaagctaacgctgatggaacacgttcctgatgattacctcgtttacattgtaacagcagcgggaagcagtgaagaaaaaatccagccggtcaagctgtatgaattggatagagaaatgtcgctcaataacttaacgactatttatgtccctccagtagcagatgaaacaattttataccatcaatttgacgcattcagaaggattattgccacgctcagaggaccaaacggatgtccttgggatcaaaaacaaacgcatgaatcgctcaagcgatatttgttagaagagtcttatgagttattagatgcaattgaccgtcaagatgacgataatatgattgaagagcttggtgatgtattgctgcaggtattgcttcatgcacaaatcggtgaagatgaaggaatgttttcaattgatgatgtcattcgcagtgttgcagagaaaatggtaaggcgccatccgcatgtatttggtgaagtaagcgtaaatgatgcagacgaggtcttaaaaaattgggatgaaatcaaaaaagaagaaaaaggagaggaaccttcttctttgttagcttctgtacctggggctatgccttctttaatgaaagcgcatggataccaaaaacaagctgcaaaagttggtttcgattggtcagaagttgaacctatgtgggaaaaagtacaggaagaacttgctgaattccaagaggaagtacagcatgctgataaagaaaaaatgagcgatgaatttggagatattttatttgctttagtgaatattgcaagattctataaaatcgactctgaagctgcattagctaaaacgaatacaaaatttttaaatcgatttcaatatattgaagaaaaagtgagagcttctgaaaaaccatttgaatctttttcgttagaagagttagatgaattttgggaagaagccaaaaaaacaggtttgtaaaacagaaaggtgagggaattatgaggttagataaatttttaaaagtatcacgtttaattaagcgccgtacattagcaaaagaagtatcagacaagggccgtattaccattaatggtatcgttgcaaaagcaagcacaaatgtgaaagtaggagatgaattagcgatcacatttggcacgaagaaaattaccgttaaaatagaggctcttcaagaagcagctaaaaaagaagaagcagctaatttgtactcaattgtcaaagaagaacgtatttcatctgaagtataactgatgaaggcttgttctaaatcacctttctcattcatatgttttaaacaacagataacaagagcgaatgctcttaatgaatgaggtggggatgaagatatgagccaattttacgaaacaagcaattcaaacaaagaccatactccaaatcatgatttagtgatgaagggtcggcgtctcttagatatcacgggtgtgaagcaggtagagagctttgacaatgaggaatttttacttgaaacagtgatgggtttcttgtcagttagagggcaaaatctgcaaatgaaaaatttagacgttgatcaaggaattgtatcgataaaaggaaaaatctttgatatagtttacttagatgagaaccaatcggagaaggctaaaggattctttagtaagttgtttcgatgagtttaaacattcagctctatacaatgcttgcgatggtatcgatgggaagcggtttaggtgcttctctcgatacttatcgttactttgttaatcgctctaaatcacgcccctggtttgtatttgtgaatgacgtattgttttggatggtgcaagctcttctcattttttatgtgttgtttttagtgaatgaaggagaactgcgtttgtatgcgtttcttgctttgttttgcggctttgccgcgtatcaaagcttatttcaatcactgtatttaaaagtattaacatttactgtctcgagcgtattaagtttatatcgaggtgttttaacgcttagtaatatttttttggtcaagcctatccgcttctttattcatattttagttgtagtcgttttagggatctaccgagctgttcataagctgctcgtattctgtctaaagcttatttacgtaccgaccaggtgggttcttttcgtattttggagaatgatgcctaaacctgtaaaacgatttttacatatgggttttcggtatatagaaggaatttacaatcgtgcaaagaatatgataatgagaatcgttgcatgggtgaacactttaaaaaacaagggggacgactaattcaatgagtgcggtacgaaaaaaaaaggtcgcgaagttaaatactgattatagccataaacaagagcaaattaaacaaaatacagatcgaaagcgtatcggtttaattaggcgtttgactgttttcggagtgttggccttaatcattggtggattgatggtatcagctttaattacgcaaacctcagctattgagaacaaaaaagctgagaaggtgaaattagaacaacagctgacaaaattacaaagcaagcaaaagcagttaaaaggtgaaatcgtcaagttaaatgacgatgattatattaaaaagattgcccgcagagattattttttatcagaagacggggaaattatctttaatgtaaaaaaagactaaacgtatggttcgttgacagtgtatttttgctttttgtataatataataaattgatttcttttatcatttaaggaggagcattttttttatgtcaatcgaagtaggcagcaagttacagggaaaggtaacaggtattacgaactttggagcttttgttgagttaccaggaggttcaacaggcttggttcatatcagtgaagtagctgataattacgtaaaggacattaacgaccatttaaaagtgggcgacgaagttgaagtcaaagtaattaacgttgagaaagatggtaaaattggtctttcaattaagaaagcagtagacaaaccagaacgtccagaaagaccagagcgtcctgcaagagcgccacgctcagaccgtccacgtgattcacgcccacaacgtaataacaatcgtggtggcggtaatgatttccgtacaaaagaaacattcgaacaaaaaatgaatcgtttcttaaaagacagtgaagaacgtttatcttccctaaaacgccataccgaatcaaaacgcggtggacgcggtgcaaaacgcggttaacttgctgcttatatcaaatagatagcgagtttttgaaaagtaccttttatctaaaaggtgctttttttatatataaaaaagagtagaaaaaaagcatgtactgttgtacatgctttttgatgacccgtacgggattcgaacccgtgttaccgccgtgaaagggcggtgtcttaaccgcttgaccaacgggccgttattcgagtagcggcggaggggatcgaacccccgacctcacgggtatgaaccgtacgctctagccagctgagctacaccgccattatacgttctctaaaagacatttataataatataaaaaagcagagttattgtcaataacttttttgttatttttatagacttttatttgcttttaaaaaagaatgatgagcataggccttctccgtggcgaacagtatctctcatattttttaaatcgctatgtaagattgtacatctttttgtatagttttcaatataatactagaaaatagtcgaacgattataggtattttgctagtccgtttgacaaaatttcaccttccgccgcgatataataacgaataagtataattagcgggtggtgggagaatgcaaaagacggaaagagattttgccagtccaacaacagaggcggtatttaaccgaactagattagaaatgtcccgtgtatttacaaaggcgggtatgaaaacggaaaaggtgttatttcaatggggattgttgctgctagtcgtaggttttttattaggacgagcgttaattttaatgaaaatcatgccatttgctttgccattctttgcagccgtaatggctataaagaaagaaaaagcaccgttagcaagtttagccgtattggcaggggcatttagtgtttccattcaaaatggaggtaccgtatttgctacactatttgttttcttactaattcatcgatttagcggcatactgacaatggatccgttaaagaagctgccgttcactgtatttagcgcgatgttacttacaaaactaactattttttatgtgtttaccaaggaattcaccatgtatgactttacatttgtggcagtagaagcagggttgagctttatcttaacaatgattttcttacaaagcgtgcctttaatttcataccgaaagcgaaaacaatcattaaaaacagaagaagtgatttcccttattattttgttggcatctgttatgaccgggacaatagggtggatgatttacggcctttcggctgaacatatattatctcgttacttagtattagtttttgcgtttgtatctggccctacgataggagctacggtaggggtcgtaaccggtttaattttaagtttcgcgaatgtttctagtttgtacgaaatgagtttactcgctttttctggcttgcttggaggacttttaaaagacggtaaaaagctaggagcagctctggggttggttgttggctcattgctaattggcctatatgctcaggcagatcaaggactaacgactaatttgtatgaatcactgacggccgttgtcctatttttattaaccccatcttttgtgttgaaaaacttaagtaaactagtaccagggacatctgaaaatatgcttgaacaacagcagtacgtgcgtaagatccgagatgtaacagcgaatcgcgtagaacagttctcaaatgtttttcaagcactttccaaaagctttacgcaaaatggattttatgatgaaaagccaagtgcggataaagaagttgattatttcttaagcagcgttaccgaaaggacgtgccaattttgttttaaaaaagaacaatgctgggcacagcagtttgatacaacctatgaatatatgaaggaaattatgcttgaagttgataatggcactcttgaacaaaatccaaggctaattcgagagatggacaaacattgtgtgaaatcgaaaaaagtcatcgatgtgattgagcatgaacttacgtattttaaagccaaccagcacttaaaagcccaaattcaagaaagtagaaggattgtagcagaacagcttcacggtgtctctgaagtcatggggaattttgcaaaagaaattaagcgagagcgcgaaaatttaaacgtacaagaagaacagattttagaagctcttcgcaactttgggatggaaatcaatcaaattgaaatttatagcttagaacctggaaatgtagatattgaaatgtgggtgccatattgtcacggaagaggagaatgcgagaaaattattgcgccaatgcttacagatattttaggtgaaagtattgtagtaaagaacgaagaatgtgctaaatatcctcaaggctattgccacgtttcgtttggttgtacaaaagcatacgttgttgatacaggcgtagcacatgctgctaaaggtggagggtttgtatcgggtgacagctattccatgattgagctaaatgccggtaagtatgcactagctattagtgatggcatgggaaatggagagcgtgcccactatgaaagcagcgaaacgcttcagctgttaaaacaaattttacaaacaggaatagaagagacaattgcaattaaatcgattaactctattttgtcgctgcgtacaaacgatgagatcttttctacgttagatttagcgatgattgatttacaagatgccaatgtaaacttcttgaaaatcggttctacgccaagcttcatcaaacgcggagataaggttattaaaatacaggcaagcaatttgccaatgggcattattgaagaatttgaagtggatgttgtgaatgaacaaatgaaggcggaagacttattaattatgatgagcgacggcgtatttgaaggaccgaaacacgttgagaactatgaaatgtggatgaagcgaaaaattggcgagcttcaaacaaacgatccacaagaaattgcagacttaattatggaagaagttattcgaacaaaatcaggtttaattgaagatgatatgacggtagttgtggcaaaacttcagcacaatactccgaaatggtcatcgattccttcttacgcttatcgtaaaaaagcacaatagttagatagaagtatattttatctcctcctcgtctatcatgttaatactgataatgaggaggggatttttttatgaaaaaaggtacattgaaacagatgttggtaattacggacggtggttcgaatacaggtgaagatccggtagcaatggcagcactagctaaagaacaagggattagtgtaaacgttattggtgtgatggaagaggacacaattgatgagcaaagcacgaatgaaatagaaggcattgccatgtcgggcggtggcgttagccaaattgtttacgtgaaacagctgtctcaaactgttcaaatggttacaaggcaggcaatgacgcaaacacttcaaggtgttgtaaataaagaacttcagcaaattctaggttcctctaattcaagattagaagagttatctcctgagaagcgaggagaaatcatggaagttgttgatgagcttggcgaaacggttgacttagagattcttattttagttgacatgagcggaagcatgaaaaataagcttcctactgtaaaggagtcgctgttagatttatcgttaagcttgaatgctcgcatggggcataatcaattttcaatctttttatttcctgggaaaaagaaagatgtagagaagctaatggactggaatccaaaattagagtcgctttcaacgattttcccaaaactaacagcaggaggtattacgcctactggaccggctatcaaagaggctactcattatttcaccaaaaagcgctcattgagagggttgttaaaaaataatgaacaatacattgaagaatcaggtatgtaacctatctccgggaacagaaattcaagggaaatggcatcacgtccattataaaattcttgagaaattaggcgtgggagcaactggagttgtctacttggttcaattagtcaacggaacgctagcggcgttaaaaataagcttttccaacatgtccgttacagcagaagtgaatgtattaaaaaagttgtctcaagtcaaagacaaagtgctaggaccgtgcttgctggatgtagatgattggagctatggttctcacgctctttctttctatgtaatggagtatgtgaaagggcagcctctcctttcttttatctcaacaagagggacagaatggctgcaagtatttgcaagtcagctcttaacagacttagaaaaccttcatgaagaagggtgggtatttggcgatttaaaaccagaaaacctggtcgtaacatctaaccctgtaaaagttcgatggattgacgttgggggaacaactctgcaagggcggtcaataaaagaatttaccgacttttatgatcgagcgcactgggggcttggctcccgaaaagcagaaccgacctatgatttgtttgccgtatccatggttttgattcacgcagcttatggcaagcgaattaataaaacagacaaaccggctgaacaattaaaacaatttatattaacaacaaagcagttggaacctttcggagacgttttgtatcaagcggttacgggaaagtataagtcagctaaagaaatgaaaacagaggtgttatcgatcgaaaaaagaagaggggcaaaaagtaaaggaacaaagcctcaaaacgttcgtcaaccgtccgcccctcgtgttaaagtaaagaagaagcgttctcacgtgttagagacgctactactttgtacgtctgtaatgttgatttatattttgtatctatttattcaagtgctataaagtttggagaaattgtgaaactttccttatagtcattcgtataaagtaaattaatgatacattattgcgtgtacattataaggatgagtcattcctatggaaaagcaagtgaacaattttatgacaaaacatcagttattatccgcaggctctacggtggttgtaggtatttctggtggtcctgattctttggcactgctgcatttcttatggagtctgaaagagcaaaaatctctcacgattattgctgctcatgttgatcatatgttccggggcaaagagtcacagcaggatatggaatatgtgcagaactactgcaaacaattgaatattaaatgtgaggcgaagcagattgatgttactgcctatcagaaggaaagaaagttatcttctcaagtagcagccagagaatgccgctatacattttttactcatgttatgaagaagcacaaagcaaatcttcttgcattaggacatcacggagatgatcagattgaaacgatgttaatgcgaatggttcgaggcagtacgatgaatggatacgcagggatgcagcccaagcggccatatggggatggatttattattaggccgttcctagccgtaacgaaagaagaaatcaatcgctactgtaagctacatgggcttacccctcggattgacccgagtaatgagaaagattcgtacacgagaaatcggtttcgtcattacgttttgccatttttaaagcaagaaaacgccgctgtacatgaaaaatttcaacaatttagcgagaacttgcatgaagatcaagcatacttagaggaattaacgaccgatgtgatgaataaagtaatgagaaagaaattgcaaaatgaaattctcattgatagagattgttttctaaggatacgcaagcctttacaaaggcgtggtattcaactaatattaaactatctctataaagaaattcctccaaccctttcctcagcgcatgttgacatgttagtaggattttgtgaaagtaaaaaaccgtctggtacgcttgactttccaaatggtttgcgcattatccgatcttacaacgactgtcttttcacctttaatgaggggaacatcgagccatatgaatttattgttccgattccaggggtcgtcgagcttccaaatggtcaccagcttatttgtgaaatacataataaagtcgaagatataaaaggaaacgatgtttttcttttagatgaagctcacgatttacaatcattaaaggtaaggacacgaaaaaatggcgataaaatgcgagtaaagggcatgaagggacataaaaaagtaaaggatatttttatcgatgaaaaaatccctttacaattcagagatcattggccggtagtggaagatagccaaggaactattttgtggctacctggtttgaaaaaatctgcttatgaactgcatacacataagtccagatatgttattttatactataagtagcgaaaacttctaggaggcaagtaaggaatgaagcaggatattcaagaaattttgatttcagaagaagaaatacaacagaaagtaaaagaattgggtaagctattatctgaggaatacgctgaccgttttcctttggtaatcggtgtattgaaaggcgctatgccttttatgtctgatctaattaagcgtgttgatacatatttagaaatggattttatggatgtatcaagttatggcaatgcgatggtttcttctggtgaagtaaaaatcctaaaagatttagatacatcagttgaaggtcgagacattcttatcttagaggatattatcgacagcggcttaacgcttagctatcttgtagagttattcaagtaccgtaaagctaagtcaattaagattgtcacactcttagacaaaccaacaggtcgtaaagcatctattaaagcagattacgttggatttgaagtacctgatgcattcgtagtagggtatggattagattatcaagaaaaatatcgtaacctgccgtatattggggttcttaaaccgcaagtatacagcaattaataagcacatatccaagtgcaatttattggataggataaatgttctatgttagtattgaatacagtatttgtttatcgtgggaggaggtaagaaatgaatcggatcttccgtaataccatcttttatttacttatatttttagtcattattggcgtggtaagcttctttagtggctctaatcaaaaagcagaaccaatgagatacgatacatttgttcaacacttagacaaaggtgatgtgaaatcactctctatgaagcctgaaagaggcgtgtatgttgtgcaagggaagttagattcttataaaaaggatcaaacgttccaaacttacatcgtagatggtgacaaagcacttgatcgtattgacgctgcttcagaaaataatcaagtagaagttgattttaaacctgctgatgaaacaagcggctgggtaacgttctttacgtcaatcattccgtttgttattattttcatcctattcttcttcttactgaaccaagctcaaggtggcggaagccgcgttatgaactttggtaaaagtaaggctaagctttacagtgaagaaaagaaaaaggttaaatttaaagacgtagctggtgcagacgaagaaaagcaagaacttgtggaagttgttgagttcttaaaagatcctcgtaaattcgcagagctaggtgcaagaattccgaagggtgtcttacttgtgggacctcctggtactggtaaaacattattagcaagagctgttgctggtgaagcaggcgttcctttcttctctatcagtggttcagactttgttgaaatgtttgttggggttggtgcttctcgtgttcgtgatttattcgaaaatgcgaagaagaatgctccatgtattatctttattgatgaaatcgatgctgtaggtcgtcaacgtggcgcaggtcttggtggcggacacgatgagcgtgaacaaacattgaaccaattgcttgttgagatggatggttttggtgctaacgaaggtatcattatcattgcagcaacaaaccgcccggatatcttagatccagcgttattacgtccaggccgcttcgaccgtcaaattacggtagatcgtccagatgtaaatggccgtgaagcagtgcttaaagtacatgctcgcaataagcctttagatgaatcagtaaacttaaaagcaattgctatgcgtacgccaggtttctcaggtgcagatctcgaaaacttgttaaacgaagctgccttagtagctgctagacaggacaaaaagaaaattgaaatggttgacattgacgaagcaacagaccgcgtaattgcaggtccagctaagaaaagtcgagttatttctaaaaaagaacgcaatattgttgcttatcatgaagcaggacatacaattatcggtgtcgtattagacgaagctgatatggtacataaagtaaccattgttccacgtgggcaagctggtggatatgctgttatgttaccaaaagaagatcgctactttatgacgaagccagagctgctggataaaattgttggattgcttggtggtcgcgtagctgaggaaattattttcggcgaagtgagtacaggtgctcacaatgacttccagcgtgcaacaagcatcgctcgtaaaatggtaacagaatacggtatgagtgaaaagttaggaccaatgcaattcggtcagtcacaacaaggccaagtattcttaggtcgtgatttacacagtgaacaaaactacagtgatgcgattgctcatgaaattgataatgaaatccaacgtttcattaaagaaagctatgagcgtgctaagcagatcttaacggaaaaccgtgacaagttagagcttgtagctcaaacattgttagaagtagaaacgttagacgctgagcaaatcaaccacttagtagatcatggaactcttccagatcgttctagtcacgtaacagatgaagatgttaaagtaaacatccaaacaaagacagacgatgaagagccaaaagcataagacaataaaaatcagtggagatattctccactgattttttaatgggcaaaagttaggtttggtaaaaggttttcgtatatatggtggataagtaggatatccactagagaatcgtgtcattatattcctattttatctagaatatacacgtctatttaccagttatggtatgatggtttcagtgtgaatactgaatttatataaagtggtgattgaaatgatttttgtattagatgttggaaatacgaatacggtattaggtgtatacgatggagatgaattaaagtatcactggcgtgtagaaacaagccgtaataaaacagaagacgagtatggcatgacaatcaaagccttgcttgagcacgttagtttatcttttaaagatattcatggtattattatttcctctgttgttcctcctattatgtttgcattggagagaatgtgtcaaaagtattttcatttaaagccgcttgttgtgggtcctggaattaagacgggtttaaatattaaatatgaaaatccgcgtgaagtgggagcagaccgtattgtaaatgctgttgctggaattcagctatacggaagccctttaattatcgttgattttggtaccgcaaccacgtattgctatattgatgaaaataagcaatatatgggtggtgcgattgcccctggtattaatatttcgacagaagctctttattcaagagcatctaagcttccgcgaattgaaattgcgcgaccaaatagcattgtggggaaaaatacagtatctgcgatgcaagcaggtattttatatggatatgttggacaagtagaaggaattgtagcaagaatgaaagagcaagcaacagtaaatcctaaagttattgctactggaggactcgcaacattgattgctaaagagtcggatattattgatattgtggatccatttttgactttaaaaggattgcaaataatttatacaaaaaatatggagtaagaggtgtatattatgggtgactatttagtaaaagcactagcttacaatagtcaagttcgcgcttatgcagtaaaaacaacggatacagttggagaagcgcagcgccgtcactatacatggcctacagcctctgcagcattgggacgttcaatgactgcgggagtcatgatgggggctatgctaaagggtgagcaaaagctaacaattaaaattgaaggccgcggcccaattggcgttattttagtagacagcaatgctaaaggggaagtgcgtggatatgtaacgaatccacaaacgcacttcgatttaaatcagcatgggaaattagatgtagcacgtgctgtaggtacagagggcacactaagtgtcgtaaaagatatcggaatgcgtgatcaatttaacggacaagtacctattgtatcgggagaattaggagaggatttcacgtattattttgtgacatctgaacaagtcccatcttcagtaggtgtaggtgtacttgttaaccctgataacacgatcttagctgcgggcggatttatcattcagcttctgccaggaacagatgataaaacgattacagctattgaacaacgattacagacgattgagccaatttcaaaactgattcaaaaaggtctttctcctgaggaaatcttagaagaagttcttggaaaagaaaatgtgaagtttctggagacaatgcctgtagagttcaaatgtcagtgctcagaagaaagaattgccaatgctattatcagcttaggacaagaagagattcaatcgatgattgaggaagacggccaagctgaagcccagtgtcatttctgtaatgagacatatcgttttgataaaaagcagcttgaagaaatgaaagaacaagcaatctaaatgaaataaaagattcttaaaaggcgtcattttataaatgagcgcctttttttatagatattaagttctatttctgtatatattgatctaaaaatataacaaaattaggtaaatgaaaagacaaaatgattgacaatttagaaaacatctgataaattgtatacaaaatcaataaaattagttggtattaggagtggtcatatggcacgtattgcaaattcaattacagagttaattggtcaaacaccaatcgtaaaactaaaccgtctagttgaagaagatatggcggatgtatatttaaaattagaatttatgaacccaggaagcagcgtaaaagatcgtatcgcattagcaatgattgaagatgcggaagcaaaaggtgtgttaaaacctggcgacacaatcattgaaccaacaagtggtaacacaggaattggcttagcaatggtagctgcagcaaaaggataccgtgctattttaacaatgcctgaaacgatgagtattgagcgtcgtaatctgcttcgtgcgtacggtgcagagttagtgttaacaccaggtccagaaggaatgaaaggggcggttaataaagcaactgagcttgcaaaagagcacggctactttattcctcagcagttccaaaacgaggcgaacccagaagtgcaccgtcaaacaacggctaaagaaattatcgagcagtttggcgatcagctagatggatttgtggcaggtataggtactggcggtactattacaggtgctggtgaagtgttaaaagaaaagtacccaaatatcaaaatttatgcggtagagccagctgattctccgattttaagcggtggtcaaccaggacctcataaaattcaaggaattggtgcaaactttgttccggatacgcttaacacggaagtatatgacgaagttgtcgctgttcaaaacgaccaagcttttgaatatgcccgtaaagtagcaaaaacagaaggtgtactagtaggtatctcttctggggctgcgatttatgctgcgttaaaagctgcaaaacagcttggaaaaggtaaaaaagtgttagcgattattccaagtaacggtgagcgttacctaagtactccattgttccaattcgaggaacaaacacaagcataaaaacgataaaaaaacagcttctatatgaagctgttttttttcatctaagaatcatgtaaaatgaaagcaggtgatttatttttaggagagtgaacaaatgcagcaaagaatgacttggggcgaatctatttctatctctaaaaaccaatggttcaaaaaatatcaagagttgtcagaagaggaaccgaatcatatcctgcttgaaagcggtcgaggcggaaagtttcaaatgatgggattaaaacctgtagccattttgcgaggcgaacaaaacgagcttcatatcaaaacggatggccaagttactgttcaaaaaggtaatccgcttcatcttatgcgagactggatgaagaagtttgaagcagaggtgaatccagatcttcctccttttcaaggtggagcaattggctttattagctatgattatatccgctatgtagaaaccatacctgaccttgctgaagattcattgaaaacgccggacgtttatttccttattttcgatgacgtatttgtatacgatcaagaaaaggaaaagctctggattatcgttaatgacgaagcagattgtaaagagcagacacataagcgtattgatcaatacaaaaaggactggatggaggcaagtgctgaaggactctcatatgagcggattcatcgtgttgccgaaaagagtgaggtttcgatgtctgaagctgctttttcagatgccacaactcgcgtacatgagtacatcgggcaaggcgatgtgtttcaagtgaacttatctgttcgacagtctcaacggcttcaaactcatcctatgcatatctacgaacaggtacgaaaaatcaacccgtctccttacatgtcttatatgcagacagaagaatttcacattgtgagctgttcaccagaactattagtgaaaaaagccggtgatgaaatcagtacgagaccgattgcgggaacgcgctctcgaggtaaggatgatcaagaagaccaacagttagcggatgagcttattcataacgaaaaagagcgtgcagagcacgtgatgcttgttgacttggagcgtaatgatcttggtagagtaagcgaatatggtaccgtgcatgttgacgagtttatggttattgaaaaatattcacatgtcatgcatattgtgtctaatgtaaaaggcaagctcgcgcgcaacaaagattttgtagatatcgtagatgcggtctttcctggaggaacgattactggagcacctaaagttcgtacaatggaaatcattgaagaacttgaaccagttcgacgaggaatttatacaggatcgattggttggattgggtttaatggagatatggaattaaatattgcgattcgcactatgattattcaagacgaccaagcttatgtgcaggctggtgcgggcgttgtgattgattcaaatccgaaacacgaatacaaagaatcactgaaaaaagcaattgcactatggaaagcaaaagagcagagcgaaaatgagctgagtgagggtgagtaaagatgatattaatgattgataattatgattcttttacgtttaatttagtacagtatttaggtgagctagggcatgagcttcttgtaaaaagaaatgatgaaattacactttctgaaattgaagtgctaaatccagatttcttgatgatctccccgggaccatgcagtcctaacgaagcgggaatcagtctagaagccatcgagtattttgcaggtaagattccaatattcggcgtatgcttagggcatcagtcgattgggcaagcttttggagggaatgtgattcgtgcggataaattaatgcacggtaaaacatctgaaatgcatcatgatggccgtactatctttaaaggtcttgataatccgttcacggcaacgcgatatcattctttgattgtagaaaaaagttcactgccggattgctttgagatttcagcgtggacagcagaagatgaaattatggcgattcgccataaatcattacctattgaaggagtacagttccatcctgaatctatcatgacttcttacggtaaagaaatgctgaagaattttattgaaacttacgaaaaaaagcgagtgtaatgatatgtatatatacgtaaatggcgaagtaaagcctgcgtctgaagccactatttctccgtttgaccacggatatatgtacggcctagggctgtttgaaacgttacgagtttatgaaggtcatccatttttagtggaagaccatctggatcgactgcgtagcagcttacgtgaattaaatattgtatgggactactctacacaggacgtgttgggaatcattaatagtctgttaatgaaaaacaatgagagaaatgcgtatgttcgattaaatgtctcagcaggaaatggcggaattggcttgcaggtggaagaatacgacaagccatctacaatcgtatatatgaaatcaatgcctcatccatcgagcccccttgtaaaagaggggcttattcttgagacgaaacgaaatacgcctgaaggaaccatgaggttaaagtctcatcattatttaaataatgtactagctaagcgagaagttggttcagacttaaataaagagggtatctttttaacaaaagaagggttcttagccgaaggcattgtgtcaaatttattttttgtaaaagatgattgtgtatatacgccttctcttgaaacaggtatcttaaatggaattacgagacagtttatctttacgcttttacaaaagaaaaacatagaggttgtagaaggcttatttacggtagaacagctcttgaagggtgatgaagttttcgttacaaattccattcaagaaatcgtacctcttcgaagtataaaggataagcagttttcagtaggagaccatacgttgacagctcagttgcaaaaagagtatcgcacttacacgatgtcgctaatgagtcgacacgagctacatgtataaaagcgaaaggagaggctaaagatggataaaatttatgtgaatgatatgcgtttctatggatatcatggtgtatttccagaagaaaataaattagggcagcgttttcatgtggatttagctgtagaactggatttaaaacaagctggtactacggacaatttagaatactcggtgagctatgcagatttatatcaaacatgccaggaagttgtagagaagcgcacgttcaagttagttgaaacggtggccgaaacgattgcatctgaattgcttgctaattacgaactcgtgcaggcttgtacagtaaaggtatataagcccgatccgccaattcccggttattatcaatcggtagctattgaaattaaaaggagccgttgaatgacaacagaagcatatattgcattaggatcaaatattgaaaatcgaatggaacatttgaagtcaggagttactggcttgatgaaacactctgagattaaggtagtggccgtttcatctatttatgaaacggccccggtcgggtatacgaatcaagcaagctttttaaacatggtagtaaaaatacaaacaacgtattcgtcagagcaccttttagattgtttgcaagtcattgaacaagcggcaggtcgaaaaagagagattgtatggggacctagaacccttgatttagatatcttactttatagtaaggaaatcattcatacggatagactgagcgtccctcatccccgaatgtttgaacgagcgtttgtgatggttcctctaaacgaactagctccatctcttattctccctgtagcagaagaaaaagttgaaatcatcacaacacgtttatcggatttaaaagatgtaaaattatttcgaaagcaaacaaccggcatactagatatgttcgaaaataatagtaatgatttacataagtgaaattgaatcttattagttgattcatttttatattggcgtaaagtagagttcatagtgaaaaatttgagatttgggttcgcaggttggtggtttatcggtagcttgttagagaaatcgaagaaaaagagaagcgcagcaagaataaagcgatttgacatagagaaacgactgaacctataataattttaaagaaacgtagtagttgccagtaaacatgctggccttttttctgtttcggaaaacttaattatacgatggagatgagtaaacgatgagtcatgaagaattaaatgatcaatttctcgttcgtcgcgaaaaaatgagcaacctacgagatcaaggtattgatccgtttggtcaacgttttgaacgtacacatacatcacagcaattaattagtgagtatgacgagttaacaaaagaacagttagaagaaaatgaagtgcctgtgtcattagctggtcgtattatgacaaagcgtggaaaaggaaaagcaggtttcgctcacgttcaagatttaacaggacaaattcagctttatgtacgtaaagatgcaattggcgaagaacagtacgaaatcttcagcagcgtagatatcggtgacttggtaggggttgaaggtgttttattcaaaacaaaagttggcgaactttctattaaagtaaaagattttacgttactaacaaaagcgcttcgtccacttccagataaatatcatggtttaaaagatattgaacagcgctaccgtcaacgttacttagatttaattacaaacccagaaagtaaacaaacatttatctcaagaagccgcattattcaatcgatgcgccgttacttagataatcatggatatttagaagttgaaacaccgatgatgcattcaatcgcaggtggagcagcagctcgtccgtttgtgacacaccacaatgcgcttgatatggaactttatatgcgtattgcgattgaacttcatttaaaacgtttaatcgtaggtggattagaaaaagtatatgaaattggccgtgtattccgtaatgaaggtgtatctacacgtcacaatcctgaatttacaatgatcgaattgtacgaagcgtatgcggactacaaagatatcatggctttaacagagaacttaattgcacacattgcgcaagaagtacttggcacaacaaagattcagtatggcgatcaagaggtagatttaactccagagtggacaagacttcatatggtcgatgctattaaacaatatacgggcgtagacttctggggagagacatctgttgaagaagctcgtgctttagcgaaagaacacggagtagaaatcactgaacatatgcaatatggacatattgtaaatgaattctttgaacaaaaagtagaagagcagttaattcaaccaacgttcatttacggacatcctgtagaaatctctccattggctaagaaaaatgcggaagatccgcgttttactgaccgttttgagctgtttatcgttgcgcgtgaacacgcgaatgcatttacagagctaaatgatccaattgaccaacgtgagcgctttgaagctcagttgaaagagaaagaacaaggaaacgatgaagcacatgagatggatgatgacttcattgaggcattagaatatggtatgccacctacaggtggtctaggaatcggtattgaccgccttgttatgttactaacaaatgcaccgtcaatccgtgatgtactattattcccacatatgcgtcaacgctaaaaagaagatggctacggccatctttttttagttaataatattagaaaatttaaacttttaatttacctcttgtttttatgaaattgatttggtatatttatatctgttgctaacgcagacaagcgaaaacaacaaaaaaataaaaaagttgttgacattacgttaataacttgataagatagt

SEQ ID NO: 34 - DNA, 48682 bp, Priestia aryabhattai
  source 1..48682: mol_type = genomic DNA
ccggctgctgtggataaaatgcctaataaaaaggaccctaagcccattccagagtcaaaaaacacaaaaaacgtagccgtggagacacctcggcgatgaggagaagctttttttacagcaatggattgaaaacttgatgtaatcgttccaaagcctaatccaatcaatgctccagctaataaaaacacccagcttgttgtcgcttggctaagcaaaaagataccgatagctaaagataaaatggacggatataccacgctgttttctccgtattgatcaaaccattttcctgtaaaaggtctagaagccaacaggcacactgcatatacaacaaagaaaaagcttgaagcttgcgtaaagcccatttcttttgcataaatagacacaaacgaaataacacttgcatatgaaaaagctaccacaaggcctgcaacagaaataggcagcgagcggtattcaaaaaactccgcaagacctttggctggctgtatttcatttgttgcagaagaagctggttgaacctcaggtacacgaagtactagactacataatactgctaaaacagaagatacaaccgcaacggtaaagaccgctgtatgactcaaagtatttgttaacgttaagcctacaaacggacctactaccatcgctaagttcatgaacgtcgcatagtaccccatcccttctccttttctctgttctgggattacatttgcaacgattgctcctgtagcagttgtgctcattccaaaaccaataccatgaagcacacgcagcagcagcagcgcagataatgagtgaatgttcatatataaaatagaaccaattaaaaagataaagacacctattaatagtactttcttttgtcctaatgttgtcatccacttaccggctagcggtctgaacacaataccggacactaaaaaaattgtcacaattagccctaggctttgtttacttgcatgaagttcatccgttgcaaacaggggcaatgtgacagttaacatataaaaaatgacaaaaacaaaaaagctggtcagtgagaccgctaaaaaatcttttgtccataatttcgatttctgcatgagtttcctccttttatttgtttattcgtatcgatttattaacacaaactaaaacacagtctagtaataatatgtatacgaattatatcaactcaaactattataggatccatatatgtaagtgtcaacatgtatttatcgattttgatttccgtgcaagactttgctttccgcgggcgagcactgagcctcctcgtcgcatacgctcctgtggggtctcacctgcttcgcttttcacgcaggagtcttcgccttgcctccaatcaactgctagaaagaccaacacacatgaaacctacgtttaccacaaaaaaaaaccatgaatcaaacactttgattcatggttcgtttttcacttcgtctaatatttttttgtcctagcctcttttggaaccttcacttctttaaatgagaaataatttgatccgttacttcactagtagttgcgctgcctccaacatctggtgtaatgatgcccgattccgtcacttgttcaataacctctaacaaatgactgcctaattcttgttcaccaaaatgatccaacatcatttttgctgtccaaatctgtccgattgggtttgcaattccttttccgacaatatcaggagcagacccgtgtaccggttcaaacatcgaaggatattttccgttcacattaatatttgcagcaggagcaacgccaatacttcccataacagcagctccgatatctgttaaaatatctccaaataaattgcttgccacaattacatcaaaacgacttggatttgtaacgaaaaaagccgccagcgcatcgatgtgctgtgtgtctgtttcaatatgaagataactctttgcaacatcttgaaacacttcgtcccaaaacggcatggaatgaacaattccatttgacttcgttgcgcttgtaacttttgcttttcttttagaagctaattcaaaggcgtagcgcattgctcgttctgttccttttcgagaaaaaaccgcattttgaatagaaatttgatcttctccttgataaatccggcctcctacttcactgtattctccttcactattttcacgaacaacaattaaatcaaaatcttttgggttcgttagtggagatgcgatgccttttaacctcttggctggacgaatattaattacctgctgaaattctcgacgaatcttaatgagcagaccccatagcgacacgtgatctggcacaaggtttaaatttcctacagctcctaaaaaaattccgtcaaagtgttgaagctgctttagcccatcttccggcatcatctgtccgtacttcaaataataatcacagctccaaggaaattctgtaaatttaaattttaatcccccgtgaagatctgcaatcgtacgaaggactctaaccgcctccggcacaacttcttttcctattccatctcctggtatgttcgctatttttaacgttttcaccaaaaatccccctgcatcttttatgtaaaaaacctatcggtcgaccgtcgactgatattatctatttgattatacgtaaaaacaacactttcatcaagaaaattctgaatatattcattctcttcaaaaattcaaaattattatgactcttatgaacaagcgtattataattaggaaataaatgattataaataaacgaggtatatcaatgaacaattttgatttacataagccgttaccatactatcttcaattttatgaaaaaattaagcaaatgattgtgaacggtgaatataaaccgggccagcgaatcaatgaaacccagctagctaaagcatttggggttagccgctctcccataagagaagcaatgcgtttattagaaaaagacggccttttagttgcagatcaaaaaacaggctttattgtttattccctgtctcctgaagacgtagaagaaatttatcaaattcgtacggctttagagtctttagccattgagctgtgtattactcgcgcttctgatgaagagcttcttttcattgagcagctgttagacagaaccgctgaggaaataaaacaaggagccgaggattctcgacttattgagctaaatgaacattttcatcagctgattcttcaatacagtcataataaacatttaaaaaaacagctcgatagcgtaaatgtattgatttatttttgtcgagtgcttaattttaaaggtaaaggacgcgctgctgagattttagatgagcatcagcaagtgttcacctttatgaaaaaacgcagtttaaaagctgttgaacatatgcaaaaacatttacatcatgatcttgttcatttacaaaaacgattaaacaccaaaagagattgagacataactaaattcattcaatccaaagacgaacaaatgagatacataaaaaaatccgaacgatgaatcgagattctccatcaagaatctcagtttatcgttcggatctttcttcaacgaaaaaaattttgtcccagcctctttttttaaataggcaaaaacactccaggtgcttccccatgctcatcgtcatcgagccaccacttaaagccttcttgtgcaactaatttttgggcttcttcaggaccttgtgaacccgatggatattcataaagcggcagcatgtcagcctcaaatgcatctaatacaggctgcacccactgccaagatagctctacttctttccaatgagcaaaaaatgtagagtcaccgattaatgcgtcataaatgattcgttcatatgcttccggtacactttcttcttctcttgaaaacgtaatacgaaccggctcaataacaccattttttaatggatttttgctgttaagctgcaaagcgacgttttcgcttggactaatttcaataataaataagtttggtgctactttgtcataaggagtttcgtacagaccttttaaagaatctttaaattctacgacgatacgagttgatttttctttcattcgtttgcccgttcgaatataaaaaggaacgcctttccaaaatggattatcaatccataaacgcgctgccacaaacgtatcatttttagagtctgcttctacgccaggctcttctttgtatcctctaacagatttgtgatcgatttctccgcttccgtattgccctcgtacaacatcgcgagctacttctttcgcttgaattttcctcagtgactccattactttttgcttttcttctaaaatgttttctgagcaaattcgttttggaagatgcatagctgtcatcatgagaacctgcagcatatgattttgaatcatgtcgcgtatggcccccgtatgatcataataccctgcacgattttcaacaccgactgtttcacttgccgtaatttggacattcgcaatgtgtttgttattccacagcgattgcagcacggggttcgtaaattcaagcgcttctaaattttgcaccatcggtttacctaaataatgatcaattcgataaatttcttcttctttaaacgtactgcttagcttttcattaagctctcttgctgaaacaagatcatgtccaaacggcttttcaatcataagacgcttccagccgctggtttgatccaagccgcttttttttatatgcagagcaattacatcgaagtattcgggtgctacggacaaataaaacaaacgatttcctttacttccatgagttgtttcttgctcattcacaagttttagcagctgttcgtaatcttctgttttgcttgcgtctactgcttgataatgaaaaagggacaaaaaatcttcttcgttactttccattttccgtctcgaaaaatcgtttatagattgctttacacgctctttaaaatcctcatgagacatctgctcgtaccccgatccaataatagaaatagcatcagggagctttttgtctgtaaataaattataaagagcgggaaagatttttctttttgctaaatcacccgttgcgccaaataaaacaaaagttaaggactccactttttttcctcccgtcaggttgtatgtatgatggattttctcttctcctagcttacctctgtttatttgggaatatccttgtttcatcaaaaaggacgctcacaagtgcgagcgtcctcagttatttacattaaaatgtttgtcattccccacagcagcaaaaagctcagcagaatcgtcatgtttgaaacggtgccgacaaatttttgatcgtatttgaattctactgcataaggtaaaactgaccccgctactggtagaatgaagcaaactaagattgtataccggaacatatcttcaaatggaagcaggaaaaacagcgcaattcctacgccgagtccgattacgtagcggatacttaaaaacataataatttttttcaagtagcttttttggaacgaaaaatttaaatatacgcctaaaagcaaaagagaaagcggcatattagctttagagataatgcctgaaacgtctaatacatatgatggtaaatgaatgcctataatcgcaagaagacaaatgattacgtaggtaagaagcggcatcgattttaatactttgtataaaatctttttaaattcaatgtcaatatcatctcctgagtagtagctgccaatcacatagcataaaacaaaaataacaaaggcatttccgacatcaaacataccaaaatatttaagcccttcttttccccaaatgccttctactaacggataagcaaacattccaatattaaaccctggaatcatcatcgtcagcatgcctttcacttttctttcatcttttcgaaaaacaaaaattcctaccgcagctaacagcaagccatagacaattccaataactaatagtaaaataagcgatccatcaattttaatactgctgaatgtgacaataattaagcaaggcattgtaatattaaaaataattcttgctaaagcttccccgtctttttgctgaaggaggtttgttcgttttagtatgtatcctaatagaatgattgtaacggaatacaaaaactgactgttaaagctgctcatagacctactcccttgccctctaagataacgttttatagaaacgttcttcatatcttttatacttatttaatcgattgttttaccctgtcttttttaatccttttttcattataatataagcagcttaaaaagaaactagagaattggatgcagtttacctgtttgttagacaaaaacagcttagaaacaaatgaaaaaactttcctccaaactgattttaaaacaggacatttttcttttttatggaattcatttaaaaggtatgtagtatttttatgaggaggaagaaacgtgaaacgaaaaatgatagcgcttactttttctgctgctctttgtttttcagcttcaggatctcttgctgaagcttctaacaaaacagatgtaattccaaatgctgatcagtcggcagaaacctattttgacggagcgaatgggaattggctcaccactaaaaaccccgctcaatatcagcaggctacgctctatggcaatattgggcttactccttataactgggggaaacctgaagatggatcgggctggtatcgaattaatcagcccgctgaggtcaaaggaacgcaagtaaatggcatttttgaagacgctcagttcgtcatccgtgttcctgataactggaacggaaaacttgtggtagccggcattcctgccacgcgcaacgaaacgtccaccgatttattattcagcgattacgttcttaaaaaaggctatgcatttgcagccaccgataaaggaacgcaaggagaaagtgaccctaacgatccttttgctaaagtaaaaaatgcactcgctaacgatgacgacagcgtagcagaatggaatatgcgctatcgtcaactgacaaaagctgcccagaaatacttgactactcattattcagacaagctaatcaacccatccaatcgaaaaaatcctgcaagcgatttgattcgaaacgatcataaagtacccacgtatgcaattggcatttcaaacggcggatacgtagtcagatacgcacttgaacacgatgatccaaagcaaacaaaagagcctcgtttatttgatggaggcgtcgattgggaaggtgtattatggagtgcaaaagcgcccaatttaattagctcactaacacctgttgtaaacaacgcagaagaagcgctgtacggaagcggaaaagaacagaaaaaagctattaaacaaatgtataaagccggtcttccaaaaggatcagaaaaattgtggaattatcatgatcaagtgtactgggcggtcactttaaacatttaccgtgaccactttgatccaactgctcctggaagaacaaactggcacaactacttaaactttacttcatcaggtctacgcgaccgctcatgggactacatctttgaaaattatcgctatcaaacccgtccaaaaagcgtaaaagaaaatgtagcaaaagtagaaaatacaggtgatatcgatgtacctcttatcagtatggccggctctctcgattcacttatcttcccgtctattcacgcggagggctatgaaaaactcgttaaaaaagctggcaaggcaaatcttcatcgtctttataccgttaaaaacggaaatcacgttgacagcttagtatggaataaacaaacggatccaagtcaagagcttcagcccctgcttccatatgctcatcaatcttttgatttgttagtagactgggtagaaaataaaaaagctgcgcctgcaagtaaagatattaaagcacctcaaaataaccttaaagtaatcgacataaaatccgggcaagaagtagatcctcgctgaggttgagacataactaaatgaatccaacctaaagacaaacaaatgagatacatgagctggactgcttattacaccgcagttgatttccgtgcaaggcttcgctttccgcgggcggccgctgagcctcctcgtcgcttacgctcctgcggggcctcatctgttccgcttttcccgcaggagtcttcgccttgccctccaatcaactgctagaaggaacgaaatagataatactatgttcaccatcacaaaaaaacgaaccactaatcagacctgctgattaatggttcgtttttcacttgggctaaaatacttttctctcagcctcagtcttcataataatcaagatacaaatgacctgctgagtctgcttgtcctaaaaataccttgtcgactgcggcatctttcttttttagctgttctttgacccacgctacgctatatcccagctcatgaacggcttctttcattatatttccgtccatgataatcgtttgaggtaatcgtgtcgcctctccttttattaataaatcttctctcgtaacgttttgcttttctttttttaacagcacgcttaattcgccgttggtttcgagcatggcaaaagctacgtcttccacataaaagatgtcttttttccgaagctgctccatgagctcatctactgtatatttttctttttttacattttcctcaagaatttttccttctttaatgaggatcgttgttgtcccttccaccgcttttcgaaagcttatactttttaacgatacgtttgatacaaaaataagaaacgatgcccacactaaaattgcgactaccccgtgacttgcctgtaaatctacatccattgaaattgttcctgcaatatctccaattgtaatgccaacgatatattcaaaaaaagaaagtttggataactgttttttccctaacagctttgtgataaaaaacaagccaagtaaaatcagcactgaacgaagtaccacttctatccaatgattcaacgcatgcaccttctttactaaaattgatgtatcctttatcttgtacttatttttatgtatgaacacgttttttcatcttccattatttacatacctttcacgacaggttagagtagaaagaagtaggaagcaaatgggggttttatgatgaacgatgaagtgttaactgtatttaacgaccaacagaagcgcataggaacagcgtctcgcaaagaagttcatgaaaaaggctattggcacgaagcgtttcactgctggtttgtcagctgtgaaaatgatacagactatatttattttcaaattcgaagcgaacaaaaacaagattatcccggtgcgcttgatatcacagctgccggacatttgcttcatacagagaccgttcaaaatggagtaagagaaattcaagaagagctcggcgtcaacatttcatttaatgaattgctttctttagatgtatttaaatatgaagtatctcagccgcactatattgacaaagaattcgcacatgtatttttatactacagctctcaccctcttagtgcttttactttgcagcaagaagaagtatcaggacttgtaaaagcgcctttttctcacttttgcgaactgtggcttggaaatcaaacagaactgagcgttgaaggaataacaaataaaaaagagcctattcaccgtacagcacataaaagtgaatttgctcctcatcccgaagcttactataaaacgatcattgcattcattagccagcagctgcattccgcagaaaaagcttagaattctaaactttttctgctgaaaaaatcatatatgttgcactgccaagcgcaacaagcttgccgctgctgtcttcaattttcacttctccaacagcaagcgttttgccgcggtgagacagtgtggatttagcaactaaataatcgcctatacccggccttgtgtaatttacttttaattcaactgtactggcactttcagcctcagaaagagaagaccgcacagctgaaccaaccgctgcgtcgataagcgtggcaataacgcctccatgaaccgttcctcttccttgcagaagctgcggctgaatcgtgatttttaactccgcatatcctttttcaagcagcttttcttcaatgccaatataatcccaaaacggaatcatccctttactcgttcgtttcatcaatctcatcctttgcataaataaactatgtaagaacttctagaaaagctggagaaatcctgtttcttcacatgcaaaaagcgcttgctctttagcaaacgctttttattccactatttttcaaataaaaactgcactttgttttctttccattctaacttagcattaaaggttttatcaccttttttaaaaccttcaatcaaatctgtctgtccttcgcttaacagcttttttaaattagcctgcgtaactgttttacctaaaatctttttcgatacggtaaacgtgcattttgtttttgcatagtttgagcatccgtaaaatgagcctttatccactacttttccatcgcaaagcttacacgaaccaaacgatttggaagaaaagcttttacctttgcccttgccttttcgctgaatggattcagtgtcgtatccgctgaagttccacttactttctgcttcgacagcgtcttcgataattttagctgacagcttttttgtttgttccataaaagcagcggccgatgctgttccttctccaatttcagctaaacgctgctcccacttagccgtcatttctggagaagctaaaattttatcgccaatcgcgtcaatcaatacctttcctttatcagtcgcaaatacttggttttttttcacatcaatatatttacggtctttaagcattgtaatgattcccgcacgcgtagcttcagtccctaacccttccgattttgctaaaattttctccagctcatcattatccaaatgcttgcctgctgtcttcatcagtgtaatcaactgaccttctgtgtagcgttttggaggctgtgttttaccttcttttacgtctactttaatagcttttccttcttccccttcttggacattcggaagaataacgtcgtcatctttctcattttgaaaaattactttgcgccagccttcttggatttgctgctttccttttgaaataaaagctgctcgcttttccactagtgtcgtaatcgttgtatagtcgaaaatcgctttttcatagtgtgccgcaattagacgtcttacgactaagtcgtaaattttctgttcgtctcctgacagtttgctcgggtccttcacttgttccgttggaataatcgcatagtgatcgctcactttttttgcatttacatagcgtttatttcctagaattgaagagtaaggaagcggaaataaatgttcgtattcagaaaaagcactcagcttttctaaaatctcaggaaacgtttctgcttcaccttctgttacgtagtttgagtctgatcgtggataagaaacaattcctttctgatacagcccttgcagcacatcaagcgtttttttaggagaaaacttaaacgctttattcgccgttgcttgaagtgatgataagttaaataatagcggcggctggaactcttttcgctccgttacgagttcatgaacttccgcgtcttttccttcgcaaaactgagcaattttataggccatttctttttctttaagacgcgattctccgtcttgatgccatttaccttcgtacttctttccttcaatatcaaacttagcaagcacttcccaaaaaggctctgatttaaagttatcaatttctttttcacgcttcacgatcaaagcaagagttggcgtctgaactcgtcctgctgaaaaaacatctgacatgccatgcttttttaacaaaatgctatacacccgtgaagcattcatcccaacgacccaatctgcacatgctcttgtatatgcttcataataaaggttacgcgtatcgctttcgtcttttaactgttgaaacccatcataaatagcttttggcgttaaagaagaaatccacaatcgcttcatcggcttatgcacacctgacagctgaatgatattacgaacgattaattccccttcacgccccgcatctcccgcatgtataatttctgtgaccgtgggctttttaagcagcttttttaccacttgaaactgcttcgcttttgagcgcgtcacttcatattgaaaacggtctggaatcatcggcagcgtgtcaattgaccactttttccactccggcttataatcttccggactcacaagctgacataaatgcccgactgcccacgttacatatgctccgtctgtaaacacttcattcggtggaatctctaaatagccctcgtgacgcttcggcttaaactgtgaagctagcgtcgatccttgatccggcttttctgcaataattaacttcatgtatctaatcaccttacatttcaaatttccatgtgaaacttattcagttttattattttatcatagaaagagctgttggagtatgaatgaggagaaaagtagtttagatgagggatacctatctcattttaaaaacgtgtcgctatccgttataccttttcaataaaaaagctgtagatcattttctacagcttcgatacacatctgaatttttctggcaacagccattatcatatcgactaaaacaaatctcctttaggacgtgctatgaaataatcaataaccaaatatacaaaccaataagcgtaataaacaatgtcggaatcgttaagataatacctgttttaagatacgttccccatgaaatcttcacgccttttgttgaaagaacatgaagccataaaagcgtcgctaaagacccaatcggggtaattttcggacctaaatccgatccaatgacgtttgcataaatcaatgcttccttgattgttccagctgcgtgtgttgcatcgattgctagtgcatcaatcataacggttggcatattgttcataatcgatgaaagaatagccgcagtgaatcccataccaattgttgctgcaaacagtccatgaccagccgttgctcggatcacgtcagccagaatttctgttaaaccagcattacgcaagccgtatacaacaacatacatgccgatagagaaaaagacaatcgcccatggagctccctgtaacactttttttgtatgaaccgcttggctttttttggccatcatcaaaaacagaatagcaataatacctgcaataatcgaaacagggacgctaaagaattctccaattaaatagcctagcactaacaaaaccaagacaattccagataaccgaaacatcttttcatctttgatggcatccactggcttctgcaaatctgctacattgtacttcttaggaattcttttgcggaaatacagatataagaccataatacttgcaaacagagaaaccaaatctggaacaatcatgcgtgatgcaaattcagaaaagctaataccaaagaagtcggctgatacgatatttactaagttactaacaactaggggcagcgacgttgtatctgcaataaatccacttgcgataataaacggaaaaaccattttatcgtcgaactttaatgcccgaaccatggctagtacaatgggtgttaaaatcaacgctgctccgtcattagcaaatagcgctgctacaacggctccaagaagagacacgtaaacaaacatacgcacgccgttccctcctgcagctctagccatatgaagcgctgcccattcaaagaaaccaatttcatctaaaattaaagaaataataataatagcaataaacgcaagagtcgcattccacacaatgctggttacctcaagaacgtcttgaaaatcaacaacgcctgccagtaaagcaagcatagcccccccgcaagccgaccagccgattgataaattcttcggctgccaaatgacaaaaattaatgttactaaaaaaatcaatgatgctagtacaactgatgccactttttaaacctccaattattcacaacaactaatacgcagtccttgtttttccagctcttttaaacgttcatcctgacttggtacagatttaagtatgcccagaacaaactcatagtactggctttctttattaagagaataaaaaacccattgcccttttcttctttccttcacaagttcaacatctcttaattttcgtaaatgctgactaattgacggttggctagcttgatagatatctacgaactcacacacacagcattcattgttctctattaatttcaccatcgaaagccttgttttatctcccaataattttaagatttgggctgccttttcaatactatctataggttttgtggtcattaatgaatacctcctactccctttcagttgatagataataatgtgcttatgtattaatgctcattactataattgatttctaaatgttttacaattttttagtaaactaaaagtgatttagtagttgtctaaggatttaaagaatttatttttccctactaatctaaacccaatctagcacacaatactataagtatattttctcgtaaaaacgctcctaatgtccttggacaaacatacatacttattttgtctattagcataaaatataaagaaaaataagcaaggatgatgataaaaaacattattcctattataacccgcaagatggtaaatattatgtagacaagccttactctcttagagacaataaagtatctccctctgcttcccctaaaatccctttgaaaaatacagccgacagagcttttaaaatccctgtattcctcagccacccttctatgcttaatgctacccaaacaaaatttcttaatcgtttaattgatgaaattgaacgtgctcttcttttccctcgtacactgcctgatacagagcaatatcctaataaaacgatcacaagcgttcgccgaatgatactctctagctatgagttgatcgcggtgaatatgcagcaagtcttcgccaattataccatgacgaatattcccggcggtacacctccgccaccatcatgggaaggtgccccttttttacaaatagagccaagcatgggttaccaacgagacctgcctttacttcttatcaaagaatcaggtgtcaatagtataggcgtctggaatccatcagtagttcctttctttattattgaatgggattctgcaaagccgcttgatgagttttttaaccgtgttgaatggaaagaaatatttcaaaactgggtggctcaagtgcgaaatggctactttattcaaacacagccttcctatcgatacggcccggatgatctatagaaatcacttcaaacgaagaacactttcgaaagctatttctataaaataagttggaatgcgaggtgaatataattgactttaattaatagtagtggggcatgcgtaggagttctatatcgagctaatgccggtgcatcatgcaaaaacgggtattgtgttcataatggaagattagtaggcggcgtcataagctcaaatgctggcaccttaacggttacaagaatcatcgataacacaaagttacagacctataatggtattcttctgagtcaccgagccgtaaacaaaacgacagggcaagtcacgcagcaatatttgtattttagaagaaatcaattggaaaaggtagaagtcacgccttatacgcaatatagtgaccctagctgtcaaagagagaatcattataatatccctgatgttatctatcctggtgaatgtgtaggaatcagatatcggataggagatgaatggcatataggaaatgggcgatatctatattggacaggccaagtgaatcactgtatatttgatgaacgtccgcaaagtacaaataggcaatttttacggcagatttggtatgcacattggatactcgatccaaaaaatgaacgaaatattatacaccaaaaaacttctcgaggacctggatctccaagagctgaacgtagaatttatgtgtttaaaaatctgcttcctggccttttcgtattatctatcagtgagaaaaatagagaataatccttcgttcaactataacttccagcctccatcaagtttttttcaacattccacaaatattgtgaatgcccatccaaatattactgactaccagttggatgggcattttcttataatttttctattttttatttgtacatatggttcgcttttctcttttttgtaagaaaatagaggcactaatccacgaagtaattggaataataatggctacaccaatgcctccgcttaagatagaaatgacttctgcacaaaaggtttttgaattgataatatctccaaacgaatacgacaatctcttaaaccatataattaaagttaaatatccccctacaaatgcaaaatacagtgtattggttgtggtgcctaaaatatctcttccgattttcagtcctgaattgaagagattttttttagttacagacggatcatgaacaaataattcattcatagaagatgaaatagatagcgaaatatcaatgatcgctcctatggctcccataataattgtacaaatggctattttagcaaagtcaattccaacgtaaagtgaaaaagcgttaatttcttcttcttgttcttctccaaacccttgaatcatggcatgatgttcaatgataaaaataaagagtactaaaacggctaaggtaataatcgttgaaacaaacgcagcaatcgttttatgattgaatttattaatataaaataaattaatgcagctaatgattgtacaagcgattaacgtaacaataatcgtattttttatagacagcataaagagaatggttagaaaaataacgccaaaattcaagaacaaagcaaggaaagatctaacccctttttttccgcccacaatactcatcagaataaataaaataagagcaagcaataataaaacgttcactttctgttccccttcctaaaaataaaaagaatcgaaagatagagtgtaattggaatcgttagcacaatgccaatactgccagtaagagcacggattaactctaacgagaaattcatcgaaaacgtgtatcctaaaggagagccgttttttaaataaagaagaaccattggaattgttccacttatatatgaaaaaaataaaatattcgtcatggctcccatgatgtctccgccaatttccttgcccgattttagtaagtctttgtgcgctatctctttattcttttcatatagttcatagacagaagaagtaatcgtaatagctacatccatgacagctcctaaagatccaattagtacctcactcataaatattttttgaggaggaatcgtcacaaactccattccttcataatgaagaccattagaatctgttagctgcatgacgatgtatgcaattaacagagaaacaaacgtacctattaaagttgaaataattgctacatgcgttttttcttgattaccgcttactaataacaaagaaataaccgtaaaaagaacgacagctacaatacatacagctagcaagctcacattccctagtgctaaatatacattgagggccccgattaaaaggacaatattaataaataagctaatgattgaataaaaaccttgcttccttccaatagccagcaaaattaatataaataaacccgcgacagcggtaacctgcttgtcccgctttactccttcaatcgtcccatttagagcatgctgtgaattcttttctaaggagacaaaaagatctgttccgacagtgtacttttgatcataagcacctgaatatgagtacgtgttctctaaatgaataagcttccctttgtattttccgttcatgattttagcaacaattttttgagaatatacggtatctttgttgtgatttaaatcagtagatttattttgttctacaacattcgtcttcactacctccgctatcggttttttataaagcgaataattgtggtttgttactattagcgctatacataaacagcaaattcctagtatatagagaaagatttgtttacgagataatttattagacttttgcttcgaaaaaagattccttatatgctgggaatacagaggtgacatcacataattcctttctggttattatttgaacgcagggcttttgaacatgaagagactgcaaagagatctaaattctttgcagtcttttcattcgtttatcgtgagcgctatacagcaagacatactgcaggtacacaagacgctcaaacctactgttttttcattccgtactgtaccagagaaaaatgaaattatagtgaaaacatagaacgatttatccaattcactaattttttatgacgatcttatataattataggagtatacaagcaaatagaaatggaccattccggattaagtactataaggagtatcacattcacaacatatgtataaatgacgattaaaaaatgccttcataatcactcttttgagtgatttactacttctcttacagaatgctaaaatttaaaggaatcattccgtaggtattttacttgaacaagaacagctttttctccccgcagctgttcttgttattttttaataaaaatgaaaaaagcagcgtgctggacattccacacgctgctttttgcgatcacaggactactctgcgggtcgaggtcctgcttctcgtcctgagttctctaccgttaatattggccgaacggtgatatcttcatttacacgaatttgacatgacaagcgcaagtgatcttcaattgaactttctgagtatgcatttttctctacgtgtgttaaatcacaatattcaccttcaagcacttctaccctgcaagtcgtgcatttagctttcccgccgcatcgatgaagaatatttataccgttgtcttcgagtgccaagacaagcttttttccttttgccacttcaaaacttccgtatcctaaaacggttactcttggcatgtatctccctctttccctctactgtgtacaagcgatttaaattacactatatgcagtttctttttattgcatgcctaaatccaattaagaagaccatcattttgtaatatggcaactaaaacgacaatcccaagtataataacaggtatcagtgcttttaaaatttgatacttagataattctatacgttgaggctcctttaacaaatgactttgatttaactcagtattgttttcactttctttatgattcatgttcctctgcctttctattttttatagtgcggttcatatctacttctgctgacatcacaaaaatagacacagaatttcttcataaaaaccatcttaacctttttaagaacatgctatactaacaattctattttaaaacaagtcccttcatatgtttcaaacaaattcatcttgtttctccttttaatagcgtcagatcagaagactagactttttcacatcactaagtgcatgggcaaggtcgttatttataatcaaaagtaaaaccccataacgagtcatgggattttacttcgtacgttggttttttggaattttaatttgtttaatatctcccagcacataaatatagaaaattaagcctaacaacaatacaattcctgctacaataaagcttagattaaaagaaccagttttatctaatagatatcccgttaaagctgtagctataattccaccaaacaaattattagctaaattaacaatagaactgagaagagaaatagagcctgcaggcgcaatttcagcagaaattgaccagccgattggtgccgttgcagatatacctgccagtccaatcgagatacaaatcatcgctactacaacactattagttaaaatagagcctaaaaaaacaaaccctaagcataatcctacaacaatgatcgtgcgatatactttttgactgttatatcctttttttatgaggtaatcaacaagccaaccgccaactaaaatgccagcaaatgtagcaattagccaaggtactgccgtaagcagacccgatgacatgatatccataccgtatttttcttttaaaaaagttggcagccacgttaacagtaaattaaacgtatatccatagcctgtaaacccaatcattagcccccaaacttttcgattcgtaaataatacttttaaggtatgtaaaaattttgatgtttgttcatcgttcgcatttaaattattttcttgaatatacttcaactcatcatctgatatgcgtctgtgcttttctggtttttcgtaataaaaccaaaacagcagcgtaaacagcacgtttataattccaatggataaaaatgctgtgcgccaatcaaatttagtgatgagaaacgctacaagaggcgcgccaagtacatttgaaaatttggccgctgaatcaaacaaagaatttggtaagcttctttcgtttggaggaaaccatagagacgtagcttttgacgctgctggaaaagctgaagcactcattattcctattaaaaaccggacgatatagagaagaagttttccttgcaaaaatgccatcgacatcgttaataaactccaaatcaccatacccactcttgttacccatgctactccgaaccgatcaagcaagcttccggcaggtatttgcatgatcgtataagaatacgtataaatagaaaagacaattccgagctctgttcccgttaagtgaaatgcatcttgtattgcaggagcggccactgacaccgctacacgatcaaaataatttaaaataatcatactgcttaacaaagatgaaatgaaccatcgtgtgcgtcctgttcgctttactgtatgttcactcatagctagctcctttcatcagtagtttgttcgttttattaccgtagcattctacttaataccacaacttcttttgaaagaaacatgcgttttcttcatccatcatgtaagaaatccctcatgataaaacataaaacaagaagtaaacaaaaagagattgcgtcataactaaatcaatccaaactatagacaaacagataggggaaagaagatcttatgaaccactggttataccgctagaagccatcacctacatgaaacctgcgttcaccataacaatgaaaaaatccgaacgagttggattctcaatcaagaatctcgattcatcgttcggatcttcctttacctaaaatacttttgtaccagcctcttttttcgctaacagtctatttggctgaaagttcactttcggttacccacttgtgattttttactttctctccgcctgtagtcggtgcgtagtctaccatgtataccgttgttttttcggctgaatcaatcgttgcttttgcccctttcatacctttcatatgatctgcttcaagcgttacctcgctacctggctttaactgctcgttacccgcatcttttatttcttcttgaataacccacttatgatttttcactttttttccgccagtctttggcgtatacgaaacggtataggccgtggtgtcgtaagcaccaacaatcgttgcttcagccccgttcatgcctttcatatgatctgcttttataacggctttatctccaactttatatgttggattctcagtttgctttaatccttttggaacctctcttgaactagagtgattcatctctgagtgatcgtgcatggattcgtttttgttagctgaaggcttttcatgactagagtcgtttccgcatccgcttagtccaataatgacagatgcaccaagaataaatagctgttttttcataacagtccctcttttccacataataaattttaaaataaaaatcatttaatcactagaaacaacttatctttgcctgctcttcttcttttctttattgtagccagactttgtgcagattttgtgaagatgaaggtaattgggtacgaaaaattcctgtgcctaaaaaaggccttcgtatgaaacacttaccacaaggaaaaagtataaaaataaaaggaggaaagaaacatgctaaaaatacgctttgctctatcctcactcttacttacgtttagcttggtgacgggagccccctttgcttccgcacactccacgctctcatctagcgtacaaaagatagaagtaacgtccattaaaatgaaaacgctcaaaacatttatcgatgaacaagatatgaatgcattcaccaatagtataaaaaaggcacagcatatgaaaattctcttagatgaagaatctgctgggagcattgattgcaaaatgaccattacctatggagatggttctagccgtcattatttcatttggattatggatgatggacgtgatgtattaattgctcagcaaaagcatccagaagaccttcatcttaaagggtatgaattgaatcaaaaaaattccttgcacctaacaaagctgctaaagaatattctttagcagctttgcttttagatcactttcaccgagaatggctcgatgactctaatattttttagtttatattgcccacatagcatatactgctatgactgcgagcacgtacaaaatagctgagacgatccactttttcatatcttatagcctcactctctgcaatcgcagtgcatttaatacaaccgatacagaactaaaggccatcgcggctccagcgacccaaggggctaacagcccaactgctgcaattggaataccaagcgtgttgtaacccattgcccagaataaattttgcttaatattagaaatcgtttttctactcatttcaatcgcatctgcaatgctcatcaagtctcctcgcatcagcgtaatatcagcggcttccatcgctacatccgttcctgttccgatggccattccaatatcagctagcgcaagtgcaggcgcatcattaataccgtctcccaccattgcgacttttttaccttgctgctgaagctttttcacttcttctgctttgccttctggcaacacttctgctataacgtactcaatacccgcttgcatcgcaatagcctgagctgtttgacgattatcacctgtaatcatcatcacttctaagcccatttcttttaacctggaaactgcttctttagaagtcgctttgatggtatctgcaacagcaagcatgccggcatattttccgtcaagagcaacgagcatagccgtttttccttctcgttctaaatttgtcatttcttctaaggctgtatcaatattcactttatgttggttcataagctttcttgttcccactaacagctctcgctcttgtacagttgcttttactccataccctggaatagcttcaaaagataacggatcttgaatctttatacctttattttttatacctgctacgagtgcttgagcgagagggtgctccgacaaacgctcagccgatgcaactaactgtaatagctcattttcttcgtagccttgtgcaatacgtacatcggttaactcgggagttccatttgtaacagttcccgttttatctaaaagaatcgtatcgattttatgcgttgcttctaaatgctcgccgcctttaaacaaaataccaaattctgctgcgcggcccgaccccgccataatggaagttggagtagctaagcctaacgcgcatggacatgcaatcactagtacggcaataagcttttctaaagccggtgcaaattcgccaggcgcaatccaaatataccaaacaaagaaagtaagaagagcaattccaactacaattggcacgaatatacctgaaatatagtcagctaatcgctgaataggcgctttagacccctgcgcttcttctactactttaataatttgcgcaagcgccgtctccctgccaacgtttgtagcttttatttttagaaaaccatttttattaagtgtagacccaattactttatctccaatgtttttatctaccggtacgctttcacctgtcagcatggactcatctaaggccgattgcccttcaataatctctccgtctacaggtactttttcaccaggtttaataaaaataacttcgcctttttgcacttcttccactggaatttcaacttccgctccgtctcttattacaacggccgttttagcctgtaagcccatcatctttttaattgcttctgaagaacggcctttggcatttgcttcaaataattttcctaaaagaataagcgtaatcaatatagcactcgtttcatagtaaagttgagctgtatgagcaggtgagccaagcgatttaagagaagagtatagactgtagaaataagctgcgcttgtacctagtgctactaaaacatccatattggcgcttttgttacgcagagctttaaatgcgcctacataaaattgcttccctaccacgaattgaacaggcgtagctaaagcgagctgaacccatggattcatcagcatatgaggtaaaggaataaacgatgtaaacgtaaaatggctaaccattgcccataataacggtacgcttaaaataaatgcaaaccaaaactttcctttttgtttactgagttctttttctcggtggctttgctcttcttctctttcttccgactttagctttgctccgtatccaagcttttcaactcgctgcgttatatcttgcggagctatttgagaagggctgtattcgacagaagccgtttctaaagcaaggttaacacttgcctttgtcacgccttctaatttgtttaaccctttttcaatacgagtcgaacaagcggcgcacgtcatgcccgtaatagcaaactccgctttttcacttacaactccgtacccaagctttttaattttttcttcaaaggcctgtggacttgttttagacggatcaaatatgacagtagatctttctaaagccaaattcacgtttgcttctgttacaccttctattttttttaatcctttttcaattcggttagaacacgctgcacatgtcatacccgtaatttgcaaggtggcttctttttgtttatcactcatcacgtttcccctcctgttatatacccacaaggggtatatatttttcctaaatcaagcgtgcgaaggtattcacacgcgatgctgtttatgctacgtcataaccttggtcatcaatagcttctttaatatcttcaatcgttacttgactaggatcaaatgcaactgttacttttgcgtcttctaagcttacttctacgcttttaacgccattaagttcgcctacgccaccttcaacagctttgacacaatgaccgcaagacattccttgtactgataatgttacgttttccatttctagcatctcctttatttcattaatcgtttaatggttgttaataattcatctactacttcttcatcaccatcttgcacacgttctacaatgcaatgcttcaagtgaccttcaagcaaaattttacttacactatttaaagcagactgcgcagctgcgatttgagtaatcacgtcgtcacaatacgtatctttttcaattaatcctttaattcctcgaatttgtccttcaattcgatttaatcggcttgttagattttttttcacttctggagaatggtgactttttctttcactatttatcgtacaacatttttcttcactattcatgtgattcgcttcgaccatctaacatcctcccttcatgacttcatcatactatacccccctaccctatgtaaagagaaaaggtggcttattttatcttttcaccaatttcgatagctatgctcatatcattttcaactaacatcaacccacttatagcctattccccatacggtttgcaggtattcgtctacagaaaaacccgcttttctaagcttatccctaacatttcgcacatgggagtcaatagtacgatctccaatctccgcctcatatccccacactaacacaagcaagtcgtcccggctgaacacacgatttaaatgctgaagaagtaaccccactaattcaaactctttaggcgtcacttgaatgtgctgatttttatattgtaatacgtggtcttccttgttccatactaaccctttataggtgatttcattcttttcttttaaggaacgtctaagaaccgcactgatgcgtgcaaccaattcttcttcgctaaacggtttagtaatatagtcgtctgcccctatatttaatccttttactacatctaacgtttggctgcgggctgtgagcataatgaccggtagatcagacattttccttattttttggcaaatctcccacccatcttcgcttggcatcataatatctaataacatcaaatctgctttgttaccttcataaagatagcgcagcgcttctgtgcctttttcaaattttatacatgtaaatccgtttggcagcagataaagttctagtaaatccagcatccttgcttcatcatctactaataaaatagtggtcatcctatccatcctctcttaatacaatctctacagtcgttccttttcccatctcgcttgtgattgttatttctccttcatgagcttctacaatctcctttacaattgataagcctaatccgtaacctccgctttttctcgagcgagatttttccactcgatacagcttatcaaatacgtaaggcagatctttttctggaatgcctattccttggtctttaagagttattgttaatgattcagctgatttttttacaattaaatcaattttagccccttcttttgaatatttcattgcgttatcaagtaaattgataatcacttgctgaaatctttcaggatctagtgaaaagtaaaggccttgagggcagcttatgtccagctccatctctttttcttttaaagctaaattaaaatgcgcgcatatggtgtgcacatacgtagccagttctactttttgtttttgaataaaaaatgtgtgctgatccagctgcgccagctgaaacaaatctttgactaactgtgaaattctttccgcttcttcttccacaatggcaagatatttatcacgttcttgcggtgtattagaaggccttctcgctacgtctgtatagccctttaaatacatcaaaggagtttgaagttcatgtgaaatgctgcttaaaaattcatttctctcttttcttaaccgctgcagctcattcgctagcgactgaatggacattcctaattgtccaagttcatctcttgaatgggcaccaagctttacagacaaatctccttgactcagcttctccgttgcttttttcatcttgattaaaggagcggttataaatttagacagagcaaaaatggtcacaatcgaaaataaaacggaaacagctcccgctacgtaaaaatgatgctgtagtctcgcaatcatttcgtgaatatcatttgtgtttttgaacatataaaccgtgccgaactgctgacggcctttttcaataggtgatgctgtggcgatataagatttgcttttccagtcgccttgcatgatttcacctttgtatgtaagagactttcctttccatttctctactgcttttcttgcaccttgaattaaaggcctggacgaactgataatttttcctgttttatctgttatgacaacatcagtttctgcttcagattccatcagtgcaacatggttaagcgtagccgaatcatgatgcttctctaatacttcccggtgactgtttcctcttaaacgcaaactttctaattcctccgaaattcgtgtgttggcaagaccgctatataagtaaaaaaagagagccgcttcaattagtaaaatgaacattaaaaataagagtccgagcttaatagaaattcgattcatttattcacatcctttgctttcattatagaagtaataattgaagaaactgtgcagaataaagcatacatgattaaataaccattattctctgacagtttaccacaggtatctgacagcttagtgtataaaatacgtttatcctaccgtaaattccgaactcactaagcacgcagcactacataatccaaaaacaaaaaaaagatggagacataacgaaatccctccaatccaaagctagaagcacctatatagaggaaacctacgttcaccatatcaataaaatcaacaaaaaatccgaacgagttggattctctatcaagaatctcgcttcatcgttcggattttccttcaactaaaatacttttgtcccagcctctttttatttaacaatgataacaggacattctgcggattgagcaacttcgtgacttacacttcctaaaaatgtctctttaacaaagccctttccttgacttcctattataatgacgtcttgttgattgccatgtgcgtattcgataattttctttgaagcggtgccttctaaaccgtatgcctcatatggaatacctgattgagttaaatgattgtgagcttcagataaaatatcgcggttttcttcttctatcagtgcgtctaagtcaacgctaaaaacaggctgctgcaagtgaattctttccttaatatgtacaattgtcagcttattagcatttacgcttttagctagtttacttgcatgttgaagagcacgaatagaaggtgccgaaccgtcaaaggcgactaagattttgttatacatataaagaaccctctctctttttgttctttcatgatgcgttaccatctagatgctgtagatgataaagcaaaaaataataaagtaagagacttcttgatttttgctttatcatccatactatacttttaccgctttcagaaaaaacaaaacatttatccgtttttcctcatataaaaagcctttgctcactagaagcaaaggctgattgtttatgttagtaggttatttaacaaacttcttttaactcttcagttaaacgtaaaaaagtttctttatctcttttttctaaagactgatcaatttgtagtaaaagctgtgcttttttaaagtcacgaagagatttgtttagcactagttgagctgctgtcgcgtctgatacttttacttcttcttgtgtcattttgcgggacgtatagttttccattacaagtcaactcctcatccttttcgctattatataagaaatcatataattattcaaatattttttcttatttttcattttaaatttgcctctcaaaatgaggtttggacatacccaaatcattataatccaaaggcgagcgaattggattgaattgatttccgtgcaaggcttcgctttccgcgggcggccggtgaggcttttcccgcaggagtcttcgccttgccctccaatcaacagctagaagcaacagaatatacaaaatccacgttcaccatcaccatgaaaaaatccgaacgagttggatcctttatcaagaatctcgatttatcgttcggattttccttcaactaaaatacttttgtctcagactcttgatatcacaaccactctggacatgaagaacctcgaggaaccagaactgtcttatatttccctggagtttccgacatttcgatttgttctgtaagcccttggtacaatcctaaaggtgtttgggctgtaaagagatccggtgcaacgtactcatgcttctctgacgaaccagctgtttgatgagcgtacgctttctcatagatgcccattgataaaatccataaagatacgcgatccaatgatacacgcacgcggtagctgcctccttcttttgctcttctttctagtgccattaaagcaccgacttcaagcagccaagaaaccgcataatcatttaccactacaataggaggcagcttaggattttctggcgatccttctaacgccatgactcccgttacgcttcccgctgtttggtcaaacccatttcttttcgcccagtctccttgtgttccatgcaggttaacggtgcagtggatgattccaggttttaattctgcacactcttcagctgttagaccgtatctctctagaaatccgtatcgacggttcgcaaaaaagatatctgctccttgtagaagttcaaccattttttcttttccttctttttcaccgatatcgagcgttgaagagcgcatacctacattagatgtagcgtaaatcgtatcatgctcccaatcagttggcttccaaatatttaagacgtccgcaccgtgtaaagcgagagctcgaccaaatcctgctcctgcaataacatgaccaagacctaatgctcgaataccatctagcggcgttctaggatcttttgaaaatggaatcggctcactttctccaatcttttcaatttcaattaaaggaagctgtgctgcttcatcatacgtaggctctttcataaactcttcaattgttcgcacaacaggcatgataactcctcgctctgctgcagctttttctaactcttctgcattccatccgcgaatagcttttgcaactgcatcagggtcttctatacaatttaacagctttaacgtttcatgtttagagcgcggatagggattcagcggcattacccatttgtcatcttttgtttgataaaagcgaaagcctaatggattataaggatcatttgctttactcggggcatacccgttaagtttttcccattttttatcgtaaaaaggtgataatcttcggatcgcttttcgcagatctatatgaatatcttgaccttttcctccgcgtattctccaaatttttgagacagctactgatttagcaactagtgcaatagctgctgctgaggcaaggcgcagcgtactaggaacaatcggatcttctccgtaaaacgtaatgtttcctccgctgtcttttgctgataaaccgactccttgaagcacattttccagctcttgatagatatcaaaatccctattatccgttaaacgattttcatttgctttcacaatagattttgttagctgatctttcgtaatgttgctcacgtatagtcccttctttcctaatataattacctcattatgtccctgcttgctgaagttatgccctcatcgagttaaatcaaaatacttcaaatataacctttacgttaacgttaatattatcttaaaacgaatgtatcatatatcacctatgcgaacaaataatttgtttcatagacaaacaaaagcgctttatgtttttgtacataaaacgcttttgtcctacttcaaattttcttttttgaactacttttcgattggtttttttaatgcatgtaaattttcttctccagaaagcatgacttggttcataatatcttctgcatctttaattgcttggttataaaagtgagggccgatatgttctttaataaactctaatacattttctgctgcaaattcactgatttcttcatctcgttcgttataaaaaaacgtttgaatttcattgagcattttatctttatcttcttttgaaaaattaataaacataaacaaaactcctctttacattgatatctgtctacctgacatcatagcaagaggagctgagaaaatgcagtctttttttcttgttgtttttgtgtacaatgcttatgataatttttaattagctagacactttcatagccagtttttcttttatgcggcttgagcgctttttcatatcctgtaaaatttctagatatctcttttccgtcaactcatattttgcaagtgggacaagtgataacaagcaaagaatcccgggaatgattgtaaagattaaagcaatccaaataagtgtgctgtgtgactgaatttgatttggcacgtatcctaccgctgaaaggatgtacccgcctactgctccacccactgctgaagcaacctttgttttgaaaatatttgtagaaaaaaccattccttctgctcggttccccgttttccattcgccatattctacacagtcagcgagcatagatgtttgagcaatgttgctaactccaccgccgaaagaagctaaaaagcttaaaatcatcaccggcataacgtgaaaaccggttacaaacattgtaagagtggctacagcatttagcgcaattccccctattgctgcacgtttctttccaaatttatttgaaataaaaggagacgcgatcgcccctacaatttgtgctgtaaaaaataaggttaagtaaagagacgcgatgttctctgcatttaaattatatttaaaataataaatagaaaacgtggttcgaattgttaaaatcgtttcaactaaaagcattgagaaaatcaagtagcgcaacggtttattttgaataaataagttccaaactgcttttggcgtctgcttttcctgtctttttacggtatagttttcttttactcctgaaaatgtgatgatcattgtaatcattaagatacacgcataaataagactaagcataaaccagtttccaaaataatgagctagtggaagagttaataaactagcaaacaaggaccctactgctgcaatggttctaggaaaagctactactttatttcgttcttttacatcttgtgtaattgttgctgaaagcgaccaatagggaatatccatgatagcaaaacttgttccccacgcgatataagtgatataagcataaattaattttcctgtatgagaaagatcaggactaataaaacacgcgactgtagcaacagctgcaaaaaatccacctattaacaggtaaggcctaaacttaccaaatctcgtttctgtattatcaacaatcattccgataataatgtctgcaattccatcccatatcctagcaataagaaataaagttcctacggctgcagcatttaatcctacgctatctgtataaaaaatcattaaatatgtacttgttaatgcataaataatattgtttccaaaactccccattccgtatgataatacggtttttagagaaacttttgactgtacccccatgctcatataacttaactcccctctcctataaaacgctttcatatcattggtgactagaatctcattgctttatgagattctagtcttctattacggctgtatattttccacaactcgactttcgtaaggctgcagaacaatatctttaaatacttttacttcgggcgtatggttcataaggaagtaataactcttctctccaagcttgcgaggatatacttcaattccatcttcactttctctatgctcaatatgctgttgttttacaatatcaagcgcaattttttcaaacgtttgctcctcaattccacagcctacataataaaccgttccgcgaccaaactgattttttgttacagccgcttgattataaaatggatcatcatactcatacagcacttcagctgttacaggtgtgataatgtctctccacacggaagctcttgcttgttctccttcatacagtcctacccctttaatagctgctttttgagtagaagacagtgcttccacttcatgaatttcaatccctgttatttcttttacatatccgggcagtgtctgcttaaagtgaatgttattttgtttatctttaataccggttctaaaagtaaaaataatcacgccaccgttttcagtaaattcagtaaatctcttacctaattcttcatcaattatttgcaaatccggaacaaccagtactttatagcttgaaaaatctcttgcagcaggaataacatcaataggtgtattcagcttataaaacggtgtatatcctctaagaagctcttgcgtaaagtcaaatccttcactttgctgctgaaagcgccatgaccatatattttcatagtcatacaaaacggcaacatcggatttaatatcagactcaagtacatgttcgtaatgaacgatttcactaaataacgactgaacttctttgtagcgtcttccataatgattatcatgacctacaactccatagcagtactgctcggctcctcttgtcattccgcgccaacggaaatacagcatattcgtacatccatgagcaaacgcttgataagaccacatttttgcctgattaggtcgcggaagataaccgatgacatcatgaccttgagcgcccattaattcctctacaatccagaagtttttatgtaacaaacctctattaaaatcatgccctagtgcaatatgagccggggtaatcggctcagtttgaccgccccataccggataattatcataagatacaaagtccattacttggaggttttcttcatgatcaaaccatttatcaaaaaaccctcctgatacgttcgttgtcaacagctggtgatcacctttatatttcttcacaatcgctgtttgttcgtgagcatatctgtttaatgaaaaagagcgaaagcgcgcccagtctagctttaacgaagggctgtgtgtcgtaattgtttttacaggcatgggcacttcagtaaactcgttatatgtttgtccccagaaaatagtgccatacttttcatttagctcattaatatctttatattttctttccaaaaactgctgaaactctttatgacattgttcgcagtaacacatgtcactgccttcatggccaaattcattgtcaacttgccatgctacgattgcttcttctgagcagtagtgctttacgagttgttctgtaatctggacgctatacttccggtaaagaggcgaattaaaacaatattgacgtcttcctccaaaggctctgaccgccccgttttcatcttttgataaaatagaaggatgctgcttcgcaagccaagccggaaaagtggcagtaggcgtaccaaacataacatcaatattctgtttgttaagcttattgataacgctatcaaaaaaggaaaagtcatagtgcccttctttaggctccataaggtgccaagcgaactctcctattctcaccatgtttgatcctagctctttaataccttggatatcttcttctatcatattctctggccaatgttcaggataataatcgacaccgatgtacatttttctctactcctatctatttctttgtttcattaaatgaacgatttgctgttaactgttaaggtctactcggaaacggtgatcaaaagcaaaaaaatcacatttattttcttcataaataaatctctgttcaactttcaagatacatacttcctaatcttttaaaacgcttacaagtttattttatgaactttattcaaaatattcaatggtaaaaatttagagaaaaacatcctttttttgctctttattaaaataaagagtaaaacgcttacaaagacaaatgttttcataattcttttatatatcttccctcacacttcccatatccacatttaggtaataaattgcttagaaaacaatcgtcaaaagtcatttctttcatacatgttatctatcaattagtaagagtcatttgacttatctataaaatagtaaaaattacagggcaggtttttaccattattaacacattaaacctacgttcaccatcacaacaaaaaaagaccgcacaattaatcaataatctcgattaattgtgcggatacttcttcggctaaaatacttttgttccgccttttacttgcagctgattataaacacaccttttaccggtttgtgttcatgcagcttccatttatacaaagctcttcaaacacaggatcctttacattttccattaataatggtgttgcaacatgctggaaattagaatgacgaatcgttaggtttgtgacgggagaacgttcataggctcgaatccataagccgtatttgcctccgttgctttgcaaattcttatgaagacttttttacatagagcttatacaaggttaataaggcgaacggctgtctttaatgctataattaatttcgcatgcaaaatatcactactagcatttaaatcatacatagccgctgcaccttattttcgtatcatttaaaataaaggaattttaaagagaaaagtgaatagtataaacatgcactttatttactatctctttttaattttcatatattcattgcttttaaaggagaggatatcatgccaggagcaacaagcatggtcgtaatcgggattactgccttaattgtatttggaccgagtaaattgccggacataggacgagcatttggacattccctgcgagaatttaaaaatgcggcggaaggaattatacaggatgacgacaaacaaactccagagaataccactgaagataaagaggaaaaatcctaatttttatgtaaataaaagttatatagactaaaaagcccacttttcacgtgcagtgggtttcttttttgatgtatgatagtaaaaaatagtaaagaaagagggtaactttttgtttaaatcgaaactgcatttttggacattagaactattaatgattgctttactgatttacatttgtaaacatatttcgtttgtttttctaccaatcggtgtgtttatctccactttgtttttccctattcttgtagctggttttcttttctttttattcgaaccaattgtgtcatttctcacaagaaaaaaagtgcccaaaacactggccatcttattattatacgttgtttttatcggcgtaatcgcctctattgtgggcggtgtgggacctactttatctaaacaattaactgatttggctaagaatattccgtcttatattgtagaaacgagagagtacataaatgatttatctaactcaagatggtttaactggctcgttgaacaaaaatatgtgtcgctcgatcatattgaagagtcacttttaaactacgcgtctactttacctacgaatctcacaaacagtatttcatctgttttaagcgtcgtaacaaatattacacttacggttgtaaccgttcctttcattcttttttatatgcttaaagacagccataaacttcgtaaaaatacgctgcgtatggttcctgcttcttaccgaaaagaaacgttacgtacaatgaaagaaacaacaaatacactagctacttatattcaaggccaaatgctcgtttgtttgtttgtcggtattagtacattcattggttacctcatcatcgggttgccttatgcattaatactcgccctaataggagcccttactaatattatcccgtacgtcggcccttttattggcgtagcacccgctttaatcgtaggtttattatactctcctacaaaagcgatattagtaattatcgtcgtcgtaatcgttcaacagctagatggaaacattatttctccgctggtaattggaaagaaattaaacactcatcctttaacgattattattctattgcttgttgcgggtaatattgcaggaatactcggaatgatcttagcgattccggcttatgctgtaacaaaaacaattgtgataaatattgtaagaatgattcaatttagaaacaaatctgtcaagctgtaaaacgcaaaagcaacccaataaagaggctggtataaaagtattttagttgaagttaaatccgaactattaatctgattaatggttcggattttttgttgtcatattgaacataagtttcgtgcagctgcttctagctgttgattggagggcaaggccaagacttctgcgtgaaaagcggaaggacgaggaggatcatcggctgcccgcggaaagcgaaatcttgcacggaactcaacagcggtgtcacaagcgcttcaactcctttatcccatttgtttgtctttagattgaggtaatttcgttatgtcttaatgtcttttatcttcccatggattcagcactgacacaccatcagatgatttccatccggatctttaaatgtaaaccaatgattgtgttgaattcctgtcgttagctctacttttttctgtttcatatattcataagcttcttggatatcgtttgtattcaaatgaaaagctggcgttttaaaaagcgtattttttgaatacgttttgctatctaatacaattcctgttccattcataggtacacatataaatgatcatataaaatgtctccatctgctatcaaacctagtatgtcacaataccagtctcgtgctttttttatgtcctttacaggaataaaaactgtgcctacttcatttaatatggggttcatttatgacctccggtatgggtttagtagttttacaacgtattctcttttaatcgctgatatccttttattttgagatactttctatactcggtagcagaattagcggtcttgcggacacggttatcctccatacataagctacacggcaaatgtatatatttcatgaccaaatgtagattactaaaaaagaaaatgagaaaatctcccccttcccctgctttgcacgtgtataatgaaaaatagactatagatagtagccttcttttgtttgtagcatcgaactttcttgcattacaatagatttaaagccactatccagctaagaattaaaatgactaacttaaggttaaggaggttagatgtgtatggattattcatctttactcatacgcgaagtcattgatagagtatctaaattacgcctcttatctgtttataatgaaagtataaaaggtgatttagaaagcaccatcctccctctttatcagcagcactttgaaaataaagatgtaaacgaagcgttgaggattttaaaaaaagactttctcaatcgtacgaaacgcagatggttagatgctgctatacgcgactatgagcaaaaaaagcctaagaaaaataaagagctgattggagaatacaaagcgctaacagcttattataaaacgaatggaaaagaactcttttgcaaacagtttgaaaacgtatcatctccggaagaagtcattaataaacgaattggtattctacgtgaatggagtcaagaagatagcttcttcttaacggattatccttatattcatcaaaaaactaagacccagcgagaaaaagcaatccatacggatatatctattattattgggctgactatactggacccaagcttccaaaacggaaatcatagtattattgagagccctttttcaactgtagagaatccttttttctctaactcaagagcaaagcttctcgtcgagcaacccctattagagaaagaaggaaaagaatatttcttaagtacttataactctgaagacgggacagattacgaattgttaatagaaaaagaatacgctgaagaaaatggaaataaaattagtgatttagatcggtttgattataaagtgtttttagagatcatgagccaacgcgacgaattgttcgctacacaaaaaattattaacgtaaaaattggtgaccttgtgaaagcactttataaaacagatagtaagcgcaactatcagatgatagaagaaagaattacaaaaatgaagcactacagcatgacaaaaatacagcataataagaaaattgcctatggtatttttgactttgtggatattactacgatgccgaacggaacgcgaattgctgaaattcacgtcaatgaagtgatatatagagactatattcaacgccaaacggtgcgtatttataaaaataaagttgaaaaattaagtttagacgccgcttatcatttgctattcgttatgcaaaaagagcgtctcatttgctatgaaacaaaatcttcatacaatgtcacaagagattatttatatttttcgacaagaatccgctttcgaaaaagacgaaaaaaagaaaaccttgtcgaaattgaaacagccttagatgagctagtcgaacaaaaactagctgtccaatcctataaaagagtgggccaagtgtttcagattacctttattcctgtgggagaaagtgaagtaaaagacttattagctggtgattacgaatatgctcccctttctatttatcaaaacgtaacaagttctataggctaaaaaagaatgcccttataatctttataagggcattctttttatctatctactattaatcactgcattttttgctccacatttccgtgcgaaagtgtttttttgctccaattcttcatgtaaacatattatttcccctgctaatatagctattaaacttcaccttccttatcattttatgaactttttatgtctaaaaaagcatttataattgttttttgctccagatccccgtgcgaatgtgctgtttttctttctacactgcatttactataagtttggctccaatcttccgtgcaaatatgtcacttttacataaattttcttgtgccagtgtctttctctcttcgtttccttcaatttttgctccacatctccgtgcaaaagtgttttttgctccagatttccgtgcaaacatgccactttcttaaaaaaacactatttttgctgcaaatgtttgtttatcccctctgaaaatgtgaactttttgtgtctcgaaaagggcatttttctttcttttgtcccttttttccgtgcaaatgtgtcacttccttgcctggatctttacttttatcatttttgctcctattctccgtgggaatatgtcatttttacatcaaaattttttttgaatttgtcgcattttgtgtatttcatccgtcataatacgacattttgcttaagaatgctgttttatcaatgtttatgaaatataacgctatttttgctccacatctccgtgcaaatatgtcaccttttaaatagatgtctcgtcccttgatatcactagtctttaaaaaaaatgcaccatttccccgtgcaaatatgtcattttacagcctatatgactgtgtctatactgtaaaagacgacgtatatagttttggaaaggaggtcactacatgagtatacaaaagctgtcactaaaacggcacacccttgtagcaaataaactgctgattgtcatgagcggattaaatagaaacactaaacgagacaatagctattactatgaaaaacattcatttggtcttgcgaaaaactttgtagatataaagtggacgggttctctgatgaagcaaattttagcttacgtagccaaatgtaacagccagggtcatatttcaattatttctgagcaagaactggctaatacgattcaatgttccgttcggaccgttcaaaataataacaggcttttagaagactatgacatcattcgctgggatcgtttatggggagactatattcaagtttctttaaacaactatttagaggattttttagatttacatataaaagaagctgctgatgttcaaaacatatcatataatcctgaaatgcttgatgaagatcacaatacctatacttcaaaaggtggttatacttctgtttcgatggaagtgatttatcaattgctggctattaaaaatatcaacatgctgcgtctggctttacgtgcgttgtacgtatacgaatctgatgtaaacgtaaagaaagattcagaagcacttttatcttacaccgaggtaaaacacattcttccaaaatacattggctataaagctgctattaaagaaatggctagtaaattgagtacaattttccgtatcgatgtgctagaaaaagatgattgtgtcaaaacattattagaagaaaagcagccaagaaaatcaattattgaaaaaatcaaggatggttttattttaagctttaatttaactggtgctcatgatagtaaaaaacaaaaagaaatcgaaaaaatccgtggagagcatgcatttgctcagtttaagaatttctttaaatcttttggccattattcaattaaaaaggaagatattcattccattgtacatgagtttggtttagatataatcgaaaaatcattaacgtccgttcagcgttacttacaacaaacttacatagaagaaagtatggatgcatttcgccctcttgtgcatgaaatggagtcaaacttctttacgtatatccgcaaaattgccaacgggtattatcaggcaaaaattaacgctctataatactcttttttgttatgcctttttttactcatttctactctattttccttccattctttctttctctttaacttactaaaacataaatatctctcagctataataaatccctttaaatgataatgattttcgttttcatgaaaaaaatcaactaaacgaacaaaaaatacaataaataaacgttattttccgaactactgcgtagaaaatatggctgttataaaaaaatcctatattttttcgtgaaaattcttgtagctaagtgcagtttttttgattccttaattccctttaaactcagtcagcaaaaggcttttaccaatataagttttaacaatgtttttaatgtttttaatgtctttttaatctcttataaatatatagtaatttctataaaacaatggacagcaaataaacagcatttatatatccgaatacattaaattaaaatatataactcactgaaaaaagcgctaccataaaatagaaacgctctttcttacttcatgtatctgtataacttcataaaaaaacacacaaaacaaattctttacatctgctttgtgtgttttttttatttagtaggattatattgtttaagaactttatcacgtacatatttaagatgatgatacattttcttgaatgcatcatcggggtcatgattagctaacgcattataaatagcggtatgatgttctacagtaagtgctggttctctaaaggtaatttcgctatctgttttttcatgagtgaagagcagggaattaatcataccttctaccactggattatccgcgctaacagcaataattcgatggaattccttatccgctgcaccgtaattgttatctgtgctcttttttatttcctcgatcgtttcttttaactgtcttaattgatcatcgtttattttttccgccgccatggttactaggcccagttctagtgccatgcgcgcctccactactgcaggtaaattatcgattgataacgctaacataacggaaaaaggatgtgctcctattttgttattaaaatacgtacctccacgagtttttcgtgtaattacaccaagtacttctaatgcactcaaggcttctctcaatacagggcgacttacattcagtacgtctaataactccatttcagttggcagcttatctcctggctttaattgcccgctgaccaataactgaataatacggtcgactacttgttttgccagcgtattacgattaacggattcaaatgacacttttttagtcgaaccactcatcttcatccacccttttctgaatattgtttatttgtaagactaattatatcatatagagtttatttatgtattaccaaccactacttcttaactattcttatttcttatctacataggattatgtattaaactgctcgttattataaaaaacagaagctcgaacaaagacgtagaattgttcgagctaaaagcaccctgtaattatttttgaaaaaatttttaacgtaccagacaaggacgtttattatcaaagctccaatttttaattaaatactgcatagcttttgaatcatcacgtgttcctaattgcattttcttatatagctgatgtgcttgctcgattcgttctaaatccacctctatgccaagtcctgattttttaggtactgctactcttcctccctcaattttaaaaggatcttttgtcaatcgctgaccatcttgccaaatccaatgcgtatcaatagccgttatttttccaggagcggcagcagccacatgagtgaacatggccagtgaaatatcaaaatgattatttgaatgtgatccccatgtaagaccccattcatgacacatttgagccacacgaaccgagccttgcatcgtccaaaagtggggatctgctagagggatatccacagcgtttaactgaatagcgtgacccatttgacgccaatctgtagcaatcatatttgtagcagttggcagtccagttgctctgcgaaattccgccattgtttctcttgctgaatatccattttcgctaccgcaagggtcttctgcataggccaatacatgatgtttatttttacatagttgaatagcttcttccaaagaccaagccccgttaggatctaaggtaattcgagcttcagggaagttttcagctaatgctgctaccgcttctatttcttgctcacctttaagaacaccgccttttagtttaaaatcgttaaatccatactgctgatgagctgcctgtgcaagttttacgattgcttcgggagtcagagcttcttcatggcgaagtcgaaaccactccactttttcattttcaccacttagatagtccaagtcagtttttttgcgatctccaatataaaataaataacctagcatttcaacatgttccctttgctggccttctcctaataatgctgcaactggtacattaagaaatttccctactaaatctaataaagctgcttccagtgcagtaacggcatgaatggtcgtccgtaaatcgaatgtttgaagtcctcgtcctgccatatctcgatctccaaattttttacgtactgtatttaagatgttattataatttccgattgattgatctactacaaatgtcttcgcatcttcaagcgtttgacgaatgttttcacctccaggtacctctcctacccctgtgcttccagtactgtcttttaaaataacaatatttcgagtgaaaaagggactatgggcaccgctgagattaagcagcatactatcatacccagccactggtataacctgcatatctataatttgaggcgtagtcgactttttttcgttttgaatttcactatttgtaagaacataattattcatgcttttcactcctgatctaagttttttgaatccgcttacatattgagcgtgctttcatcctttgaggagatattcttcagttctactcgtttaatttctcctactaaaagaagataacagagaatagctataagagcgttagcgcccacaaaaaccaatgctccattaaaagagcctgttgcattgacaatgtatccaataataataggcgttgtaatagaagcaacgttcccaaatgtgttaaaaagcccgccgcttaaaccggctatttctttaggggaagtgtcagcaacaacagcccaccctaatgccccaaagccttttccaaaaaaagcaagtgacataattactacaacaatccattcagcatctacataattgcaagcaaccatgctacaggaaagcaacatgccgataacgataggtgtcttacgtgcaaaagttaatgaacgacctctttttaaaaagaaatcagatacaattccccctaacacccctcctaaaaatccgcatatggcaggtagagaagcaataaatccagcttccaaaattgacattccgcgtgcttgaactaaataaacaggaaaccatgttaaaaagaaatacgtgagcgtcgtaatacaatattgtccaatataaacacctaacaacattctgcttttaagaagttgtttaatttgattccatcctgggccagtatttttctttgtttctacttttttatcatccatatcaatgagcccgccgccctgctggatgtaatttaattcttcttttgtaatgcgaggatgtttgcttggactgtagatcactttcatccaaacagcagctaagattactcctaagacacccataataataaatacaaaatgccagccgaacctgtgagtaagccatgccataataggcgaaaataatactagtgcaaaatactgagccgaattaaaaatcgcagaggctgtcccacgttcagattttggaaaccaggctgctacaatacggctatttcccggaaaagaaggggcttcagctaacccaaccataaaacgaagcgtaaataagataattatagcagcaccgccactaaaaaaaacgataaatccttgaaaaaaggtaaaaatagaccaaaaaaatacactgcatgcaatgattgtctttgatccgaatttgtctaagaaccaacctccaggaagctgaccaattacataagcccatccaaatgctgaaaaaacataccccattgaaactgaatttaagcctaattctttttgaacagagtctcctacaatggacagcgtggctctatctgcataattaatcgttgtcaaaacaaaaagcataaatacgacaaaccagcgtacatggcttttcttgctgcttcccgcttccaattttggtttagcttgcataatcacctattccatccccctcttattgttttgttcttttcctatgtttatctctcttaaaaaggaggaattttcctcctttttaagagagtaaaaggttcataatacaataaaggtatttaactttttataaaaacagttttaatagctgtgaaaaattctttagcagcctccccttgttctctagagtgagaacttgattgtttcatgcctccaaaaggtgcctgaagttcaacgcctgcgctttccgagttaattcgaataagcccagcatccatttcattaataaaagaaagcatatgagaaatatttgtagtgaaaatagaagcacttagcccatattgaacatcgttagctagtgctaatgcttcctcgatggattctactttcatcaatgctattacggggccaaaaatttcttcttgtgatatcgtcatatgcgattctacgttttcaaaaatagtaggttctacgtaaaatccattttcatattccccgtcagtcaactgacgtcctccgtataaaagagttgcaccttcactttttcctttttcaatatatgacaatacggtctgtaactgattttcgcttgcacatggtcccatccacgtgtcttcgtttaacccttctccaacggtaatttccttcgtttttgctaatagtttttgtttgaatttttcatatacctcatgctgaacaattacccgactagtcgcagtacatttttgacctgtggaacggaatgcaccgctgatcgtaccttctactgctaaatctaaatctgcatccgccgctacaattaccgggttcttcccccccatttctaactgatatttagctcctcgaacgaaagcctgttgaccaatttgtttgcctactcgatcggatcctgtaaatgtaatcgcattaatttctggatgttcagcaatagcttgaccaatgattgatccagagcccgtaatcatatttactacacccgctggaatttctgcttcttcaaaacattcgataatcttagcgcacgtaatagctgtttcagtagctggcttaattatgacagtatttccgtaaacaagtgccggagctattttccatataggaatagcaataggaaagttccatggggtgataactccaacaacgcctaacggtactcgagatgtaaacatcaatgcttcagcatcggtagaaggaattacatctcccatttttctcataccttcccctgcatagtatcgaagaatagctattccgcgagctgtttctccttttgtttcagccaaggtttttcccatttcacgtgtagcacattccgcaatttcatctagtctattttccataatatccgcagctttgtgaaggtactgtccgcgagctgcgcctgacaagcgcttccatttttcttgagcttgtttagctgcttttatcgctagatttaaatcttcaagagttgatttttgtacatatcctacagcctctttcttattggctgggtttagactctccatcatctcttgagacgatgatggaacaccttttccgttaataaaatttaagtattgtttgtcttgaacactaattgtcatatgaactctcctttttataaagcgtttacattttattaattaagataaaactcgtttagaggatttaggatattgatcaaatgcttgtgttaaaatcttttcaagctgtgcgtaatgttctttatctactgaaacaataggaggccttactctatctgtaacaggtaaacctataatttccatccctgctttaatcaatgaaacagcatatccttttttttgcttgcgaatatcgttaattggaagaattatattttggtagagttcacttagtaactcttgatcgtgacttaataaagcgttgtaaaacattcttgatatgtgcgggacatagttagagattgctgaagaataagaattaaatccaattggagcgtatgctggcatcgttacttcagccatcggcattccgtttagccagcctagtcgttttcttaaagactgggttaattctatatttaattccatatttccatatccgtcttttaatcctactagttggtttaattctgtaagtttttctaaagttggcaactgtaaaatggcattgtctctttgataaacaattgcgtttaaatttgtatgctcaatgattgcttttagatagttgtaaaggccctcttgttctccttcaattaagtatggaggtaaaattaaatagccgtctgcctgtttttcctctgaaatacgagcccattctaaagctgtagaaagattaccgcccacacctgtgtaaacgggaacttttctgttgacgacagatatagctacttctaacattgctgtatattcttttgtatttaaggattgaaattctcctgaaccgcaagcgatgaagatagcctctaacccttcgtctaataaaaattgaatatttgcttctaaagctttttcatctaattttccttggttattaaggggagcgacgggaaaacctaaaattcctgtaggtgcttttctattcatattcacatgcatatcctcctataaattttcagata

SEQ ID NO: 35 - DNA, 47147 bp, Priestia aryabhattai
  source 1..47147: mol_type = genomic DNA
taagctctttagcgccaatggtagttgggactttgtccctgtgagagtaggacgttgccaggccaataaaaagactagtcattcaatgactagtcttttttgtttctaaaaattacagcgtgaatttaacttttaaattatgttacactatagtggattcatttaattttttattataaaagttctttttgacgttgtaagaaacttctttcgaactggaggctgcattttgggtaagaaatcaaaaaaagtactatacgaattacaggaaaatgaaacaatcgcaagttgtttagatcggatgaaaaaagatgggtatatgcccgttcgacgcatggaaaagcctatctttgaagaaaaagaaataaatggtaaaaaagagtacgttccagtaagacaacagattgttttcgagggtaaaagtctctaaatacgaacattttaatgataaaaatagtaaacattcgatttttgggttgacttttttctggtttggctgttattattaagttgtcaattgagatatccgaaacctcatataatagtgggaatatggcccacgagtttctacccgatgaccgtaaatcattggactatgaggagagtacaattactaaataggtaaacatgattccttttcaaaaggaatgttgatacatgaaacctagggtagttgtggctttcctttagtgagccataacgtaccctaggtttttttataacgtgaaaaaggagcttttattcatgaatgtaaaagttgctgttgtaatgggcagtcagtcagactggagcactatgaaatatgcgtgtgacattttagatgaattaaatattgaatatgaaaagaaagttgtatcagcacatcgaacgccggattatatgtttgagtacgctgaaactgctaaagaacgaggaattaaagttattattgctggcgctggtggcgctgctcacttacctggtatgattgctgcaaaaacaattttacctgtaataggtgtaccggttaaatcaagtaacttaaatggtttagattcacttttatcgattgttcaaatgccaggcggcgtaccggtagctactgtagctattggaaaagctggttctacgaacgctggcctgctagcagcacaaatcttagcaacacaggatccaacgttaagtgatcaacttgaaaatcgtagagagtctattaaatcatctgtgttagaaagtagtgatcaacttgtctaatttacttatacctcctggtaaaacaattggaatcgtgggcggtggacagctaggaagaatgattgcgctatctgctaaagaaatgggttattacattgcagtgcttgaaccaacagaagattctccttgcggtcaagtagcagatattaaagtcattggcaactatgatgatagaaaagcggttgaacagcttgctgaagtgtcagatgtcatcacctatgaatttgaaaacgttgatgttgagatgatgaaatggctagaaacaaaatgctacgtgccacagggcagtcatttactagccgttacacaaaatcgtcgtttagaaaaagaaatgattacaaagcttaatctagacgttcctgattacgcaatcgttacgactgaagaaaaacttttaaaagctgtcgaaacaattggttatccatgtgtcgtaaaaacttgccgaggcggatatgacggtaaagggcaagttctagtgaaaaatgagaataatattcgtgaagcagctgaactattagcacagtcggaatgcattgtagaacagtggatgaacttagataaagaagtatcagttattgtacaccgcaatgcaaaaggcgaaacggtatgtttaccagtagctgagaacattcataagcatcatattttgcaccaaacgattgttccggcacgtattacagcagatcaagaagcgaaagctcttcaatatgcgcaagaaatagcaaaaggattagatttagttggtacattagcagttgagatgttcctaactgaagaaggtcagctttatattaatgaaatggcacctagacctcataattcaggtcattattcaatcaatgcttgtgatctttctcaatttcagcagcatgtaagagccatttgtaactggaccctagcacagccgactttattaaaacctgctgttatggttaacctattaggggaacacattgagaacacaatggcaaaaatcgaatgtttagatgatatgcacttgcatttgtacgggaaaaaagttgcaaaagagaagagaaaaatgggacatatcacggtattagctgataagatagatgaggcgatagaaaaagccgaatctctaggaatttgggaaagaacggaggaagtaacaacatgattgaacgttatacaagaccagaaatggcagctatttggacagaagaaaataaatttaaagcttggttagaagttgaaattctagcttgcgaagcatggtcagaattaggacatattccgaaagaagatgtgaagttaattcgtcaaaatgcatcttttgatattaaccgcatcaatgaaattgaactagaaacgcgtcatgacgtagtagctttcactcgtgcagtatctgaaacgcttggtgaagagcgcaagtgggtacactacggtttgacttcaactgacgtagttgatacagctctatcttatttattaaagcaagctaatgaaatcttgctaagtgacgtagagcgctttgtagaagtactaaaggaaaaagctcaagaacataagtatacggttatgatgggacgtacgcacggtgtacacgctgagccaacgacatttggtttgaaaatgggattatggtacgaagaaatgaagcgtaacctagagcggttaaaacgtgctgcagctgaagtggaattcggtaaaatgtcaggagcagttggaacgttcgctaacatcgatcctttcgttgaaaaatacgtatgtgagaagttgggaatttcaccagcaccaatctctacgcaaacattacagcgtgaccgtcatgcacactatatgtcagtactagcgttaattgcgacatctattgagaaatttgcagtagaagttcgcggtcttcaaaagagtgaaacacgtgaggttgaagagtactttgcaaaaggtcaaaaaggatcatctgcaatgcctcataaacgtaatccaatcggttctgagaacgtaacgggacttgctcgcttaattcgcggctatatggttacagcttatgataatgtaccgctttggcatgagcgtgacatctctcattcatcggcagagcgtgtcatcttacctgatgcaacgattgctttaaattacatgttaaatcgttttgcaaacattgttaaaaacttaacagtattccctgacaacatgaagcgcaacatggatcgtacactaggattaatttactcacagcgtgtactgttaacactaatcaataaaggcatggtacgcgaagaagcatacgacttagtacagccaaaagcaatggaagcatgggaaacgcaagttcctttccgttctttaattgaaggcgaagaacgcattactcgccacttatcaccagaagagattgaagattgtttcgatcataagcaccatttaaaaaatgtagatatgatttttgaacgtttaggtctttaataaaaaaggcaaggcacgtccttgcctttatctaagaaagtgtatctgaatattctgtatgtagaggtgacagcatggaaaagcaagagttactttatgaaggaaaagcgaaaaagatttacgctactgatgagcaagatgtattgtgggttgcttataaaaatgaagctacagcattcaacggtcagaaaaaagcggagattagcggaaaagcacagttgaacaatcaaattagtagtttactattttcaatgttacatgagcaagggattacaactcactttgtgaagcagctttcagatcatgaacaagcggttaagaaagtagaaattgttccgcttgaagttgttgtacgaaatgctacagcaggaagccttgcgaagcgaattggcgtagaagaaggtattcgttttgaacagccaatcgttgaactttactacaaagacgatgcgcttggggatccattaattcttgcagaacatgcgattttccttaaagctgcaactcaagaagagattgatagtttaaaggcacaagcacttcaaatcaacgaaatattatcgaaatttttcaaagataaagacattttcttagtggattttaaattagaattcggccgtacttctcaaggcgacattattttagcagatgaaatttcacctgacacttgccgcttctgggatgttcatacgaacgaaaaattagataaagatgtattccgcagagatttaggcggtttaacagaagcatatgaaaaaatcttacagcgaatcggaggataacccaaccatgtataaagtaaaagtatttgtcacattaagagaaagtgtattagaccctcaaggagtagccgttaaaaattcattgcaccgtatgtcttatgaagaagtagaagaagtacgcatcggtaaatttttagagctaacaatcgacagcacagattcattagatgaacgcgtaaaagaaatgtgtgaaaagcttttagttaatacagtaattgaagattaccgttacgaggttgaggaggttgtcgtacagtgaaatttgctgtaattgtttttccaggatcaaactgtgacgtagatatgtatcatgccatcaaagatgagcttggtgaagaagtagattacgtttggcacgatacagaatcattagatcaatatgatggtatcttgcttccaggtggtttctcatatggagattaccttcgttcaggtgctatcgctcgcttctcaaatgtaatggacgctgtaaagaaagcagcaagccaaggaaagccagtactaggtgtatgtaatggattccaaattttattagaagcaggattactgccaggtgctatgcgccgtaatgaaaacttaaaattcatctgtaaaacagtgaatttgaaagtagctaataacgaaacaatgtttacaaatgcttatggcaaagatgaagtaattgctattccagtggcacacggtgaaggcaactactattgtgatgaacacacgttacaaaaattgattgaaaacaaccagattcttttccaatacgcaggtgataatccaaacggaagtcttcaagatattgcagggattacgaacgaaacaggcaacgtattaggaatgatgcctcacccagaaagagcggtaagcgatcttttaggaagcgcggacggacttaaattatttcaatcaatcgtaaagcagtggagggaacaaaatgtcgttacttcttgaaccaaatgtagagcaaattaaagaacaaaagttatatcgagacatgggattaacagacgaagagtttgcgaatgtagagcaactgcttggtcgtactcctaattatacagaaacaggcttattctctgttatgtggtcagagcactgcagttataaaaactctaagcctgtactgaaaaaattccctatcacgggtgaaaaagtattacaaggtcctggtgaaggagctggtatcgttgatattggtgacaaccaagccgttgtatttaaaatcgaaagtcataaccatccatcagcgattgaaccttatcaaggagcagcaactggtgtaggtggtatcattcgtgacgtcttttcaatgggagcaagaccgattgcacttttaaactctttgcgttttggtgaattaacatctccaaaggttcgtcatttgtttgaggaagtagtagcgggaatcgcaggttacggtaactgtgtaggaatcccaacagtaggtggagaaattcagtttgaagcttcatatgaaggaaatccgcttgttaacgctatgtgtgtgggtttaattaatcacgaagacattcaaaaaggtcaagctaaaggcgttggcaacacggttatgtacgtaggagcaaaaacgggccgcgacggcatccacggcgcaacatttgcttctgaagaactatctgatcagtcagatgaaaaacgtcctgctgtacaagtaggagatccatttatggaaaaacttcttcttgaagcgtgcttagaacttatcaagtgtgacgccttagtcggtattcaagatatgggtgctgcgggcttaacaagttcttcagcagagatggcaagtaaagcaggttctggtattgaaatgaaccttgatcttgtacctcagcgtgaaacaggtatgacaccatatgaaatgatgctttcagaatctcaagagcgcatgctcatcgttgttgaaaaaggccgtgaaaatgaaatcgtagaaatcgtagaaaaatacggattagaagctgtttcagttggtcacgtaaccgacgataagcgccttcgtttaactcataacggagaagtagtagcagatgttcctgtagatgcattagcagaagatgcaccggtataccacaagccatctcaagaaccagcctactatcgtgagttccaagagcaatcagcatatgctcctactgttgaaaatcacagtgatatgttagtaacacttttaaaacagcctactattgcaaacaaagagtgggtttacaaccaatatgactatcaagtacgtacaaacacagttgtatctcctggatctgacgcggcggttgttcgtgtacgtgatacaaataaagcattagcgatgacaacagactgtaactctcgctatttatacctagacccagaagtaggcggccgtattgcagtggcagaagctgctcgtaaccttgtatgttcaggtgcacagcctcttgcaattacagactgcttaaacttcggtaaccctgaaaaaccagaaatcttctggcaaattgaaaaagcaacagacggtatgagcgacgcttgccgtgagctatcgactccggttatcggcggtaacgtatctctttacaatgaaacaaaaggtgaagcaatttacccaactcctgttatcggaatggttggtttgatcgacgatatcaaccatattacaactcaatatgcgaagcaaaaagatgacttaatctatgttattggtaaagctgaagcagaattcgcaggtactgagcttcaaaaagtactagaaaacggtacggtatttgggcattcacctaaattagatttagcagttgaaaaaacacgtcaagatcagcttcttcaagcaattcgtgaaggtgcagttcaatctgctcacgatattgcagaaggaggattcgcggtagccctagctgaaaaagtgatgaacggcagcggattaggtgtggacgtaacggtagacggcgaagcaacagcagagctattcagtgaaacacaatcacgttttatcgtaacggtttctccagagaataaagaaaaattcgaaatgcttgtacaagatgcaacattagtaggacgcgtaatagaagacgcaacattaactgttaaacatcaagaaaatgttcttgttcaattatcagttgaagaattaactactgcttggaaaggagcgcttccatgcttgctgaaatcaaaggcttaaacgaagaatgtggcgtattcggtgtatggggacatgaaaatgcaagccagattgcttattacggtttgcatagcttgcagcaccgcggacaagaaggcgctggtattgctgtaacagacggagaaaaagtgacagtaatgaaaggtgtcggtcttgttaacgaagtatttggccacggagagttagagcaactaaacggtaaagcagcaattggacacgttcgttatgcaacagctggaggcggagggtttgaaaatgttcaaccccttcacttccgctctcatagcggaagccttgcgttagctcataatggaaacttggttaatgcaaatgcattaaagcatcagctggaaaaccaagggagtatttttcaatcaacatcggatacagaagtacttgctcatttaattaaacgaagcggttatgaagatatgaaagataaagtgaaaaatgctttatcaatggttaaaggcgcatacgcattcgttatcttaacagaagatacgatgatggttgcacttgaccctcatggattgcgtccgttatcaattggacgattaggtgatgcttatgtagtagcttctgaaacatgtgcgtttgatattgttggagcagttcatgagcgtgatgtagagccgggtgaattactcattattaacgatgaaggtattcaatcagaacgtttcacattaaacgtaaaccgcgcaatttgcagtatggaatatatttatttctcaagaccagatagcaatattgatggaatcaatgttcactctgctcgtaaaaaccttgggaaacaacttgcagttgagtcaccgattgaagcagacgttgtaacaggcgttcccgattcaagtatttcagcagcgatcggttttgcggaacagtcaggaattccatacgaattaggtttaattaagaatcgatacgtaggccgtacgttcattcagccttcacaagaattgcgtgaacaaggtgtaaaaatgaagctgtctcctgtacgtaaaattgtagagggtaaacgtgttgtcatggtagatgattctatcgttcgcggcacaacaagccgtcgcattgttcgtatgcttcgagaagcaggagcaactgaagtacatgtacgcatcagttcaccacctatcaaaaatccatgtttttatggaattgacacgtcgtcatcctctgagctaattgctgctacgcgctctgttgaagaaattcgtgaattgattgaagctgattcacttgttttcttaagcaacgaagggttagtagatgcaatcggcagacagtatgaaggcaacggcggacagtgtatggcatgtttcactggaaagtatccaactgaaatttatccagatactgtacaccctcatgaaaaggtaacttgttagttttaacgtaaaaaaggagtgacaacatgtcatattcatataaacaagctggagttgacttagaagcaggatatgaagctgtttcacgtattaaaaagcacgtagaacgcactgctcgtgcaggtattatgggaacagtcggcggctttggcggaatgttcgatttatctacattgaatttaaaagagcctgttcttgtttctggtacagatggagtaggaacaaaattgaaacttgcttttcaaatggataagcatgacacaatcggtgtggatgcagtggccatgtgtgtaaacgacgttttagcacaaggagcagagcctctttacttcttagattatattgcttgcgggaaagcagttcctgaaaaaattgaatcgattgtaaaaggaattgcagacggctgtgaacaatccaactgtgcgttaattggcggagaaacagctgaaatgccaggtttatacgaagaagatgaatatgatcttgcagggtttacagtaggagcagtagaaaagtcagaaattattactggagatgagattaaagctggacagctgttgatcggtatttcatctagcggtattcacagcaacggctactctcttgtacgtaaaatcgttgatgatcaaggattaaatcttcacgaaacttacgctggttttaatgaaaagctcggagttgagttattaacgccaaccaaaatttacgtgaagccggtcctaaaagcattacatgcagctaagattgcaggtatggctcatattactggaggcggatttgttgaaaatatccctcgtatgcttcctgaaggtttaggtgtagaaatcgattacggttcttggccaattccatacgtgtttgatttccttgaagagcaaggcaagttggaccgtaaagaaatgtttgaagtattcaacatgggaatcggatttgttttagctgttgaacctgaagatatgaataaagtcattgaagcaattgaaaacgaaggcgaaaaagcatttgttatcggacgtgtaaaagaaggaacaggtgttgaatttgctggagggacgtttgcatgataaatattgcagtgtttgcttctggaaacggcagtaactttcaatccatctacgaagcaactcagtcaggtcgattaaaagcaaatattgcgcttgttgtttgtaataaaccggatgcatacgtaattgaacgagcaaaagcatgtggaataccatgctttgtttgttcgcctaaaaactatgaaaataaagaagcgtatgaagcagcaattcttgcagagcttacatcagctaaagtagaatttcttgttttagcaggatatatgcgattagttggttcgacgttgcttaagccatacaaaaatcgtattgttaatattcatccgtcacttttacctgcatttcctgggattgatgctattggtcaagcttttgatgcaggagtaaaagtgattggaattaccgtgcattttgtagatgaaggaatggatacagggccaattattgatcagcaggctattcgcattgaaaaaggcgatacaagagaaaccgttgaggcccgcattcatgaaattgaacatcaattttatcccgcggtactaaatgaattatttgaacaagcggcagttaaataaataggatgtaaccttgtcaaaaaagttttaatcctttactatggtagagtagtagtgaaagaaagattttaaatgagagatcggatcaggaggagtttacaaaatgacagcaaaacgcgcacttattagcgtatctgataaagaaggtattgtttcatttgcacaagaattaaaggacttaggagtagaaattatttcaactggcggtacaaagcgtaccctagaagaaaacggcattgacgttatcggaatttctgaagtaactgatttcccagaaattttagacggccgtttaaaaacattgcatcctaacgttcacggtgctttattagcgttacgcgataatgaagagcatcaagcacaaatgaaagagcataatatctcgccaatcgactttgtagttgtaaacttatatccatttaaaaagacaattgaaaaagaggatgtaacgcttgctgaagcgattgagaatattgacatcggtggacctacaatgcttcgttcagctgcgaaaaactatcgttctgtctcagttgtagtagatccaagcgattacgcaaccgtagtagaagagttaaaagctgatggcaatgtttcatttgaaaccaatcaacgattagcagcaaaagtattccgtcatacggcagcttatgatgcattaatcgctgaatacttaacaaacattacaggtgaaacaactcctgagaaattaacagtaacgtatgagcgtgttcaaggcttacgatacggagaaaatcctcaccaacaagcttctttctataaaaagccgttaacacaaaaaggttctattgcaacagctacgcagctgcatggaaaagagttatcatacaataatatcaacgatgcaaatgcagctcttcaaatcgtaaaagaattcaaagagccggctatcgtagcgatcaagcatatgaatccttgcggtgtaggtgtgggtgaaacaattgctcaagcttatcaaaaagcatacgaagcggatcctacatctatttttggcggcatcgtagcagctaaccgtcctatcgatcgtgaaacggctattcagttaaaagaaattttcttagaaatcatcattgctcctgcgttcgatcaagaagcattagatgtattaacagctaagaaaaaccttcgtttactaacgatagagcttgatgaaaaagcagaaaaagaagctttcttaacatctgtaaaaggcggcgttcttgttcaggatgaagatgtgttcggatttgatgatgcaacgattactgtcccaacgaaacgcgagccaacagaaaaagagtgggcagatttaaaattagcatggaaagttgttaaaaatgttaagtctaatgctattgtacttgcaaaagatgacatgacaatcggcgtaggggctggtcaaatgaatcgtgtaggcgctgcaaaaattgcgattgaacaagctggtgaaaaagcacaaggttcagctttaggttcagatgcgttcttcccaatgggggatacagtagaagcagcagctaaagcaggaatcacagctattattcagccaggcggatcaattcgtgatgaagagtcaattgcaaaagcagatgaatacggcattgcaatggtatttacaggcgtaagacattttaaacattaatgaggtgaagaacgtgaatgttttagttattggaaaaggcggaagagagcatacaattgcatggaaagcttcaaaaagtccacttgttaacgaagtgtttgtagcaccaggaaatccgggcatgagagatgtggcaacgattgtaccaatcgatgaaagcagccaagaagagcttgtgctatttgcaaaagaaaacaagattggattaacaattgttggaccagaaaatccgctaattgaaggcattgttgatcgatttgaacaagaaggtcttccagtctttggaccgcgcaaacaagcagcgatgattgaaggaagcaaaagctttgcgaaagagctcatgaaaaagtatgatattccaaccgcagcgtatgaaacatttacgtcttacgaggaagcaaaagcatatgtggaaaagcaaggcgctccaattgttattaaagcagacggcttagcggctggtaaaggtgtaactgttgctttaacagtggaagaagctgtagatacattacgtgattttctagttgaccaaaaatttaaagaagcaagtgcaaaagtagttgtagaagaatttttggatggtgaagaattttcattaatggcatttgtacgcggtacaaatgtatatccaatggtaattgcacaagatcataagcgtgcttttgacggcgatcaaggaccgaacacaggaggcatgggagcttactctcctgttccgcaaatcagtgatgcagaagtacaagaggctgtagaaaacatcttacttccaatggctaaaggattagctgaagaaggctgtgagtatacaggaattctatatgctggtctgattcaaacacaaaaaggaccaaaagttattgaatttaatgcacgttttggagatcctgaaacacaggtagtactgccgcgtatgaaaagcgatttagtcgatgtgcttcttcgcattttgaaagaagaaaaagtagaaattgaatgggatgatgaagcggctatcggaatcgtattagcagcagcaggctacccagaagattatcaaaagggtgcgccaattaacgggttggatgcgattagtgaagacgcgcttgttttccacgctggtacagctttagaaaacgacacatacgtttcaaacggcggccgtgttctattagtaggtgctaaaggagcaactcttcaagaagcgcagcaagaagtatacaagcaaatggctcatatcgatgtagaaaaaggttttttctaccgcaaagacatcggccatcgtgcattaacaaaagcagctttaaaataaaaaaggagagctccggctctcctttttaccttatgaaggattatacgtttcttcatttccatttggatggtgttcatgttcatcatgtttttgacatgaatcatatgcgtacgtaagagggcaaaaacgcgtgatgccttctgcaacttttaaagctcccattaaccctaagaagatgtatgaatctttgtacggtctgcgagataaacgagatgttgtccaagaaagaagggtaaagcccagtgtaagtcgaattaatgcgttaacaatgccgatatttggtttcatgttttatcacctttattcataaaattaataacagtttctgaatgcgtttacatcacggatgtgttacgataaaaatacatagtaaattagggggaatttagcatgccggaacaaagataccgctggaaaagcaaacatattagacagcagctcttagtattaaacggtcaaaaagcaccaactattgtcttaaaagatgcaacatatttgaacgctcgaatgaagcagtggaaaaaagcacatatttgggtttaccaagatcgtattgtatacgtcggctcagagatgcctaagcacacagacgcttctacagagattatagactgcagtgataaatatgtggttcctgggtatattgagccgcatgttcacccgtttcagttatataatccccagactttttcccaatatgcagccaagcacggaacaacgactttatttaatgataatttaattctcgctttacagcttgaacaaaaaacggcattttcattgattgaagaaatgaaaacgttaccacaatcgctgtattggtggtgcagatttgattcccagacggaaattgatgaagaggctgacatcttctcacatacgaacattacttcttggctacaaaatgaagctgtcttacaaggaggcgaactgacaagttggccgaagctattagacggagatgatttaatgcttcactgggttcaagaaacaaaacggatgagaaagcacattgaaggacatttcccgggggcgtcagcatttaccttggcaaaaatgaaattgctcggagcagacagcgatcatgagtctatgacgggggaagatgttgttgctcggttaacacaaggctatgacgttgctttgcgccactcttcaattcggccagatttgccaaaattactgcaggagttaaaagagctgcaggtagattattttgatcatattacgatgaatacagacggttctccgccttctttttaccaaaatggcgtgtcagatatgttaattacattagctatttcagaaggggttcccgtgttagatgcttataatatggtgtctgtaaatattgctcgctattataacatggaacatttgcacgggcatgtagcaacaggctgtgtggctaatattaatattttagaagatcctatgcggcctactccggtctctgtgctagcaaaaggaaagtggatgaaaaaagaaggcaaagaacaagcattagcctcagtagaatttccttgggaaaagtttggtttttcaccgttaaagttggactttgatttaacgatggacgattttcaattttcaatgccagtaggcgtaaaaatgaaaaatgctgttattatggagccgtattcaattcacttgaatgtgagcggagatgtattagcctctgatcatgatgaaagttttttagtgctggtggaccgagaaggcaagtggcggatcaatacgctgttaaaaggatttgcgacaaatgtatcgggactggcgagttcattttcaaatacaggtgattttattttaattggaaaatcgaaaaaagatatgatgtgtgcatttaaacgcatgaaagaaattggaggcggtattgtcattacagatgatgagaaagtagtatacgaactggatcttccgttaaaaggagtcatgtcgaatctgccgatggaggagttaagtaaacgagaggtagaactcaagaaagtgctgggtgagcgaggatacaaacacgatgatcctgtctattcactgctgttcttttcgtctacacatttgccttatattcgtatcacgccagtaggaatttatgatgttatgaataaaaaagtactttttccgtctataatgcgttaaaatataaaagtatcaaaggaatttgaaatttgtatgaaattggctgtcttcatacagaatgaatgtatgtgcaaataaatatagaaactgtattttatagatagaaacaaccagtaaagaaagccaatgataaaggagttcgatacgatgcaaatcaacaaactacgaggaaaagaattagatcagctatttcaagcgattttatcattagaaaacattgaagaatgctatcaattttttgatgacctatgtacagttaatgaaattcaatcattagcacagcgcttagaagtggcaagaatgctgagagaaggcaacacgtaccataaaattgagacggaaactggagcaagcacagcgactatttcccgtgttaaacgctgcttgaattatggaagcgatgcgtatcaaatggtgttagaacgccttcaagaagattcaaatcaaaagtaaagcgtatggctgaagcagccatacgcttattttttacttaaaattgagttgcttcttcaatgatatttttaaggtcgctaattgctacacgtttttgttccattgtgtcgcggttacggattgttacttgattgtcttctaatgaatcgaagtcgaatgtaatacagaacggcgtaccgatttcatcatggcgacggtaacgtttcccgattgaaccagcatcatcatagtcaatcataaagtattttgctaaatcttcaaagacagcgcgagcttcgttagaaagctttttagaaagtggcaatacagcagctttaaatggtgctaaagcagggtgaagctgcataactgtacgagaagagccatcttctaacgtttcttcttcatatgcatcaatcatataagctaatgttacacggtcagcgcctaaagaaggctcgatgcagtaaggtacatagcgttcgtttgtttcttgatcaacatattggaagtcttctccagagtgttccatatgctgctttaagtcatagtctgtacgagaagctacgccccatagttcgccccagccgaatgggaacttgtattcaaagtccgttgttgcattgctgtagtgagaaagttcatcatcatcatgatcgcgaagacgaacgtttgcttctttcataccaagagaaagaagccatttgttacatgtttctttccagtagttaaaccactctaattcagtgcctggtttacagaagaattcaagttccatttgttcaaattcacgcgtacggaatgtgaagttaccaggtgtaatttcgttacggaagcttttacctacttggccgataccgaaaggaagctttttacgcattgagcgctgaacgtttttaaagtttacgaaaataccttgagctgtttcaggacgaaggtaaatttcatttgttgatgtttcagttacaccttggtgcgttttgaacattaagttaaattgacgaatttcagtgaagttagctgaaccacactcaggacatgtaatttcatgttctttaattaagtcagccattgcatcaaatgaaaggccgtctacgatcatttcaatacctttttcttgaagtttttcttcaattaatttatcggcacgatgacgagctttacaatccttacagtcgatcattgggtcattaaagtttcctaagtgaccagaagcttcccatgtttttggattcattaaaatcgcagcgtctaaaccaacgttgtatggagattcttgaatgaattttttccaccatgcttttttaatattgttttttaattctacgccaagcgggccgtaatcccatgtatttgcaagaccgccgtaaatttctgatccttgaaatacaaagccgcggtgtttagcgtgagatacgatttgatccattgtttttgacattctaattcctcctgtaaatggtagtgattcaagcgaaacaaaaagagcgggtacaaaaaaactctcgtccctgggcatatcaacaatatgcccagggacgagagtttttcccgcggttccaccctggttgatacaaaatgtatccaccttcgtctgtatatactccagattgccttttccttaaaccattctctaggctcccaccgtccctagttcgctttgtgaagaggatttaagtactattgatccttcagcgtatatcatatgaattttagtagctatatattagcatatcctatgcagagaaacaataaccttgtgcaaaatgggctttttttgtgatgttttcttccggaatttgaggataaaaccatatcttttatacatattttttgaaaacaaaaaacgtgatgaaaagttcggttttcctttcatttcaccctcttagttttgttataatgaacaaatggacgagcgcgaacttttaagtgtaaagaaatggaggaacatatatgtatgatattaaagagtggagacatgtctttaaattagatcctaataaagagatttcagatgaagatttagagaaaatttgcgaatccggcacggatgcggttcttgtcggaggatctgacggagtgactctagacaatgtactgcagctgttaatgcggattcgtcgctacacggtgccgtgtgcgcttgaagtatcaacaattgactctgtaacacctggctttgattcttattttattccgaccgttttaaacagcaaggatccaaagtggattgttgatttacatcacgcggcgatgaaggaatacggagagatcatggactgggatgaaatttttgtagaaggatactgcgtacttaaccccgaagcaaaagtagctgcgctaacggaagcgaaaacagatttgaacgcagaagacgttgtagcgtatgctcgtatggctgaacgcatgtttcatttgcccgttttttatctagaatacagcggaaaatatggagaccctgcattagtggcagaagtgaaaaattcgctaaatgagacgaagttattttacggcggaggtattgagacaaaagagcaagcgagtgagatgggagagctagccgatacggttattgtaggaaatgttatttatacaaatttatcggaagcgttaaaaactgtaaaagtagtaaaaaagaatattgcacagtgaaaaataaataaagtagaatagagaatatatgttcgatataggcggtgaaaacgtgaattttttaagtgaaaaattattaacaggattaaaccctcagcagcaagaggcagttaaaacaacagacggaccactattacttatggccggtgcaggaagtggaaaaacacgtgtattaacgcatcgaattgcgtttttaatggcagaaaaagaagttgcaccttggaatattttagccattacctttacaaacaaagcagctcgtgaaatgagagagcgtgtggcaagtatagttggaggagtggcagaagatatctggatttcaacgttccactcgatgtgcgtgcgtattttacgaagagatattgatcgtattggctttaatcgtaactttacgattttagattcaacggatcagctgtccgttattaaaaatattttaaaagatcaaaacatcgatccaaaaaaattcgatccgcgctcgttattaggaagcattagttcagctaaaaatgaactgaaagtagcggaagaatttgataaaacagcagcgggaccatatgaagaagttgtaagcaaagtctacaaagagtatgaaaagcgtttaaagaaaaaccaagcgctcgattttgatgatttgattatgacaacgatccagctatttaaacgagttcctgaagtgttaacttactatcagcgcaagtttcaatatattcatgtggacgagtatcaagatacaaaccatgcacagtatatgctggttcgcttgctagctgcaagatttgaaaatgtatgcgtagtaggggattcagatcagtctatttaccgctggcgcggggctgatattacaaatatcttgtcatttgaaaaagattacccaaaagccaaaaccattttgcttgaacaaaattatcgttcaactaaaacgattttggctgcggcaaacggcgtcattgcaaacaatatgaatcgtaaagtgaaaaatttatggacggaaaatgatgaaggccagaagatttatcattaccaagcaatgagtgagcatgatgaggcacaatttgtagcacgtaaaattaaagaagcagtagacagcggaaagcgtaaatacagtgattttgccattttgtatcgtacaaatgcacagtctcgtgtgatggaggaagtgctgttaaaatccaatattaattatacaattgtcggcggcattaagttctacgaccgcaaagagattaaagatttgcttgcgtacttgcgcttaattgccaaccaagatgatgacattagcttagctcgtattgtgaacgttccaaagcgcggagttggagctacttcagtcgataaagtggccaattacggaaacgttcatgacatttctattttcaaagcgctggatgaagtagaattaatggggttaacaggcaaagcaacaaaagcccttcgtgatttccaatcgatgatttcgaacttagctcaaatgcaagactatatgtctgttacagagcttgtggaacaagtattagaaagaacaggataccgtgaagcgcttaaagtggaaaaaacaattgaagcacaaagccgcttagagaatattgatgagtttttatctgtcacaaaaacgtttgaagaagcaagtgaagataaaagcttagtagcatttttaaccgatttagcacttgttgctgatatcgataagcttgacgacgaggaagaagaagagaacgaacaagtgattctgatgacgcttcactcggcaaaaggtctagagttcccggttgtttttctaatgggtatggaagaaggcgtattccctcatagccgatcattattcgaagataatgaaatggaagaggaacgacgcttagcctacgtagggattacacgtgctgaacaagaattgtatttattaaatgctcaaatgcgcacactatttggtaaaacaaacgttaatccaaaatcgcgcttcattggagaaatcccaagcgagcttgtggaatctttaaatgaagcaatgcgcaaacctgctgctggtcgttcaggggcttcagcttcgccgtttgcagcgcgccgacaagcggccgtggcaaaaacgaagcttgtgtcaacaggcagtgaatcaattggatggagcgttggagataaggccgagcataaaaaatggggaattggtacagttgtaagtgtaaaaggagaaggagattcaaaagaattagacattgcttttcctagtcctacaggtgtaaaaagactgcttgctaaatttgccccggttacgaaagtgtaatcgtgaaaaggagctagaatatggagtttgagacagcaaaatcacgcgttcaagaattacgtgacttattaaatcaatatggctatgaatattatgtgttagatcagccatctgttccagatgcagaatacgataaattaatgaatgagttaattgagatagaagaatcctttccagaattaaaaacagctgactcacctactcagcgcatcggcggccaagtgctcgatgcgtttgagaaggttcagcatcaaacgtctatgctaagtttaggaaatgcatttaatgaagaagaccttcgggattttgatcgccgagtgcgccaagccgttggagatgagttttcttatgtatgcgaacttaaaattgacggccttgctgtatctcttcgctataaagatggatacttagtgttgggggctacgcgcggagacggtacgactggtgaaaatattactgaaaacttaaaaacaattcgctctattccactgcgaattaaagaaccgttatcaatggaagttcgcggagaagcatttatgccgagaaaatcattcgaagcacttaatgaagcaaaaatggaaagggatgaagttccgtttgctaacccgcgtaacgcagctgcagggtcactgcgtcagctagatcctaaaattgcggcaaaacgtaatttagatatctttgtatatgccatgactgatacaggagaattagaaatcgactctcacagcgaaagtttgaatttactcgatgagcttggttttaaaacaaataaagaaagacagacgtgtgaaaccattgatgatgtgattgcttacatcgaaagctggcaaacgcaacgtccagaactatcttatgatattgatggcattgttgtaaaagtagattcatttgatcagcaggctgagcttggaacaacggccaaaagtccacgctgggctattgcttataagtttcctgctgaagaagttgtaaccaagcttgtaaatattgagctgacggtaggccggacaggtgtcattacgccaacagctattttggagccggttcaagtagcaggtacgacggtacagcgtgcgtctcttcacaatgaagatttgattcgtgaaaaagacattcgcatcggagattatgtcgtagtgaaaaaagcaggagatattattcctgaggtagtgaatgtgattgaggagaagcgaacgggagaagagcaagattttacgatgcctactcactgcccggaatgtgaaagtgaactggtgcgtttagaaggagaagttgcgcttcgctgcattaatctaagctgtcctgctcaaattcgtgaagggcttattcattttgtatcccgcaatgcgatgaacattgatggacttggtgaaaaagttatatcgcaattatttcgtgaacagttaattaaagatgtagcggatatttatacgctgacaaaacagcagttaatcgagcttgagcgcatgggtgagaaatctgctgataatttgattgcggccatcgaagcatcgaaagaaaattcgcttgagcgtttgctttttggtttgggcattcgccatgtcggagcaaaagctgcaaagacgttagctcagcactttgaaaccatagacaagttaacaaaagcaacgtatgatgaattagtggcaattaatgaaattggtgccaaaatggctgatgctattgtcgcttactttacacaagaagaggttcaagaacttatacatgaattaaaagagtatggagtaaaccttacatacaaaggacccaagcttgtaagtgtagaaaatgtagattctgtttttgctggtaaaaccgttgtattaacaggtaagcttgaacagctatctcgcaatgaggcaaaagcacaaattgaagcacttggcggtaaagtcacaggaagcgtaagtaaaaagacagaccttgttgtggcaggggaagaggctggttccaaactgacaaaagctaacgagcttgaaattgaagtatgggatgaggcaaggctacttacggaattaaataaataagaggtgtgtgtagttgaaaaagatattgttactttctcttgcggtcatgcttgtaacttcagcgtgtgcaccgaatctttcggatgataaagagactgttcaacaaaccaacaacaagaaagaaaaagcagttattccgaagtatagtatttcagatgattattaccgaacaattcttccatttaaagcgggagtggcaagaggcttagtagcagcaaacttaaacaaccgcttggatgcgcaagaatttgaaacaggcttaatgcgcttatcgacagatagctattctccgaaaaaatatgtgtatcaagaaggccagtaccttgataaagatactattcgctcatggttaagccgtaagctgagcgataaacagtttaaagatcttcaaagcaaaacaaaagatgctacggcgaaaaagaagcttaaaaacaatgggttaaatccaatcgatacggaaaaaggcgatttgaaaactcgtaacgaaacaagcccaatgtacttagcgaacattactgagcaagactaccttattcaagacggagacgacaaggtcaaacttggaggcgtcacaattggcctggcgatgaattctgttcattattatacagaagaaaatggttatgctcgtgaaaaacagctaactgataaaaatattgaagagcaaggcaaaaagatggccgatgaaattgtgcagcggatgcgtaatatcaagggcttagaaaacgttccaattcgagtagcgttatttaaacaaagtgctaagtcctctttaacgccaggtaactttatggctgttggaaatgcaggttcaaatgatacggccgttggcagctgggatgatttagacgagaaatattatttattcccatcatcagatgcaacaaaagatcaccgagatgatgcaatgaaatttgatgagttcaaagcgcaaatcgaagactacttcccgaactttacaagcgtagtagggaaagggtattacaaagatggacagcttcaaaaaatgacgattgatattcccgtccaattttacggaaaaggtgaaattgtaggatttactcagtacgttgctggtttaatgcttgatcatttcccttcatatatggaaacgagtatctctattaactcagtaagcggacctgaagctctcattgttagaaaagcagatgaggacaagccgttcgttcatatttacgaagagtaagaaaaaaagacactgctcaagcagtgtctttttctaattctatgaaattgcctcctatgaaggaatggcgtgagaattttgtcttgtaaacttagcaagataataagcagcaaatgcaaatgcatcttgttcggttgtccgcttttcatacgggcgctttttatccagctcaaattctttctgataataagggatatgatcttgaatatagtggcgcagctcgtgaaagatcgtttcaataagcggaagatagtcatcaaatttaaaaataaatataatgccgacttctcgccagtaaacgcctgatgcaaactgcaggtattctgcttcttcttctccaagagcagagacaattttattggcttcgcatgaatcacaaaaaattataggaatatgaaaggctttatttaaacaagcaaaaacatctttttgcaaggtggacaaatcccacttgaattcttcatctaatacaaaccatcttccgctttgctgatacacagggcgctggtgaatgactgactgtataagtattttattcaatttttatagcacctcttttatggtaaagtagttattcgttttctttactttcccaaagactagtgaaattaaaacatggtggtgtgttcatctgaagcatgtttctctttctatctatcttttctaaaaagaaggttattttatacctatgcaagagagaaatattttatgacgaaggaaaagtatggaatgttgtttgaatgaaatagatttggtataaaatagaagtgataaatgtaagccctgtcttgcctggcggggtttttaatattttaggaactagtctcagaaatgttgcctgttgctagtgaagtttggtattatcagtatattgtagtgggacgaatattcggaggtgaaggaacatgtcaagaatttctgttgatcaagtaaaacacgttgcaaacttagcgagacttgcggtgacggatgacgaagcagaactatttacaaaacaattagatgctattattacatatgcagaacaattagatgagttagatactacaaatgtaaaaccaacttctcacgtattggatatgaaaaacgtaatgcgtgaagataagccagctaaaggtttaccaattgaagacgtagtaaaaaatgcgccagaccacaaggatggctacattcgagtaccaactattttagaataaggaaggaggctttacgatgtctttattcgatcgtaaactttcagaactacatagccttttacacaagaaagaagtacgtgtacaagatttagtagacgaatcatataaacgtattaatgaagtagatgataaagtaggtgcgttcttagcgcttaatgaagacaatgctcgtgcttatgcaaaagagctagatgaagcactacaaacaaaagatgaatttggcctattatttggtatgccaatcggtgtaaaagataatattgtcacaaaagatttacgtacaacttgttctagtaaaattctagcaaactttgatccgatttatgatgcaacagttgttcaaaaattgcaggcagctgaagcggtaaccatcggtaaattaaatatggatgaattcgcaatgggttcttcaactgaaaactcaggtcttcagttaacgcgcaatccatggaatttagattacgtaccaggtggatctagcggtggttcagctgcagctgtagcagcaggcgaagttccgttttctttaggttctgatacaggtggttcaattcgtcagccagctgcttattgcggtgttgtcggattaaaaccaacgtatggtcgtgtatctcgttacggattagtggcatttgcatcttctttagatcaaatcggaccaatcacaaattctgttgaagataatgcatacttacttcaagcaatttcaggcgtagacccaatggattctacttctgctaatgttgatgtaccggattatgtatctgctttaacaggtgacgtaaaaggtcttaaaattgctgttccaaaagaatacttaggcgaaggtgtgggcgaagaagctcgccagtctgttttagatgcactaaaagtgttagaaggactaggcgcaacttgggaagaagtatcgcttccacactctaaatacgcattagctacgtattatctattatcttcttctgaagcgtctgctaacttatctcgttttgacggcgttcgctacggatatcgtacagataatgctgagaacttaatcgaaatgtacaagcagtctcgaagcgaaggctttggaaacgaagtaaaacgccgtatcatgcttggaacatttgcgttaagctctggttattatgatgcttactacaaaaaagcacagcaagtacgtacgttaattaagcaagactttgagtctgtatttgaaaactatgacgttatcattggaccaactacaccaactccatcattcaaaattggtgagaaaacagacgatccattaacaatgtatgcaaacgatattttaacaatcccagtaaaccttgctggagtacctggtatttctgtgccttgcggcttatcaaatggattgccattagggttacaaattatcggtaagcatttcgacgaaagcacaatctatcgtgttgctcatgcattcgaacaagcaactgagcatcataaagcgaaaccagcactgtaaggggtgagataaagatgaactttgaaacgattattggtcttgaagtacacgttgagcttaagacaaaatctaaaattttctcagcaagtccaaacgcatttggtgcggctccaaatgctaacacaagtgtaattgacttaggttatcctggcgtattacctgtgttaaacaaagaagcagtagattttgcaatgaaagcagcgcttgcgctaaactgtgaaatcgcaacagatacaaagtttgaccgtaaaaactatttctatccggataacccaaaagcttatcaaatctctcaatttgataaaccaattggcgagaacggttggattgaagtagaagttaaaggtgaaacgaagcgtattcgtatcaaccgacttcatttagaagaagatgctggtaagttaacgcatacaggcgatggctattcactagtagacttcaaccgtcaaggtacacctctaattgagattgtatcagaagcagatatgcgttctcctgaagaagcatatgcttatttagaaaaattaaaatcaattattcaatatacaggcgtatctgattgtaaaatggaagaaggttcacttcgctgtgatgccaatatttctttacgtccagttggacaagaagagttcggtacaaaagctgagttaaagaacttaaactcatttaactacgtgcgccgcggtcttgaacatgaagaaattcgtcaagaaaaagtgttattgtctggtggcttaatcgagcaagaaacacgccgttttgacgagtctacgggcgaaacaattctaatgcgtgtaaaagaaggatctgacgactaccgctacttcccagagcctgacttattagaattacacatcgacgaagagtggaaagaacgcgttcgtgcttcgattcctgaacttccagatgctcgtaaaaagcgctatgtagaagagcttggcttacctgcttatgatgcaatggtattaacgctaacaaaagaaatgtctgatttctttgaagcaacgcttgctgcaggcggagacgcgaagctatcttctaactggttaatgggtgaagtttctgcttacttaaactctaaccaaaaagaactttcagatgtagccttaacacctgaaggtctagctggtatgattcaattaattcaagaaggtacaatttcgtctaaaattgcgaaaaaagtattcaaagaattaattgaaaatggcggagatgcaaagaaaattgtaaaagaaaaaggtcttgtacaaatttctgatgatgcaactttacgtaaatttgtaacagatgcattagatgcaaaccctcaatctattgaagatttcaaaaacggtaaggatcgtgccattggcttcttagttggtcaaattatgaaagcttcaaaaggccaagcgaacccaccgatggttaataaaattcttttagaagaaattaataaacgctaaatttgataactaaatgtgaggtggatatccatctcacatttattatgagtaagggcgatcgcgctgaaggtatgaataaaaatcgaaacgtgaatattgtatatcaaggttaatttctttataatatgtttgttcatgccccctcttgttgatgatgtaatgtgagggggcattctttcactgataaaagtaggcaaagatttgtgacaaattatcattattaggatgatgaatatgaaaagagcgagaattatttataacccgacatcgggccgtgaaatttttaagaaaaacttaccggaagtcttgcaaaagctagagcaagcaggctacgaaacatcttgtcatgctacaacttgtgctggtgatgcaacagaagctgctaaagtagcggtagaacgtcgttttgacgttgtaattgcagccggtggagacggtaccatcaatgaagtcgtaaacggtattgccggacaagactatcgcccgcagctaggtattattcctgttggaacaaccaatgactttgctcgtgccattaatgtgccgcgcacgattgaaggcgctattgatgtcattgtagaaggcgtaacaaagccaattgacttgggctgtgtaacaaacgacggagaaacgcattactttgtaaatatcgccggaggcggccgtttaactgaattaacatatgaagtgccaagcaagttgaaaacaatgcttggacagctagcttactatttaaaaggcatggaaatgcttccttctattaaaccaacatctgttgaaattgagtatgacggaaaattctttggcggcgagattatgttcttcctcgtttccttaacgaactcagtcggcggttttgaaaagctggcaccagattcttctttagatgacggcatgtttgatttaattattttaaagaaagcaaatttagctgaattcattcgaattgcgacacttgcgctgcgaggagaacatatcaatgatcctcatattatttatacaaaagcgaaccgtgttaaaattcatacgaatgataaaatgcagttaaatctagatggcgagtacggagggttattgcctggagaatttgtaaacttatatcgccatgtagaaatctttgttccaaaagcaacagctgaattgatggaaaaaaatgagatcgcctaattgcgatcttttttcatgcttttctttgtttggctttcgctcttatggtacaatcagttcagcattttcaaatgactaaaaggatgtaacgataaatggaaaaattaaaaccacctgtagaaaaaaatgaatatatagatgttgcgtttgaagatttaacgcatgacggagcgggtgtagcgaaagtgaacggatttcctgtcttcgttcaaaatgcgctgcccggcgaaagcggccaagtaaaagtcattaaagtaaaaaaaggctatgcgtttggcaagcttatcaagcaccatacaattagtgaacagcgtgttgaagcaccttgtccggtttacaagcagtgcggaggctgtcagctgcagcatgtaagctatgaaggacagctgcaatttaaacaaaagcaagtaaaagacgtcatggcgcgaattggccatttacctgacgttccggtacattcgacgctaggaatgaacgatccttggcgctatcgaaacaaagctcaagttcccgtagcagaacgagaaggcgggttggtcgctgggttttatcagcagcgaagccacgacatcattaacatggatgcctgtttgattcagcagcaggcaaatgatgatgttgttcaagctgtcaaatcaatctgtgaaaagcatggcgtttctgcttaccaggaacaaaaacataaaggctcacttcgtcatatcatggcgcgctacggacttgtaacgggtgaaattatggttgtaattgtgactcgtacagctgagctgccaaacaaaaagcgtattatagaagacattatcgaagccgtacccagtgtgaaatcaattgttcaaaacgtaaacagcaggcgcactaacgtcattttagggaaccaaacgaacgtactttggggagaagaatatatttacgactatatcggtgacgttaaatttgccatttcagcaaaatcattctaccaagtaaaccctgagcaaacgaaagtgctttatgacaaagcgcttgagtatgcagatttaacaggagaagaaacggtaattgatgcctactgtggaatcggaacaatctcattatttctcgctcaaaaagcgaaaaaagtatatggcgttgaaatcgtgtctgaagcgattgaagatgcaaagcgcaacgctgagctaaacgggattcacaacgctgaatttgaagtaggcgaagcagaagtcgtcattccaaactggtacaaacaaggcatcaaagcggacgtcatcgtcgtagatccgccgcgaaaaggatgcgacgaagctcttttgaataccatcattgacatgaagccgaaaaaagttgtctatgtttcatgcggaccagcaactcttgcacgtgacctagctattttagaaaaaggcggatatgagacggttgaagttcagcctgttgatatgtttccgcatacgacgcatgtagagaatgtggcggtgcttacattaaaataagagggtaaatacgtagatcgctatcaatgaaatgatagcgattttttattttccttataaataaaggtataagtaaataaacttatagttcctttgtcgtaaaatgtctaaaagtaaatagttatattttcttaaaatcctgatattataggtctgtagtattatttttggaatattgataagggggacctatatgaaaaagtctttaagtgctttattgggagtaagtttattagtgtctggattaacgctaggcgcggagtcaagttatgcagagtcaagtactaattctaatgtgaaaaaggctacgcaacagttgaatcctactatccaagttcctgctaataaagtgaagaaaaaagaaaaaaatttatttagcagtagctctaaaaaggaaactagaagaggaaagataactgaagaggatgcaaaaagaggatacataaaagacgaaattattgttaagtttaaaacgaataagtctcttagtagtctaggagataaaacaaaggtaaaagggttaaagttaaataaaacgttagataagaaactgggaattcaaacgttaaagtttgatacgaatgtatcaactatgaaagaaatcttaaaagtcttaaatgcttccagcgctgtggaatatgctgaacctaactatatttataaaccagcagctgtttcagagccatattatcaatatatgtggggattaaaaaatacaggtcagtatatagatggaatggcagggaaaaaaggtattgatataaacgctgaaagcgcttgggtgaaaacaaaaggaagcgctagcactacggtagctgtaattgataccggtgtagatatttatcacccggatttaaaggataatatttggaaaaacactggagaaattcctggtgacggagtagataatgatcataatggttacgtagacgatgtgaacggctggaatttttatgatggaaacgaagatgtttattatgacgaaacagaagatgatcatggtactcatgtagctggaacaatcgcggctaaggagaattcagtgggtgtaatgggtgtagcacctaacgtcaaagtcatgcctttaaaatttattggtcctgatggtggtagcacagatgatgccattgctgcaatcaattatgcaaaatcaaaaggtattaaaatatctaataattcgtggggaggcggacagtattctcaggctttatatgatgttattaaaaactcaaactctacgtttatagcggcggctggaaacgatggtgacaatattgattattatgccgcttatccagctgcttttgacttacctaatatcgtttctgtagcagcggtagataaccaaggtaatttaggctacttttcgaattatgggagtaaaaatgtagatatagctgcaccgggtgtttctattttgagcacgcttcctgagaatagttatggctatttcagtggaacatctatggctgctccgcatgtaacgggtgtagcatcattggttttagcagcaaatccatctttcagttctgcacaactaaaagatacattgatgaaaagtaccacaaaactgtcatctttaacaggaaaagttgcaagcggcggtctagttaacgctggattagcggtatcagctgatatagatggagaaatacctggagtgtctttaaatggaaatagcataagctctaccttgaacgcctccacagataaagatgatgtatattcaataaagttaacaaaaggcgaaaagtttacggtgtcgttatcaggagctgcggggacagattttgatttgtatttgtataatcaaaatgcaaaaactgtaaactctagcgatggtatcgtagcttactcagaaaagttgaatacttcaagtgaaactttaacgtttgtagcgtcagctgatggtacttattatttagatgtatacgcttataaaggaagcggaagctataaagtagatgtgaagtacggagcaactgctggggtatacgaagatactagtacaaatttggcttatacaggaaactggagtaaagtgtcaaacagcagttcatcaggaggatcatacaaagctgtaaatgaagcaaatgctggcatgcagtttgtatttaatggaactgaagtatctttaaatacgcttaaggataatacccaagggcaagcaaaagtaacgctagacggcaccgcttattgggttgatttgtacgctgataagccacagtataaagctacagtgtttaacaaaaaaggattaaaagcaggaaaacatactctcaaagttgaatggtctggaaaagttcaccctggagctaaaaagaccgtaacaaaaattacgctagattctattacagtcaaataatgacctaaatatgtttgttgagtaagagcagctttcatttgaggatgctgcctctttttaattgaaaaagaggataaatattccattaaaaagcaatactttaatttaatgtcattctttaacggttatgtacggagctatcgaagaatgaatttatcaagtttacataaccgatccatgttcacaaaacgagaaattgattattttgctcatgtaggggagctgttaggttttgacgcctttattgaagactctaagtttgattgcttgaaaggtcgttctagaccaatcgatttatcttggtggaaatgggatgctcgatttgatgataaatactttttgtatctggccttacatttagaacgagaaaatgtttggggaaaagatattgataccattcaaaagttattttcacaaacgacagaagaatatattcctcataatgtaataggaattcagttcgtagagtcttttaaaaggataaaatatttgaacgaattgattcttcaaaagaatgccattcaaaagtctaatgctttaatgatttatcgatattatgatactgagattaattcagaaagaatttatgcgtgcagctttactccaaaaggtatgagtgaagtaagaaaagctatttgtgctcaggatcagacggggtattggtttatggtatttgaagaagaatatcaacaagctgattttgataacgagaaaattagtatagaaagataaaggggaaattcgctacataaaaaatcaacctattcgaatttaaagcgaaagaggacaccgctaaggttttttctttcgtttttttacatttgtccaccccaccaacacagcaaatttctgaatatactttttttaaggttttcaatattttaggaattataataaagaagcaataaatgaaaacattatatttgtggtaagaggtgaagggacatcatgtatagagcaattgctattatagcaggttctgtgttaattggatttgcatacaattggtttttaatcccccataaagtgttaagcagcggtattagcggtattgctatgattataggaattttaacgcctgcaagcacgggaacaatgaattttttgttgaatttaccccttttaattattggttttatgaagttaggaaagcggtttgttttacatacgctgctgtccgttgtggctttatcaattgctttatacgtgattcccttgagagctgttagtacagatcctattctgtcagctgtttttggaggagttttaactggaattggcgtagggtttgtttttcgtcagtcagcttcgacaggtggatttgatattattgcgatgcttcttacgcataaaaaagaatttccgcttggcgctatattatcagcgatgaatgccgtggttgtgtttgtttcaggtttttttgtgaattgggacgcggctttatatacgatgctttcgattttcgtcacaggaaaagtagtggatgcgattcatactcgccatattaagctcacgttaaccattattacgagaaaaggcgaagaaatgaagcagcagcttcttacgaatttggtgcgcggcgtgacgttaatgaacggtgaaggagcttattcaagagaagaccgtaaaatattaatgacggtgatttcacgctatgagcttgcaaacctcaagcagttaattcaatcggtggatcctgaagctttcgtaaatattacggaaacggtagaagtaatggggctgtttcgacgggatgcctattaatatatttgttatttcagcccccatttatgataaatagccatttttatagtataaaagttataaaaaaagccttaagagtagttcttgaggctttttttgcgtaaaatatgagtaagaaaatatcgtgtatgaaaagtataaaaaagggaatttgatagagtacataaaatattgacatcaaaaaggagagactatatgacggtagaatatcagttaacgaaaaagaaatattacgaaacgtttatacaagaaaatgaaaatcagccgcctgtaaaggtccttggacaagcttattacgaagagcagcaaaaagagtggtacgacttatcgctcgttcgcttagcccagggagaagtgtacttccataatcaagattttgagtccgcgatttttaagtgggagaatgtaaatggtgaatttaagctgtgggcgaagaaaaatacagccgacgcgcattatgaattggggttgtctacgctagctgaagagctttacctatccatcgaaacggattcaaaagtattaaaagctgaaatagcgctaaagctgttttcgctttatacggaccataacaatattgaacgagcttatgaagtcattaacgagctggttgcttctcagccggattatccaaacgtcacggcgattgcacgcagattttatgaagagcaagaagactttaacagcgcagtggagcttgtggtagatgagtgtattcggacagaatcgttaaattggtttgcggtattaaagacttacgtagataaaggatatacagcaaactttatccctaactatttttatcaagtgatgattgcattttacaaagtggatcaagtgtatttcaaacagcttgtctcagctttatggaaacaatataagagccagcctccttatcttgcttggattaaaaccatcaatgatattttcttgaatattgaagtaggcctctatgattattggcaagagatttcaactctttatcaagagacgtataccgacttgatggaaagtgatcattctgtaaaggaattgcatgaagtcattccgaacgtattaacaaactggcttaaaattaccaataagtcacgtgcgttatttccgtctgcggccgtgctttcatggaatgaaaagtttccgtcaactattgatatcattacaatcgaaaatgcaggcagattaatttttgaggcacgtaacgacattgacggtcttgaatatcactacaagctttgccatggcattattaaatgggctaatgaaaatggtttagaagtggggcacacctttaaatggtgggtagattttttattagatgctcatacgacacacttattaattacaggaacaaatgctgcaacgtcttcatttgtgggatcgattacagaagaaaaggtaccgcaaaatcacgaaacaacctttgtgttcattcatgatgaggaagaatctgtccagcaaatcgctgatcaagaaatcattccgatggaaacgattgacggagcggagcaatctcttcaccaggtgcttgtagaagtgaaaaaaccttttgcgttccttgataagcataattgttcatgcattgttacgccaagctttacagaacaagaggcacgtgagcaggatgcatttaaatatgctcccttagcagatggtttactgtttgtgcttgatgcaaaagaatcgctgcttgatgaagaaagagaattattgctggagattaaagagcatgcgccaaatacgccagttcattttgtcatcaacaatatggacagtctttataatcaagcaacgattgagcgaattacaaaagaatttgaagcaagcattggagctgatttcccgcaggcacatgtattagcctatacgcctcactacgtatcgagtcagcaccacggagacttggctcagtttattaaagctaatttctattacgatccaaacgacgttggagtagaagagcgtgcgcgcagactgctgttcttcattcaaagtatgctaaagagcttagtggagaagagaaatcaaacagaaaatcatttgattgaaagcattaaatggaacgaagatatgcttgtgcgattaaatggcttcttgcatcgagtggatgacttagaacaagaaaaagcgagtagtattgtttcggcttatcacggcatcaaagaggatattagcaaaaagctaaaaaataaaattcctcgtttactcaaaaagtcttcagaattagtgaaggaagacagtgattttagtacggttcatattgagctgaataaacaaatgaatatgcgcgtggaagagcacttgcagcaagatgttctgcccaagttccgcatttctttaaaggactggattgctacatcaaatgaagagctgattgcgagtcaagtagatattgaagaagtagcagagtcattaaataagatgtacaatgagcaaaaattaacgttagcctgcgattttaaagtactggacgactggcgccgcgacgttaaccgtatggctaatcgggttcagctggatgaagaaaatattttacttcgcgttaatccaacgcagctcttgttaaaaggagcaggaaaactgttttcttccattcttcaaaaccaaacgctgctttataatcaatataaaaagtacattgaaagtcaagactatcaagatatcacagaatcaatgctggcaaagttttttatgcaatttaatttatttgagaaaaatttagaagttgatattgaactattctttgaaaagccaaaagaggttttaaaagaaacgattgaagaaacacaggcgcatattaatgaaaatcaagacgtgttaagccatatgaaagccaatcctgaagcttactatgatcctttaacattattccagctgagcttgcgtcagtatgagctaatggttaaagctacagaagaagtacactacaacgtataaaaggtggagcaggatgtatttaacgataaaagaagcagcagagtatctatcttttcctgaagaatatgtgcagaaattgattcaagaaggaaaagtacgagctatatttgatggtgaaaactacttattaaataaagagcagttcaacacccatttagagcaaatggaaaagtacaaaaaacaaattgaagaatacctaaatgagcctatccctgaagatatggacgtaaaagatgaagattgaaggcagaagcagaaaacaaatgttttctgcttttttcttttggaatgagagtgttaaaaaaggtaagatatgaaagaaatgtcgaaaaaagttggaatttcgttaaagatgtagtctttttagatgctttttttatataatgaaagtatgctaaacaaaaaggagaaggtctatgcaacgatcaagacagttaaggctgattttattgcttgccctgattgttgtggctgcgtttttaattattattatttcgaaaacacaagggattataagtcagcaaacgacaaaaaaagtagaaaacacaagcgttgcaattctcacctctgatgtactgacagatcaaagctggggcagtctagcttataaagggaaaatcaacatcgagcagcagtatcctgtttccgctcaggttattagcgaagtaaatacgaaccaaaaaatgaaggaagcagctgaaaaagttattcaaaatggaacaaaagtcgtaattggacatggaagagaattttctaccgtttttacagaactcgctcctaagtatcctcatgttcatttcgtcaccattcacgggacttcaagttataaaaaccaaactgtatatacatttgatcaaacaaaaatagagtatttggcaggcacggcagctgccatgaagacacaaacgaaaaaaattggattaattgatacatttgccaaagaaaagaatctaggatttgaacaaggaatcaaagcgtataatccatcgattgctttttattatcgagttgtaaacagccgagacgatgggataaaagcagtaaagctgctccgtgagttaaaagatgaaggcgtcgatatcatctatgctaaaggaaattcgtataatcaagaagttattcaagaagcgaaagcacaaggaatgtacgtaataggatatttagatgatcaggcgtacatgggtaggtctgttattttaaccagtgtgatcaatgatgttcctcaagcttacaacgtgattatgaaagactattttagtaaaacaggtcttccaactggagaagttagacttgacgccagggacggtgtttataaactagcgccttttggaccgatgtacagtaaacgggaaaaacaaattttatattcgaaagttagaatgtctacacagccgaagtaactatgaaaaagaaagagatgactatgaatcaattatttcgcaacatgtcattccgtagccaaatattaacgattcttcttttgattacattcatgttaagcgggttctctttagttttagtgcatgccgttgataaaatgaatcatgtaagcaacgaaattaaagatgaagatgttcctcaaatggtgtggctttcttattgggaagagcagctgaacataaaagaatacattgtgaaaaataatctaaagaaccccactgtctccttgatagaagaatatcaatcatatgatacacgagttatcgaaaataatgaaagatataagcagcctgtgccaaaatcgttgattccactgaaggaaaaaattgagctgctggattttaagatttccaataacgtacaaggactgctgaagtatggagatatagagggagcaaaagagtatcttaaggaaaattatttgccggatttgcatcagataaaaaaagacattaatagttcaaaagaagagacggttgattcacttgatacactatcagatacactgtctgtcattattaaagattcattaattttactattaattttaacagtaagtgctattgtggcttctctttatgtttcttatcgtatgagtgcgagccttacgaaaccaattgaacaaatgattgaaaaagtgaatgacattgcagacggagaatacggtcttgttcttcaagacacaaagcaaatcgagctgaagcagctttcggcttctatcaatcaaatgtcggttagtttagaagattcattttggaaaatcatcaaagataaagcgtatcgccagcagatcttaaattcactgcctgttggaattattacaatggaagatgagacaaatagtatatttgctaatacctcagcaaagcagtttttagatctcgaagaaaaggatatttgcaggtatatggaggaatgtcctgaatataatactgaattttggagcatgttgaattcgggagaaattcacgaaaataaaaaagtattttttggaacgaaagagacgtgctattgctttttagcctctcaaacccagctgtttaacgagcagaacgaaagcatcggaaggattttttatttcattgatatatccgatactgaagaattagaaaagcgaatgcatcagtctgagaaactcgctctagttggagaagtggcagccggagccgctcatgagattcgtaatcctcttgccgtgattcatggatttatatctcttatgaatcagtctctttctgatgaggagaaaaagcgtttttacctgcctctgcttatgaaagagctagagaggattaactacatcattgaagaaatgctgttgttatcaaaaccaggggctccagtgatgaaaaaagtcagcatgcaggagattattaatgagctcttgcctttgattactcactcaagcaaatttacagaaaaagataagcttatcttcgatgtgaaactgcagccgtatatattaaaagtagatgaaaaacaaatcaaacaagttcttcataatctaattcgaaacagtatggaagccatggatggagaaggagtcattacaatctactcgcaggttcatgaagatagctactgtctatacattgaagatactggaaaaggaattcctttgcatatgcagcagtctctgtaccagccgttttccacttcaaaagatagcggaacaggtcttggtctgccaattgctcagcgtattctagaaagccacggaggacagattaaattattatctacttcttcccgcggcacagtttttgttattaaattccctctaaattaagaaaacagcctcaaaagggctgttttttaatgtgctgttaaaataagaggaccgtttttcgtaatcgcaagcgtatgttcaaattgagcggataatttaccgtctgttgtacgagccgtccaaccgtttttatccattttagaatgccatgtaccagcgtttaccattggctcaattgtaataaccataccttcttttaaacgtgtacctttgccagcttttccgtagtgaagaattgtaggcgcttcgtgcatggtatttccaattccgtgtcctgtgaagtcgcgtaccacagagaatttttcgccttctacatagctttgaatagcgtggccaatgtcacctgtgcgatttcctggctgtgcttgctcaattccttttaaaagcgcttcgtatgtaacatctactagacgctgtgcttcgtctgaaatgtctccaacggtatgagtccatgcggaatctgctaagcctccgtttaaatttacaaccatatcgatggttacgatatcaccgtcttttaatggtttagttgttggaaaaccgtggcaaatttcatcatttaaagaagcgcacgttgcatattgatatcctttgtatcctttttgttccggcgttgccccgtgctttgctaaatattcttcaacaaatttatcaatttgcattgttgttatgcctggtttgatcattttagcgatttctttatgacaagaagctaataatttacctgcttcgtgcattaaattaatttcgcgttcactttttaatgtgatcattgttgttcactccttttttgatgtaactttacgaaaaaagttgagcagcggttatagcgatgaaagtcgactattcatcagttcattcttctttatttgaaaatccaagaaatacagaagccgtctgctatggggcgatataaaatcatccttaatcataacgcccaatggtaggaaaatgcaagatgcaggcttaaaaaggaagggtttgacgataggcatgtagggaaaactgataaatgaacgttgaattggagcattctctataacaaatgcggtatgatatagtaaaataaatgaaacaaaacaattctttaggaggggtataggaaaatgagtgaacatggaaaatttattggatttgcaggtacatatacaaaagcaggcagtgaaggtgtctatacatttacgttagatacgaaggctaaaaagattgtagaagtaaaagccgtggctaaaattgaaaatcctacatacttaaatgcaagcaaagacaacgaacatctttatacagttattaaagaaggagaaaaaggcggagtagctgcttttaagattgacccaaacacagggcaactaaagtttgtaaacaaacagctgctagacggggcgcctccttgctatgtttcagtgaatgaagataatacgcttgttttatctgctaattttcataaagggagcgttgagacgtattctgttaatgaagaaacaggagaaattgaatatgtagcatccgtagtggaacatcctcattcagatttcaaaaaaggacaacaaggaaaaccacacgtacactatgccgattttactcctggagaaaagcacgtggccgttgtggacttaggtattgatgaaatcgtgacatatgaagtggaagagaataaattgaaggaagtcaacagtctttctacatctgttggttcgggccctagacatttaacgttccatccaaatggccgctatgcgtatgcaatgacagaattcagctctgaagttttatttttaacttatgacgaaagcaaaggaagctttactcaacaacaagctactttagcgatcccggctgattttacagaaaataatcaagggagtgcgatccacatttcttcagatggccgctttgtctatgcaggaaaccgcggacataactcgattgcaacattcaaagtagatcaggattctggacagttaacattcgtagaatggacgggcactgaaggcgactggccgcgcgattttgttttggatccaacggaacaatttattgtagcgtctaatcaagaaacaggaaacttggtactgtttgaaagagaccaagaaagtggaaagctaacgcttcttcaatctaacgttacggttccagaagctgtctgcgtaaagttcctccattataagtaatcgatgtagacaataaagcataatcaaagaacgattatgctttattgtctaaacctaagcggctgtcactccccttgcggggtttgcgccatccgcataggtgaacctttgaacgaatagtcaggtagtgcgagcttcttagcgtgatttatgatcccaatttttgaaacgagcataatctatatatggaagaaaagcccttttgaagggcttttttttctgggattatagtagaataaagagagaacgcatgaaaggctgaggtgataagtgtggaaaatatatgtgagtatccaattgtacaagctcccatggcaggaggaatttcaacgcctaaactagctgcagcagtatctaatagcggaggactagggtttttagctgcgggatataaaagcgcgcgtgaattggagcaggaaattatagagacgcactcacttacgaaaaaaacttttggagtgaatctgtttgttccgacaaatgaaaaagtagcagttgatgcacttgattgttatcaaaaagaactgtcaaaagcagctgaatatttggagtgtcaagttggtataccaaagaatgatgatgatgaatggagtgttaagctcgacatcattcaaaaacatcagatatctgctgtgagctttacatttggatgtccagatcgagagattatagaacgattaaaagaaaatggaagccgtgttttcgttacgattacaacgcctcaagaagccgaagtggctttgagagcaggagcagatgcgctatgtttgcaaggaattgaagccggcggtcatcgatctacttttttagagggttcggtggattacccgcttatgaagttgctgaaagaagttcgctcaatcactaaaaagccattgattgctgcgggagggttgatgacggggtctgacataaaacgtgtgttacaagaaggggcttctgctgcccagttaggtacggcttttatttgttgtccagaaagcggagcgagtgctcttcataaagaaagcattcttcaaaagcgttttaatgaaacaggtgtcacacgagcttttacagggaaacgtgctagaggatttgtgaatgccttttttatttcctatgataaattagcaccatccgcctaccctcatattcattacatgacaaagcctattcgaacaaaagctacacaaatgaataatccagagtacacttctttgtgggcaggaactggatttacgctggcaaaagaactgcctgcacatcttattgtggaagagcttgtacaagaactaaataaatgatgagaattacggtgttgcttgctttaagtgcaagcagctttacataaagaaggtgaacttatagtgcaaaacaaattttcgattgggcaaatggccagactgcataatattccggttaaaacacttcgctattatgatgaaattggcttgttcgagccttacgaagttgatccacaaactggttatcgttattatacgttagaacaatttaagaaattagatatcattgtctatttaaagctgatgggagttccgttaaaagaaattaaaagaaagatggagcacagcagcttggatgaatttattgaaaccttagcagaatatcagcaggtaacaaaagaaaaaattcgtcaccttcaaagagtgaatgcgcagttaacaactcgaatgaaggaattagaacagacgagacatattaaccaaataggagctccgtttatcaaacacctttcttctcgtgaagttgttcaagtaaaagcagaggtaggtacgttagatgggacggaaagcgttctccgtgatttaaaaaagaaaattagtcatattaccccgattatgattgggaaagtaggatttatgctatcagtagaaaacacgaaaaaacaacaatttacagattacgatggcatttttttattggtcgaaagcgatgtttcttttaagcatgaactcgttacgttaatacctgaaggcgattacgcatctatttatatgagagaaaagagagataccacaggagtctattacgatgcgttactgaactttattaaagcggaaggatacaaagcagaaggtccttttttaattcggcgaattgtagattcatttatttctcatcatgaagaagagcggctgacggaaattcaaattcgaattacgtcttgactatccagcagctggagggtttaagatgagactattgtaaaactgctgaagggagagacaccaatagatgaatcagcaaagtatttcccaaggaatgtctttaagccgaggaaatcgaattttatttattttaatcttgggttcactgagcgcatttggaccgttatcaatcgatatgtatttgccagcgctgccgactcttgcgaaagaattgcatacttcagcttctttagcgcaggtcagtctgacagcttgcttattgggcttagcatttgggcaagtggtcatggggccattcagtgatattcgcggcaggaaaaagccgcttgtagcagcattaatcacctatgcagttgcatctgttttatgcgtgtttgcaccgtctatttggatttttatcgttttgcgatttattcaaggtatggcaggagcagcaggaatggttatttcaagagcgagcgtgcgagacttgttttcaggttcggatttaacaaagtttttctccatgcttatgcttgtaaatggcttagctcctattttagctccggttgctggtggacagctgctgacgattatgtcgtggcgaggagtatttggtgtgttagcagtgattggtgcactaatgttttttgccgttttatttggtttaaaagaaacgcttccgctcgaacgccgtaaagaaggtggattaacagaagtactgcgtacatttggcgtattgctaaaagatggtgtctttgtgggatatgcgctggcgcaaggttttattatgagtgccatgtttgcttatatttcaggttctacatttgtccttcaagacatttatggcctgtctccgcagatgttcagctttgtttttgctattaacggttttggactaattatagctactcaagtgacaggacgtttagcgggtaaaataaaagaagctactcttcttatgtatggattacttcaagcagccgttggaagcgtgcttttagtggccgtgattgctactcacatgtccgttattttggtctgcatcttgcttttctttgtagtatcgagcgtaggaattgtgaacacaaccgttttttcactggctatggaaaatcaagcttcgaacgcgggaagtgcttcagcgcttctagggttgcttccgttcttgctcggagcagccgtagctcctcttgttggtcttggaggagggcaaaatgctctgccgatgggcattgtgattatggtctgtgatttattagcattaggtgtgtacatgacgttagtgagaaggaaaactgcatcataaaaaagctacttggctttcaacagccaagtagcttttttagttattgagctttgtgctcgtgattttcaaacggcattgtaacgccaagcttttgaatttctttttttgcattttccaaaatggtttcagctttcgcttttgtttcagcatctaacccgcttagaaaatctttctttttag

SEQ ID NO: 36 - DNA, 47006 bp, Priestia aryabhattai
  source 1..47006: mol_type = genomic DNA
ttaagttttcaaaaggtggacgaggcgaatgaaaaagttggagcaaaagctttaaaccttataaaaatgaaaaaagaaaatttaccgattccagatggctttgttattcaaacagaagctttaaagcgatatatcgaatggaatgggattaatcgtcaaacggataatatacacgagagaattttgcacggggaaattcctattgaaattgaatctgatcttatagaggcatttcgaaacctaaagagctcttatacctcagtagctgttcggtcatcatccagtgctgaagatttagaaggcgcatcttttgctggccagtatgaaacctatcttaatgtgaaaagtgcagaggattttttaagcaaagtgaaagcgtgctgggcctcatttttcactgaaagagtcgaacaatatactcaaaatatgtatgctgattttgatgaaacttcaatggcagttgttgttcaaggattaattgagtccgaagtatcgggagtcatattcagccaaaaccctgttactcataatacaaaagaaatgatgattaatgccagctatgggctcggagaagcagtcgtctcgggtatagtaacacctgatgtttacctggttaataaacaaacctttgagatagagaaagaaaaagggctaaaggaagtaaaaataattccaattgctgaaggcgttgaagaaatcgaaacaacggaagatgagcagcaaaggttttgtttaacagacgagaaaatcattgaattggccgaaataacaaaagaagtagaagctctttaccaacatcccgtagacatagagttcggtgttcaaaacaatcaagtatatctattacaggcaagagcgattaccacattaacagaggccaaagaattaactcctttccaaaaagatatatctttaagtttcgaggatatggaagagttttggattttaaatgacacaagtttttctcatgctgttagtcctttgtatgcttcatttattattccggcattttctgaaggaacagctgctagttttaaaaagttaaagtttatgtttaatagacttaatttaaaactttataaaggacacatctatacaaaaacggagccttttaaaggagattctaataaaagattccaagaaaataaagaattgatggaaagtatttatccaatcttaacaaaacgaatgaaccaaatgattacggaacaattcttgccctactataacaagttagatagctttaccggggaaaatctcaatcttcaaagaggaaaagagattcttcaaagtttgactgatttttataaaacggcatatgacttgcattttgacattgttatgcctcaaatgtctttaaacactaaagttgaagaatactataaaaaccttacaaataaaaaatccggacatgatgtttatgagctattgaccgggaaaatgaacaaatcgttggaaacggatcaacagctttctagacttgctttaacagttaaagacgatgcggaacttactaagatctttgaagaagaatgtacagaaactttattaaagaaattagaggaaaataaagcagcaaaaagctttatggctgaagtagatacttttctaaaacagtatggatatcgaagcgtcgtaagtcacgattttgtaggagaaacttggctagagaatcctcttcacgcgttatcgattattcaagggtatgttaatgacggttacaactttgatgaaaacttccaacaaacggtcaaaaaacgtgaacagaactataatgaatggttgatgcagatagaggatagccaacataaagaagaatttaaaaaatattatcagtgggcgctagatgcatccgttataagagatgaccatcacttttatatcgatgcaatgttggacgcaaaagctcgtttattcctactcaagctaggtaatttactagtacatcatcatgtttttctaatgaaagaagatattttctttttatatcttgatgaggtagagtctcttttagaaaatccagtagacgtgacagaattagttgagaaacgtaaaaaagaacacgcagaacatgagcaaacatctaatttgcctagatacttcggcgtccctgaaccagctcagctgaaagaagctgagaaatatatgggagctattgaggaaaatgacgctaacagcgaacattctattaaagggttagcctcttcctcgggaacatataccggaaaagtaaaagtcatttcaaatacgaaggaattttccaagctggaaaaaggtgatgttttggtatgtaaaaccactactccactttggactactttatttcagactgcaggggctgttattactgacgctggaggtatcctttctcattcggcaataattgcacgtgagtatgaaattcctgcagtggttggtacgaaaataagtacggataagctaaaagatggcgatatggttatggtcgatggtacgaatggaattgtcacgcttttaaatgaataaataatcctcttcgcttccatttgacaacagttctttttcctttatatactgcctaatggaaagtaaatacttacattcaggaagcataaaggatgattaacatgaaaaaagatgaaacaaaaaagaagataacaaaagctacaatagaactgcttaaagaaaaaggctataaaggtactaccactagagaaattgcagaacaagctggcgtgaatgaattgactgtttttcgccactttggcaataaagaaggcattattcaagctattgtcaaaacaacaagcttttcacttgagatctttgataaatcaattgaatgggagcttgaaaaagatttgacgaatttcggttatctgttactaaaagactttgataataaccgagacatgatttcaattgctttaaaagaccctttaattttctcacaggcacacgaagaaattataaaaaaaattaatgatacgaaagaaatactaaaagaatactttgaagaaatgcaaaagaaaggatatatcaaagaattagattgctgcacgcaagcagagattttcctaagtacgtattggggatattttatgtataaactgaattttggagacaaagccttacatgcagattatcaagatatgataaaaaacagtataaacacgtttataaaaggaatttctctccactaaaaggaggcaataatgtttgggtaaacataaagagcttatcttggttatttcattactaattgggacatttcttgtaccaattaattcgaccatgattgccgttgctctatcaaccatatcagctcattttaatgaaccactttcaaatatttcgtgggtagtaactatttatttaattgtaatggctgttactcagcctatcgctggaaagctaggagatttgtacggaaacagaaatatctatttatggggtgtagtgttctttcttatagcatctttaggctgtatattttcaactaatctcatttcccttattatctttcgatcactgcaggcagtaggaggagctttacttactccaaacactatagcaatcattagatatgtggtgccaaaagagcggcttcctaagattttaggtgtatttggaatgggaatgggcttgggtgctgcaattggaccattgctagggtctgtactgcttgaaaacttcaacttggaagctatattctgggtgaatgttccttttcttttcttagctttaatcagtggaatagttatgattcctaaatttaatgttaaaaaacaagcaattactttagatattcaaggttccatttatttagcaattagcatttctttgttgatcttgttgacacacggtatggaatttactaaagctttaataatgggaataatatttattttatctacaatcttgtttattaaaagagaaaatacggcagaaaacccgattatcgatttttctttatttaaaaattctacttttacaagcgctaatttatctattatgcttagcaattttgttatgtatgtgattttattaattatgcctctgttaatgaagtctcaatttcatttatctacagcgcaaacagggcttgttttatcagttttttcgatttcaatgtctttaagcggctggataggaggattattaaacaataagtttagttctaaaaaagtgataggattttcctttgctatgattattgtctctaatattctttttttatctttagagaacgttggatctattctttttcttatagtagctttaattattggaggtttttctacaggaataggtttaacaagcatgcaggttgcctcgctggactccgtaagtaaagagcaatctggtacagcctctggcatttattcaacgtttcgttatttcggaagtattatttcgtccacgcttattgctctcgttacaagttataactacatctttattattttaggagtatcggggatagtaggtatactagtagctaaaaacattaaatctggtagccaagacatgataagcagcaataattccagtgcaaaagcatagttgttttttgataaagcttttggttatatacacaatttactaatcaatcaataaaaaataagtactgcttctaaaataggagcagtacttattttttgcctaaaaaccttagagaaaacaacagatgaattcatctgttcccttcaaaaatgatttgttttaaacagggaactatcgtttgtcaagtatgtgggaaagttattgagaatgtagacaactctgaaggggttaaaacatggtacgggaattggcatgagtattgctgctaacaaagtaaaaggaattcgttgcgcactcgttcatgacgttttttcagctaaaatgacgcgtgaacacaacgatacgaacattttagccatgggggaacgagtaattggaccaggtttagcccgcgaaattgtgaagacttggttaacaacccaatttgttgggggccgtcatgaaaatcgcatctgtaaaattacagaatacgaaaatgtatcagaaccttctcttgaaagaaaataaagacaaaaaaggcaagaatcaatttgattcttgccttttcctattatttcacttactgatatgatgattatagatcctatcagaatagcaaaactaaccatttcaattcccataccagttaaccttccgtaaaagcagcttattatgacaacgctgagactaattatttgcaattaaaatagatgtaataaaatatgcctgatttattcttgggagttaaagaagtttgtttgctgatgaagaaatctgtacggttagtatctattgggctcctattcaagctattcccaaactagctgtaaattaagatgattgcattaatcagttatttttatagttctaaatttattaataagagaaatatgtaggtatcaaagagaataaaagtaattttatattacatcaaaccgtccagatatacagcaaaggagaataggaaacatgcttaatcaattaaagctgtgggctaaaaagttaaaaaagcagctatttatcttatacttagcttataaagatgaacgagtatcttggtatatcaaattatttactgcttgtgttgttgcatatgccttcagcccaatcgatttaattcctgattttataccggttttaggctatattgacgatataatcattgttcctgtaggaattatgcttgctttgaagatgctacctacaagtgttatagaggactgcacaataaaagcagaagagctcattcaaaatgaacgacctaaaaattgggttgcgggttcaattattatcgtagtatggctacttatttttatgtggagctgttttactgtttttaaattattaaattgaatgaactcttatcaagaaaaaatatattaggtttactatcgatcgttatgatacaaaatggtaaatgatatatataattgaaaggagtacattagaacaaatgcagcaaattgatatccaagaaaaaaagatagacagagctctctttcaatttgttttccctttttccttaaagcaaggaactgaatctagtatctccctttttctaaataagagcggatttaagctatttcagttaaatcaactagaagacgaatgtgcatattacggcgattttaaagtctcacatcgtgatatggaggcgtattatttgtctttcactaataagatactctttccacactcagaaaaagaaaaaggtcttcatagatactcaaaacctttaaatataagaggtaagttaattacggatacagagtgcattccttttcaaatacactctgttgatttaacgatatgtccttatgaacttgggtttttaaccattcgaactgagttgaaaccttttacgtctatgccattgtctcattctttagaattcgcagatcgctttcgcgtattagaaccacgaacacgaaaagatagcagtacaaaaattgaatgcgatggcaagatatacaagggagcaggaggatttgtatttaacaacctctttgagggtctctcctgcttttttgaaggtgattcaaaggaaaattcttattttgaaaccttttccttttttgaagatgaaagaatgtatgtccaatccttagtggcattagagaaaagtgaaaaaattgatttagttgatgtttatcgaatgggaagtctttgcggcttaactgtagagggaaagccatatgttcatgccaataaccttccttacattcaagattatttacaaaaacacgcttatcagcgctgggctcctagcacttattttctgatagaagaacatatttttacttgtataacgattcaagatgaacgtacaactcctaatttagctaatcagttttatggagaattttactacgggcttgtattaaatctttttcacaagatcgttttattaaaattagctaatacctatgcagagctaaatattgaaaaagacgtaaaagaaatggagaaattaatttattccattaattcgtttaccgcaaattatttttcgcttgaaatagtatctcagtcccggagtcgtgatattttctatcttcttagggaaaatttcaatattgagttgttatataaggaagctaaacaatctctagagagtttatttagataccaggaaaacgttaatgcgaaaaaagacagcctgttattgctgattttgactctttattccgtagtaggtcaaatgcttggaatggggcttgtagtaaatgattttatcggaagaatcaaatggagaaatatacttgcatacaatcctgtagaatattttgcattaatcctagcagctagcggtgtcataatctctctgatactaggtatacaaagtttgtaccgatggataattgatcaaaaaaatcgaaaaaaatgggtgaaacagactgtattatcttcaacaaaggaatgagaacagtcctttatttcatcttaaaacagaaacacgtacattagcccataattgataaccttaggtatcaattatgggctaatttatctctatgcatttttaaaaaatattcagttatatcgctttacaattaaaaataaatgttgaaattgagctaataatccgtttttttacggtgtttttttactgtccatttcttatagatgtagtgtaagaggaagcctctgtactgatttataatatagtaactaacaatataaagtatacttccaaataagaagctattaagaaccattcctgttaaaaaattctttcctaattttgctcctagttctagtcgattatccaaatcttcatctgcattctgaagcaaagtttgatcaaggtcgattggaaatatatatcctccaactactgtattcaagtaaaacatcaacggaaaggcccacataaaaaacattccaccaataagacctgctatgctgtttcctttacataatttagctaaacctaccgatattataaggcccaatccaaaggtaggaacaaagttcacaacagaacctagactaaaacctagcgcaactttatgtgaatgatcttttaatcttaatagtttaataagtaagtatttaaaccggcgcttcaaaaacactaatttgctcacattattcctcctatctctttacgctggcatcctatctttccttttggtgtccaccattacagaaaggtgttttactgtattcaagatttggcgtcatataagtaaaaagaaaaatgaggttaaagaataacaggcttaaccattataagtatatttatactttatatgacaaaacaaataattgcctcctaataaatcaagtgatttttggaaatgtcacaaaaaattcataaataggctgtttcttttctctttctccctgctaaaattttatagtcaagaacaagaaaaatatagcatcgggggatatacttagtaaaaaagataatttcttcattagctctatgctcgtcattaattgttttaccaacaataagcaatgcagctttaggagacaagctattaaaagaaggtatggcagatccagacgtaaaagaattacaggatgttttaagacagaaggggatattttcagctacttcgactggctattttggttcaattacaaaagaatcagttctaagctttcagcgttctcatagtttaaccgctgatggaattgtaggatctaatacatatcaagcgttaatagctaattcaacaagtacggttacaaacggtacacttttaaaatatggaatgactagtaatgaagttaaaaaagtacagcaattgttaaaggtaaaaggttactttaatgccacaccaagaggatattttggtacagttactcaaactgcggttgtgaatttccaacgggatcatggcttagccgtggatggaatagtaggtccggctactttaaatgccttaaataacgcatctagcagctccactggttcttcaactgtcaatagttcaacgcaagcgacagccagtgacatagttgcttattctaaaaaattcataggcgtaccatatgtttggggaggaacgtcaccgagtggtttcgattgcagtggtttcatttattatgtatttaaaaatggaggtggagtaactgtaccgcgaacagtagctactttgtatcagtcaggaaaaagtacatctgctccaaatgtaggagatattgtgttctttgatactactggaggtccttcacatgctggaatttatattggaaacgggcagtttattcatgctggaagttcaactggtgtaactattgcatcgttaagcaattcttactgggcccctcgttatttaggaagtaaatctgtcttctaacaaactacaaagcactagttagcaagaacgaaaagactaagaccaaggttaagaattaaaatttttttgaaggttacctttttatttttatgaatattgagctttatgatacgatatgaagtgaactttttaaatgagggtctatatgcaaaaaattaaaggtaaaaggataaaaattagtatatttatgctgggattagggattattttttttctgtttgccgggaaagagcttgtggtaaacgaaaagcctgtaaaatctgacgtgattattgtgttaagtggtgataatgatcgactggagaaaggaattgaattatataaaaaaggttatgcgtctcatttaatcctttcgaacggtcaagagaataatttttatcatcaagccaaggactcagggatacctgaggattcaattatattagaaaatcacgctacaagtactacggaaaacgctaaattcacaaaaaggctaatgatgaagtatcattttcaatccgctatcgttgtttcttccaactatcatatgaaaagggtagaaaaaaactttaataaagaatttaaggatacccaaatacaattaacctattgttctagtggaagtcgttattataatccaaagagatggtgggaaactgctttaaatagaaaagttacctacacagaatacgtcaagcttattggtaattattttggttttagtggaaagaaatcgaaagaattattaagagaatttatctaaaaaattgcaaaaaaagtccataggggatggctctatggactttttttgcaattttttagattaccagtagtagttcaacataatcctgagatgatggattatttacttaaaataaaggaaagtacggtgccccatataaaggttattaaatagaataacctttgcagcagacccgtaggcataggaacaaaaaatacaagcataatgagtataaggatgactagtaagaagactaagcagccatacgtccaatacttgccgctttttaaagatgacgcatatatccaaagaccagctaaaacagtaatcatgccaagttgagcgaatattgaatgccaaaataaatttatatcagccggtataaatccagaaacaatattgcctaaagctaatataagaataaaagctgttgctagctggctttttcttgttttctttagactttgtgaaatgtgcaaaacaccaattgaaagtgttaatccgtttataataaacaatacgttcatccagaaatagtaaggagagcaaatttcatgaggtgcaattgaataggtgtagtttccacaagaagtgacgccaagatcactcattgcgtgatgtaaaaaactgtagggagcagttgcagtcaaaataaagacaggttcaactaaaaaatacaagcaagtagcaaaccagcttaaaatgccaaccttttgtgatatatacagaatcatcacctcttaaaaagcgttatatacgaattttatatccaaataatgttaaatagaatggtcttgaagcctatttttaagtagggcttgaggttgatgtgaggaaggaggacaaagtgtttaaacttagagatgcttatagtaggttaaggatagaaggacctctttactaattttttgtaagagtaaagaggtctaaaagcgtcttaattagaaataaatagatgctgattatgcacccatacgtaaagttaatgtattctaaacgcggtgacattcaagacgttttctctagaattttataatctgatgttttttgaatatctacatcatattcatgtgcaaatttttctaattccttaaaaacattgggtggattaaataatgctattcgcatattccacccgttttctacttttactactgctaattttgttttccaatttaaccgtttaaatacgattcttttaatgtccattggtttaactgtttttgcatatactttaaaccataatatatatgttctataggttaaagtatctctgtctatctgaaattcatatctgaggaaaagggagagaaacgaacaaaggatagccaaaagaagtaaaaagtcaagtgctttatattgaactgcttgaatgagtaataaattatttaaaagtaataaaggaaaaataatagttttttgagcagtagctttaaataacatagaatctcctttctttagtaaataagccaactggttttttctatgatattatttaagtgttaatttagattagatttataatgggaggtcttttgcatgtataacaccatttcagattttatcaaagaatggaacgacgaagccacgctaactcaaaaagttttggatagcttgacagatgattcgttgaaacaacaagtttaccctgaaggacgtacgttaggaagaattgcttggcattttacaacaaatattccagattacctaactgagtttggattaagcatagacagaatagaaagtacagtaagcgttccatcttcagcacaggaaattgccataaccttcaaaaatgtaagttctcacgctgctaaaattatcgaacagcaatggacagatgaatctttagaacatacgcaagaagcgttcggaagaacccaatcaaatgcggcaatcttaatgggactaatcaagcatattgttcatcaccgaggtcaaatcacagttcttatgcgtcaagcaggactaaaaccccctggagtttatgggcctccaaaagaagattgggttcatttaggtgtggaaaacccaccgctttaataatatcaggtaaataaaaaagaggctgtccatagaaaatactataaaattattttctaggcagcctttacgtaaaacctaattaatcagttagtgcttactctgaaaaagcttttgagtactgcacaacaccttgcatattttttaataatccctctgttaactctaaggccataaagaattcttcaggcacgtcaaaatgttctttcttatcgctgtattcttcatttaaaaaagcgcttttcacaacttcttcagttttattatattcttcagtgagttcttgtttaattaagatatccatttatagtctcctgttcattttggtaaattacagctttttatactccataaatgggacttcctttatgcacacagtcatcaaggaagcttactcatccagctctaaaaataagtttaacaaacaaaaacctccaaaattagtatgtatatattttatagtgttatattttatgagtccacctttaatacataatatttgtaaatcatttatggtaaaatatactatatatgttaaattagagtgtgtgaagaaggggtaatatctgatgttgaacgtattatttatatgtttagtaagctgcttcattatttatattgggaaacgcgtgtggaaaaaaggtaatactaatttcattgctgggtatggaaagatatttacacctaaggatgaaaaacagctcgctaaaggaattggacttattattatgttgtttggctttgaatctatgatatttcctattctctctttgctttttgaagggattggcttttattatggattgctggttgtgttgaacttcttcgctttatttggacttatgataaaggatcaggtgcaaagagaagcctaaagggggagaaaacgatcaataaaaatattcggcttatgattggtttaatcagcactattatcctgtgtttctatggagtaagaggtttattcatacatgaaacaataccgttttcttcttacctctttgcggtaggtggagctatttccaccattgctcttatctgggaattaaaaaagaaagatacagcttaaattgaaaggagttatgatgtgaaaagacgatggatttcttggtggatagctaatatgatttggatcatacttttcgctgtaggcacagttgttgtctggacaagagaagttgatggagcgggtgttacccaaacaccggcgctaaaattgttggcgtttatagtgttgctgattgcatttattttccctttgattattcaggttatatggctaattgttaattttaaagctagtaagcatgtactatagaaaataggaatgatgttatggaatagaggggtgatatgtatgcaaagcaaaaagtgctcaaaatgtgattcaactctaatcaaagctcgtattcaatcatcacctggtacagtaggtgtaaataaaacaccgagcagcgtattaaataacaatcacaattacagtgagttaataccttatgtttgttcaagctgcggttatgtggatttttatgtggaggagcctggaaagtttgtttagtagaacttttaggattttttattttcaactacattatgatacgtcactgaacttggtatatcgcctaatgtcaattttaattaaagggtaaggaaaatgatttgtggaggctattatgaagagaacaattagttttctgtcagtagtttatttaaccgttctaactgcatgtaatcaagaaagtacaggaacgaatacagaaagttcttctgctgtcattgttgtaaacggaacagaagataaattagatcaaacacaagaaataggagaccaaatagggacaatagaaaagaaaactaaagcaactaaaatgcccgcaggtaataatcaatcaaactattttacagttggttcagaaatctattcagtaaaaggaacagaggattatattatattatagttaaagacaaagatcataaaagtcagttaatgaaaaaggtagttcaaaaaaggtgagtattatctaatttgactactttgtattttagaaaatacgttctatgtgagcgtgttacatatatggaaatctaattatagtaaaacaaaaaaatttaagaggtcgaaagtgaataaaaaaattcgatgcagtttagctagttgtataacaattctaggggcgttaagtatatattttttgttcttttcttacgataagttttatgtaacgaaagacgagaatgtgttgaacacaaagcctttaagtgatacatatggaaattatgagtgcacggagatggctgatcaaacaaagtatgactctaagaaatattttagagcctttggtaaaacacaaaatggggattttgtttatgctattaaaggtgatcataagcataaacaagtgctgctagttgaaaacacagagatgcctatgtggtttttatatgctcgtcaataaaggtgctaaagtgtctataaaatccattatggtaaataaagatgttgcatcatttttcttttgaaatatatttcaaataaagaaggggctgtgttatgaaaaagtggttatacttaccttttattctatctttggtcattctatgtgcagcatgttcaagtttaacttgggagaaacaatatgcggattctccacctagggagttattgtcaggtggagaagaatattctattttggcagtaggggaagacatcgatcatccagaggaaataatgggtttaaatcaggttcgatatttttcctcgttggaagaagtaaagaatcaatatccagacttaaaggtagaaggcagccctttctttattatttttaatgataaagaagtcgttttaagaacttcagaattaaacaaagcgatacgttttgtagaagaaaattactagatacaaaaacaaataaattttgtatcatcttttcctcctacaaaaaatgtataataagctccattacgttcatcttcaacatccatttccaaattaaatctcttctccaaatctaattttttaactaaacgcttaaaaactaataaaagacaccaaggaagcataaagcaccttggtgtttttacgtttaataatatctcatatgacaattataaaatgcaaaatatagaaaatatgataacatatgtttattgttgtgggataaaaaatgtttggaggagaaatatgaaaaagttctatcttggtttgtttgttatttgtttagtgtttatcatttccgcttgttcaaaaaccgaatatgtaaacaatgttgagtacttaaaattacaacaagcagaggtaatgttaacagatgataaaaaaatcgttggggaaatgatagtccctgataaaaagaataaaagtaaacgtatcgttccaatggagttacgctatacatttacgatggaaaatacgtctaataatattatggctctctctgattctgctaaaacaaacattcgcatagaaccagataaggagttagtatcagctgtaaaggaagcacttggttcaaatatttataatatggataacaataagttaggtattggtacgagtataggagaagttccatctaaaggaacaagtaaatttactcttagttataccttaggagcaaaacaaaaaaataatgaattgcctcttttgccaactgaagaaaaactaaaaaagctacaagctaatgcgttaaagggtacactcattatctcccaagatgacaaagatattgcaaagtttaggttagattcaagtcaataaacatgattataattttaaataggttaatagctcgctaactctgtatatcgtcagcgttagcgagctattgtttttatatttatatgcttgtatgtggatttacttttcccaaaaataaaattgattagccttacttatttggttacgataagcgctcgaataatttcattccaatagtatttgaagtttttgtcacttgtatttttttgcattagaacagttgattcctttgtattctctttttttatagacattatgatttccccttatctctttatatttagtatgttgtggtttgatttaccatattttataatgaaattagcaatcgttacagatgaacattacgattgaatcaatcgaaatatccgattataaagaggtgaggaaaatcgaaataaagcaactgattacatttaaaacagctgcagaaaatttaaattttacatatacagctaaaattttgaactttgctcaatcaagcgttaccgctcaaataaaagctcttgagaatgaacttgaaactcctttatttgaacgtctcggaaagcgcttggttttaacagaagcaggtagagaattcaaaaggtacgccgataaaatgattcaattgactaaggaagcaaaaaacgctgtaagtggagtggaggagcctgcgggtacgcttatcattggatcttctgaaagccagtgcacgtataggttaccttcaatattaaaagagtttaaggatcaatttccaaaggttaaaatgatttttaagcccatttactctcaagcacaaacaagagcgcagctactagatggaacccttgatattgcttttacaatggagcctattcagcatcatgatgcaaatctacatacgcaatgtcttgttgcagaaaacttgaaaattatagcttctcctcagcatcctttagctgataaagcagaaatttacttagaagaccttgagaatgagactcttttgtatactgagtcggggtgttcatatcgggtagtattggaaaacttgtttcgtgaggcgggtatttgtacatcaactaaatttgaatttgtaagtgtggaagctattaagcaatgcgtcatgctagatttaggtattgccatattgcccgaagtagtagtaaaaggagagcttgagaaaggcatattaaaagaattggcttgtactaaagttgatacgcctctttatacacaaatgttttggcataaagataaattcatgtctcttcctttgcagtcttttattcaattggcttgtaatacctttggtttaaattataaggggattgaaagtaagaatctctaggtacattacactgactaaagacttataaagggtatataaaataatctcacattatttttaataagataaggggtgaagggaattttcattacttcactaatatatagatgaaccttaataatctagattttaattggtgaaatctgagttaggagttgaactaatttgaaaatgggagtaaatcaaattgaactaaatggtttaacatttcaatatcgagaggcgggcgaagcttcggcacccgccattattgcacttcacgctttgggaatgagtgcagagtcttgggatgaagtagcagctgtattagggaaggaatatcggtttctagctttagatcagcgaggacacggtggaagtgagagaaccggcacctatacgtttgaacttatgtgcgatgacttgcttcagtttgtaaatgcgatgaatttggagagctttacgttgattgggcattctatgggtggtacggtgtcctatcttttttctgaaacatttccagaaagggtagatcaattgattgttgaagacactcctccaccttttacaggagaaaagttcaaaattcctgccaaaccgcctggttctttaccgtttgactgggaggttgtaccttcaattcttcaacagttaaacaaccccaatcctaaatggtggggaagtcttacagagataattgcacctactctcatcataggaggaggatccagccatattcctcaagataaattgcaggaagtttctaagcgcattccaaattgcaaattagtaacgatagaaggggctggacatgaggtgcatgcaggaaacttatccgcttttttaactgctgtgaaaagcttccttgcttcgtgactttctggatcttttatttaatttgaaagtttggttaagtaaatagaaaacaaataaagagccttatttaaggctctttatttgttcttatttttttacgataggaacattcttaaagacttgttgtcgaatagctgctgatttaactgctttattaatcttctctttattattatctataaattgctgtgctttttctttatcaaataactcattgctatctggtaaagtttgaatgtttttggaaatgaattgtttcatttcttctctagatactgagaatttctgatcatctattttaaaactgtacccttcagcattaggtattagtatcgttaaataaatagcattataaagaaagtttttctctagtgtatccttaccgtcgaaccaatattttaacatttcatcttctgaaagagagccctttttagcaccataaattatttttggtgttttattatgtaaatcaatttctttaaatgtttctcctccaggcaatgctcttacgatagctaccacgttagaattatctccaacataagttccgctatgctctttaaaatcttttacatcaacagtgttaatgcttgtgacttcttcttttgaagaacagccggttatacctacaaggattactaagattaaacaaaaaagcatcttgaaatatttcataaaaatctccattttcttactaaaatacccttatgtggatattttgcgaattatcagtgtatcgtaaatatgatgttttgaaaagatgtaggtactttcgtacaaaataccatttgctataggagacgttttgtctactgtaagtagaaggaaggaactttgaaacatgaaaagaccccaaagctttcttaaaaaagcgctttgaagtcttcatatctcatgttttgcttctaggagctaatccctacaattgattcgataatttgtgcccagtcctcactatggacttcatgtcctgtaccatcaagagctattaagttagcatgggaaatagcttttgcaagagccagtccatgttcgtatgggagtgccggatcttctgttccatgaataatcagcgtaggtatagtaatttcactcgatctgtcataatattggcctcctccttgaagcaaggcatggttaaatctactcggcagctgtttggcgcgggcagcttctctttctgctagcttatgcattcttttctcttcataaggctttgtcccacttaaaatttcccatccacctgcaaggtagggaacggttgcctcttgatttgaccagtctatggaagtgctcttcgtgtggtaatcaagtatatgctgatccatttggggcaatttttccgcctcttttccaaatacgcttgatgcaattagagtaagggagtctatgcgatccggatatctaagagcaaggatttgtcctatcatcccgcccaaagacattccaacaatatgagctttgtctatagaataagcatctaaaacaccaattgcatcgtcagccatatccgttattgtatagttagaagtaccgggtggataagtggtagaccggcctaaatcacgatggtcgtaacgaataacaaatctctcccgttcagcgaggcgaaggcagaagtcttcatcccaccaatctaacgaggacattgctcccattattaaaaggacagcagggtttttggggtttccaaaactttctgtacaaatctcaacgttatcaatttttattatttcttcattcattcgtgtacctccttttaagtgttagagaaatgaaaagtattcctttattcagttctctaaaatgaggatatttccttttggaattttatttaggaaagccattattctgcctatctctttacctttttactaaaaagtaaaatataaaatgtaactaagggaagagcctaaacttgttggagagcatggggattcagcatttgctgtctgtaacatgttgataaggcaggaaagttgaatgcatgtatggaaaaatacttatgtgaggtgaaataagaatgaatgattaatatggagaaaataccttttaaactttaattacattttttcatttattacaacttgatagattaatatacatatacaggattgctgaattcgtgtgctattggtgagcatatgaattcagcgttctcatgaggagatgctttatgaagcggttaataaataaaattgcgattgtgactggtgctagtcgggcaaaaggtattggtactgaaatatgcagggaattagctagagaaggtgcagatatttttttcactcattggtcaaagtatgatcgtttaatggattattgcaatgaggatgattttaaatggtcgaaacgtcttatggaagagattcgcagtctaggagtgcgatgtgaatcaatggaattggatttatcgcaacccaatgcaccaagaaagctgcttgatgaagttcaaaacaaactaggttctccatcaatccttgtaaataatggaacacattctgtggacgtagattttcgttctatagatgctgatatgcttgatgctcattataacgtgaatgttagagggacgtgccttttgactgttgagtttgcacgtctaatcgaaggtaagcatggcggtcgaattattaatatggtatcaggtcaagataagtcacctgagcctgggaatttggcttatgttgcaacaaaaggggctgtttctacatttactaaatcagttgctattgaattagcacctcttaaaattactgttaatgctgtagatcctggaccaactaacactggctggatgagcagtgagttaaaggaagagttactgccaaagttcccaatgggtcgacttggtgagccccgggatgccgcaaaattagttatctttttagcaagtgaagaatcagaatggattaccggacaaattattcactcagatggaggcttttggtgatttaacatagtagcggtcttccactttttagcggatttttgtatgaaacaagcagttaaaaggatcttcgaatgaagattcttttttattataatgtaacgtaacatgacgataaccgagtttctacaacttatcagtcagtcccaaaggattgttgatgggctacaaaagaaaaagtacgggcttttctaaatcagtagtaaaatgagatatttcatttatgaaaaatgctttatcattttcacttattgacgacaaataggatatattcagggggaatgtttatatgtcaagctttgaggacgaagaagtgctaacaggagggaatgtctctaacgtttatcgctcgggagatactgtacgacgagaattaaaatcagatagtcataaatttcataagctattaaagcatttagagaacaaaggttttagttatgcaccaaaatttttaggcattgatgaaaatcgggtatgagttgattatacaagcgtagtgcccccaggaacatgcatgtatatttctttttcttacttatcctgtttgaatcctctttttgtggaggattttttttgtgtgtctaaaggatataattttttaaaatatatatatcaaacaccttaatcatatgtatattttatactcaataaatcaatgtaacaacagcattacaagatgaaagagattcaatgtgtttttaagctgcagcaacaaaaacgatcgttatgcactaaaggctagatttttatatgtgctctagaaagaggcattatgttgactgggaatgaatgtaagaaagattacagaaatactatggacagatatggacaaatttttaatttgtaaaatattttttgtgattatacgggctttgcttattccagttttcgttttttttatagtatgtactataaatgtatagagaggtgaagttatggcaggacgtcgtagtagagatcgtcgtacatctcaatctcgctctatagtagataattttcgaagaggagataaaattcaagttttttctgctggaagacaacttgatagaaatggtacgtttattcgaacagaaggcggatttttagtatgggaagataattcaggtaatagaaatactactagtttagacagtatcagcgttcgcagattaagaaaacgtagttgctaataatttgtacaggctctgattttatataaataaaaaaacaccttcaagctgataactgggtatggagtaccgagcaatcatttggaggtgttttttctcataggaaacatcagaaataaattttctttaaggtatcacttatagagtaatacctttcataagacggaaggtttcaagaagtaaaacgtttaatcctagccatactcctccaaatacatatcctgctgcaatatcgctgggatattgtatgctcaggtaaaaacgactaatcgcaataagcaataaaataagaatggctgctattggtgctaatgtaggaacccataatcttttagcgtgtcgaaccagcataaacacagcaaacccataaataacaaaagccatcaaagactgctcgcttggaaaggtgtatgaaagctgttctatcaacgattttctaataggggagaaatggtggaaaattcgtctcaggctttcttcgtatagctccccgccgcctgcaacaactaccagagataataattcgatttttttatctctgcctttccataaaatccatacaagtgtaaagaaaattaatgccaccagcacttgcctggatcccagcatgaaaaatatccgcattggtacattccaatctttattaaaaagggctgttattaatagacttgttattttgttaaaatctccaaactcgtttgcgataaagtcttgcgtcattccaatcataagcagaataaaccctaatgtaactaatgctgtaaatataaaaacaagacctgcccgtttccgcgtatgaaacacatttactatccacttgaggcaattaattgctatctttttaatcgttactttgaactttgtataaatgtaaatagctgcgaacaaacttacagctacaatcatcccaatgacaaaatacttcttaatagaatgatgaaactgttcccactgaggtcctaataactttcctagagtaataaatgtggtgacccaaagaaacgatccactataggcgtacagtgcatacgtccgaaagggaagccgagtaattcctgaaaaatatcctgtaatatgtctaataactgggaggaaataagcaataatcaacagcttgtttccatgtacactaaaccattttgacattatttcaattcgctctggccccatatgaaatgtttttccgtatttatcaaaaaaaggagtccctaacttataacctaccccgtaggctatggtcattccaaccatactccccataccagccaccaagatacttcccacccagcttaaatgtccttgaaaagcaagaaccccagcgtagcccatgagcagctcccctggaagaggaagagcaagaagttccagcatcaatgctagaaacagcacgatatatccgtattgatttatataagatgtgataaaatccatggtttgtccttctttcataatatgtatttgcctaaagcacagtgaataactcaaatatgcttgaatttgattgaaaataagagaagggaaaaggttaatttcacctttacttttcttttaatgtagcactatttataaaaaaaactttctttttcattgatttttaatgttatttttagcctatttttaattacaaaccgtagactgaaaatgtgctatttgaaagttcaacataagaccgtttatttttctaataaatagtgtaaggagttcctaaacaatctatgtaatggaggagaagaaaagataaatcttacaaattgattgaaaagggtaactacccgttatgaattttttataatgcttactcttttccaagtagagtaattctttaatcgtataaacaagagaacaaaaaggtgcgtgaaacagcccaggctttaccacatagcaaaagcatacaaactacaaggagggaaaagtgatgaataatcgtgagaaagataaatacctcattctttccgctacatttggagagggacataaacaagtggctaatgcgataggcgaggcaataaatgagatcgccgctgatgctgagcctattaccatggatatcatggagtggattcatcccaccctctatccaatcagccactatatttataaaaaaagcattaaaaagtttcctcaagtgtatagctttttgtataaaaaaactcgtgtgaaaaattcgttttccattaagctaaattcgatctttttgtcgggcatgcaaaccgtgcttaaaatcatacaggaaataaaaccgaaagtagtggttagtacctatccatttgctgcggggatagtatcgaaattaaaagagcaagggttaattgatattccagcggtaaccatcatcacagattatacggatcattcttattggattcatccctctacagaccaatatgtggtagggtctgctcgattgcgtgatcaattaattgcgttaggggtagaggcagacaaaattaaaaacactggaatacctgtacggaaaagatttatggatgttcttccaaaagaccttctcctagataaatatatgatcaatccaaatatgttcaccctgctcatcatgggagggggagacggattttttggaaaagggatttcaacctttaaggcattagaatccatttccacaccgattcaactttttatagtatgtggtaaaaataagaaattaaaaacacaattagagtgggaattaaaagactcgaagcatgacgtgagaatttttggatactgtgaaaaggttgaagaattaatggctgtttcagatttaatgatcagcaagccggggggagtaacaacctctgaggcaatggcgatggatctaccaatactactttatcattcgttaccaggacaagaagaagacaatgcagagtatttatgtcgttcgggattcgcactgtctgcacagtcagaaaaagaattaattgcgcaaattgaaaatcttgtccgtgattcagcacctttaagatggatgaaacaaagaatgaaaaaatatcaaaccaaaacatcatccatagacgctctccatgtcattgtcgaaacagcaagacgcggtccattacgtaacgtaacagatagtagaacgatacaaaagcaaaaggagatagaggtgagtatataatatggagttcatgatttctgctattatttttttcattttattatacaccgttattccgtatttcctatcacgtggtctaggagtgaacgtagttaaaagaggaagggatttatctaaaattgcttttacgtttgatgatggtccgaaccctatttatacgccgatacttcttgatttattgaagaaacatgaggtgaaggcaaccttttttgtggtcggtactaaagcagaaaagtaccctgaactgattcagcgcatgcatagtgaaggccacttaattggaattcataactacgtacatcactccaactggtttatgtcgccttggaaagttagaaatggacttaagaatacagccaaggcgattaaatctatcactggagtcacacctatttattatcgcccgccttggggaatgctcaaccttttcgattttatgagaagaggtaaatataagattattctatggtcaatcatggcggaagattggcgaacctctggcggaagcgaaaagattaaacaacgcctggccaacataaaaggcggggacgtcattttgctgcacgactgcggagatacgctcggggcggaatctgaagctccaagaaacacaattaatgcgttaagagatgtattaaaaacagtgaaaacaaaaggattcacttgtgtccgtgttgatgaattggtagagaagctataggtagtaagaggactatctttattaaagcttgcgaatgacattttaattcttgttattaccgtaactaaatatcttgtctgttataaaaaaagaacctctattttaaagaggttcttttttatggtcagagtaaaaatatatggtaatataatcatatattggttatatttataatttcatgttttttaaaatctgtgttgaatcagcagtcaatttaaacgacatctatgaaagtagggtagttcttgaaaaaagttattttgaaatttttggtatattttttaatgttatttggaggaaacttaatgattaatattctgtttacctctaattttgatcttttaacagcattttcaaccgcttttggagtttcctttggggttgctatctttgactattatacacataaaaaaggcaaggtagcataaggtgcagtacttttcacccaatacataaaagattttattagaaacttaaatatcatagtattataaatgaatttctacactacttttctcttaaacaaatgggagttctctgttatgccttaacaatctgttttttcacaggaatgtagatgtcgatctctttattttctgaaccatagcatcttttgtcatacaattcaaactccattgatccgtagtgctcataacccgattcagggaaccattctgtaaaaacataattccatgtggactgaatggaagaagtaaatgattcttcatttgattttggtgtagtaaatacggcatattctagttcagggaagcttctgtaaactgttccttcaggcgcgggagtgccttcctctacttccatgccaattacataaacaaattcacccgtttcaggattaaaatcagtgcaaatgccaagctccgcgttttcgtttaggggtttggggattttagagcctaatccattttgcatgtactgttgccaaaattcaggaatgtctttgttattctggccaccctcgttcttcgtttttagctcatatccaatgatataaaaagcagatttagtgactagttttggttccatcttatttcctcctgacaaaagtgtggtagttaggtaggcttttccccgcagcggtccagatattctccttgcgttacggtattgttttggtgaaacatcgtaaaattttttgaaggctctgttaaatgattcttggtattggaaaccaacatcaagtgcaatatcaatcactttttcatctgtgaaaaataagcgttctgctgcgcgtgtaagtcttcgtttcctcacataatccatcactgattctcccaccatggcttggaagacacggtgataatgaaaaggagaaaaacaagcaatttctgctaacttttctaaagtaatttgtgtctccaaattctcctcaatgtaatctagcgttctctgtatacaagttacataattcatttacattcacctaccttacgttcactataacagcaaacaaatctttgttcttaacattttttgctatattcaattaggacatatgttttaggtttacttgtgtcttttgtttattttaaatgtttatataagggcagatgaaataaatgtgaaaaacgagcccttagcagataagagctcgtttttctcgttcatataccattatatattatcaatgcagcaatattttaatcgtgtttaaagttgaaaaccatgcaaaaaaaagcaaattttttgtatatgttattcatcaagatttaaaaagatgaccaagcgttgtctttatgtaagctgaaatttttatctttttcttgaaaagattctataaaaggtaaaaactaaaacctatcgcaatgtaggtaccaacaagtaaaacaccttcgaaccagttggaatcaccgtcgttcacaacggtcaccgtcatgagagcggcaaggatcatcgcaatcatttccgctgtattaaatacaagaggcaagaaatcatacaagtatgagaacagaacgagtataggagcaacaaacatggccgtttggacggttgaaccaatggaaatctccaccattacgtccattctgttattataggccattgcaattgctgacacgtactctgcagcacttccgactatggccacaacaataattccaataaaaacgtgactccagcctaaggcagcacctactggctcaatggtgccaacaagtttttcactaatataagctagtacaattgtggccagtccaagtacaacgattgctttcttttttccccattctggttcctctccattttcttctgcgtttccagtaaaaatccccttatgcgtgacaagtttaaaaagaagagcaagcaggtaaatggtcagcatcacaatggcaaaagaagttgataaaacctgcatatctttatcatccaagcgttttgcaaagataaatggcaatacaaaagttacgataatagcaaacattaagagggaggtattatgtcgtgttttaaacacactaaatttttgctttttaaatcgaattcctccaacaatcattgatattccgctcgcaaaaagtagattaacgagaactgctccagtaatggaggaaatgacgattgtatttagtcctttacttaatgcaaaaaacgaaataataatttctgcagcgttgccaaacgtagcattaagtaatccccctgctgttggacctactacaacgctaaggctttcagtagaacgtctgatgtaattagccaaactaattaatgtcacacaataaataaagaacattaaaatataattccaattaaaaatgctgccaataattgaaagaggtacaccaataatcataaaaatgaaaaagactttattcatattttcctccatggtcatttatagatcctatagcaagaagagaagctctatattatcttagcgtttttattaatataactcttaagacttttgttattcacatggagagtgcaactagcaattaactcgacgcatagaaagagaacatacttaatagctggtgcaaaagggggctaaagttaaaaaagaaaagaatcgtacaagataaagcgctatgaactcctcaagatcagcttcaaagtatatttaatagtctgctctgaataacaaatatgtatcttttacatgctaaaaagatatgaattttccaaacgcccctaattgacgttttcgttaacgttaactatgggtaatgtagtttatagatttcaaaataattagaatgaagcaccatttaaatatgattcaaactggtaattatcattaaaggagagagctattatgtatacacttggagaactattagagcaaagggctatacaatctgctgaaaaagaggctttaatttggagtacatctttccatacatttaaagaatataatgaacgtgtcaatcaactcgctcattacctgttaagccacaacgttaaaaaaggggatcgaattgcaattctctgtcaaaacaatcatccgtttcctaccattctgctagccgcattaagaataggaaccgtagcggttcctattagctggcagcttacgaagtatgaaattatcgatattttagatagtgcacaacctaaaattattttctacgaccaaaaatttcatgaggttattccttttgattctgaactattagatcacgtgattactttacaagtaggaagaaaaaatagcgtggagacagttgaagaatataatgaaattttttctacgtattctatactaaatccaaatatacaggtctctcaagatgacatagctatgcttctttttacttctggaacaactggcaacgcaaaaggctgtatgattgagcatggtcatgtgtattcttatatacaaccatctagccaacgaatcgattatgaagaggatggtcgttttcttgcttcgcatcctttttatcatatgagttctattaataatattttaaaatctgtttccaacgggatggggttatttttgttgtcagatcctacaccagaaatcatttgggaaacgattgaaactcataagatcactatgatgttagcgtttccttctatgtatatgcaaatgctcgaagcagtgaaaaatgcagggtcaaagaaatcttcactaaaggttgctattgctggaggggcaaaagttcctgcttatcttattaaggaatatgaaaaattaggcattagcatgatacaagggtatggaagtacagaagcatggacagtcagtgtatggacaccaaatatgggaaatgaaaaaattgaatcagcaggtaagcctctttctggtgtagaagtaaaaattattgatcctgagtcaggacaagaagtgaaaacaggagaaattggagaaattattataaaaagcccctattgttttaaaggctattggcataatcaagaggcgactgacaaagtccttagagatggttggttctatatgggggacgctggaaaggtagatcaagacggctttttatatattatgggacgctataaagatgttatcgtatatggcggtgataatatctatcctgatcaggtagaagaaataattgagcaaatagatacggtcattgaagccgctgtaataggagtagaagatccagtttatggagaaaaacctagagcgtatgtggtaaaagattctcattcttctttaacaaaagaagatatcttaaaatattgtaaagatcgtctagcaagctacaaaattccagaagtttattttactgataaacttcctaaaaaccagcttggtaaagtattaaaaagagaactaaaatgaagatagttaaaagcgtggactgaatgcagtccacgcttttagaatgggaaattatatatttaaaccagaaatgttaaatagaaagtccttttatatcaggataacaaacgagaagtgtattctcatactcagattcgtagcctgtaaataccacctttttttctttattatcatattgaaatccgaaattttttaaatcatttctcaatatatcttcactaattttcatggaagaagcaatctcctcataagtattaccattatttaacttttgaataatctcaccaattaacaaattacgacctccagtagtatacgtgtcttaagtaatactttatcctgaatagctgcttttatgaattgcaagtaaaggttaacaatttaaatgaatttggtattaaaagaagtgtagaaagccacatgtttctactgaggaattattcttcttgtccttgcatttctcattaataatagtagtgagtatcaccctatgttattacctgggtttgctgaaaaagcaaagagaatattctctttgcttttttcttggctttaatatttactgctctttttctggtaccatttcaactttacctggcaaaaaagcaaaccttcctaaaaccgtagtgatcgcaggtacaaggaatggtcgcacaataaatgtatctaacagaacacctaaagccgtgataattccgaactgaaccagaacttgaataggcagtgttgctagaaccgcgaaggtagcagctaaaatgattccagctgatgtgataacaccgcttgtttcgcttacgccttctttaattgcttgctttaatggcatgtgcttctttttctgccaaatgcttgagatcataaagatattataatcctcaccaagcgccactaaaaatacaaatgcgtataaaggaatcgctccttggatagcatctgcccccatgatgttgtgaataatgagccagcctaatcctaaggctgcactgtaggacaagataaccgttccaaccaagtaaagcatggctacaatggaacgcaagtaagctaatagcagaagtgatataaaaataataattaaagggacaataatactgtcgtctttatcactcgttgtcattgtgtcatactgtgtagctgtttgaccgccgatccatactttggattccactgcggaaactccggactgtgacagtgccttttcagctgcatctttcaagtctggaatagctttcattgcttctatactatatggattcacattaaacgtaacgtcatatacttttaaatcctcattatttgtaccactttgaggtgcagaaacagtactaataaggtcatttttctttaatgctttttcaaggtcaaccgattttccttccgtatcaatgactacttgtgctggtgctagttcaccaggagagtaagcatcagaaataatcctaaatccttcacgagaaggcatatcttcagggaaagaagacaataaatcatatgtgtacttgatttgactagagtaaagggataaagctccaaaaaagactagacaagctacaatgatcgtccatggtttagtcgtcaccacattaccaatccaattcccgaaacggtttttctcttttcggtcacgcaccggttttcctttctttttcgccaattcctcttccatttcaggagtacgagggacgaaaggataaaaagaacctcttcccataaccgaaagcagggcgggaataagtgttaaacttgctactcccataactagaatagataagctaaaagggattgcaaaacgattgtaagcaccgtattttgctacaatcaaggccagaagagagatgacaactgtaaatccactcatagctatagcacctgaagcacctttaaaggcgttgataagtgcttgtctcttatcttttactttgcgaagctcatcgcgataatgggaaattaaaaataagcaatagtctgttcctgctccaaacaacaagaccgtcataatggatatggactgcgagtcgaccgtaatccatcctttatctgctaaaataccgagaattggactcagcaccccataggcaaaacctacaccgattaaaggaataatcgctaaaattggggaacgataaattacaagaagtaaaattaagactaataaaactgttgcaattagtaacgaaacgtctgctccttcaaataagctggttgcatctacttgaatccctacaggccccgtaacacgcgtgcttagcttatcttttgcatcaatatctgtaccaaaagaatcatatgaaacttgttcttttacttgttttttaatcgtgtctagatttttttctagtacatccgtttcaacgttttctttaaagaaaatgggctgtacaagcgttgtaccgtctttcgaaatcattttttgtagagctgctagcggtaacttatgcaaaggcggtgtagacgtttgttcttctaatggtttcttttctaaatctgccgccacttgctgaatagattttagatcatcgttgttcaaacctgattttttgtgccatgtaagtaaggcaggaacccctgatgagttaggaaattctttctttataagattttcagcctctacggaaggtgaattctcacttaagtttggtgcattgttcacttccgttttattcacggcaggccaagcaattgttagaactgcagttgccagaatccatacggcaataacaacccaacgactcacttttccagtcataaattggctgaatggtgctaaaggtgattctttcattaatactccctcatttccaaatctgtttgtttctattacaatatatatagaaccttcaataattatatataccagaaggttaattaataaactagtttaaatgtgccaatttcttgaactagaaggagggcccttatgaatacgaatcagacaccgaaaaaaaagcctggcagacctaaaataacagctgaaaataatataacgagagagcaaattttaaaaacagctgctcatctctttatggcatatggatacgaaaaagtttcaatggaccaagtggctgaagcaagcgatgtgaccaaggccagcgtttactactattttaaaaataaggcaactttgtttacagtttcggtatcaagcatgtttcaacgcattacaaaacaaacggagaaattattacaaaattccaatgggctgaaacacagattatatgaggtaacattagatcatttaaaaagaccgcatattgattttgaaacattattgcaggaagcgacttcttcgcttacagaagatcatattcatgaaattcgtgaggcagagagagcgatacatgaggcattagagaacgtattcaagcaagctgcaaacaacggagaaatcgtcgtagcaagtcccagattgcttgcgcatacattttccacggtaacaatgattcggaataaaaaagaattaattacagaattaggaggccctgaaaaaacggctcaggctctagtgaacctgttttgggtggggattagtcctaattaattttcttattccactataaaaaacggctgtaacatattggttaatatgttacagccgtttttttactgttcacaggtacttcttgagaaaagcccaatggcataacaataatatggtggctttctaacctatgtaagtatgttgacataaactatttactcacatactggaattcgtatttaggtttattctaaaagttgttcaaccgttgattagtgttaaaaaaatgaaaatcttatcttttagagtttactgcagcatatatggttattctattgtaaataaggcctttagcataacagcttacattttggaaaggagaaaaatggatggaatctatttggctcgaatacgtatgggcattattgattctaatcgggttagaaggattattatcagctgataatgctcttgtactagcagttatagccaaacatttactcgatgaccagaaaaaaagagcgattaattacggaattctcatggcatttatttttcgatttggagctctttttgccatttcatttattgccaacgtttggtggatacaggcgataggagcagcttaccttctgtatttaggtttaaagcatatcattaaggcacggtttggaaaacataatgaggatattcataatgatgatgaaaaggagtctgctggaaaagggttctggccgacggtgggcaaaattgcgttagccgacctagcttttgccattgattctattttagctgcggttgctatagcacttggacttccggattcacagtttggagaaatcggtggtatggacggagggcagtttgcagttgtagttcttggggggattgcaggtcttatcttaatcaagtttgcagcgacctggtttgtaaaactccttgaaaagcgacctgccttggaaactacagcatatgccattgttgcctgggtaggtgtgaaacttgctgttattacttttgcgcataaagatattggtgtcttagatcctcattttcctcacagcaccacttggaccctgattttctatggagtattagttggtatcgcgctattgggttggtttgcaccgggcaataaatcatcagaaaatccatcggcctaaaagataatcaagggccatacgcaaccgtaaattagacttctattaaacattatcatgttttattgttctataaagagtacgcaccctaaattatcagttattcttactctttccatccaagcggagcctcatctttaacattcaaaagcatgtttaggtcctatagaaaaagtgagttttgttgattcaagtgtaactatcaagtgcgttaatccaagccggattaacgcactttttaattgaaatggttgcgcaaacgaacttggttattttatttattatttttgttccttttgcgataatcagtaaaataggaaattaagaaaattccaataaaaaaaccaatgaaaagaccgataagactttctatttgaaccctttttttttaattatttggtcgtaaattaccctgaatataacatcagcaaaagagagaacaacagccttgatggtaatacgtaaaaaattaataaaatcacacattttcacaaaatatattacccaattttaaacgattaaaaaggtctagaaagaaagacttgcgatttaaggttcattgaagggttacataaaaagttctctttcgatatttctacaaaggaaaagaagtctatattctattctcttagaagtagataatttaccctattttatacaatatttagatgatattttatagtcttttatcccatatccgaataaattggttttaattggctgctgaaggatacacctattagtagaacgacatattctatggggatagaggaggagaaaatagtgaaggaaattaaagtagcagaaaatagcggtcaggcaaataagtttattgaagagttttttgtcaacgggtttagtaaaagtgaaatttatttattgacctataataaagagcgctcggaatatttaacaaatacaacaaatacaaaagaatatcgagcttctgaacaaggagtttttgaatctacagttaataagttattttctcgtgaagatgaacttcattctaaaatggcctcgttaggtttaacccaagaagaagctaaacaatgtgtcggtgaaatgaaacaagaacgtataatcattatcgcaaagaaagatatgtaatggttttcttatacaataacctttgaaagaactaagtgatagagaaaaattagtaaaccttgctagtatgttgctttatatataatatttgctcttctgtacgaagggtttatgaaccggaaaagatattgaacgaaaagtatattactagagtcgtttactaatctcatatggaggtgaaaggataatgattcaattttttggtatccacatagggacgttatactttcctacaagtatccttctaattactttattagttttagtaggttttattatctattttcttagtagaagaaaaagaaatagagatcaaacgattcagtcaaatgagaatagggtaaaggggaaaagaggaaaagacaaaactctgtaaataatctaaaagaagaattaatatatttcgtcatcaaaaagaatccccgtttgaagtgaaagtaaattatcctaatcctacagttcccgatacagccttacaccatgatttaacccgtgagaaggtatgatctaaatacatgcaaagagggcccttgaattcatttccaagggctgtttttatttttattctgtaaaggacagacgaccttttaatcttctattttcttactatttcttacttataaattcaaaggaagctttattgtcgttttttaagattttaagcaagcaattgaacccttgataaatttgaaatagtagtctaacctttatattaaggagtgaaaattatgaatcaaaacatttcgggtattgattatcaggaagtcattgaatatgcgttagatccactcattattcattcaaatcataagattatatatgttaaccacgcagctgaacatttttttagaggaaaaagggaagatattataggtgcaagtcctttagatatatttcaagaaacatctaaagcagcaataaggaaaagaatccaatctgcttatgaacgtccagcagagcttattgaggaaaccatatttagaatggacgggacaactgttaatgttgaattatattgtcatcccttgctgctgggagataaaaaagtaatccaaacctatgtgagagatattacggtaaaaaaagagagtgaaacaagacaaaaagaaataataaagcaaataaatgaactgtctacaacccttgttcctcttttagagggaatcgctgtacttcccttagtaggatccatagatgaggaaagagcaaaccaacttttaatggctgttccagtaaaagtgcagacgcaaaatataaattgtttaattatagacttttccggtatttatacattgaattcaattgtaacggagcatctttttaaaattaatagcgttatgtcactacttggagtgcaatgtatcttaacaggattaaggccagaattatctcgctctgctgtacagctaggtattaatttagattctaccctgacaatggctactgtaaaaaatgcacttcattttttaggaattacttctagtaaataacctgtaaaatgaaaataactaaagcaacttttacctttttaaagatacatatcatatgaatctttaggtggtgctaaacctttcagaggaagtttttaattaaagaaatagtggcatcgtctttacggtttcgttctgttttaaatatttttaaatggtttttttaaattagatttgtatcttgtatacattagaaaaacaaaagaaactcctgaacatataccaggagtttcttttgtttaaaataacatattgtgaaatcgcacgtttgttaaataaaagatagaagaatcattgaatcgctttcttcagtttaagatcttgtataaagcttcagaagcgttatctatatcataatcgttataatttaaggttttttgatccgtaagtgtagtgatttgaaaaatcttagatgttttacaatacgacagttccagtacttgaggaatggtatgagtaatagtactatcctcatattgaataagagtataaagcgttttttttatttcaagtatattcataaaagtacctctttccattataaggaaactaagggtacaaagagaccatataattttaatttatgttctttctctattgtaacatatgaacgtatagaaaaatacctgccgagaacagacagtatggtaactgcaattgtaaattctatgcacttctaatcctgctagctgatcagttaaaaaggtgactatcaacagaacatgttcttcttataatagaattaccttaaatagatttagtagtaaaaaagagtagattattaatctactttattgctttataaacaactggtgaggaaagtttaatcaatgtagatggctgcccaaaagccatagattcatcaatgaatgtttcaagagattgaacggaattagttaaaacttttactaagtagttgtattgacctgccaaacgatgacattcgataacttcagggtgttctttgcaatattctacaaattgcttgcattttgtattgctgtataaaataaaagcagttacaggtttgtgaaaattttcaggattaattattgctctatatccatctattatatttttttcttcaagtttttttactctttcattaacagcaggggtagataaactaaccagctttcccaactgtgtaacggacaaacgagcattctcttgtagatgtagtaatatatttttatcaatttcatccataaaacataccccgctttaaattataaattaaaataataggttttccgtcaatattaaagttattacgtagtaatacaataagaaacatatgtaaaaatagaaatttatagaatacaatttaattgtacacttttcaattgtcagaaatgcagaagaagacttgtttcgtccgacacattattcttataggtaactaattgcacgaagacaaagatttttagagtactgaaaatcgaattcagtaatcgattgatttatagataaaacaaaaggtaatagcacataactaaaataaagccctaaaagtgtctaatcgacgcttcttagggctttatttctgccaatcattgtgtctcaatcgttttttattaagcaggaaagcctcctgttggcggcggccatgctccatttaaccttctcataatgacaatttcacctagatgatagctattgtgagaagcaatattgcgcagtaatccccctggggtttcacttggccaagcctccagaggttcttcgattgctaatgtatcagctaaatgacaagcttcgtcaattccatcacaaaaatgctcgatcgtctttttccattcttgctcatcagacggagctggatggtcgggccaactttcactcacacttttcggtcttacggggttttctcctttagcaagaacaagtaaaaagtcttgccaatagctcatatgctttactaattgataaatagaataaggtaattcctctggtttatgtgaagcaggttccatattaatatcggttattgcgttaatcgttggaagatgacctctttcacctcgcagtgatttgataagcgcatcacgaaatgctgtattcgtttgtgtcatgttttttccggcctttctttttcaaagtattaagcttgtaacagtctaacacaaaccagtttaatatatgtacttctgtgattaacgatttactataacaaagccactaaaataaatagtatcaatcacaattttttgtttgtaagtcacctttaaatgacgaaatatggtttaatataaaatatatagaaataagtagaaaaaggtaccctttatggaaagtgaaaaagattatgtgattttgagaaaagcgataacaactctttctacaagctttattttagcttacctcttggcaataacagacctagttctacagctcactgatgaagaagaactgtcgtatcatatcggaaacgacatggcaggatggttccttgtgtatcttttttatataggtgcaatcattgctgtttacgggaattttgtctcagttatactggacgctattcgaaagaaatggtttcccaacatgaggtggctatttgtcttctttcacggcatgttaggtttaattaacggtttgttttttcaagatacatatttggcttattacggaatggcagctgctatgttatatgcatgtatagattggtgggtagaaagaagaattgacaggggaaaaagtacaaaagtactattaattataccttttgttcttttacttctcagttggagtatattagaagcgatatcacctagtcttccgccattcactaaaaaagatgccatagagtttgcgacaagtggtgaaggaacagatattgatttatttcctgatacagttgaaacatggaagggaacgtttgagggatatcacgttcaaagaagcactcgtgctaaaaaattaaataaagagttataccttgtgacctttgaagaaaacaggaccaaagggaaacgaaaaggacactatgtaatgtcttataaagtagatcgcagcagtgtctcagggtatggcggaagtggcacaacacctccttattatgagaaggtattacaacaataaaatagtaaaaattaagtttatgaataaaggagctttgatctatgtctaaaatttctctagcaggggctgtgaaattgaaaagtgtattatcaaaacgaatacatgaattagaagaagagatgaaccgagttgcattggtgcccttacttataagttaagtaagggccatatttatcttatttttattagaaagctttcagtataataacacctgtaataataagagtaaccgagataatttttctcttgttttttgattccttaaatatataaattcctaacagcgttgtactaacaatcgttagccctgcccatatagcaaaaacgattcccatttcaaaatagtgtgtcgttagagaaataaaataaatacaagcaatgaagagtagaaatgcgcctattgtaggaacagtttgtctaaagcctttagatagttttacacacatttgccctgcaatgcctaaaactaagcccatcgttaaaaatacgtatcccattacgctgtccttctttctttagagctccctttaatgttaagagaaactgcaccaattataataagagaaacacctaaaattttagataaagaaatagtttcatcaaaaaagataatacctgtgacaacaacaagtacggttgctcctcctgcatacaaagcacttgctactcctacttcacctttggcgttaagtagcatataagcagcaatcgaagaacaataaaatagtatggcgaaaacagtaggaacaaagtttgtgaatccatttgtaagattaagaaaaaatactgcgattacctccaagatgatggcaagaaacaatagtaaataaaacaatcagatttcctcctttcagtcacctcattttaagaactttacgtaattactactaaataattgcagtagcactcggatgtcattattttatctagagcttgatatcttgtaaaataatgataaatgattgtagatatcactattattaatacctaaatgaataaatgtaagtggaaaggaggatgtttatggacgtagaagatatacgcatatttatggctgtagcagaatacggcagtgtaagccttgccgctgataagctgggttatgtccaaccaaatgtaacagcacgcattcggtctcttgaacgaaaaattggacacccattgtttcatcgtcacagacgcggaatgacattaaatgtagaaggtcgaaaacttttaacgtatggagaacaaatgatgcggctgatggatgaaatacagaaagcatttcaagatgagcgtaaccttgttggatcattatgtattggattagttgaaacggtaatagggtttcctgaaatcatttcttcctatcataataagcacaaaaatgtggatatttctctagtatcaggagtaagtatacaattaatagagaaagttcttaagtttcagttagacggggcatttgtagcagaaccagtaaatgtgtcaacgcttgatcaaattccggcttttgatgaagaaattgtacttgtatgcagtgcaaatgaaaaaggtaagaagcagattcagtctgccaaagagttactacacttaccattcattttatttaatgaaggctgccaatatagagaaagactacagcaatggttaaaagatgaacaaatagtatcaccaaaaattatggaatttgctacacttgaaacgattatggggacagtgatttctggtcttggtgtgacacttatagcccggtcattagcggagagatatgagcgggaagggttagtacaacttttttcaatacctgagccttacagaaacctcaggattgtgtatgttcgtcgctccgactcctatctaggagtaactgagggtgaatttataaagacaatcagcgaagtaagagaaggaaaaaagcagaaataaacagactgttttttcataaagagcttttttatttaccctatgtttaatatgaatgcaccaagtgttaactagaaaggtaaaagtgagttttttagctcactttttatatggcataaatcaaaaatgcttttaaaggagcaagcacggtgaaaatagaggacaaaaaatttgcagaacgagtactgaagcacttacttatgggcagtcaaatagacggagtgaaatttgggattaatagttctacaactctattgtattttactaattataatagaaaagatgatggtgattttgttttaaacatcgaaactaattggactgtatatcctgaagcctgtgatacatacccatcatcagagggtgaagtgccctttaatacagaagagcaacattttaagcatatttgggatattaggagacaaaaagtagtaaacgttcagctagatactgtatcgcctcatcttatcatttctctagaatcggggagagttttatttgtgaatggctacgatcctaactacgaatgctggcaattaggagacccttttggaggagttgattggcttttagttgcaactccgggtggtgacatagctatttggtgtcctagtgagtttgaatgagcgttatgttaactattcttgtatatagtgtacaaaaaaatcacttagggaaatgttaaaacatatggaggaaacatgcatgaatactatcttagagagcttttatgatttaaaggaaatattaagttcttttaataatctccatgagaagtacaattggttgttgagtgatttagatggatcttttccagaaaagtaccttaattactttactgactacagaatttacaacaacagaacgaacactagtacatactggattacaggtgaaaagctcacggagcttgctaataaagaggacatctattttatatggggagttttctctgcctttgataagaaagaaactataaatttagatgtgcttaaagaagagccttatgctgatggtaatccggatttttggattgaaacaccaacaattcagcaccctaaagcaattatagaattagttttttgggactcatctttaattttacttctgagcaaggacgaagaaatatctaggaattttagaaacaagttcgcaaaatggaaagacctagaggagtacaataacgagtagtcttatgacttatatatactataaaagaaaaaacatctatcggaactatcctcaggaaacagccacggttaaatggataaatgatgaaccaggtgaaattagtgaccatacactaaacgttaaacaagatagatttaatgctaatgatcggagtaactaaattctatttttaaacaattaagagctcttggtattaattatttaaaaatgggctaaataaacacgcgcagctgaagcatcaagctgcacttatttactgtcgctgaaatcgtttcctagcgttggtctagaaaacagtagagtagacattatttacatgtaaaagaataagcattggtaattggattatgtattttaagtatgacttctgtctcattaataactccttcaaagtagtactcaatatcacttccttatttatccataataacatactttaattagctatccatttataaactagaaatgttttgtataattcttataacatttgtcttctaaaaaccatacacttttacagacgtatttggtagactaataggaaataaatagaaaaaacttatcgaaaaaaattttgtgtacgaaattatttaaagaaggggggttcctattgtctaaatatataggtcttttcttcttgaacctttttataggaattatactatatttcgtattaggttcccttttaatgactggtgataatgcagcagaggaggccattaatacctttggattcatcataattatattcctttcgtttttaattgcacaaatgtactacttaatacatttagtaaagaagaaataataggtattgatgatggtctcatcggaattacaaaataaattaaaaacacttattgatacgatatgtttcctagttccgttcttataaactgactaagaaaatatttgataacaaggattcttttgcagaaggttagtctaaacctccgtgttcatattttttctctatttctattttgataaacgtaactcatttgctttaagagtatttatacgacttaaagcctgtacaattacatactaaaaagaaatatccaatataaataaaacataataacaattgaaagcgatagaattgcgttgtataaagatttaagcttcacaaatttaccacaaccacaagacttggggcatttaagacaggggagaatagaataatgaaaaaattaattggtgtaactattatggctgtttcgttgttaataggcggagcctgttcaaaccaaggaagctcagatgtagaaaaaaataaaaaagtgtcaaaagaatatcagcaagataatcagaaaaaaccttttaaaattactaatgttaaagtaaaagtagttaatgacaagggtttggtaggatctacaataatagaagagaacggaaaagagaaagaaattgtgcctcttgctctttactacgatatgaaaattaagcactacagtgataaaaaccttattaattttgataaagatgatttagattttaaagttttacccgataaagagctaataaaggcctctaaagatgctgtaggagttaatatttttgatgacgagaaaggtcttgatggattagggaggggatcaggatacggggattttaatagaaatagaactggtaaaataaatgtaagttatgacttaggattcaccactaaatccggagggctgccagtggctcctaataaagaaaaaataaaaatgcttaaagaaaatgctttaaaaggtgttttagtagtcattaaaaataaaaaagaaataggtcgctataaccttaatgctataaacaaaatagattaatacattctatttgtttacttagctacttacctagaaagctttaactgcaaataaaaggagaaaagcatgagagaagcaactaaatcaaaattagacaaattagtgggcttgaatttaagatacgcggggagagcctcaaatttgttttggctagggtttggagaaaagattttagtaaccagaagggggaaaacggaagaagtagctgaatatgctttacatattcaatgttcttggcgtattgccaaaggtaataaaattgtagtaggctcccgggatttctattctccaagaacaggcttggagaatgaaaatgagcactttgaatgggacgtccaaggaaataatcgattcgatgaacgaattgaatccattatagaagatatagacgaaaacacgattgtagaaagagttgactcggacgaagtaggagggctaaagatctttttatctcaaggttatttattagaggtatttccggatacgtcagaagaagatgaatatagtgagttctggagacttttcaaccggaaggaagacagccctcactttgttgtcacaggaaatggtattaaaaacgagtaatcttataattaaagaaaagaaaaaagcacaaacccgttggtaccaaacgtttttgtgcttttttcttattttataattgagttacatataatcataagcggaatcatcaaaatagagccagtgataatattcaacctgcggatctgtcatcttcgaaacttcttcttcattgaatttttgatactcaactaatttctgcactttagaatttctttccacttggctcattttaaatcctccttatagtttgaaaaataacaatgtatttaaatttagaaagcgttttcttttattcttgtttttattatatatctcaatatgagattaaaacaatatcaattatagatgatttttcaaaaaacaatatagaaatggtatttaagctacatagccggtatttatcaataatatttacaccgagggagtttgctcag

SEQ ID NO: 37 - DNA, 42809 bp, Priestia aryabhattai
  source 1..42809: mol_type = genomic DNA
ctatgatgggcacaaaaatttcagcttggatttgttcatttttattttgatattgcttattgtagcaatatcgttcaagttctgcatgacctgaatgttcataacccaaataagaaacccactcttaaaaaataactttctatatacggtcaatcgcttctaaaatggttgatagggaaaagaaatgattgggaggtgtattagcatggaaataaataattcaaatgaacaaattgaacaatcaactgtagctgaacctagagtattaacttcatttgtagcatattgtacttcttgtgcaccacattggaggtctagatgttatgcaactaaaacagaagctcaatcattagcagatgtacataattatgcaaaccatggcggacatgttggagcatcagtaactcaacatgtcgggaattgctaatccaacaattaagagcatccataaggatgactccttttagtaaatagaactaactggtcattcattttagcactgttttttacttctgtacctttcctcatacttcttatatttcaactcaaatatgtaggagtgtaggaggtgactgttatgccagatcaagctcacgaaaaagagaaaataccaaccaagaatggtaattctcgaattgctgaaagaagtcatggaatatacaaaactacacgtaatgaattagataatagaaccattctaaacaatatagataatagcgcgatgcttaatcttaatgatgatgaatgattcactgtacggcagtaggtgatgagtagataatcatggagtatttgctctttttttatacgctggggatcggcctagtcacttatttttctcatgatgtggatgagaggtcaaagaatattccagcatctaaaagagagtgtaatgacaagcagtggcttgtatacttcagagcttaaaaagtagtaaacacaaccgcataaaaaaaaaaaggttaaaaccttctctttttactacatttttaatgaatactttgtaaagaattcttaagtatgcaaagtcctttttccaattcattagaatcctttgcagacgtcaaggcaattcgaataaattgagtagtttcctcttgtctgacaaggaaacgataagaatgatacacacgaatacccttagccaaaaccttctgttcaaactgttgtggctgatacttatgcgcaagtggaagccaacgaaaaaagctgagaggattttcataaggattatcaactttaaaatatttctggtagatgagattacattctttggcaagctctttttttgtgaaattattttatcagcaacacccgtattaattaactcagttataacttccgcatttaacgcagaggttttaatattaatattaaaaattccacgagtaattttatcagtaaacttatttgcaaaagcaataaaaccgactcgcatgcctgaacttatggatttagagatactgtttatgtaaacaaactgttctggaacaaaatgagataccggtaaatagtcttgtggggcgaggaaggaatagatatcatcttccattaatataagaccgtgcctcttaattacttctgctatatcctttcttcggttcatatccattgtaactgtggtcgggttgttacacgaagggtttaaataaataccttgtagattagttttcctacatataaaatccaattgatctggcatcatccctaatgtatctcccccaatgggaactagtttaatgttcagcatattggctagttcaacaaaatttggatacgtatagctatccactgcaattttatcaccagcttgaaacaatgaaatcaaaatcagtgtaaaagaattttgaccgcccgatgttataaatatattttcaacatccacgtccatattgaagcgctgtaaccattgtttagctgccattctatgatacggaattcctaatggatgtccataatccaataacttttctagataatttttgtcggcagtactcttaattgcttcggcaacgaatacattgaaagaatcgagtggttttataacccccatttcaatgtaattcttatttgtctcgctgtctgcgatgaaaatagcatttcctgcattaggtgcaacaaaggttccacttccagtaacagcataaattaagtttttcatctcacaaattttaaaggctcttgttatggtactaaggtttatatcaagataatcggccagttctctttgtggaggaagctttgtattgggtttaaggtaaccattaagaatatcgtattctaacaagctcgcgatggagagatataatggggatccgagatttcttttatcgggtttccatgacataggatagtttttaaatgaatttacaggcatgttgacttaacctccgtataattgtcttgcatatactttaaacccccatgtttatattaatgtttaaatccaatttctccgacagctgtatcatgtcaaatctttgaatccattttaaaaagagaaggtatctcaaaatggattcaaagattctgattaaattaaattttttcaaaagctagctttattcctaaagagatgagtgcaatacccgttattcggtcaaggaccatttcaacagaaggtttttttaaccacgaactgatgtatttaaggatgtaaagatataaagtaaaccacaataaaacagttaagataaaaagtccggctagtacaatcgactgcataactacatttccttgcaaatcaataaactggggaagaaaagaaatataaaacataatagctttaggatttaaaagtgtacttgctaaaccttgcagataacaagttttattttttgaacctttttgagttacttgtaatccatcttccaatttcgtttcaaattccttattttctccttccttattcttcgttctagacaggattgctttaattcctagataaagaagataaacaactccagtatatttgatgacttcaaaaagcaccatggattttgcaataagggctgttaaaccaaggacagaagctgtggcatatataatatgccccgtaacaacgccatatgaagtcatacgacctccatgcctattaactgtaatcgcatttttagtaaccaaaataaaatccggccctggggttataatgataataagagatacaattataaacatataaaattgtgacataagagcaaatccccttcgatttgatataatacaaatcactttatcaccgtagttgtatgtattcaataacgaaattgtatgcaagacaattattgagatatgggtgaatagtagggacttaaatcgaattttcataatgcagtaggtgatctttagatgattatggaatatgtaatctttttttatatgatggggttgatctagtagcctatcttattcatgaaagggataacaggcagggagggaccaacctaatataatcagttcgactcactcactgagtatgcctttctaattagtttcaaaggttatttatgctccctctacttttaaaaaacactttgtatcctctaatttcttgacttaaaccagaacaaagttatcttcataaattaggataataaaatcataaatttattaaaaataaaatttagttgttttttttttacataaaacctagtaaacttataaaatatataaggtatgtgggagggttcaaattgaaggaattgtttataaatagtgacaaacagcgcaactggttaaatcgtttagaaaatatcaagaaaaacattgttgagaattcggaagaggtggataagttagcaaaatttccggtagaaagtttccaactattaaaagatataggttatacaaaaatcactcttcctaccaactatgggggggagggattatcagtttatgatatggtgctacttcaagaaacactcgctagctatgatgagaacgtttcattagcaattggctggacattaggagttatcggtgatctttatgcaaataaattatggtcggatgacttactggaagaatttgcggaatatttagtcgatggagctattgtgaatcgacttgttagcgaggcggcaactggaagtccgactcgtggagggagaccaggtacaaatgctaggcgtacgacaaacggttggattattaatggtcgcaaatccttttctacagcctcacctgtcttagactattttttgacgtctgcttggattgaagaacagcagaaagtaggttttttcctaataaactgtaatactccgggaatctctatcgatgaaacttgggatgtcatcgcaatgcgaggaactgggagccacgacgtggtttttgaagaagttttggtagaagaaaagtatttagtggaaatcactcagcgtccaagtggagggttgattaatggctggcagcttcatattcctgctacttacctaggaattgctcaagcagcaagagattacgctgtaaactttgcaactcattatcaacctaatagtttacaagccccaattagtacgctccctcatattcaacatttaattggagaaatcgaattatgcttgcaaaaatctcgttttgtactttatggcgtagcagaaagttttgatgatccgaatcgtagagggctactaacaaatgaaatagcaattgcaaaatacactgttacaaataacgcaattacaattgttgataaagcaatgcgagttgttggagcgaaaagcttacaaaataaaaatccattgcagcgttattaccgcaatgtacgagcaggattacataatcctcctatggatgatatgacaattacaaagcttgctcaccacgctatccaacaacaacaaatcaaagatactatcaaaagctaaaaactaaaaataggaaggggattttaagatgattttcaaaaaaatatttgggatgacagtagtaagtgttatgacagcaggattattagcagggtgtggttctaatactacctcaagctcttcagctgatacaggatcttcgaaagttcacacaataaaggtagcctatgaactaggttctaagcctactacctatcaggatgatgcgggaaagcccgcagggtatgacattgaaatgatgaaaaaaattgataaactacttcctgattatcaatttcaatacatcggaacatcaagtgacgaccttcttataggggttgaacaaggaaaatacgatgtaggagtaaaaggcgcattctatacagatgaacgtgcgcagaagtttctttttccgaaggaatttatggggttgaataaagcaggattagttttgaaaaaagaaaacgcaaatattaaatctttacaagatttttctacagccaatctttcgttagctccaatagctaccaataatggtcaatatgctgtaattcaagaatataatgatgctcatccggataaaaaattaaaacttaaagccagtgatacatttgcaattgatattgtgcaatgggtaaacgaaggtcgtgctgatggtggagtcatgatggaaggagcctttaattcccaggtagtcgataaaggcagcccttactacaatcttaaaaatgatgttgtattcaatggatttgcagttatcaaaacgtggcctttgtttaataaaaaggaacaggattttgcagatgcttatgataaagctgcaaaaaaactgaaagatgatggaacagctgctaaattaattaaggagtatacaggtagtaatttattcgaattttcagatcaaataaaaagataaaattcctgtgaatatagaataaaagctgtttagtaaaagctatacagcttttgcttataaaacttagaaatggtgagtgttatggaaaaatactttgatatatcttatatttggactgcattacctttgctacttccttttttacaagtaacactttttgtatcgattataactattttatcaggcacttttttaggattagtattaaccattttcaagttaagtcataataagctacttaataaaattggtaatggttataccacgattattcgttgtacaccatccattgtattattatttcttgtttactatggcattccaaaattagcagaagaatttaacttgaatttacaaaatataaatacagccatttttgtcatcataacgtttacgttgcaatttgctgccataatgtctgaggttattcgttcagcctatcaatcaattgacaaaggacaatatgaagcagccgtcagtgttggattgtctccatttcaagcatattggcgtattatcttcccacaagcacttgttattgctttacccaactttggaaatggcatcattgctgtgctacaagaaggggctttagcctatacaattggattcatcgatatcgtaggtaaagctaacttaatgattacaaataatataaatgctcatgctttagaaatctacattgccctagccattatttattgggcattatctttactaattgaaaagttttttagcatattagagaaaacttttagcaaaggaaaaaaaacattagaaactacttagaggagggataattttgtctcaaggtcttaactataaatttctaattgatacgttttttgtagctctatcagggatatctattaccctcctagttactattgtatctttaatcattgcacttcccttgggatttctgctggcaatgacacgaattaaccgaattccagttattcagcgaatcgcacaaatatacgtttctttcgtaagaggaacacccattattattcaaatttttattatttatagcagtattccactcattttgaaagcattttttgataaatataatattcaacttgatatttataaaataaatccaatttggtatgcccttattattttttcatttagtaccacagctttacttattgaagtctttcgttcagcacttggtactgttaaaaaggaacaattagaagcagcatattccgttggtcttacaacttttcaggcttataggagaatcattatccagcaagtactagtcgttgcacttccaaatttgtgtacaactactgtaaatctgattaaagcaacttccttggggtatgcaatgtccttaccagaaatcacattaaatgcaaaagtagctgcgaatatgggctataactatgtggaagcttatttagatatttttattatttaccttattttatgtatgaccgtcgagtacatttttaaagtactagaaaagcgcttaagcaaatataaaatggcgaatgtttgatgtaaaggagggagaaaaaatgttagagattaaaaatgtacataaatcatttcataaaaacactattctcaaaggagttgatttatctattgataaaggcgatgtagttgttattttaggacccagtggatctggaaaaacaactttattacgttgcattaattttctagagaaggctgatcaaggtcatgcatcatttggcgatattaaagtagacttacatcaagctaagaagaaagaaattcatgcaattcgacaaaaagtagcctttgtatttcagaattacaatttattcactaacaaaacagctttagaaaacgttacagaaggattaataattggtaggaaaataccaaaggccgaggcgattataagaggtaaacaagcattagataaagtaggtttatctgaaaaatacaatgcttatccaattgaattatcaggtggtcagcaacaacgtgttggcattgcaagagcagttgctttaaatccggatattatcttatttgatgagccaacctctgccttagatcctgagctagttggggaagtattatcggtaatgaaagacatcgcaagagaggaaggaacaactatgctcgttgtcactcatgaaatctcatttgctaaagaagtggcgaaccgagtaattttcatggatgatggagttgtagtagaagaaggcagccctcatgaaattttggtaacaccgaaagaagaacgtacaataagattcttaaaacgagtcatacctaaagattacatctatcaaatttagttttacaatctactgtttatatagttaaagaatagaaatttatctataaaactctgggatgttacaaagcaagagattagcgataaagttaccaattatggggttttgaatagaaaggactgaattaaaatgaacatcgttataattggtaccggaactatagctcacaaaagacatttaccttctgttatgaataacccgatagctaatttatatggggtatataaccgtactgttgaaaaggcacaacaggtagcacagcaatataactgtaaagtattcgaggatatagattgtatatggcaggatgataacgttaatgccgttattatttgtactccacctagttctcattgcaatattgctacccaggcattgaatgcaagaaaacatgtcttggtggaaaaaccaatggcaatgtctaagttagaggctattacaatgaatgaagcagcaaaagctaatggatgtattttaatggtgtctcataatcagagactttataaaccacatttgaaggctaaagaattaatagcaaatggtgaaataggggatgtattaacatttagaacttttttaggtattcctggagtcaatctacagaacgatgaacagcagggtcaatggaaaagctcacttggtgaggttggttcgcatcgattagatttaatgaattttttattagaaaggaagcctactaaggtattcagtcatttatttaacgtaggaagtatagagtccaacaccgatgataatggtatagctattattgaatatgaagattgtattacaggaacctttattttcagtttcacaagctttggagcaagtgatagaatgacgcaaattttcggaacaaaaggagaaatcacgctatacagtgatgcttcttttgtaacagtagaaaaggggatagaggaaaagcaagtttatacatttcttgaggaattacctcaacataaaattgaaatgacagatatagtagatcgctttatctcttctattataaataatgaaaaaccttttgttacaggagaggatggtattcaggtaatgagtctaatagatgccattcggcaatcaagtaaggatggaaaatggataactctagcaaatgaatatcaaatggagtcgtgattcttcagatactatgtagctactgcagtaagcttgcctgtccactcaaaaaataacaaagaacccttactgcggtaggtgaggagtaggtagtgatgtaagatgtgctcgtttttataggctggaggtggacctaataaagatgtcccaaggactaaagtagaacataatgaagagcagtggaagcatgatcctaaagagaagtaaataaaggcaaataaaaaagagaagggttaaaacccttctccctttactatataaaatcgtctatacttagatactcttcttcattccacattctctgcattcacgtaagaaaacgccaccttttacggaacttttgaaataagatgaattgcagttgtcacatcgtccactttttttatctggaaattcagcgtattcataaaccttatcaagatcgatttcttgctgctctttctcttccatgttgatcactcttttctagttgactcttattagattaccacaaatggtgaaggtgaaattattttatgtaaaacgaacatcaattagttcacttaactttattttatttttcaattcgaaaacttcatcgatgaagataaagagatcccccagggaatcaacaaattgaatgaaccctatatcggttatactttgcccattcttataatatgtaaggtatacttgtttatttgtatgtaatgcttcaatcaaggtgaaattgatttgttccatttgctcttctgttaaaagaggttgaggtacttctgcttgcttgtttataacttcctgcaatcctgtgtattgttctggcatactcgcaaacgggcgccattttttcattcctctatcgtcattcatgatatcatcctcctttaagctttatggccgccaataagaccatttcgataacgagctgttgagtgatccagatagcttgaagcacgtaaaacactattctttccataacgcatccgaatttcatcaatcgttttcgcaagagcataggctctttcacgctgatcgatatcctcaaataagctcatttgctcctcttcttcaatgcttgtgtttgataaggagatcccaatggagcgaatcggcattccattatcgtgtgtatgtaagatggttaagcaataaggaaaaatatcttggcttaagtttgaagctcttcccattttcttttgtcttgagaagcctccacctgtttgtttgctgtagccaatggataaatgaaccgtttgagccaccacttgatgcatacgtaaacgaaagcatacatcgtccaatagctccaatagtaataattccacttcttttcggcttgtataatctcgaaagagaatctgacttttcccaaaggaacgagaactagggatgtacacatcggaaatacgactaaaatcaatcccattcgcatgttggtgaagttcctgtcccatgatgccaaattctttttgtaacatctctttagaagaaagagcgagttcttttatggtatagatgcctaaacggtttaagcgtctttctgtagctgacgagatcccccagaaatccttcattggatgaatcgaccataacttaaagggaatatcctcatatcgccaatacgcaactcctgttgggctgtgctttgcttcatgatctaagctgactttagccagtaagagattaggaccgattcctgcggtagctgtcagtcttgttttacgatagatttcattaattattcgatgagctagatcctctggtgttcgagcaaataaatgcaaagaagccgtcgcatcaataaacaactcatcaatgctatacgcatgaaagtcttcaggagccacatattgtaacaccaaactcgaaatatagttcgaagccttgatgtatctctccatggatggattcaccacatggatatctttccttttaggaatttcaaaaaggcgacttcctgttttgatcccttctttctttaataaaggtgtggcagctaacacaacagatcccgaccgtttgatatctcctacaacagcaagccttgttttcaaaggatttaaacctcttatgacagaagaaacggaggcataaaatgctttcatatcaatacaaataatgactctgtttggtagctgcccataatccattgaactaactcctcaataaagaacgtttgttctttattatatacgaacaaacgttctttattcaatggaatcttttcccgattattgctattcgtgtctcttaaataaagattgattgaaatggagttaattcttttaagtaagtttgtattttttatcactggtattaaagaaaagcccatgtgaagggaaacaaatcacaggttataaatgttatcattagttgaaattaggtttctgtggggaggttttagcagacttatgagagatattatgaacataactattaatatcagggtagcaatatgtttagcatatgctgaacagacattaaattattttgagaatgaattcaaaggtggaaattataatcaagcctttaaacaatttagaagcatcataaatatgggttacgaatggatatcaggaagggtgatagattgggaagaactatacactttatgtaatgatgatgagagggattatggttgttttaattttgtagccatgttcgaatgctcagataaatatgaaacaccgataagcgtgctaatatggactatttattatttaatttatcagtgtgctcaccattctaacgagatatattttcctcaagacctatgggatggacatttaccacaagagcaagaaaaaaatataattgaaactttacatattgaagttaatgaatacctttctacagagacttgtgaaaaacttaaattaatagaggaaaagtatagaagctgttgagtggaataaagcttaattaggagcgattagcaagcccttatttagtgagaaccaaaaaatctataataatatatactttcttaatgaccaaaggagaaacaactaaatgagttacattagaatctatacattaagagacggtactaaaaggaaaataaagatcgaagagggaatgaccctacaagatgagttaaataaggcaggaatcacagaatcagatatatttcaaatgcaattagtgattcaagatgataaaatataattctagttgtgcctttttatatttgcatggcgaaacgagaagcggatcagaaacagattgagcagaccgttgttcagtctatttctgctgtaaatgaaccgagaacgacactgtcgctttcgctgacagtgtctgataaaaaagccttgaaaatgatggctgctgagaaaagtacgacgattgctgccattattcacaggtggattgaagaacataatgaaaaggaggtcttataaatggcgaatattaatgagaccatttctgaagttgcaaagctgaatcctgaccttgcacgacagattcagaagtacgttaagaatcattcttacgggcttgtttttgagcataatctccctgaggctctccgtctttataaaaagaagcctgccgttggggatactgtcaatattcttcctgggcgaggtgcgaaggaaacagatgagaattcgattccgtgggtagtaaaggagattaaagacggttcagcgagactagagcacgatggtgagacaaaatctgttgctgtcgaagacgtggtagttcttgtgagctatcgtgacgtcatttatccaggactccaggaaattgaccgtgtagagcgtggaaatccagatgacccatatcatatggtcatcaattcagagaattatcatgcacttgaggctttgtcgtatgcttatcctggtaaggtcgattgtatttacatcgaccctccgtataacacaggcgcaaaagactggaaatataataataattatgttgacggctctgatcaatacaggcattcaaagtggcttgcatttatggaacgtcgtttgaaacttgctaaacagctactgaatcctgaagacagcgttctcattgtaacgattgatgagaaagaatatgcacgcctcggcctacttttggagcaaacatttcctgaagcacagatgcagatggtaagcgttacaattagtccttctggtgctaaacgtgacaatttattttctcgtgctgacgaatatgtttatgttctgttgtttggtaaagcgcatgtaactcatcctatgggtgatggtaaggaaaaagaaatcagatggttttatttaagaagaacggattatgcgtcaagacgaggcactgttaagggtggaactgctcaattttatccgatttatgttgatgatacatctatgcgcattgtagctattggcgattatcttacggctgaacaaaaaattgaagatgctcctgtaattgaaggtgcaacggcagtatttcctatcagagaagatggcgtagaaatgaactggggagtcactaaggaaactcttcaagatttggttgataagggatttgttcaggtgtcaaagggttatcctttacaaccttatattttcaagtatgtaagtacaaaatatgctaaaaaatttaaggaaggccgttgggaaattcgaggagagcgtgaagatggaagtaagatcatcgtagaaactggcgggaaaattactcgtgctactacagtatggcaaaacaaagtttatgatgctggtgcatacgggacttcattgttgaaatcaattatcggagacgggaaatttagttttccaaaatctctttattccgtggtggatacattaaagtattttgttgcacaaaaacctgatgcgttaattcttgattttttcgctggttcagggacaacgcttcatgcagtgaatattttgaatgcactcgatggcggtcataggcgttgtgtttgtgtgactaataatgaagtatccgcggtagaagaaaaaaaatttattgaccaaggacttcgccaaggtgataaaaaatgggaagagcatggcattgcgcattatgtcacatggcctcgtacaaaatgttcgattgaagggtatgatgtggaaggaaatctgctagatggagattatggaaggccagcaaaagacattgatttgggatacgaattgcctaaagcagatggatttaatgcaaatgctattttctgtgagcttacatacgagtcagcatggccgattcgtcttgaccaagcttttgacgcgattgcgccgcttctttggacgcaggcaggctgcagaggcccgattatcagacgcatcggaaagagttatctgacaactgatttctatggcgtcctgtttgattacaatcaggcaagtaagttctgcgataaggtcaagaagactccgtctatcaagacagtattcgtcgtgactgacgaccaaagaagatattctaatatgtgcaaacgtcttccaggtgtcaacgtccatagattgtacgagacttatttaaggacgtttgaaattagtggcgaaggaggacttgattgatgaaatacgaattatttgattttcaaaagtctgcagtcaatgacattctaaagaaaatggattctatgcagcgaagctatgcttcagatggctctgtctcagcagtatctcttacggcaccaacaggtgctggtaagacggttatcgctgcagcagtagcagaaggtttgttttatagcaatgatacatatgctggagatgaccatgcagtgattttgtggttgtctgatagcccgagcttgaacgaacagacgatgaagcgatttgaagcagcttctgatttgcttacgggagctactgtgatggaagcaatcgggccagattttgtgaagagccatatcaagctgatgccaggtcgtatttatttcctgaacagacagcttttgtcttcaaagggtaaactggctaatgctcctgaaggaggaagaacattttatgatgttctgacagacacgattagcgatccagatattcatttgtatcttttcattgacgaggctcatcgcgggcttggcaaggatgctacaaaggaatccacgaataaaacgatttatgccaaattaattgatggccaggacggagtaaatccgtcaatgccttgcgttgtcggtatctcggctacccctgagcgatttaatgctgctatgcaaggacgtaagaatcgtgatataaaggcgtctgttgatgtgtctgtatcggctgttcgtaactctgggctgattaaggatacgattgaactgcgcacacctaagaaagctgcggatacgaaacatcaggatttaacgcaggcatgcgttaagttgtcagcgtcttctaaggcttggaaggattattgtacggatcacggtgttctcccagttgtgacgccgttgatggttgtacaggtagaagacaaggttacaaaagataccctgacatcattgtgtgcacatatacaaaaggttttgccgtggctggacatttctgattgctttgccaacgtatttggtgaacatgaagatattgttacacctgcaggcaaaattccctatgtgagtcctgaagatgtagcagagcggacagagattcgagtcctgtttgctaaggatgctgtatcaacaggttgggactgtccgcgtgctgaggttatttattctcgtcgtaagcgtacagatccgacatatattgctcagctgattggtcgtatgattcgtacgccgcttgcaagaagaattgatttatttgaagaattgaatactgttgcctgctaccttcctgagtatgacgtagtgacagtggaaggcgtagttcagaagctgaaagaagacaacgtggctgtcgcgactacaactattttgaagaatccagctgatgtaagtttcttcgataatgcgaagaaaaagattgaacagaagctggagaagaagcatcagcagccatcaaatggtactgcagcacctacgcaggcattgcctacagatactccttcagtgaccatacttggagctcctgcgacacaccagtcagcacaggaaactgtcgctggaacagaattcgctgtgaatatagaggacgaaggattctatgttgcagatattgaaggtgttactgagactgaggaggagctggcagctgcgctggaacgaattccaaaggttaacagtgaagatattaagacaagttttgagggaattattacacgtagggtacgacatgataagccgaaccatttcctcgacctgtgggattgtgttgacgtgattacatctgatattgatattgattatgatacagcaagccagatagatgaggatttttataacaacgtcgagggtgagattaagcgtcatcctggtgattataagcgcgcatatacggatattagcaatacgacagtgagtgtgaagcgtattgacccgttgacgggagaggaattcgaagaccgcgaagagctggttcagaatgatgctgacaggcttgtatcgtactatcgtcgtgcagtcagtgtgtttgctggcgcttctgatttggtgaagtatttcatcaacaaacgtaagaacgatgaattcgacagtgatgttgaggcgatcagccgtatttcagcagttggtgcctgtattgagattattcaggcactggaagtttgggctgagaacaagaccaatgagctgctgagcatttatggtccgcagcgttatgcagtgtctgaagagaataaggagaagtgggagcgcattgaaggtaacacgaagccttatatcgaacgtaatctcaacattcaggccagcattactcgtcagaacaaggattatgatgcttatccaaagcacattatcagtgatgaggatggctgggcatatatgaatctgaatgatttggagaagaaggtcgttcgaacagagctttctcgctcgctgaatgttgcatggtacaggaaccagtcaagaaacttgaatgcttcgctagtgattccgtacatgctgaacagcgtatgggagaacatgtatcctgatttcattttcttccagaagttgaacgacggtagtattgttcctgcgattgttgacccgcacggcgattggcttggcgacagcattgcaaagctgcagggatacgtcacatatctgaaggaccatcctgatatgtttggttccgttcaggtagttgctgataagaagggcaacgaacttcgttaccttgacctaatgcttccacatgtacagaatgctattgagacatttgcggggacatctgcgaaggaactcttcactggtcctctcagcaaggtgtacaaagtaacagcagaataagttttcacgaaaaaaagggagagcatgttgttggatgttctccctttttttaagatttattttctgttttacatcacgtcgataatttatatgcggtcagtcagtttctcttcgggcattacttctatagtaaggacattggattaaggttactcctgtggggctgtgctttgcttcatgatctaatctgactttagccagtaagagattaggaccgattcctacggtagctgcctataatccatttgaattactcttcaaataaagaacatttgttctctattatgtacgaattaatgttctttattcaatgaaaactctaaagttttcccgattattgctatcttacgaggaaggagaaatataacttaacctttcttataaatttgaaataaaatttgatctaaaacaccgcacgaactttcttatgataaataaaaaagaatctattttgaaaaaagttgtaaaaatggaaaattagtaaaaatttatgaaggagtattgagaaagatatgtcaaaatatttagctgttaataaattagaattagtaggaagagttgttattcaaagtcatattcttgatgctgtagacttaaaaattggagataaagtatcattttctctttataagaacaatattattttgaaaaaaatagagaacgatacatctaaaaaagatgttttatcggtgggaaagattcataaaattgatccattaaagagaattactattcctacagaaataagaaataagtatggcattaatttacatgataaaatagaagctcatgtaattaacaatagaataatattacgtaaatatgatttggacaaacctattgaaaaagatgagattttcaagcatattgaaagtttaaaacagtgaaatttctttgtttcctatattaacttagggcacttatattttaaaaaaagcactgtgagtgcctttctctctactgctactttctaatgaaactattacttgtcacattttaacttaatatgctacttaacataacctgagcaaggatagaatttttaataagaattcgaaattaaaaagacttaaactaaaatagaaaacttagtatattctcaaaaggtacaccttttgagatagcaaaaaagctaatagtaaagtaaagtgtctatttaaacctatcaataaaccctcttaaacaattgaaaaacaatagatcttattgtacatttttctcagtaattgaatgacttaaaatcgacttaacttctaaatatacaaaagaacgttcgtaaaagtgtgagttttaagaaagacgttcgtaatttgttttaaaacttaaatgaacgataaaaataattgattttttatataaaagaaaagtccgtaaacgtacacttttacgaactattcatttgactctatttcaaaacattcaggttataaacattctattattcattatttttttctttattagggatattcttaaaaacattttctcctggatcaaatccctctggttcccaatagcgttcttcatatttaccttcttcaaatatctttctaaggtacccaatggcatcaaaccatgtactaaatactaaatatgaataaggaaggctaccttcatcattccatacaatccacttatcttctttagattgtgtaacaaggtaagaagcatcaggaggcattttgaatatctcatatgtattttcaaggacatcatcccaagatttaaagcctaactcttcagcaaaaactcgatattcctttaaaaatgtgttttttacgaacctagaaatacgccccattatctagtctcctttgttttacttaaacattaagtaactgttttaattcttttttaagcttttatagtgccaattaatatggtccagctctaactctatttcaattagttgttctatgactttttctttatctaatgaagagttaagaaaatctttaattaatcgctcaatcttattactactctcagaaatatcatttaaatctactgctaattcaacatattctttttcagatgatagtggagaaagtctatttattaactcattcacaattgattcactcattgtattctctccctgttagatcattatcaaatttgattttataacttaatttcaacaataaaaatttagatgttatggtattcataattagtttatcgttttaaaatgtatcgtggtggaggaccataaatttgttcagcttcaaagtaggcaagtttatctggaatacatacgatgagagaagggaaaccatagcctactgcatgctctaaggcagtaagtaaaggtagatccttcccatcaatatcttcattaaaagaaatggcataacactgttttcccgcaccatgctgctttaataacttagcaatgtcgtcagcacaagaatttggtttaggtatttcaatcatgtactcttccttcaacgtttttgtgtaagtatgattaaggcgatgtaatgcgtcatctcttctttttaaagagaaaagttcaaacatcactctttcttgaattctcttagcaaaaaaggatttcactactttttcttctatttctttattcatttaatctcctccctgagtaatctttattatatagaattttccttcagagaatgagtaagtttaaaaggtttattcttttactatcgagaaaagtgattatttaaatgaagagtaaataaagaaaagccttcttttaaacaaagagggcttttaagtttaattttgtggaaataaaaatgcttgtttaaactttcgtgcaggatatttctttccgtccttcataactctaaaggattcttctttccatgtcacaactacttcaatcttttttgagtcaaccgaaatgggttgattttgatgatggaagaaattctgtgaatcaggtattttatatgtgattaattcagctttggtatttgtatttggctcatccctatagatttctactgtagcatcataaacctgtgcacctaagtttctcacatcgatactataggtattaaactcatcattatccttcaagttcttaacatcgggtttgtctatttttactttccaatggtctgatgattgagacgtaggaagcttttctggtgtataagcgtaagtattaacagaaccaaaaatgatggaacataaacaactaccaacaagtaagatatgtgctttcttcattatagattcctccaactaaaagataagagtattattcttccaattagagctaatatacgtaaattttattggcttttgagctacttgtaacaaatgttagttaaaaaggatttgttttatgagttatagaaagtcatatcagggaggaatatttatatgacaaaccataaagacgaagaaatattaacaggagggaatgtctctaacgtttatcgttcgggagataccgtccgacgagaattaaaatcagagagccacaaaattcatgatttattaaaacatttggaaagcaaaggttttagttatgcaccaaaattcttaggtattgatgagaaaggaagagaggtactctcatttattgatggagaaactggtaactatcctttaaaagaatacatgtggtctgatgataccttaatagaaataggaaaaatgctccgcctttatcatgactctgttagtgattttccaattaaagaagattggacagcaatagataacaccccaaaaccatttgaagtaatctgtcacaatgactttgccatatataacgttatatttaatcgtaaaattccagtaggtattattgattttgatgtggccgcacctggtccaaaactgtgggacatagcttataccctttacacttgtgtccccttaagtagattttatctttctgaaacgggtgaaaaagtttattatcattcactacaaaacgctaacctcgtaaaacaaagaattaaattattttttggggcttatggtaaggaatttgaagaagattatttagaaatggtattgctacgcttacaagggttatgtaaaacaattacaagaaaagccggtgaaggtgacattgctttccaaaagatgatagatgaagggcaccttgaacattatcagaatgatatcaaattcattcgtgaacatggaaaagagtggatttaaaatgacaaatgcaaaattgtttacagctatttatataccatatacaccttttcaagatgaagtactaaaaccaaagaatgctcgtaaatttagatttaagctggaagaaagtgaacgtttagaaactaccctttaccgttttgtttatagcaaaaatgaaaagcaaataatttgtttttacatagttgacgattgggaagatccttatccttatctctttgtagaaaataacgaattatatgatgaatttacatctcaatttggagtagtaggcgttcaaggaggttattgggaatttggaatggatacatatttagataccgattctcctgaaatcatatttgaaaaattaaataaggctataaatagtggttatgatgaagacacgcctatgcccatatgtcatatatacggtcaagatatgtggcacggagatgcttttatcgtagccaatcgtacagcactagaagaaatgcgtaatgctattgatattgctttaaaatatggagaaataagaacaactttatcaccttctgataatgagggatatgacttatttatttcttgtgtagaggataaatttgattgggacttggtaggaatgccttattatgatcacgaattttttgaaaaacctaaagttcctgttaaagcttttagaaagtacaaaattaagaagtaatcagatacttttttctttctatttttgaatttactgaaagcatgctgtgaaaaataaaagtaaaaagctatctcatggaatgagatagctttttcagtaagtggtgattaacttactaatcgacttgtaaattataaataatttggataataaagtaaagtatttttaatctattgcatatgtataaaaggtgcgctttttatacattattccggcgaatgtccttggataatcagcgttatatcaaggatgtataaaaagctgcataaagcagaaatcgtagcctgacttgaacccttgcctatgaactgaacccaaaaagttagacaatttatatttaagcaacgtagttggcatgagtacggtattcgactggacttatgcctttcaattttcccttaattcgagtgttattgtagtagtgtatatattcttttagctctctctcaaaatggtccatatctttaaattgttgaaggtataaaagctctgacttcaataagccaaagaaattctctatgacggcattatctagacagtttcccttacgggacatactttgaataatattattttgttggagtgcttttttgtacttcgacattctatagtgccaaccctggtctgaatggagaatgactttttctcccttttttaagcattttaatgcttgatcaagcatcttacctaccaaaggatagataggctttgattcgatgtgataagagataatttcaccgttaaaaagatccagtataggggataaataaagctttttgccaaacaggtgaaactctgtgacatctgttacccatttttgattaggctgagtagcttgaaaatcacgctgcaggacattaggagctgtttctccaacatttcctttataagaacgatattttttaactcgaactaaacattttaatcctaattccttcatcaaacgacgtacagttttatgattcagtacatagccttggcgtctgagttccagtgtaatacgacgatatccataacgtcccttgtgatgatgaaatatgtcttgaataaggttcttcatatctccatatttatcaatacgattggaagaagcatttaaccagtaataataggtactgcgcgcaaggttagatacaagtagtagtagttttaagtcaaattgtttccttatttcgtgtactacttctgctttttctcgtgttgagatgttttctgaactaaggatttcaacttttttaaataagcattctctgcacgtaaatattctagctcagcttgtagagcatcgattgattgagtagtggggttttcttgtttagtttttattttcttcatggatggacgcctctttcccttaggttttagggcatcaataccaccattctcataaagagtttgccaccttttaagcgttcttctagatttgatattgaagatggcagctgtttctcttattgacgtaccctgttctttcatatagttgagtacatctagtttatcttttactgagtaccttgcataggaatttttaaacgcttcgtctccatgatattgaaaacgttgaacccaactgcgcacatctccttcatctgcccctatagaatctccgattcttttaaaagatccttcattaaataagtattttttcacagccattagtttctcttcttttgaaaatctcttcataaaaactgcgcctccaattggttagattatgtctaacaattggggcgcagttcactaccaagggttattttttgagttgtgttccggaaagagtggttatgtaaactaaatttgtatatgatatacaaaggtaatattgttgaaagttaaggagatccgtatgaggaaagaaattaaattggaattagaaagcttagtaggctctaaaataaacaatatgggacgagcatcgaaccttttttggcttgagcttggagaaaggctatcagtagttagaagaggaagaactatagagttaagcgaatatgctttaaatattcaatgctcttggcgaattacgcaggggaacaagattgtagtagcatcaagggatttctattaccctagttcagattggaatgaagttaaagaggactttgactgggatgtgcaaggaaacaataaatttgatgaaaaacttaaatatcttatgaaaagcataacagaaccgttaactgtagaaaaaatcgattcagatgaaattggaggactaaaagtctttttatctaaagattttacactaaacgtattcccagatagctcagaagatggtgaatacaatgagttttggcgattctttactcgtggtaaaggtagtttccattttgttgtaacaggtaacggtattgaaaaagagtttaactaagaaatacataaaaacaaaaacagtacttttattaagtactgtttttgttttgctacctagaattttgattatgttaactacaaatgtatggagtctacaaacagttttctagtaagaagatacctttttaaatgcatattttaatataatcgaactaactccaaagggtaccgagcaacttagagcaagaataagaaatggtttaaattccaagaaaacacttataccatcacctaacgaaaatattaacaaaatgattgaagtacctacacctccagaaaggacgtacagtaggagttcaattaaagctttatacttctttgtatctcttatgattgcgtcaatcataagagataatgggataccaaatactaaaacaaatggaatcacaattaatccactcacgaatcgggcaataaaatcattaaaatctatatatccaccctccaagaataaagccgaaaaaactaaactaccgcagatagatgaaataattactggtataatctttgttttcataaatgtagtccccccaaagagttttgttatttatattagcactttaagtaaataaacactctatttttatttactaccgagaacgcacaatatgtggactgcaaatccaaggagtattttgtatatttttctgcttcttactatcaaataaaggtaattatatcgacttgttgaactcttatgttaactgataggtaaaggagtgatactcaacatgagtacctatttatatcgagtaaatgctttttctcaagatttaacttctggtaatccagcttatgtgattcgcttaactagtccaattcaaaaacaggttatgcaagagattgctaaatagttaaatctacctattacagcttttcttctagagcaacagcataatgtatatgggttaaggtggtttactccttcataggaaataaaattgtgtgggcacggtacattagcagctgctcatatactctgggaggaagggattatagaggcacaacatcctattacatttacgacaaaatccggtcatttgaaagtagaaaaagtgaaacaagggattcaattagctttctctaccgatgaacctatccccatagatattacacctaatcttcaacaattagtaagcgtacctatcttaaaggctgcccaaaacagtgatcgataccttattgaagtagcagatgaagaacttatttaaaagaagtgaaagcataatgagttaaaatctcatactccttggctattgtacatatcaatatgggacatcctaattataaaggtatgtataagtcaaaattctaggaggagtgtagatgcgtaaatgtatcatttgtttatttacgattgttttactgttaaatttaatcgcttgttcacccactttagctaaaacatcatatcctgatacgattgaacatcaaattgaagaactattaaaggaaacaagaacctatttcgattcatccaagcctgttaaagtcgtaaagatggtgaaaactcctataaaacattactatactgtgctatttacttactatacttattcagatgattattttttgggtgatgcaacgttcaaaaaagaaaaagataggtatacactagtttatggaatgagttctacagtccaaaaattaaacaataccacgatgtatcttgacaatgttccatacagtgtcgtttatggagttaacgaggaaaatcgtattaaaacactacgactctttactctcgataaaaaatcttcatacactgctccaattaaaaaaggaacctattttgtacattttaaaaagctcccacctaataccgatatagaaaaaatgaagcctttttatattgactgctatgggaaagataacaaactaatcccttggggcgaatgtgcggagtaagtgtgtgtaacagtttaaataatttcttttgataagagcacactatttattaggaggtgtgtattcttatgaaaaaaataactctcattacactcataacatctattcttttgttcgtaagcaatagcatagaagctaaggcacttgttttccctgaattaccaactacagaaacgtccaaacaatggactgttgaggtttctaaccctgacaatgatgatcctgacttagcacaagctaagaggggagtgtatcatacctatagtttaaatgtgaaaaatatagggaaggacgtacatgatgtaaaagttcaattatttcgcaatgaacccaattcaaatacgaaatatggacttttgccaactatggagtcgccccaacttaatcaaaaaggtggacaccccttacatgtttctaatttcggtttatccgaagaggcaaccgatctaaacattgtgataacgtggaaagcacaaggcgaggaaagagagtatcaagaaacgtttacctttcatcaaaaatagggcctcataattgatgaggctctattttagcgcatttaatttacactagtgcaagaatgttacattgtgcaataaatgtttattcccctcccattcaacaatcaattgttcaatacctacaatcgctgtatcaggcttctctagttgttcgcacatccatctttgaatagccagcaatatattatgattgaattcttcataagcagcttcaggatacacattacgacctattggaaagaatgaaagattcaaacttttatctctataaaacgaagcaacagctactactgttcctttcaactcgggatgatgagaacgactgctgccccattcaaaacatcttgttaacccaaaagaaaaatctacgttagtaagtggagaaatatatttttttagttgttttttggttgtgacatacgtttcatgccgattcaaatttctgtagtatgatgacatcctatatcatcctcttttccttcttattattgggcaatctttagtgtcgtttccattgaaaccaattgcctctgtcaccaaatcctccaggctcataataataaaggtttccgtcgctttctgttacagctgtagggtaaaggggattccctgtgtaaacgtagacacccctttcttcagctccgaaagggaacataccgcgctcacttggcattactatttttataggaatactgtggtaataaggcttcagtctatctcgataatgagcgaactcatcaaaatgactaccaaaagtaattgctccattgaaccattcagcataaataatggttaaaagtaagcaaccgattagagataaatgtcttttattttttaaattaatgggtgtttcatatttagacagaatgaaacagattaaaagaagtaacccaatttctacaaaagggagccatagatacatggaggcatactctaatgaaaaaggttcaggaaacagaaaaagaaggtaaataacttgaaagataagaacattcttcaaagcaacaggacgcctacgcactaaaataaagagacatataggcataacagcaatcgtaaaaaaactaactatcacactgttcaccttctttttcttatcatgacaactaataaaatttgttctttattttattgaaggatgcttgaacacctcaactgtaatcaatataagtttacgaaacaaacttgcttccttcctttacatttcttcaccgtagataagtgtataatagcgcgtatagtatttgtaaccgcaacttaatattttattttcttttttgaattcaagcctgtttgatagtatatctctatctgtataggtccagccatgattctccatttccttaatgtatgggtccatatcaccttgtttgaccatataggtaaccgtcccttcatcctctttaaccttaacaactttcttttcttgaaccatgattttacttgctgcaagagcgtaaggtgtagggtttccctcctgaaaaattgtgtctctcttgatagaaataaatactcccatgaatgttaataaacatatacttattatcaacagcaattttttcatttacaaatctcctttttaaaataaaatcctttcttgctaacacaggagaaaggttgcgagataattatttttggtataagaatcatcaaaaaagggactaagtctgtctctattatttcaaattaacattttatcatttttttccatataaatctgtcgatttttagtatagaatcgcaaatattaatatactgtttcataataaaatagttagatatgtatatgatattcatcaatttctcgctctttatttagaaacatacaggaacttaccaccttttatgtagaatagactagttggaggtgcatgaatgaaaaagtatgtgggatttttatttttcatgttgttgttatttatggtttcagcttgttctaattcagaagatataaagctttcaaaaacagaggttatgataactaataacaaggaccttgtaggagaaaggactaaaatcatagaagaaggtaagagtcaaacaattgtgccgactgcgttatactatacatttacagtgaagaacaattctaataaatctatatctaatgcagacttgaacaaaataaaactaaaaataaaacctaatcaagaactagtatctgtggtagaagatgctgtaggatctaacatttataacgttaataagaatagattaggatggggacaaggaatagaagaggttccagctaatggaactggaaaatttaatatttattataatctaggtacagataaacaggatcatacactaccttctatacctactaaggaggaattaaaaagaataaaagaaaacgcattaaaagccacacttgttgtttcaaaggatggagaagaaattgctcacttcaacttaaataaaaattagtatgtaattattaccgataagtcacattacattaactatggttatatagagtatacgtactaaaagccatacttatatcttgtttaaaaagtaaaaaaataccattttcatgatatactaattatgtacacaataggattagattatgaaaagaggaagatggttatgagtcaactaaaaagaagtgctttaattgtaatattaatcgtaagtgcagttcttataagctttatcgttacctttattaattatcatatcattgctgtaatattaaaaataattgtacttggtattggttttgtagttgcaggattggttctccaatctcgtgaaaaaggtattgatacaattattcgtaccactcgtaacaataaggaatagttctaaatcatattgtgtacatgaatgaaagagtttctttacctaaggtaaagaaactctttttctattctatatatttcattcctatgagcaaccctatggtgactagaccgcaaaaaaggacaatttatatacttttctgatccgtagtaataaataaaggtaattatatcggtttgttgaactcttatgttaactagtagttaaaggagtgatagtaaacgtgagtacctatttatatcgagtaaatgctttttcgcaagacttaacttcaggtaatccagcttatgtgattcggctaagtagtccaattcaaaaacaggttatgcaagggattgctaaagagttaaatctacctattacagcttttctcctagagcaacagtgtaacatttatgagttaaggtggtttactccttcagaagagataaaattgtgtgggcacggtacattagcagctgcgcatatactttgggaggaaggtgttatagaggtccaacaccctattacatttacgacaaaatccggtcatttgaaagtggaaaaagtgaaacaagggattcaattagctttccccactgatgcacctatccctatagatattacacctactctccaacagttagtaagcgtacctatcttaaaggctgctcaaaacagtgatcgatacattattgaaatagcagatgaagaatcattgaaaggaattgttcctaatttagacctccttgctactctgcctgttacgggtttagtcgtaacaagcccttcaactaagtatgattttgtttctcgttattttgctcctagaattggaatagaagaagattttgtgacaggttcagcccattgtggtttagctccatattggagccaaaggctaaataaaaaacaattatatgcttttcaatcttctgaaagaggtggagatttattcatttattatcaaggtgatttaacttacataactggtaaggctattactatttataaaagtcattttaatgaattgttactctaaggatatagaaacattcaacaacagaaagaagcgtcagaatcaattctgacgcttttatatatgcgtgtcttgcctttgtaggattatctttgaaatcttttctgattttgtatcaaaatgaatagcaactataacttcaaatttcttgttattttcatcaagccatagtttgaatgtttcaactgaataattccctttctgttcgcgctttacatgtaggtaatcatagattttagctgatggatatctttctctagctttttgtatagcaatctttccccactttgcatgtgagggaatcgctttttccgcatttactgtgttgatgttatgaggactattcaaaaaaggtgtgaaaataaacagaatacataaacaagatgttattaaggatttattcattcattaatcctcctgtttttattgtattctgttcttattttataagtattatccttaatctgtaccgataccgttgattatagtaattaagattgcatgtgatactattccttatttatcaggttttttatctatttcaagcaattctatgattttatctagctttttttcaatttcaattgaacggttactttttattgaagaattaataagcaatcttcgaatgaatagtgtaaacgatacaacaaatagagcaataaggccaatgataataatcagatatactattgaaaatacgttgaaatgatctatgacataccactccactcttttctatttttagacaatataacatattattatgaccctcatttacaaagaatacctaaccatgggtatttaactgcttctatcatatacgtaatgcttttggaaacactaattgtaatatcttttaaaggtggcatattacaatgaaaatggcactaattattatattgatctttggagggatgaattttccttcaatacttgtgcatgcggagaaaattcagggcccgtctctaatgaaaattgttgaaaatttcaagccgtctaatgcaattcttataaaagctgacagaccttcagccgcaaaaccaattcaattttatgactttaatcatgatggacaaaaggaaatcattattacctatgaaattaaagcaaaagagcaaccctctccttctcaatttggagtaatgatattacaaaaagaaaaggatggaaattggagaaagctatttaatgaccacgttcaaggagtagatttagacttttcaggactagctgatattacagggaatggtgtgaaggactacttatggggagttacaattggagcagcagcaggaagtcaacttaaagttattcattgggatgatacatccttcaaagaaattgaagacgaaccataccataaaatagatctagtaaaagggaaccaaaaggttggtattgcaacttggcatatgtacattggtgatagttatcttgtagatgtattaaaatggaatggtgaaaaactagtttatgatcaagaattatattctacatattaccctaatattgaaaagttttataaaaataaaattagaaaattggatgcctggtattactggtattgccttgcagatgctcaaataaaagcgaatttatttgatgaggcttctaaatccataaaaaaagggaaattattagcgaagaaattatcaatgctggaagtggttcgagattttaacaatttaagtaaggcattagaaaataagaaaaatacaacaggacgttaatttaaataaatacacttaattttattattacttcatctagaatgctggaagaaagccggataatcatgtctaaaatacaggagaaccctttatcattgggttctcctgtatttagttctaataattgatattaaggcaactaaagagaaggaaacggttttatgttagatataatttaattacgcatactaaattttgaggtgagaataaatgataaaaacacagtgcctatttatatatatattagtaacatctctaatatttccttatagtgcattggccgagagtcaacctttgccttatttagaagcgaagtgtccaaaagtatcgcctttggttcaagttgatttaaatcaaaaggaagaggtactatttgcattaaaagaattagttccaaaagcttatccatacaaggaatataattcttggaaagttgaagaggcaagaccattatcatcacctaaaacatttagaccatattataatttagcaaaaaaattatgtgggagtgatgttgcagaaaattcttggttcatacaactacactttcctaaaatcttatatggggctagtgcttctactggaattatgttcattgcaaaggattcaaaaaaaggatggctagtttggtatacatacaaatagacccttgtggccatagtatcgctttgaacttcaatcaatacaagaaaaaagcgttagaaacgtttcaaacgctttttatttacacgttatccttcaatcttcagaatcttgacttcatttctcaccgaaaatgtgataaccacaggtccttcaggcgggttgtgtggacctgtaaacgtgtcgtatttcaccttcaccacgaaatcatagttcgaaaatccacctgatacgcgcttcacactcaaaatatccgcattccacaaactataactacgatcaggatattttgttcgaatcgctttatccgcatacggattcagcagcatcaagaaggcatcatagaaatctgtatgcttctgcttaatagagggctgtggagcagcttctgtataggaggccattcctcctgctaaccataggacaagcgctgtggcgaccattaatcgtttcatccgttatcctcctcgtagaacttgtttcagctagtttccccgtaagaatatggaagatacagaaagttaaaaaacgatgttagaagcttgattttatgcattcatacgagcaaccagtaccatccaaaacgttgctacaccaacgatgtataaagtcgtgtataaacgagaaaaacggaaagtaaacgagtccttgtgtaccaaggactcgttcttttgtatgttttcctaaaaataaaagaggttgtatgtaagcaggaaatgaatattatatacaataggttttcttcaacaacataccaatataaacatttttgatgtcattagattgtgtaaaaaaaaggagtagattgatgtgtgtgataaggagaaaaggggatcagaaattgaaaaacctagtctagacagggcaggaatgagatcgtatatggggaatccagagaaatttgaactctctttttatgggatattgatggcatgtgttcccttaataattgctggaatctttatttggtacaattggtgaatagatttacacttagaagtctttcgatagtttaaagacttctttattttttgttgagattatttctacctagaaaatccactatgtaaactagaagtgaataacatatacatagtgattttaatcaatattattgataaaatggaattaataggaatcaagagtttagggggtagaagtgaataattttaaaactatattgcggaataaaaacttaagtattgtattgggaagtcagttagtatttcagttagggatatggttcggtacaattggtaatttacaatttttacaaactcatattgaatcccatgttctccaagcttttttccttgtcattggcgggattataggcgttatcataggtccatatgcagggcgttatatagatgttacgttcaaggtgaaagtattaaaattagtgggggtaataagaattgtttctgttatagccatgttaattgctatatatacaggatcaatttattggatgcttatatatagcataggaattggttgctctgcttcattttttaatcctacaatacagacccttttgccttcaatagttgataaagaggatctgattacggttaatgcaattaatataaatattattacattatcaagaatctttggtgctgtattagcaggtttattactaactgttgctcctttatatgtattgtttctaatcgctcttattgcttatcttactttgtatttcatcaactttttgcttattgttcctgaaggcttgcagctgaattttaaaaaatctaagactaaatttaaagacatctttcctattattctaagaaatcattcaataaaaattgttctagtagtatctattattcctctcatttttatttcaggatttaatttatttgttattgaagtcggtaaaggccagcctggttttattatgggaattctctattttgtagagggtgcaagtatattagttgcaggattatttataaaaaaagtaataaagcgatataaaaagcatgtattaattttgttggctgcttgttgtttgatgggaatggcccaacttttattgtcattgacaagcctctatataacggttttagcatttggattatttggtttagcgtatggtatgtttaaccctctgttatatacatattcccaacaaaaggtaccttcagatacccatggaagattcttttcctttaagacaatgattgatcgaaccattatgcagttatgtcttgtgctaattggtttttcacttgatcaaataggctataaaagtttaatgctgctgttaggtctgtgtactttcatgttagtcttttctatcctcgttgattctaaaattaattccaaacgttcccgggatacaattaaaaatgagttttataatggctaaaataaaaacagagatcttgtatatcaatgctctgtttttattttggttccaaaatcgataattatgttaactaactttgtatattctattcatatttaatctctataaaaaaagatagtctactttcataccttctgttaaattaaagaaataaagtcataaaaagttacataaggggaattccatgaaaaagaaaagttatttaaaattattaatcgtttttgtgcttttaggtggaggagtatattggtattacaatagtattgccatttggggtacatctgcgaacggaatgtggaaagcgacttataaaaagaatcaagatcaatatgttgaaaggggttggacgggtaagattaagcagaaatctggagataaagttactgtggaggatataacttttacagacaacaataggaccttaatgtcggtgggggattttgaagaaggagaatcagaagacggtgaagttacagtattatacccattctctgctgaattttatgggggagatgaacctaagaaggggcatgtttataaagttcatgttacttggaaggataaagggaaatctcatactgatagctttcaacttaaataattaaatttacaaagttaaaacgtagaaaaaaagcctttatactagaattaaaggattttttgcttcttataattcacattatggtaactaaaaatctatatgttttacataacagttagtccaatgctttgttaaaataaagctaaaaaagtggagaactttatgaaactatattatttgggagtgagttttagattaaacagctttggaatagatatgaaaaatggctaaaaataaattgtccagaagtactaaacacattaaaaagtggtgcagataagaaagctattagcgaactggaagaagaattaggtgttaaattgcctaaaggcataaaggatctactaagtattcatgatggacaagtagacgaagggattggggtgataggtaattactatttgttatctttagaggatattttatatactcggtcaactatgaaagaattactagataatggagattttgaagactttgaaccagtagaggcgattggtccagtgaaaagagatttttggtggaatccgaaatggatatccattgctactaatggttttggagatgacatatgtattgacctagatcctgatagtggaggaaatgttgggcaaattattacattttggcatgattgggaggaaaggagagttatatcaaggagcttagaagaatggtttgaagatgctctagtaaaattagaaaatggaacatataaattaattgtaagccaaggggaattaatgtttaataacgatggcttcgcagaatagtctgtatccatacctctaatttaaaagagtagctgttgatgaacagctactcttttttatgattctgctgcaagaaatactctctagaagcataaagtgattaaataattccctaacgacagttaattaaagaaattagcaaacctcacctattttgctagcatgtccaacaaaataaaaaggaagtccctttgttatagaaaagagacttccttttactcaatctttttcttattatgaagactaataaaatttgttctttatttttattgaaggatgcttgaacacctcaactgtaatcaatgtaggtttacggaacaaacttgctttcctactttacatttcctccccatatataagcgtataatagcgtggtgtatagtatttgtacccacaacctaagcctctatttttttttttcaaaatcaagcctatttgctatcatgtctctatctttgaacgtccagccatgttcctccatttctttaataaaagggtccacgttaccttgtttaaccatgtaagtaaccgttccttcttctgattttactttcactacctctttttgcttaataatcattttacttgctgcaagagcgtaaggtgtaggatttccctcctgaaaaattgtgtctttcttgataaaaataaatcctcccatgaatgttaataaacatatacttattaccaacagcaattttttcatttgcaatctcctaatttgattattatttgcaatattatttattcttctaatcatttaatttggcttttaagtccatattctatagcaaaccattctgcaaagcgctcgcgttgtttatcacttttatgtttgatatcatgaaattgattttcaacatgatgtcctaattcatgaataagtacatcttttagataaaaggattgaatcgatttcttatcgaattctaaaatccaaccattatcttcttcaatccacctagtaccatgcctttcatactcaatgcaaatagagggttttggtttagtcttgtaatgtaaacacatcgttttaggaaatggaaatagatatattaccttataaaaatcattgtaagaggcgaagcgaaattcattacaattaagctgttttttagaaccactgcataaaaatattccctttaagcctgttaagtaatgtgacggaatattgttcattattttccgtatttgttcttgatttgcgggatgaaaagattcagggtgtggcttataggttcgatacagtattccttcttctttatcaagcaacctttcggattcttttgtaattttatatatttcagtatcataaggtgaatattcagcttgattggtaagcttattttcgctccaaggaccacttcttaatccgtttgccaatcctttcacccttcgcatctttatcccccttttttgcataaaaatcatcactgcttttatttgataagtaattctctaaaaaataagtaaacccctttttaagtttttacctattattgtacttagaacctgaattacattaatccttttaccctttataaaataacaaagtagtatcataaggatattaggaggaatacaaaatgattgccgataagtataaacagctaattgaagatttcttgaataaaaaaataactgcagacgaatttcaaactcaatattttaaaatatttaaagaatccgatgacagattaggcggtgaattgtttttaattttaaacggcgtatttgaatcagccgattgctattggcatgaatgccttccaggtcaagaaaccccctttgaaatttcggaacaacaattgaggaaagaggtaaatgaagcattagttaaattaaataaattacaggccgaagattaaccttttactacttaaaatagacattacgtgaactaataatgtatagactatacacttcttatatagattagtatgctataaataaaagagtatttagttgaaaggtggagcttttttggatcattttgtagttaacttaattccgaacggattttacggctatgaagagagtgaggagcttccagcacatgacttaattcttcgtccactactctcatgtgccacagagtgttatgtttatggtcttaaagaagatacagaattatttcaccagtgtactggtataatttcttctacccgcagtaaataccaattagatttaaaacaggaagtcatcaaaggatatgagcagctttggaatgcaacaggatggcagagaggttcaattttaatatttatagagccagaaaagcttaaggagttaaacattttcccttcctgttatgaccctagtattttagaaaaccccaattcaggggagagtattgcagccattaaattctgtaagaatgtaattaataaagaaaaaatagtaggtctctgtttttcggcctctaatggtattgagtggatgaaagtttacgcagagaaggatatactgaaaggattatatgagtgtgcgagagtacagtcactatcttcaagctcagattctatatataaagtcagaaaaaaacgtagaaaattacctaaatagtaagtatcgatgaatcatattatggtaactacctttgtatatcgtatacagcttaaaaagcagaaaaacctatctcttcccagtcaaaagagtaggtttttctgctatccatatttcggcaaagaaaaaatgccttacggcatcttgagtagtttgcttaattccccatttattattcgtttacggggaagttgggttgaagaacagatataattatttttaggaataattagaacaaggagaattaacaatgcttaatgataaacaaaaattactttttgagaatttaaagaatattaaaagctattgggtgaacactgctgttgaaaatttaagccctaatgctgatttaatagcctctaattgtgaagaggagtatcagtttctatctaaaaaactatcctcagtcgaagaattacttgcctttcaaaaaatacaaaatgaaattatcgagggagttattcattctatattggtgatggtcgatggtggagatgaccttgcagacaggctatctcttgatttgatagatggagagacgaaagaatcactacaggatgacattgcattatatgaagaattcattggctatttacttgatgtggaagatgaataaagagtgatctttactaggagatacttgagttgcagaatatttatttgaaaatagatattctaaatgagatttaaatataaaaaagaaaacaggcttaagtctgttttctttggttcttataacgcacactatgttaactaaatctgtacatgctatcccctactttactgctctatacaaataatatatagctgtatagctaataatatttgtataggggtgatagcatgagaaagttatcagtgtttttattatgtatggtcttaatactgacgcccacaataacaacacaagctgctaatagaaatcttccaacaaaaacgaaagcaacaaaagaggcggtattagaagacgctgtaatcgatttattacaaccacaaatgtttttagccattgatgaccattatggcgatcgaactggcatcgcttttgactgtcagagagttgtagggattagaaaattagaacatccaggttcatggagttttgaagcgcaattgcagggaatagcttacaagggagcccatgattaccttgatgtttttacagtaactataaggaaagattctacagcaggtgataaatgggtaatgcaaaattataaagtgagaaaaatgaaaccatcagataaaactgaatgtagagatccagcttaaaagtaaatatctccaaatttaaaaaagcccttggaagggcttttttaaatttggaggtttcctataattcacattatgtaaacttgttttgtatatgatattcatatttaatttctataaagagggtagtttgcttagataacttctgttaaattaaagtaattaaggtatctaaagttatgtaaggggcatttcatgaagaagaaaagtggtttaaaatcattttggaatcttagtattatcgcaactataatttttgcttttattccaaaggttggtattagggttgaaggacattatcattattttggctttcctgctgattgtttaatatattataaaggttcaagattagctcctgatataataggcatcgtatttaatattgctttcttttattttgttttctttattttaaacaaaatatttaacaagattttaagaagtactataaggtaacgaggaaaggagcacattaagtgctctttttggttcctgtaatgtggattatgttgactagaaatgactgttctctgtatatataatgtacgtaactaagtatattcaaaggagatgtctcgttttgttggattatatatggattgatggaaattcacctattttgtcccaattacctaatgactttaattctgctgctattctattccatccttttattcaaatgccctttggttgggataaatcaaagagagaaaatccttatcagcatatatatcctagtgacgaggaaatgcttaaacttggagaaccaatatcgtggaaagaagtaataggcaaatgtaatttaaaatcctacaaggaactctcgatagcgttgcaacaccttactggtgtgcctagtgatgaatataaaaaattagcttcttatgttaagtctaatcctgatttttattaccccgaagaagttaatacctcattgtttatactagatagtttagtgaaaattctctgttcaaaaggggcaaatactttatatttttctgaacctattcacgacacaaacggttcatttaaagtcaatgatatgtcatctttagaaatagctaacttatctcctaacgagtcaattatcacagatgaaaatatggattttgcatttatggggatctatgattcgtttataacattgcttttagctaaagatacaaatattgaggatacaattaaatctctaaaccttgaagctttcatatgtgataaagagacatatctttattcaattatttaataggtacctataatacctgttatgttaactaatgaatggtccgtatgatatatattttaaatagcgttttaaaggaaactatttatattgaatatttttatgttaaaatttgtatgtggaatgtaaaaacacacttcggttggtagtccggaggcattaagatgtattaatgtcagtgaccttcccctcctcgggatgtccatcatttcatagtatgtttagaggagggaatcgttatgtcactaacgatttaccatgatggccagttttgggtaggaattattgaagttgtagaagacggtaaattaagagcatttcgttatgtatttggagcagaacctaaagatacagagatatttgactttatttattacaaactactaaatattattaatcaatcggttcattcaggtcttgatgtaaaaggaaaatctaataaaaagatcaatcctaaacgtttacagcgccaagtagcaaaagaaataaataaacttggtatttcgactaaagctcaagaagctatgaaacaagaatatgaagaaaagaaaaaaagtaaaaaaaagagagctaagcagtatcgtgaagaactgaaggaacaaaaatacctaatgaagaaacacaaagcaaaagccaaacacaaaggtaaatagagaa

SEQ ID NO: 38 - DNA, 40783 bp, Priestia aryabhattai
  source 1..40783: mol_type = genomic DNA
caatccttttactacagaggtcatcaggaaaaagaaatattcgcacaaaaatgggatgttgaaaacaattctgcaaaaggcgttgtccaaatagcccatgggatggccgaacatattggacgctacgaatactttgctaatgtattaactcaacatggctacatcgtatatggaaatgatcaccgcggtcacggtcaaacagctttaaaagatgaagaaaagcgtttttttgctgaggaaaatggttttgacaccgtcgtttacgacatgattgctctgactaagcacatttcaacggaacactccggcttaccaatctttctttttggtcacagcatggggtcttttctaacgagaagatatattcaattgaatacagagcacattcacggcgtgatgctctcaggtactggcagcattccttccctctcactgaagggcggcatattagctgcgaaaatagagaaaaaaagaaaaggattacgatctactagtccattgcttgataaactttcttttggacagtacaacaaatcctttcatcctgctcgaacaccttttgattggttaagtcaagataatgaggctgtagatttatatgtaaatgacccttattgcgggggagttttcacagcgggatttttctatgacttgttaacaggaatcaaacaaatctctaacttagctaatataaagctagtaccatcaagcctgcctatttatttgatatctggagaacatgatccagtaggcagctatacaaaaggtgtactcaaagtatataacgactttaaaaaagccggattgcaggacgtaagctaccgcttttttacacagtgccgtcatgagttgcttaatgagctaaataaagatgaagtgatagaagatatactaaattggcttgacgtgcaaatgaacaaaaaaacggttcgtgtttagacacgaaccgttttttgattaagcaaatacagatgttaatacaggcactacttgttttttacgtgatacaacgccttctaagaccgctgtattgttttcaagcgttacgttgtatgcttcttctacttttgaagcagcagaacctagtgctaatgcagtagagttgctgtttaaaatatctgtaacaactaaaaggaataattgtaatcctttttcttcgattgttttagtaatagcttcttccaattcaactttgcgcactaaaacgtcgtttacgtcaattgcattcacttgtgcaatttctactttgcttgtacccatgctgaattctttagcatctaatgaaattaattgtgaagctgttttatcgcctaagtcagctccagctttcagcattgctaatccgtactcttctgcatctacgcctgcaatttccgctaattctttagcagctgcaacgtcttgatctgtgcaagttggtgatttgaataataaagaatcagaaatgatagctgatagcataagacctgcgatgttaggctcgatttctacgccgttttctttatacattttgtttaagatcgttgctgtacatccaactggctctgcacgatagtataaaggatctgctgtttcaaagttagcaatacggtgatgatcaattacttcaagcacacgaacttgatcaatatcgtttgcactttgctggcgttcgttgtggtccactaaaataacttcatttgtttctttagatacttcatcaacgaaacgtggtagttcagcgttgaacttttcaagagcaaattgcgtttcaccgttaatatcgcctaatcgaactggttcagcttctacacctaatttattctttaaatcagcgtatgcaattgcagaacagattgtatctgtgtcaggatttttatgtccaaaaattaacgtctttgccatcttaaatctctctccttcttacgtatgtaaatagcattcttgcgtaaagttagttaattcgttcacgcaacattgccattttaacataaacttttacattattttaatttttttgcgaaaaatgatgttcatccgcagatattttgccattttgtatctctttcatagcgaaaacacctctatttccgatataaatagagggttttgtacgttcattatataaaagttagcgataaaacacaacccgtctctctatcacttgatagataacttaaacgcagtatcttgccaatttcgataaagaaaaagtaaggaagcagtgactattattaaagagaatatggattattttgtccttgttcatataaaataaccaaaaaaagcgccctttaacaagggggctttttttggttatcgtcgcagtgtaaagttgaaatgcttatttactttagctcctagctcttcaagaaactgctgaacagtcatttcctctacgctttgggtataccaagcaagctgagattttttatgaacattgttgtaatatacatctcttgaccaatatgtttttgatcggtatgtataattaaagtgaatgaatagttcactcccgtctggacactgcagcaatacgcggtaatgtggattacgacgatctttatctaaactcatttctttgatctgcgctaacattattcacctctaaagccattacttaatcatttaaaggtaaatgccacaccacactatatcctagctctgccatcaactagaaaatcatatattttctaaaattctacacgatataggacaaaagaggaagagataatttattgatggacgtgtaaagtttcatataaatcttttagctgctcagggtattgagaccttacgtaataagatatttgattaccgaaatttattctacttccactgcccagccgaatgggtcttccactgtaccattttgaatacctgttagagtgtcatacagtttttgtgatacttctcctgtgtttccatcgttgataaccattttctcgttattccaaaatagttcgccaattggagaaataactgcagctgttcctgttccaaatgcctcttctagtttgccttcggaataagcttgcttaatttcttccatagaaatacggcgctcagttacaggcatatcccagtgttttagcagctcaatgatagatttacgcgtaattccttccaaaatgcttccgttcacagatggcgttactacttctccatcgattttgaagaaaatattcatgcttcctacttcttcaatgtatttgcgctcaactccgtctagccacagtacttgtgaatagccttttgaatcagaaagctgctgagcttttaagcttgaagcatagtttccgcctgttttagccgtccctgtccctccggctacagcacgaacaaattcgctttcaaccgcaatttttacaggagcaatcccttctttgtaatatgaaccaactggagaaagaataatgataaattgatagcggtcagatggcgctactcctaagtaaggctctgttgcgatgacaaacgggcgaatgtatagtgatgtaccttcagcagtaggaatccattcgcggtcaattttaatcagctgctttaacgcttctagcgctaagttttcatcaacatgaggaatacaaagacgatcgtttgatttatttaaacgtttgaagttctcatctggtctaaataataatacttgctctttttttgttacatatgcctttagtccttcaaaaacagactgcccgtaatgaaagatcatggatgccggatctaatgtgataggttgataaggtacaatacgagcatcgtgccatccttggccttctgtataatccataatgaacatatggtccgtaaagactttcccgaattgcaattgatcagattgcggcttttctttttttgtttgacttagtgttacatcgattgaataagttgtcatagttgtttctccttgctctttatatttacgggtttttcgcttaaacctctatataagttacattgtacaactttagggaagcgtgtcacaatagttagagacgaaaaattctaaaaattttataaaaattataaagaaatagcacctaatcgaattaagtgctgaattgaaaaggttttctttctaaaaaaactatttctacattttatttacaaccatttataaaccaattttcactcgaagcttttcatcttgtattgaaaattgtttaattttccctactggaatgaccttcactttatcaatttcattgagattgatatgaatttgtttttcttcatacgtagtaacaggcggcttgtgaaaaattcgatagttgatccaattttgattaagaggtttcatttcatggattttgaatagaagcgtacgttcttttgcttcaagaggttctagcacaatggaaaatggaattctcaccagaaattttttaataattccattcatgtgaatataggagtcttgaaatgaaatagaaaattgctgaatttgatcttgctttgtcatttgcttttgaaaaattcgcatgagcatagaagcggatataggaacggttacgccactttcagccatcttttctttcatttttgcctgcacatcatcactaattacatcgtttagctttctctgtacccaatccttcatgatacacctccgctatgaagttatcttgctgtttcctctaacgcacgaattgaagctgttaattgatttgacacgtcagcaaggcgatcttttgttagtttatcttctccaaggtagataggttttccaaaggagacaacaataggaaccttcgaaaatagttcttttacatttgcaggtcctttgtaaactgcgggtacaataggaacctttgccatgctcgctatagtgactgctcctctttttaagggaacgtcttcctctgttcgcgtgccgctagggaaaatcccgacgatatgtccttcttttgctaatttaataggtgttttaatgctgctgggtcccgggttgttacgatctactgggaatgcgttaagtttttttaatacattactagtgagtatatgattaaaaagctccttttttgccataaaatgaatttggtgaggcaaaatagccgcaccaagcgctacaacgtctacccatcccttatgtgaacaagcgattacaaaacctgtgtctgttggtaaagactctttattccttatgtaaagcttacctcttctttttaataaaaatttacatacgtgagccgcaagattaaacataaacatttcctcttccctctattatttgaaaatatatacaaaattatatcacttgatattaatatctggtactaaaaaatgtaacatctttttacacaatagcttacctgcttctctatatattgtaaaaaagtagagattgaatcctctgtttttggtcaacttgactaatgacatcccttaaaaaacattttactattagtgtatcattctaaatgtaatatttattaacattacatgtgatataattaaaggaggtttttagttgaataaccaaaatcgaccgttgcaattagcttcattgggtttacagcacgtacttgctatgtatgcgggtgccattctcgttccactgatggtggggcgcgcattgaatttaaatgcctatgacttatcctatcttgtggccattgatttactaacatgcggactagctacgctgctgcaggcatggacgaacaggtggtttggtattggtcttcctgttgtactcggaagctcatttgtagcggtgactcctatgattgcaattggaactcaatatggaattagcgctgtttacggagcgattattgccggtggtattttcatcgtgctggtagcaagttttttaggcaaaattattaaattttcccctcccgttgtcaccggaacggttgtgacgatgattggtttatcgcttgtaccatccgccgttcgaaatatggcaggaggagtgggaagcaaagattttggttctctttctaatcttcttctttcttttggtgttctagcgcttattttaattttaaatcgatttttcagcggttttcttcgttctctttccgtattaattggaattgtagccggaacaatagccgctgtattaatgggaaaagttgatttcactaattttaatgaagcttcttggctgcacgttcccactcctttttattttgggatgcccacttttgaaatcggccctattttaacaatgattctcgtatgcttggtcattatcattgagtctacaggcgtatttttagcattaggaaagctgtgtgatcgggaattaacggaaaaagattttacaaaagggtaccgcgccgaaggaatcgccattgttcttggaggactatttaacgctttcccttacaatacattcgctcagaatgtaggactggttcaattatcaaaagtaaaaacaaaaaatgtagtggtagtagccggcttcattctcgtattactggggcttgttccgaaaatagctgcttttacaaccattattcccacccctgttttaggaggagcaatggtggtgttgtttggtttagttatttcatcaggcatcaaaatgctaagtgctgttgatttggccaaacaagaaaatttgctgattattgcttgctctctttcacttggccttggtgtaacggtggtacctgatttattcgctcagctcccaagtgctttgcgcgtaattgtaagtgatggagttattacgggaagtttggctgccattttattaaatctcttttttaacgcatcaattgaacgaaaagtaccttctgtctctttagagaagacagattattcagaaataaaataaaggtggtgtagtatgaataacgtatccatgcagtatgtaaatcagcttagcaagaagtattttgtttcactagttggtgatatatttgaacattcaccttgggttgcagaagagacttattctaaaggccctttctcttccgttgaacaacttcatggcatgatgaaagaaattgtagcgcaagcatctatagaaaaacagctgaagctgctgcaagctcatccaaatctaggtgaaaatattgccatgacatctgcttctactgaagaacaaaccaaagcaggcttacaaaacttaacacaagatgagtatgaacagttttcttctcttaatggaacgtatatggagaagtttccttttccttttattttggcagtacaaggtaaacaaaaagaagatatctacgaggcaatgcaaagtcgtttactaaataccgagcaaacagagtttgatacagcgttagaagaagtatataaaattgctttctttcgcttaactgataaaattactgaagataaggagacaaagaaacgagcatgactaaaatcacaacgcatattttagatcttacccatggatgtccggctgcttttgtcaaagttgatttttatcatattcagtcggaaagtaaacgaataaaaatttcacacggcactacaaatgaagacgggaggttagtaactccgctcttctcttctgaagcgtttgaatcaggagattatgaacttctgtttcatattggggaatattataaaaaacaagaggtccaaacaacaaatccgccctttttaaatcaagtttctgttcgagtcggattgtcttccgaacaagaacattatcacgtccctttgcttgtgtcaccgtggggataccaaatttatagaggaagctaaaaaaagaaacggcgtctttaaacgtcgtttcttttttagttgagcaatttagacatatagtactcatcaataaacaaaccgccaattcgcagtgaatgtttttttgttccttcaatttcgaaccctactttatcatataaagaaagagccttttcatgctgtatagcgactgtcagttcaagacgatgaatatggtgttctctcgcccattcctcaagtgcaccgattaaagccgtcccaatcccttgattttgaaacgtctttcgaatacctaatgtcaaagaagcgatgtgagcgtttcggttagcttcgccccctgttgcagctatatatcccacaagcacctcgctttcttctgctacaataatcgtagagtttggctgctgcttaaagatttcgatgtttttctcctgctgatctgtactcagctttcgctctccgctttcgaacagcataaacttactttcttcttcaatctgtttaagcaaatctacaaagtttgcagcatcatgtaattctagttctctaatttccatgctgatccccctttttttgtgtcccttttgtttgtatatgtattggtgcacctttataaaatatagctttacagtttcttacggaaaatacgactttttaagaagcggaagtagaacaaaaaacctactaatctccctttttttgaaatgcttttttcctctgtataattttaaatcacttatcaacttctgtaaattttttagattccctcttttaatttccatttatcttccttttctatgggtttgattttgatctaaagagaccttttatagaaaacacatgactattatcctgttttttgtgaagaaagaaagcaataaatgtaattttacttgtaatcgtttagaatagaaaaagtggaaattttatgtacctatcctccttaattattggtctttgaaaggaaattattatgaaagtacaacccgcaaaatgtggtgtatatgtcttaagcggtctaggagctgttattgtgttcttcttatttttacttaagaacagtgctttctttctagaggaagaatacggtcaaaacaaacctgaagctgcgcttgcggtcaacgaacatacctatcaccttcacaaaggctctattaactggtcaaacggccgttcaacaacaaaaaaagaaataaatgtatatgatttatatacaatacatatcgcagcaaaaaagtatcccattgaagtagcaacaattggttaagctccatttttcgaacttagacggtgcttatattcgtagtgtgagtgtgcatatatggagagataacggtgaaaaaaccaagctgtttgtcaaaaataatgaatttaaggttcctaaaaatcaaggtttatacgttgttgatattgcgattaactctacaagaggaacaatgcaatatgcggcaaatgtgcaaatacagtaagtttttatatatttacgtttggtcgagaaaatcggataagaaaactcttgttgcaagtaggaaacgatgtatggaataaaaaacggtgaaaaagaagtataaaaaatatagtgaagcattcaaataaaaccccctaactttttcagtaaataatctcatacaaaaaaagagagcataagctctcttttttataaaatgaaaaagacgtccacgcaggacgtctttgatgcgtttgtggcggggaccgtgtgaccacattcacacgtttagctcgaaagcatgtccttcgacttacacaaattagctcatcgctttattaatataacatccgacacagaaaaaagcaatcaatttttaaatagttttttctatttatacatatttcgcgagaatccacaaaataatatgcatgcgtagctattcactctctacattttcagtctattttaactcatgtacgaatatactaatagaccaacctatgcgcagtttttgaaaaaggatgtgaatagcttgtttcaaatcactgatttccctgaattttcatggtcgtactccagacatagaatggtcacacagtgcaaccgaaagtatgcatatcattattatgtctcacataacggatggcttgacagcgcttctgcgcagtctcagagcgcttatcgtttaaaaaaggtttccactttatctatgtacgccggacaagccgtgcgtcaagtgattacagaggccatttctgactatacatctacaaagcttgtcccgaatgaacagaacttagcggagaaagtgcagcagctactaaataacgcactgcgtgattctactgactatggagagctttggtatcataagcccgctcagtataagatgcttttagaattctacgaaaacggctatatttctaaaaaagatcttaaagacatgcaaaaacgggtacatatttgtgtacatcactttttacaaagtaaatcgttttgcgacatcgtatcttcaccttttttagaagtggagcctcatcagtcgtttcgttctataaatgtttatgatcataaagtatatgcgccttttcattctctttttaaaaatccagtcacagacgaatttacgattgttgattggaaaacaagtaaacaaacaaaagatgatttgtttcaactggcgatatacgccctctacgtgctagctgaatataatatttccgttgatcaaataaaagtccgaaacgaatacttgctttcaggcagtgcgcgtacgtatcagcttactcttcacgaaattgaagctgttcttcagcaagttgatacaagcattgattatatgaaaacttttttgaaagactcagaggtaaatcagcctctttcacttgagcatttccctcaatcagatacgcctgcctcctgtcacggctgtgcatttaaagagttgtgccaaacgggataaaaaacagctgaagatgatctatattttttgctaaacttttttattgtcaaaagaacctttgctagcatataatttgcattaaggaaacattttatacttcatataaaaaaattagcttgggctatttattgttcatcaaagaaaggagcactagatatgaaagatcaaaacggcagtaaagcattatcagctatgcagctaagtgctcaagatgtattgtcgggtaaaacaaaaggaattaagcgattattgcctttcttagggcctgcttttatcgcagcggttgcttatattgacccaggtaattttgctactaatattgcagcaggttctcaatacggatacatgctgctttgggttgtattaatctctaacttaatggctgtcttaattcaatcgttatcagctaaattagggattgcaacgggattgaatttacccgagatagcacaggaacacttcccgtccttcgtttcttttgggctttggatccaaggggaattggtcattatggcgacggatttagcagaatttattggggctgctcttggaatttatttattatttcatattcctttgttcccagctgcactcatcgcagcggtaggttcttttgctattttagagttacaaagacgaggtgttcgactgctagaagcagcgattgcggcgatggtttttattgtggtattagcttttgggactcaaatgtttcttgcgcatccagacggcgcaagtgttgtccatggcttatttgtccctcagtttcacggaacagacagcgtgctgttagcttctgggattttaggtgctacagttatgccgcacgcgatttatttgcactcagctcttacgcagcgccgtgtggtaggaactacagaatcggagaaaaaagcgattttccgctttgaatttattgatattgtgattgctatgattatcgctggtgcaattaatgcaagcatgctgattgtcgcagccgctctattctttaaaaacggactaaacgtgcaagatttggacgtggcttttacacaatttgaacatttaattggtccctttgcagctattgcgttcggggttggattattatcttcaggactttcaagttcttcggtcggaacaatgtctggagatgtcatcatgcaaggatttattaaacgcagaatccctttatatcttcgccggttcattacaattattcctccgcttttgattatcggatttggcgtaaatccaacaagtgcactagttgtcagtcaagttattttatcgttcggaattgcatttgcgctcgttcctcttatcatgtttacaagcaacaaaaaaatcatgggcggattggttaatcataaagctacaacagctgtagcttgggtgatagctgcactagtcatttgtttaaatatctttttgatttaccaaacgttcgtatagtaaatcaaactttcaagaagaaaaagtgaaaaagagaccctaaaaagttagatatagtctaacaattgggtctcttttttattattttttattaaacgatagtaaaaatgaagtagacgagagttccaataatggccgacagtactaagcaacccagtggatataaataagaatagttttctttacggattgaaagaatgcgatcaacaataaaaataagaatgacacccatcattccgaattcaaacattaataacccaaaaatggcgtgaaatatgaatgacatgataaaatcaatttttttactacggtcttttacaaaagcactgactaataaatcaacgataaccgtgcctaacgtccccattattaaaaagaagggtgtaaaaaataaaaggtataaaggaaataaatcaatgaaatgcggactggtttttttaatagaaaaattgggaattgactcttttatacctggcataaaacaaaaaagtaaaataaaaagaaacgcagctataatagcggctgatagctttctatttaaatgcatgtttatttttttattactaaattcagtagttgtttttgtatgtttatgattcatatgtctttaacgtgatgtacgcaccttttcctttctcataacttttttatttatattttatgtctatcttttgttaccagcagttacaatgatacacgctctttttgaacttgactacactaacgcgctttatgtctattctctttttctttttatgtctatcgtttgctctttctatgagaaacaagatgcttttacaaaaatcgccttctttttctataaaacaaaagacaggcgtttttttctgtatgtaattaataatcttgtttggcttcttcaaacttaaacacatccgctcgttctgattgctgtgtaattaacaggttatacgtatggttggccttttttggaatttcaaatgcaacatcgaggttaagtggttcatcgtcagatagtgacggtgatgaaaaagctgtccacagggtgtgcggggtttctgtcgataaatttcctccatcagacggttcgtaggtttgataagttgctgtgtcttgtaatgtaaacgttgtgtcgtttaatactacagtcgaatgttcattaggtgttcgctgaaactgaacggatacgacaatgtactgggtgtttacttgtttagctcctataacaggataaaattgcgcatccgttgtggacacataatattgaccgtgttttgatcgttctccaaatgctaatcgatcatcagtttcaccttcttgagctacccgacttacaggggccatcgtttcatccgttgctgaaatggtgtctgctcccggggcatgtttaggttgaggggttttgtaagtgacgtgcgtatcgtcttgtttgtcttcacaagcggcgagatttgtgaacaaaacagccgctacaaggcttctggtaactattttcttcatgttattcctccaatgactagtctatatactatgctacatggtatttatctgggaatcaaggataagattggtacaatacgaatgaagtcagtgagacttagaacggatataatacctgcagagactgctgtgcttatttttataacaaaaaagagacgatttccgcctcttttttgtttgttcgtattatgaatttagttcatctaaaattgaatgcagttcacttaaatgggtaatttcataagtaggaatgacttcatttcgctctttatcgtgacgattaatccatacagatttcattccaacgcgagaagaacccagtatatctgtcattaaattatctccaaccatgatcgcttcatctttctttaaatccataagtgataaagcatggtcgaaaatagatggatcaggcttaccgcggccaaatgcacctgaaatcacaatctcatcaaaatatggaactagttctgatgtaatatctaatttggtattttgtaagtcaggtgaaccgtttgttaacagcagcagcttgtactttccttttaattgatcaagcacctcaaacgtttcttcgtatacaaacggtgttttgcggcgctctaatggaaaacgctcagctagctctgctccaaaagcatcatcgtgaattcctagggcacgaagacctcgagtccaagcttctttgcgataagcaggaacaatatctttcattttgcggaattcatcatgatcgtctaaaaaattcccccataatccttcaaatggattaatgccaatcatttgcgtaaactcataggtttcatacgaagcatataattctcttgattccttacgcaccgcttcttctagttcttcaggttttaaattatatttctcacttgcatatgtacatgttgcaacgaatgcttcttttacgcttttttggtcccaaagtagcgtgtcatctaaatcgaaaaataccgctttaatcatggatgtgtgtacccccctactgtttttgaaaaagtttaactattcttacactagattacaaggatacacacaataagtctagtatatttgcgatttattctgtaaatttatttttataaagcgtcctctttacaaacaaatttacagaaataaaaacagctgatataatcacagcatgtatgtatgcaggaggttttatatggaatcgttagaagaaatgttcggcattcccaccgttcgtacaagtaagcgcttaagcagagtagttgccgcacgcttgcgcccttttgggattacaccagaacagtggaccgttttaaaacgcgtatcagaagctgaatatagtacgcagaaacaattagctgaacgagcggataaagatcaagcgacgctgactaaaattttagatttactagaaaagcaaaattggattcagcgtatcagaaatccagaagatcgccgctcgttttttattcaaataacagaagacggcctgcgtttaaaaacagaagtaacgcctgctgtggagcaggtatttttcgaattaacgtccgaattaaacgagcagcaggtgaaaatttatactgaaactttacaaaaacttgaataccgcgcggaacaattgcttcaagacgcagaagacctgcgttaaatacccaaaaccccacagctaacattctgcggggttttacacgtagttggcgatgcatagtacttctttgatttttgaaatcacttgtttggtttcatctgttaaagaggtgaatttaaacgcgatggattctgcatttggattaatgaagggttctttgttcgtgtctttgcggtagtcttcaatttgttctaaacaatattttaaaataaacgacaagttcgcacgtcgaaatctcaaactgacggtagaaggccatcttttttgaaactgattgcttccctcatactgaatcgctccgatgtagcgttctccggatgaaaaagattctttgcttcgatatagctgaacggtttgggctgttccgctccagtcaatataaatacctgctgtttcacaaacttcgtatatgtaatgaaaaagctccgttacttctccgaaatggtagtgaagcggatgtttagccgtcatagatagctccctcctttatcgactttctaccattatattgtaggaaaagtaacttattcatttatacaacttatttcatacgtataggcagtaaaaatgaaaatatatgtttttttagtttgcataaaaatattataggtaattagttataacccgattttcgaaacgcgtcgtataccgtatcttcttgaagtttttcaagataaacgttcgttgtagcaatagaagagtgccctactacttgcttcacaaccgcaagcggaacgtcattagctaaactgtttgtaataaaggtatgacgaaaccaatgaggagaaatagactcgtttccttttactttataaacagctgatttaatcgttcgatacaacgttgtataggataatcgcttcttttcgccggtacgatagtactctttaatggaataaaaaagcggttcggtgtcaaaaggacttagttcagtgctttcatttaacgcttgccggtaagtgaaaagtgtttctttcacatcatcaaacacgggaatcgttcgttctttttttcctttaccaatcacatctacaaccaaatttccgcggcggtcttcgcggaagcttccccaatttaaactcagcagttcacttgaacgcattccactcatatacaaaagcattcccattaagcgattgcgcgctttgaattccttttcatggtgacgaatgcgcacgactgattctaacgcatttacaatcacctgggcttcgcgatcggttagctctcggtactcggtgcgattttgtttttccttgtcgctgtaatgtccttttgcaatagagggtttttcaatccacgtcgtatacaacgaaggataaaaatgagtagcgtgcccaaactctagcattcttctaaaaaattctagttttcttgcagcggtgcgattggcatattgattcatcatttcttcattaaataatttgacttccataaatccaatcgattttaatgtaatctctcgttcatagaaaaaagacagaatcgttttcatgtcttgattgtaagatctgatcgtatgaggagaaagtgattttttgataatacgcattgaaaaaaagagctgaataaattctttatctgaaacgtgctttaaattcaagttgttatcttcatctaacagctctgcctcttcccactgctcttttagctggcgaaacgaatttttcgcaggcgacaattcaaattcttccattttacccctcctaattattaaaaacaaaggtatcccttttaaatgatccagaatggaatataacgaatttttatcaacccgcaacaaataccattaaaagtttttaaaaacatctcaaaactcaatttaaaaatccgatttttgaagattttaataaaaatatccattatatgtaaaataaattctgttttctgcttatttctctactttatcatactaacgctcgataaggaagagttatcttgcgttagtatagtaaaggattttggttgtaggataaagggagctacctacttcggataattagaaaattaggttaacgtcctcataagctcttttatattatttgtaaataaaaaccatcacgaagagcgtgatggtttttaaagtgattcaattttagtcaggtgcagctgtttattgctgtaggaaacggtataggttcgataatactctttttcctgactttgaccgttcgttgtaattgaaatgacttctttcgtttggattgtatagaccgcttcgccctcttcttcactcacagattccacgtctaataccgaataatcaacgagctcttctcgaatgtctctttcgtacagcattttcacaagctgcttttgatcattccacaaaacactatcccgctggatataaggctgtacgtgttcaaatttattcgtgttaatggattttgttaaatctcgcaaataatgttcaataaaaatatccgctgtttcttgatcaactttttggacattttttaaattaaaatctttttcttccttctcttctttttctttttcatcttctttaaaatcgtcgattcgctgagagctgtttttgctgatggcatactttgtattgttctctttgaaaaccaagatttcttccttttcccctttttcatttgtacgggccgtttcaccttggtataaaatatcactagaaggattaattgactttacgtattcgatatattcatcggccgtaatgttgaggtatttttgatgataggtaacttcatcccattcgtttaatttccagtgcttattaacgtatttaaaattcatgtaaatggtcagtccgccgcttccttctttactaattggctcaatagccgagaccgaaaattgcccagcatgattgttaataagttcaaagcgaatcagatgagttacatcaggaaaaaagctcatattgcattctttgcagtaataattagtagagatactttttagctttgttgcaattaaagatgaagttgcatatggcgttaacgctttttttagcgtttcgtaatcagcagggttagattcattttcccattcgtactcttcgcctaattctttataggtgcttgaaattttgttcatcgtctcaaccgcagttttttctgcttttttttctgatacaagttctggcggaagagatgacttagcttgatcttttgggatcacttcatctgaggaaggttcggttggcttggataacttaactgtttctttttcttcacaggctgtcaaaaccattagcagcagcagtagaacgaatgcaatcgtccattttttatgcataaggtgtcctcctcaatgccgaatttagtctgtttttaaaattatctttaattctcaaacgtatcgagcacgtaatcaccgcttggaattccccactttgcctttttattttgatctgttttagcaagtaatgaaatggaattttctttgagcgtaatgacaatggttcctttatttccttgtccatcattttcatattcaatggctgcttggttattttcaaagcgaatatttttttgttcaacggttgacacgcggattttgctaggtggctggtacgaatttattttaatcgttgcttccgagttggatgtagcaagaaattgaatgataggagatccgttatcattgccagtggtccattttccatcgtagtcgtgtaaatctgttgtttgtgtagtgggagtttcagtgcttgcatttggtttagatgaaaagtcaaatggttctacactcgataactttaacgtatcgttttgataaacggctgtataaaggcggtcacaaattttagtgtaaggatctttacccggctgttttaataagctttcctcgtgggtttgtattttgaacacatggttaggttcttcataccaattgacaatatgaaacgtttgcttcttctgctcgatgccttggcgtgtgaaattttcaacaagaaggttctgctctttataaaaagaactgtccgctttcaaaaaagcttttagatcatcaaaggagttttgatccactgcttttccaaacgctgaaaagtaatcagtcatccaggctgtaataaatttcccgctcattgcttctttatttaaatcaattgattgaatgctttctacctgtgtttttggttcgtttagtactttttttgcatctttttctactatcattgtatttccgtcttttaatgtttcttcttgctgacaggctgataacagaatagatgaaacaaccgtgataatgattgtattacgtttgttcatcataattgccccttctttatctaatataaatgtatgtatattcttccaacaaacagacctagtatatcattctacaaaaaaacgctcaaccctttaatttcacaagaaaaacggcttgcctttacagcgagccgtttttcctcctatttaatggctgcttcttgatacgaattggctgcttcttttttgagctgtctagagccataaaagacatagtaaataattgaaagaaggaaaattccaagaatcacataaattaaaggcagagaaacgccaaacagcattaaatttgttgtaagaacactgtattttatgatgctgtacaagcacagaatccctaatactaaggcaatgcttggcacgaccgggtagtttactttaaaaggacgagacaggttaggttcttttttacgtaaaataaaaagagaaactaaactgatgcagtacatcatcattgctccgaacacggataagataataagtgcattggcaaacgttgcagatcctgcacaaatcacgccgattgctcccgggatcaacaaaccgccaacaggaactccttttttattcgttttagcaagaaatttagggaagtaaccatctcgtgcaagcgcgtaggtttgtcttgaaaaacccatgatgattccatttaaactagcaatcaatccgaataatccaataatagcaacaacggttgaaatgccgttttcgtatacagaagacagtgcctgtggaagtggataatcggctagcttcccgcttcctccgccaagtcctgctgttacaaatagtgtaaacaacgttgcggttgctagagtaataatcgctccaataaatcctttaggaatgtttttcttaggattttccacttcttccgctgccattgctcctccttctattgccagataaaaccaaacagcgaatggaatagctgctagtacccctgttggcccgttaataaatgaatgatcattaaaaatattcgatgtttgtacatgaggcaaaccagctacataaaaaatagataaaccaattagtgcaacaatggtagctgtaagctcaatcaccgctacttcttttaccccgattaaatttaataaaataaagaaaataaaggcacctaccgttgcgtatacagggttaacggctggaatgagaaaatgcaggtatgctcctgttgacactgcaatagcagggggagcaaaaataaattcaagcaagcaggcaattcctgcgatatatcccccaaagggtccaagtgctcttcttgcataagccgaaggtccaccggcttgcgggatagatgttgaaagctctgcataactgaacataaacgttgtgtaaaacacggttacaattaaggttgcaattgcaagtccgataatcccgccttgttcaaacccgtaattccacccaaagtattgtcctgaaataaccataccaactgaaatagcccataaatgaataggttttaattgtttttgtaacgccatatgttctcctccttttgatgtttagacaataagatgtacaccgcttgtttgctgcttgatcattttgttaatcatggtaccgatatgtgcggctgcctcaataggaggcgtccctcttctatgaatattagaaataaccatacgatcagactcttttttgcctttgttaggctcatagcacatgtaagcactcattgattccgcactgaccagtccaggtcgctctccaatcaatagcacaagtgcttttggctttatgatctcgcctatttcatccatacacgcaactcgtcccccttttacaaaaaatgaagtcccgatacgaagcccatatgactgcagggagtcaattaaagctggatacacgtcgcttatgttttcttcgattgccttggcgctcagtccatccgagactactacttgtacatcaggctgctgcacgcagtttttaaaaatttctttcttagcgttatctgctaataatcttccttgatccggccgttttaaataatgttcttttgactcaacgcgtgtattcacagagaaaaggttaaactcagctaaaatatgttctgaaactgctccatatacagagtctacggctgcagcatgatccgtgcgaaaagataaaacgtcttttgttaacggccttgttcctgtacggccgacacctatgcgggcaggggtaaattgtttaagtgtttccagcggatctcgatttgactttggtatcataataagcaccttccttaaatcaaattcataaaaatagttggatctccagctcttgatgtaaagcgtccgttttccataatacgctggtcttcaagccacttttgaaataacggcgttggggtaaggcctgacacattgcgtaccgttgcgatgtcatgataactaagagactggtagtttagcatgcagtcatcagccatgggcactcctatgacaaagttcactccagctgttcccagaagcatacttaaattatccatgtcattttgatcagcatccatgtggttggtgtaacatacgtctactcccataggcaggccgtgcattttgcccataaaatgatcttctaacccagctcgtagaacttgtttgctgttatataaatattcaggtccaataaatccaacaactgtattaactaagaaaggcttgtagtgccgagctaatccgtagcatctagcttcgagcgttacttgatcaatattatagtgagcttctgctgacagttcagaaccttgtcctgtttcaaaataccagcggtttggaccctttgccgtccctttttcatgaattagcgctgtcgcttcatcaagcatagacagtgagatgccaaatgaatcattaccggcttctgtgcccgctaaactttgaaaaatcaagtcagcagatgctcctttttcgattgctctcatctgactcgttacatgtgataatacacagttttgagtaggaattgaccattcgttgattatattttttgtttcatttaaaagcgcgtagatattatctgttgtatcaataacagggttaattccgataaccgcatctccaattccatagcttaacgcttcgtatagagatgctctcattccttttaagttatctgaaggatggttaggctgggctctagaagccaatactcctttttggccgatagtcgtttggcaagtagcttgcacttctattttggcagctccttgaattaaatctaaattggacataattttagtagctgccgcaatcatttcgctgcttaatcctttgctaagtgcaagaaggtcttctccgctatgctgatcggataaaatatattctcttaaatcccctactgtccaatctttaataatgtcgtaaaccgatgaatcaatctgactttcgattaatgccgagacgttgtcttcatctgcgctgagcagcgggtaatttcgaatatcagcaagtgtgatatcagctaggacttgcttcgctgccattcgttctttcattgactcagcgctaactcctgcgagctgatctccagaacgctcttcgtttgctttggccatgatttcttttaagctataaaatgaaaatgtttctcctaacaatcgtgtagttttaaacatcgtttcctccttgtatatttagtagattatgatgaaaaagcgagcgttttaacggaaacggagatcgcttctccagctactggtaaacctagatcaatgtaatctccgtgtgtaaaatcaatttgatctaaacaaataatttctaactctttcctctgtttagctaatgcttgtcctaaagcttttgcaatatcttgctcgcatagaacaactaggcacttagctcctttaaaacaagcaataaattcagcgcttattatttttgctaattcttgaagcatcttatagctgcagtaaggaaaatgagataaagcaatagcagcggggggatcttctgcactgaaaatagttgaagcctgcatacatgaagctcgagctatttcttgaaacagctgcggattccacgtctcctcttgctgaacgggtatttctataatcggaatattttttagcggcagccgcttcgacccaatgtatacggttgatccgctaacttctgtattttgcataccagccccaattacagtagcgcgcgttgtctcagcggcttgagatacttggatggattgaaaatgatatgctagaagcggaccaacgtctccgtgtatggccacttccttcactgtttttggcttttgcttctccatcattgctcctactcctcctgaaaccatgatcgtttcaggatgtatagaagatcttgtatgagaagaaacgagcagcgtggaattttgattcagcgcttttacataattcacggtttcttcagctagtaattgacagatagacgagagcttttcaaatgttgttttttcaccttctcgcagtattaaagaattattttttaaaaattcagttaaatgagacgaaatgtaggttacaaaaccgtctgaattcagccgaattaatctcccgcctacatgcagtgtaaacgtttctatcacttttccattttgacataaagcgatgttagcagtgcctcctcctacatcaatattggcaattactgcatttgtttcagcagaacgttcgattgctcctgatccttttgctgctaatattccttccaagtcagcgccggctgttgcaacaacaaaatccccagcacgttcggctagatagtgaacgatactttctgcattttgctttctagccgtttctcctgtaatgatcacagcgcccgcctccacttgatctaaagagattcctgcattcttatactcttgttctagtagtacagttaatctttgaacatcgatttcaacatcgtttagcataggggtggtatagatagaacttgcatacgttacgcgacgatcaataatttgacagcctggcagcgtaaactgattttgttgatttgctattaacagcttgcttacaatcaattttgttgtgcttgttccaatatctaaacctatgctcgttatccatttctgtagcatgctatcaatcccttatctcgtttgaatatggtgattatcataaaacagttttttgaatatttcactaactatgttatcaaacctgacacaattttgtgtaaacaaaggtgacaaatgacaaaaaaagactaaatcttggtagatttagtctttttgcttatgatgagtgtgatttagttacaatcattcttgatgccgatggaattaatagtgaaaggataattagacatgatagcaacgacccaatcatcgaaatcccgttcatcgagaaagaataccataggacaggcattccctttggtgcagcaaatccccaaaatattaagcctgcaatgaaatggcaaaaataacgagcaaaacttcctataattaaagataagataataaaaaagaaagcttttgatctttgattattagctaagtatcctttaatagaactagagaaaatcccgccaaatccaataaaagtaacagcgataatatactctataaaagcttgcaatggggttaaaatatatgcatttcctaaagctaattgcaatattccccataaaaatccggataaagctcctcctttgactccccatcgaaagcacataataaaaataggaaccatagagaacgaaatgcttacgcctattgcaatttttatagaaggtaaaagatcaattaaaaaagccaatgctgcaaaaatagctatttcaattttagcctgtaaaggtaatgctttattcacgtttctcactcctgtttttgaatcattcatatcaaacggtttacacaggagtaagcaaatatgtatgctgatattcccacattcctacgctagcgttaactaacaggttctaagggtctgaacaatttgttcactctcagcacggcggctccccctgtggtacgtttggatatttatgtagtataaagacaatgtttattataccatatgtaacaaaatagattcgagagatttcaaagatgtttctattttctgaatctattttttataatgacaatcgttttagtatttgttatacttcttttatgtcaattgaatataagaaaccctcatcctaatcggtgaggtagaggtcgcagtttttaatagtaaagcaacggaaatgcagagaacattgaggatgttgtttgaaaggaaaaattgccgaagtttaaatcacatctcggttgatttaagctggggctgtctccgaacaggaacagaactgtcacatcatgcgagtgatgtgaagagctatcttcacggaaggttgacgcggttttcagatttaaaagcgcgcacatatactgcgggctttttttatgttatcccgtctctttccgtacattcgaaaggagtatttatctatgcaagagcagcaagaattaaaacgtgggttgaaatctcgccacttaacgatgatttcattaggaggagccatcggaaccggcttattcctagcaagtggtggagcaattcacacagcaggacctgggggagcgcttttagcttacgctattattggtgttatggtttactttttgatgaccagcctggcggagctcgcagcttatatgcctgaagctggttcgtttagtacgtatgcgtctcggtttgtagatccatcctttggtttcgctctcggctggaactattggtataactgggctattacgattgcagctgaattatctgctggagcccttattatgaaattttggttcccaaactcttcttctattttatggagtgccctgtttttattaattatgtttgggcttaactacctttctgtaaaaggatttggtgaatctgaattttggttttcattaattaaagtagtaacggttatcatctttttagttattggtattatgatgatttttggtatctttaacaatgaagcaccaggttttaaaaacttcacgcttggtgatggacccattcacggtggattctttactgtattaggtatttttatggctgctggtttttcattccaaggaacagagttgcttggagtcgcagctggagaaagtgaagatccggaaaaaacggttcctcgcgcagttaaacaagtcttctggcgcatcttgttattttatattttagctatttttgttatcggaatgcttattccatacacagcggattcgttagcaagtgatgatgtgcgggtaagtccgtttactctaatattcgaacgagcaggtctggcgtttgcagcatcagctatcaatgccgttattttaacagccgttttatctgctggtaactcaggtatgtatgcttctacgcgtatgctgtggaacttagcgaaagatggaaaagcaccgaggttcttagcaaaagtaaataaaagaggcgttccggttaatgctttaatcgcaacggcacttgtcggtacacttgcatttggtgcttcattttttggagacggtgcggtatacacgtggttacttaacgcttctggtatgtctggttttattgcttggttaggaattgcaatcagccactatcgttttagaagagcatttgtggcccaaggtcatgatttgagcgaacttccatatcatgcaaaacttttcccgtttggtcctatctttgcctttattttatgtgctgttgtcattttaggtcaaaactattcggcgtttatgggtgattcgattgactggtacggtgtacttgtttcttatatcggacttcctttattcttaattgtttggttaggatacaaatggacgaaaaagtcaaaacttattccgttaaaagaatgccaagtaacagtgaaaaaatacgaataaaaaaagctctctattcttttgaatagagagctttttttatgtgatctgatcagcaaaatgaagagatatataggcgggctgatttttcataacaagcatataacctttgaggggacgattacagtaatcagcaccttctatataataaatatgctgaattaacctgcttaaatgggttacaaaagatggaagttgatgagtaggaatgctttgaatgtagtctatgatttcttgtttagtttgaagtcccgaatgggtacattctaacagatgaaaaagtggatctgctgctatagtagatagttcagaattgtgtttgattctattcagctggatatgcagttcttttttggaccatctttttggaatagctcttagatgctgatattgaaaatgtgtattcatgatagctaacacctttcgtattaaaataataaaacgacttattattttaataacctttacacatgaaactaaaacgttacaatgtgtaaaggtgtcatacattttataaaataagctgataaaaaagcacatcttgccactgattgaatttccagcctacttctttaaattctccgcaaaatgtaaaattaaattgctcatgcattttgacactgatatcattccctttcgtaatccctgaaatgacaacgtgatggttgagttctttagctaattccaaaatacgcttcataagctgttttccaatgccatgcccctgctggtttttatcaatataaatcgatagctctaccgtttgaatgtacgcttctttatctcgataagaagaaagcgaagcatagcccgctactaccccatctttttccgcaacaataagcggaaaaagttcattgctaatgtgattatcaaaccagctccttctttgctctactgttacaggcgttaaatcaaaagtagcagcacttgcttgaacagactggttataaatttcaacaagcataggtaaatcttcttctttagcataacgaatgatcatatgtacaaactccttatagtatagaattatctttattttacttcttttaataaacataatctacataaaaaaccgatgtgcgcatgcacatcagttatgattttgagcatattgaaaggtttgaagaacttgaagtgtctcttttgtagaaacgaccgttgcaaactcctcatgcaaagaggacagtgcgaatgtatgtacatcttctgcaggaagccttgtttttccatcgtaggacatacaatcaaagcaagctgtcgcatcgtttacaacgtatgtcctgtaccctagatttccagccatgcgggcagtcgtagagacgcagtgattagtagttaatcctattaagataagcgtatcatagccatttgcttttaaataactgtctagttctgttccaatgaagcagctgttcacgtgtttgcgaattaagtattcgtcttcttgtggaccaaacccttctttgaactgaaaccccttcgaacttgggtgtaaaggagaatctggattttctgatgcatgctgtacgtgaatgacaggataattttggcgcctccatgcttgcagtagcgtcagcatatgtttttctgcatctagattgtttctttccccccactgtggtgaataaaacccttcttgtacatcgataagcaacagcactggccgggaacgtagcataagcatcatcttctttcgtctttattttaaaatggaaataacgtatgtgcacccatcaggaccggcttttgaagaatgaaccgtttgtttcggtaaatgtatccgatctcctgcctgacatagaaccgtatcacgttcaactgtaaagtaaatagatccttcaagtatatgaagaatttcatcagttggatgggtatgagatgggtgcgtttgaaaagcaatatcgtgctgtacttcaacgtatccagtatacgccggaagcagttctttaattacttcttcaaactctccgccaactccttttttaatagaggctttttttacgtccatgctgctcactcctttttaatttaaacggacactgtccggtggtagtatagttgttatcatcgtgtaaaaaatattgcttccactctcggctttcctgctgtccataccatcctaactcagggtgagctgatacgtcatcatatgtttttaaccgatcgcggaccaccttttgtacgtgccgccctattttcgaatctcctgtcataccttcaaacacccaccgaggctgaaatgtaatcataaatcctctgctcttacggcttttgcgcaaagaatgagcaggcgtattacagacgacaaagataggttctccgtgaaagcaaaattcccataatggatcttttggatcttttggaatgtcttgcggccatttcttttgatcaatttgatgaagaaacgtcagcgtatcccaaaacatcgtttcgtactcttccattgatcgttctttatgttcaggcttaaagaataatacaaaggatgtatagcgacctatggtcttgaacgtatctatgtattctcgaagtgccgacgctgcattcctaatatcttggtagttataaggagtagtcacaaatgaaaaacgcagtaaatcttttttaaagccttctacccctaatatacaaggaaatggattttcttctgataatatatcgctttggaaatattgaaaagcatcttttccccaaaacgggacatgcgttgactctaaaatctcattggctcgaaaaagcatttttgatgccattaaaaccctccttatggaactcaacgttacatgtgtattaaagaaaagaaagtttatgagcatttttaactaaatgccgcttctaaattataaaactctaatctatatatatataagctactattggacaagttagaaaggaggctgtgtttgtggagtggtttttgattgctataaaacaaataattctaggtattagtctcgcagcaccggtaggtccaattaatatagagatgattaaaaaagggctgacaaaaggattttgggcttcttggctagttggtttaggaggcatgacggccgatattttatttatgctcctcattttaatagggttaacgccttttgttcagatgcaggctgttactgtttccctgtatgcaactggttttgtcatgctcacatttgttggctttcaaagtatgaaacaagctgtttctcgttccttttcaatagatgtaaataaaccctctattaaaagagataagtcgttttttacaggtttcttcattgctcttgtgaaccctttaaatattgtgttttggtttggtgtatttgggtcaagcttaagcgaaagcctccaaagtcaaacgtggctatctgtcttttttcacagtttctttattatctttggcatccttctttggaatttaaatattgccagcagcattcattttacaagaaaatttatcacgcctaagcttcttcgcttcattacgttaggtgccggttttttactttttttatttggctgccaattcggttttaaatgtatatccttacttataggctgagcttttagcgatgagttcaataagagtgtcatttactttctcacgttcatcataaaaaagaccgtgtccactattttcaaatggaagaagtgtagaaaatgaaatatgacgattcataacttttgcaagatcaaatggacaaatttgatctttttttccgtgtaatatatatgtctcagcgaaaatttgactcaaatcttcccgtaagtcttcgtctcgtaaagacaccgcagttttaatcgttccatgaccggatgcctctaaacctaaatcttgaaaccatcctctaaaagctgagctggtaggctgattaaaaaactttttcccaaactcttcaagcatgttaggacgatctctatacgtattttgaataattgtatttacttcttcagaaggaagtccatatggaaaatcagttttttgaataaagcttggagccgctgctcctaataaaattaacttcttcacgccatatcctaaatgtctgctcatataccgaatggcaatggctccccccatagaaaagcctacgagcgtataatttttcagccccagtctttctactaacattcgaatatcatctgctaattgattataagaatagccggtgaaaggcgcatctgattttccgaatccgcgaagatcaggagcgatacatcgaataccgcgggccggcaacgttgtaaattggtattcgtacattttagcgttaacaggccacccgtgaaggaaaagaacgggttccccttttccaatatctcgaacaaaaagtttagtcttaggagttacgtgaataaaatagttcatctataacacctcctagatgttcttttatatatatgtttaggacaattggaacattcaaaagttctttagaagcttgtgtaggagatgtgtgatgtttatttgggatagggagtagggaaattttttcatattgtttatttagaacatagtttaatttaaaaatattaaacaaaaaaagtagtaaagctttaaaaactttactactttttttgttatttttcttccagccacacatcaactaaattgccagcttcgctttggtccaatacgaatgaaccgttgctgtatcggtcgctagctcgcattgtagacggatcaacctgctcgatttgacctttagatgattccactatcatgtaatgttctttagagattgcttttacttttgcaatttgatgcggattagattttagttctcggaccatcactagccctcgttttgctcgtgctgattcttcaaactcagtaatttttgtctttttcacagctcctcgctgcgtggcgataaataattcagttgatagagcttcatcttcatcgaagatagcgccgcttacgacataatcatcgtcttttaagttaattcctttcacaccagaagcacgagttcctacaatattgatttcttcttcccggaaacggagtccgtagccagagcgagtggcaataaacacttgttttttaccatccgtttgatatacatcgactacttcatcatcgccttttaaattaacggcgacaagagctttggagtagcgctgtgctttatattgaagtaattctgattttttgaccataccgtttttcgtaaagaaaagcagatactgattttctttaaattcttttaccggtatcgcccgtacaatttgctcttctttatcaattggaacaatgttcatgatatgctgccccatgtctttccacctgatatccggaagttcgtgcactggcatatataaataattccctttgtttgtgaagattagcagcgtttcggttgtattaatttcatacttcgctaaaattcggtccgtatctttcataccgaagtcttgcccgttagacgcggcgtaagaacgaagacttgttcgttttacgtatccgtcttttgtgactgtcaccatcacttcttcagatggaaccatcacttctagattaatcttaatttcttcgatttccgcttcaatttttgagcggcgttctgtactgtattgcttttttacacggcgtaattcttttttgattacattaaaaagttttttctcgctatgtaagatttcttctaactcgttaattttagcacctagctcttcagcttccgcttgtagagctgtgatgtccgtgtttgtcaaacggtataattgaagcgatacaatcgcctctgcttgaggttctgtaaattcatatttggcaattaaattatttttagcgtcgcgcttatctttagaagctctaatcgtcgcaataacttcatctaaaatcgacagtgccttaatcaatcccgctacaatatgttcacgttcacgtgctttttgcagctcatatttagaacgatttgttaccacttctttttgatgatcaatataagcatcaagaatgttggccaaactcataagctttggtcgctttttagcaatagcaaccatgttaaaattataaggtacttgcagatccgtatttttataaagatagtgaagtactccttgagcatttgcatctttttttagttctactacgatgcgcaaaccggtacgatccgtttcatcgcgaacttcagcaatgccttccacttttttatctaaacgaagctcatccattttcttaacaaggttggctttgtttacttcaaacggaatttccgtaatgacaatttgctgttttccgccgcgaatggactccacttccgtttttccgcgaataataattttccctttacctgtctcgtaggctttcttgatcccgtctaccccttgaatgattcctcccgtaggaaaatcaggaccttgaatagccgtcatcaactcttcaattgtacacgttggtttatcaattcgcatgatcgttgcgtcaattacttcacctaaatgatgaggaggaagttctgtagcataaccagccgaaatacccgtggatccattcactagcaagttaggaaacatagccggtaacacagtaggttcgctgcttgtatcatcgaagttagacacaaactcaaccgtttgtttgtcaatatctcgtagaagttctgcagcaatcgatgaaaggcgagcttctgtataacgcattgctgctgggggatctccatcaatacttccgttgtttccatgcatttcgattaatacatttctaactttccattcttgactcattcgaaccatagcctcatatacagatgaatcaccatgagggtgatagttaccaattacgttccctacagttttggctgacttgcgaaagcctttttctgctgtatttccatctacgtgcattgcatataaaatacggcgctgaacgggttttaacccgtctcttacatccggcagtgcacgctcttgaataatatatttactgtatcgaccaaaacggtcgcctagtacatcctcaagaggtaaatctaaaaagcgttctgtttgtgtcattgtacgtcctcctctgcgaccgttaatacattttcattatctaaaatatttggatcttcttctaatccaaacgctacgttgctttcaatccattttctgcgaggttctactttatcgcccatcaaagtggtcacacgacgatcagcgcgagcagcatcatcaatacgaacacgaatcagcgtacgcgtctctgggttcattgttgtttcccaaagctgatctgcgttcatttcaccgagacctttatagcgttgaatcatataccctcttcctaccttatcgatagcaccttgcaattcttcgtcactccatgaatattcaaccacttcttttttacctgaccctttacttactttgtagagcggtggaagagcaataaatacttttcctgcttccacaagcggtttcatatagcggtagaaaaacgttagaagaagcacttgaatatgagcaccatccgtatccgcatcggtcatgatgactattttatcgtagttaatatcatcaattgtaaaatctgctcctactcctccgcctatcgcgtggatgatcgtactaatttcttcgtttttaaaaatatcttgaagcttggctttttcggtattgataaccttccctcgcagtggcagcacagcttgaaagcggcgatcccttccttgttttgctgaacctccagcggaatccccttcgactaagtacagttcgtttcgctgaggatttcttgattgcgcaggcgttaacttcccgcttagaacggtttcttgacgctttcgtttcttcccgtttcttgcgtcttctctcgcctttcgtgccgcttcacgcgcttgagcagctttgattgctttttttacaagaagagagcttacgtccggattttcttctaggaaataggcaagcttttcagaaataactgcatctacggacgaacgagcttcacttgtacctaactttccttttgtttgaccttcaaactgaagcaactcttcaggtattctaacggaaacgatggctcccaatccttctcgtatatccgttccttctaagtttttatctttttcttttagcaggcttactttacgggcgtattcattaaatgcacgcgtcatagcgctttttgcaccggactcatgcgttccaccatctttggtacgaacattattaacaaatgataaaatggtttcagaataaccatcgttaaattgaaaggcaaattcaacttcaatattatgatgaattccttcaaaaaagacgactggatgaagtgaatctttttcttcatttaaatatgaaacgaaggcttgaatacctgtttcataatgaaagatatcgtgacgatcatgtcttttatcgattaactctattttgaatccttttaacagaaaagccgattcgcggagccgttcacaaagcgtatcataattatacacagttgttgaaaaaatcgtggcatccggtttgaaatgaatcgttgttcccgtttttttcgtttttcctattttttctagcgtcgtaactggctttcctccattttcaaaacgctgttcataaataaatccatctctatgaatggttacagtcaaccattcagacagcgcatttacaacagatgcacccactccgtgtaagcctccgcttgttttatatccaccctgtccgaatttacctcctgcatgcaagatggttaaaataacttcaggcgttggttttcctagtttatgcatgcccgttggcatacctcgacctttatcttgtacagaaattgaattatctttgtgaatggttacaataatttcttctccgtagcctgctagagcttcatcgacagagttgtcgacgatttcatatactaaatgatgcagacctcgtgtatccgtacttccaatatacataccaggacgtttacgaacggcatctaatccttctagtacttgaattgcatcttcattataattaaattgttgtttccgagccattcatactacccctttcatcacaacgaacattactacattatgtatgaaacacaaacgtttgcgcttcgtgtctaagaataaatgatcatgtatcctatcttttaattttatagtgttcgcatcaacagaacgtatgtttctatttttgcgtacttacaagattttagcacaaatttccgtattataaaagcaatatcttgtgtattcatggattataagcattataaagctagctgtctaacgtctattgtagcggaaacgctcttactatttcaacgcatggtgaaacccatgcaagcagtgtgcatgggttggttgttctgcttatagatcttactttgttaaagcatgctcaacttttatacaacgatccataactacagtatacccttttttagcgagcaggtcatatgcttcttcattaattaaaccagattgtgcccaaaatacgtctgcgtctacttttaaaaactcttctgcaacttcaagcaaatgctcagagcgacgaaatacattaacgatatcaatatgcccttcaatttcttttaatgaagatacggcttttacgccgagcgctgagttgattgtcgggttcaccggaataatctcgtaaccttgctgctgcatggcttctgaaaccatataagacgttcgatgagggttatctgataaacctactacagcaatgcgcttgcttttttttaatattttaccaagctcttgacgggaaggaattttaatggacatgtctattacctctcttagctatataatatgtactgaacaacattcgtgatttacagttgatttcctgcatatagtacccgttttctctatttttgtaaacgtcttctttttttaaaataattgtctctcacccaaaactagctatgtttttttaagtatctcatggtaaaatagaaacgatatagaaataaaggagctttcaaacatgaattatttattacctattcttgcctatatcttgggctctattccttttggactagttgttggaaaactaggatacggcatcgatatacgagagcatggaagcggcaatttaggcggcaccaactcctttcgtacattgggtgtaaaagccggaattatcgttacgcttggagacattctaaaaggaaccctagcagcttctttaccgcttttatttgatacgaatcaaaacattctcttcattggtttatttgctgtcattggtcatatttttcctgttttcgcgaaatttaaaggcgggaaagctgttgccacatccgccggagtgattttatgttatgaacctcttttatttgctttcgtactattatgtttttttatctgcttatacataacgaaatatgtatcactgtcatcaatgattaccggggtattaacctttatctacacgctatttaagcaagactacatgcttattatgattattggtttaattgtagcctttgtcatttacagacaccgcgcaaacattacgcgaattcttaacaaaacagaaccgaaagtcacatttttgtcaggtaaaaagaaataagaggatcttcctcttatttctttttttataaccactttgtaagcgaatacatttcttatttattagttatactgatactaaaataaggaggtgaatgatgtgaagaaaaaatgccctatttgcaaacgaaataagaaaatggattcacagctagaaggaagccgctactgcgttcactgctgggaaaccattggaaaacaatatgatttcaaatgaaagaatgaaacgatttaatatagaaatgaagccttcacctctatattaaatcgttttattttatctcattccttcctagctggattcgtatatattggtaatttatctacctttctactataataaatgtatccgcagtattggaaggagcataattaatgaaattaacagtaacagaagcagcagctacgtggtacaaagacgaaatgatgctagaaggaaacgaaacaattcgcttttttgttcgctacggcggatgcagcaacgttcaaaaaggtttttctttaggtgtaaacacagattctcctaaaaacgttggcgttgaaacaaaagttgacggtttaacattcttcgtagaagatgaagacctttggtactttgatggtcatgatttgaccgtaaattataatgaagaaacaaaagaacctgactttcattatgaagcgtaagaaaaaagcatcgatttatcgatgctttttattcttacgcttaaccctgctttttggcatcttcataggcttcatgccattccggataattacggcgaattgaaataggcttaaagttttcttttttcacacatacgtgtgacgatgttcctgttaacgcaagttcttcatttgaattaaaaatttcgtagccgtacacaacgcgtagcccgtcatagctctcaacccaagtatgtactacagctgtctcgccataatgaagcggctttttatatgaagcctgtatatcaataactggcgacagcacaccgtctctttccatttgtgcatagctaaaacctaaatcactaataaactgcgttcgacctatttccatccatactaaatagttagcatgatacacaacgcccatctgatcagtttctgcatagcgcacttcgatttctttcgttgatactaacatgattttacctcctcttgccctgttcctgttttatcttaccatataaggagaatatactcctactagtttggttgtaactcaatatgttgtaagactaagcgcattttgaatgcggtatatcagtgtttccagccgcgtcatcttattttcatatcttttataaggaagtgtataattgtagtctttatttgtccataaacggtaaaaataagcgtttagttcagtcatcaccttttcgttggaaagtcccgatattttaatatccgtttctaaattcaagtcatctaaatttcgttttgtaaaatttgctgctcctgtaataatagttgcattttttttgtttcgaataaataaagttttagaatgatactgttctttccctgtatgataccagcgaattttaatctcccctttggatttctttacaagttctgctgctactggacggttaggcagtccgaacttttttcttccaaacgcattttcattaggatctaaaattaatcgtacgtttgctccttgtttagaagctttcaaaagcgcctttattacgtctcgatctccaaggtaaaacatgccgagccatacatcgtcgccttttttagcatgacgtaaatcatgtaatacatgcttatagattttgccttctgttaacagctgaacatagaggtctcccttttctttttctttcttcttataccgaggtaactttcctccgcaagaaaaatctgacaccgcttgttcactttttaccacatctccaatgatattcccctttacttcaaaggccatgttagaattataaaaacttgcatcatgaggattggcagaggaaataataacgctttgatctgttgctactacttttctatgattagcttttacatttaacaactttaaataagcacggaccgtcgctttaggcgcattggtaccaaacggatttgttatccatccgtttcctttttcaccaaaccactgaataaaagttctccacactgcagaatacagtggaatggagtctctgagcttagataaattggtttgcaccactttgattccgtttagccgcagtgaatctaaccactttgaatcatgtgagccgtaggttgtattgatttcatctgtaataaagacgatttcgatattaggatgttttcgtttcttttcaatcagcttacttgcaagcgtatcactaaggtgaggaaacgtttcgccttggttatagtagccgttaaatagaaacatatccataataataaaagcttttgcgtcatcaatcgcattcgtaactgcttgaaaaatatgttgttcagaaacagacgtctgctggtcttgatacgttaggtctgataaaagagatacatcttctactttgtggggcttactttcgtatgaaactcctttaggcaagggcttatgcgtgtgataagagcccacaataatcaagacgacaagtaaactgaccaaaatccttactactttctttttcacgtgctttttcacctacataaacctcttcgctagtttgtattattattgaccttactaaaaaaatatagaaagaaagcagctaaaaccgtttatttttagctgcttattgtcgttgctttatttattaaatcgtaccttcgtaaccattttgacgagcttctgactcatcttttatttcgctgcgcattgcttcgatacttacttcgcgattgtgatttttttgctgaatgcgctgacgttcttcttcattgctgcatgcagcagcttcttctgcttcttcaatgtttttcattgtattttgcaccattgtttgtaatttttcaacgttatcactgcgatcgtctggattcggtttattccatgccattgtatcttcctcctcaaaataactttgttacaattgtagtatgccggatttgttcatctctataagt

SEQ ID NO: 39 - DNA, 38919 bp, Priestia aryabhattai
  source 1..38919: mol_type = genomic DNA
atacagctattatttttggatttcttatcgaagaagcggccagtcgattagacgatcaagagattaaagaaattgcggctaaagagctagaaaatggagaattggtgtttgaagaagcgagttatttttataaacgcttttttatccctgcttcctctgaattaagacaagctcttcgccgagaggtcttatcgcttcatttaacattaaatcaaatcaaaaatgctcatggcaacggatctatgtctaagattgctcatatgcatcaaattattgcagaaactgaaaaatcaacaaacgaacttaacagacttttaaatcttgcgttctatgagggtgaggacgatcagacgtacgcctccttcatgaatattttttcaaataaatcataaaaaaaccgtccttaaggacggtttttcttattgaacacctttcattaaacgctgaatttttggagaaatcattagcacaattacacctaaaataaccgacactccgcccaatgcagcaaaataaacaacttgcgaaatgttttcatagtattgaacaagctgagcattgattgcctgcgccgctgcgcttgttaggaaccataaactcatcgtctgagcagaaaacgctgcaggtgctagttttgttgtagttgataaccctactggtgataaacaaagctctccaactacgactaagaagaagcttagcactagccatagcgggctcgctaacgtttcatttccatgaatgctagccgggataaccatgacaaggaaagaaagccctgcaaataaaagtcctaatgaaaacttctttggtgtagaaggctgtctgtttcccaattttacccaaatcactgcaaaaactggcgcaaatacaataatgaatagcggatttaaagattggaaccagccaactggaattttaaaaccaccatacgttagctgcgtatgatcttttgcatacgttgctaaaattgttgacccctgctcttgaatcgcccagaacattactccagaaataaaaagagggatataagctaatacacgtgaacgctcatcagctgttgtcttgggactcttatacataacaacaaagtaaataataggaataacaatcgctaagatacttacaaataaaatcacaccttcaacggttaaaatgcccgctaaagaagtcagtacaataaagattgcaagtacaactgcaacaagtgcaatagtaccaaatacttttttgcgttcttctggttttaaagggtttggaacttgtctacctgcacgacctagggttttacctcgtgtagccataaatacaattagacctaaaagcattcctactgccgcgattccaaaacctaagtggtagttatatttttcccctactgttgaaacaactagcggtgcgataaatgcgcctgcatttacacccatatagaagatactaaatccagcatctcgacggttatcagtcgggctatacatatcgcctacaacgctcgaaacgtttggttttaataaacctgttccaatgataatcaagaacattgaaataaacagcgctgttacacctgctggcaatgcaagcactaaatgtcccagcataataaatataccgccgtaaaacaccgtattagacgtacctaaaatgcggtctgcaatccaaccgccaataattccagacatataaacaagggaaccataaatagaaaagatcgctaaagcggttccttgttccattcctaatccaccgtttgcaattgtatcgtacatgtacaatacaagtagcgcacgcattccatagtatgaaaaacgttcccagaattctgtaaagaacaaggtaaataaccccttaggatgtccgaagaatcctttttgaggaactgtttcatacactttttctctctctaccgacatattccttaacctctctttcaaccgtaaaccaccatagacaaaactgtcaaaaaattatgatgatataaaaaaatagaaacaagaaaattttattcttataaaatgattctgtcaatatcagaattttacaatgagtgcataaaatacggttttccattataaaattgcacctataaaaagctttaaatcaagatttcttttcttaaaatatctttttgaaaatttttttatacaaaacccttgattacaaagcatctgattatctacttttcatacaaccagataatatttttctttttggaaattttttctctaaattaaaaaagaagctttattattttttcattctgcttccctcaatcgaaaatatactttttcagaataataaaaacctctttaaaaatttctcttttgttatagtagatactcatttttctcctatgtattacctttaatataagtcatcctcatttttttatgtaaaaaaagagataaaaggtttatttttcacctcttttttcactgtacctacaattttacgtattcaccgtttaccatttgtcctttgtgaagaggaaacacaccttcttctttattgtatacaatcgttcctctattaatggtagttaaaataacgctattaaataccgttccttcataaatactgtgcttatgtttgaaaaccattccttcttttgtcactttttcagtttgatccagatcaacgataaccaaatccgcatcggatcccagcaaaatgcttccttttttaggatataaaccgaatcgtttagctggattggttgatacaagctttgaaatgtgagaaagagaaatccctctagtgatggctccttcactaatcattgcttgtaaagagtactgaccgcctgatattccaccccatactttaaataaatcattctgatgagctgtttttaactcaatcgggcaaggagaatgatctgaagaaatcatatctacttcctctgattggatacaagcccataatttttctttttgactcctgctgcgaagaggaggtgcacacttagccgttacgccaatttcttcaaagtcttcctctgtaaaaagtaaataatgcggacatgtttctagcgtaacattcattccattcttctttgcttccgtaataagctgcactgcttcagagctgctaatgtgtacaaagtgaagagggcatcccgtttcttcaccgtactcaagcgcttgctttactgcgtttacttctgctacaaccggtcgcgtttctaaataatctttaatagcagtttgcttttgcttctgtttagcctgttcaagcttttgtattaagtcatttctttcagcatgcagggcaagcactttatttagttttgcaatctctttcattccttcatataatgtgaggtcatctgagaaatcaaattcagaaccggcttctgacataaatgctttaaaacctattacacccgaatgagccattttggctaattcttctttattaccaggaaccaaccctccccatagaccataatctactactgacttttgatcagccagctttttcttttcccacagcgctgcttctgttacggtaggaggaactccgtttaaaggcatatcaaaatatgtagtgcagcctcccgcagccatagatgctgaaccgtagtcaaacccttcccaatggtctcggctcggttcatcaaaatgcacgtgaatatcaatcattccaggcagaacatatttgcctttagcatctacgtatttttttgccggtgtgctaacaccttgcgctatttctgcaatctttccttttttaatccctatatccgcttttactatttcgtcttctaatacgaccgaaccatcccgaataattaaatcgtacatgttatcaaactcccctttatttaactactccatcttcttattaaacgaagcagtctgctattgttctatcatgcactgtttcctttaaaaagtctttatccttgtaaagaaaactgacacatagactggttattacgctagtaaatataactgaattatctgatttttatgctcaccattttgtctaaacttttcttttttatttggtcactttcactaactaaaaacgattgagacataaataaatgaatggacgaacaaaatggataaaggagctagtatagatcgcttgtgacactgctgttgatttctgtacaagcctttcgtttctgctgggtctcacctatttcgcttttcccgcaggagtcttcgccttgcccaccaatcaacagctagaagcaactacatacatgaaatctacgttcaccctaaccataaaaaaaccgaacgagtttgattccccatcaagaatcaaacttgttcggatcttccttcaactaattttgtcacagcctcttttaactctttttcactttttgtgacattggcaaccttactgtaaatgtacttcctttttcttgttcactttctacgtcaatttttcctttatgtgtttctacaatccatttagcaattgctaggccaagcccatgacctcccatttgacgggatcgggatttatcagcacgataaaagcggtcaaagattcgatccttttcttcgggatgaattccaacccctgtatcacgtacttttaatatacattcactcccatgctgaaccacttgaatgtttacacttccatgaggagtcgtatatttaatcgcattatctaacaaaatgtagatcagctgagttagacgctcttgatctccagttaccactaatttttccggcgtatccagctgcaaatcaatatgtttagaaatcgctagggtttcaaccgattccattaccttttgcaccgcgtctgtaatatcaaagggcatcattgctttttctactttattagagtctgagcgtgcaagcgtaagcaaatcactgacgagactcgtcatccgcttcacttcagctttcatattattgattaattttttagaaaaaggatcttctgttacttcctcctgcatttctaaagcattgatagaagaaagcataacgctaagcggcgttcttaactcatgggatgcatccgccacaaactctttttgcttttgaaaagctgtttcaattgggaccatagcccgttttgacattaagcggctgatataaatggctactcctacaaacagtacggtaaggcttaacataataataaggagccactttaacagctgataaagaaatgaaacgtcttttccaatataaagcatccctaaaaattgacctttataaaaaataggttcacccgccatcatcaaatcaatatctattttgccttccccgttttgcccttttactccttcaatgtgttcgaaactaggacgcggggcttttattcgttctttcctcacttcattttcaatagggatccacccgtcaattaaatctaataagttagagcgaagccgctcgctcgcttcgtttcccataataaggtccccttcaggactgattacataataaaaaaattgatcttcaccggctacgacaatgtttttgtactcttcttttgactgttgattcgagctgtttatcgcttgtttaattaagatgctttggacaattcgggactcttgctttagcatgttatttaagttttgctgctgactattggatacaaccacatataccaatgcataaacaataaacacgaataatagcagaaacagcattagtaatgcgctatatcggaatgttaaacgattttgcgtctggctgaataaatcttgctttactttttgttttactttctgtttagctcttgtaaggagtttagctttcaattttgtagcctactccgcgaatgctttgaataagatcttgtttgttaaatttctctagtttttttcgcaaaagtttaaccgtcgcatcaatcgttttaatggaaacatctgattcatatccccatacccggtctaagataatatctcgagaaagaacttgtcctttgtttttcactaaaaaatctaggagttgaaattcacgaggacttaattgaataaactcctcgtcaaactgcacggtttgacttgctctttttaatatcatgctggcaatctctacttcttcttctaaaatcggtgcataattacgacgagacaaagcacgaagccttgcaagcagctcgtcaatttcaaatggcttaataacgtaatcatccgctcccgcatctaagccttgtatacgatcttgaaccgcatcttttgctgttaacataagaatagctccggcgtatccttcttttcttagacgtttacatacatcgattccgtctccattgggcatcatccagtcaagaattaacacatcataatgcgcttcagatgcataatcatatgcatcattcccttccgtcacccattcgacgttatagcctccttttttctttagcatataactaactaattcacctagctgcaaatcatcttctgctagcagtacattcattccgcgtaactccttcctttgatacatgtcgctgcatccttttgtttactttattatacaaaaagaatcagcagaaacaagctgcctctactgatctcttttcattttaaattcccttagctatactcagcacgggcgcaaactgctgtcccgcagtttgcgccttttgtactctttatgaatgcctaacgatttgatttgaatatgaaggatttgatccattaacagtttctgtgacctttacaacacgccgacatatctcagcccgtacacctctgtgcttcaattgttcgacgattttttctaacttactataagacgctgtttgtttcatatccatcccctcatttcgttaaggtattatttatgaatcaagtttgtttgtaatatcatactttttctttagcttttgtaaccatgttggatactctgtttggtatttttgatcaagcagcgtttgcttaatttttgttttgctattttcatatgttgctttttgcgcttcttttttgcctgttactttaataatgtgataaccgtattctgttttaacaggatcacttacttcatttaccttcattgaaaatgctttgttggcaaaagcttcgaccatatcgccttttttgaagtatccaaggtttccgccatctgatttagaagctgtatctgttgaatattcttttgctagcttcgcaaaatcttctcctttatcaagctttgcctttacttctttcgctgtcttttcgtctgctactaagatatgactagctttcacctgtgcttctgtagctagtgaatctttattttgattaaagtacgatttcatttcactatctttaatattaatagtcgactcgaccattttttttgcctcaatattcgtctttaaatcttttttcagctctgacaattttacaccgctagatgctaatgcttgatttaatgcatcttctcccccgtactgacttttaaggttttctaattcagcattaatttctttatcggttactttaatattttgtttagctgcttcttttgaaatgactttttgttcaatcagtgaatcaaggacacttgatcctccttgagcaagaagagcatcgtacagctgatcttttgtgattttttcatcaccaacggtagcaaccacctttgatttattcattgctacggcaccaatagctactgcagcaataatcacaacggctgcaataatcataattattttgtttttagacatcgttaaactccttttccatttctcattacttacctaaacttaaacttttgcgccttggtaacggtttaagctcaattaaaggtcttgcaatagtagatacgtatttactcgacaacaaccacgccactccacaagctccaattagaagaatactgtatccttgtacactttctatccagtctccaaaagaagataggcggatatatttaatcagaaacccatgtagcagatatacataaaaggtttgagcacctcgagatgtaaaggacatcgtttgtgtagggatcaaagctagaaaggaaatcgtcattgctaagctgatgctataaaatagcgtacgaatggtcattccctctaattgatttacacctaaagaggcataggattttgaaccaaataaccactctttctcaaagtccggtgctatatactggatccatagagcaataatcagcaaagtgcctccagctacttttttgcaagaaacagacgtcaactttttaaaatgttcttttttcatataaaaccctgctaagaagaagggaaagaacacaaaggttctagaaaggcttaacgttgtttccagcggttcacataagccaatcataattcctaaaaatgccgcaacggctaaagaatatttgatttttgtaaaaatgaacaacatggcgttccaacaaaataaacttaacaaaaaccatagcgaccaagctggctgaaacactgaaacttcgaatgtggattcatcatacagtttatagtcgtataccgcatagataagttgaaaaataatataaggaagtaatactttcttcgacatcttccacatatatcctttttttcggtatccctttgcaaaatagccgcttattaaaataaacgctggcatatgaaaggtgtaaataaatatgtagagcgttcgtagccactgttcatcattgatgaagggagttaacaaatggccaaacactactaatacaattaagataaactttacgttatcaaaatacgcatcccgcttagccatttgccctcctcctttctttcgcgttctacggatctgtacgacgtgctgctgcgaatatcttttctttacattccttactatacatagtgaaaatgaaaaaacagtgaaaaccttgcttacttctatttttaagtaaggcgcggctaaataagtttgacaaatggctcctctttctctactatatagatacgcaccctatccaattcaatttcgcttgttgcgggacacttaaccagtacggatggatagggtgtttttgtatgcaaaaaaagcagaagacctaggtcttctgctttttattttgctataggctgactttcgttttttctgtttccttttttatttttcaaataataaaacaagtaacaaaaaaggacaaacgggataccgcagtataatgcgatacgctgactctcatcaaaagccagtcctacacaagcagcaaagcataaaacaaacgctaaaataggtacaataggatataaaggagctttgtaaacaagcttcgatacatcattcccttctttaatatagcgtcttctgaacataaagtgagaagctgcaatagccatccatacagctacaaccgcaaatccagaaatagaaactaatactaagtaaacagttgttggtgcaactacgcttgacagcagggagagacatgccactcccatgctgataagcaacgaattaaatggaactcctttagaggttattttccctaaccaagtgctgaccattttttgatcagataatgaccatagcattctcgaacatgcatataatcctgcattagcgtttgataataaagctgttaaaataaccaagttcatgatatctgctgcgtaaggaatacctatttgatcgaataccgtcacaaaaggactttctaacactcctgcttgtttccatgaaatcaacccagatagtacaaacatggcgccaataaaaaagaagaacgtacgccaaatgatatttttaattgcgcgaggtatgttcttttccggatcctctgtttcccccgccgtaataccaattaattctgttcccgaaaaagcaaagctaacagaaaccatcgtaattaatacaggcataagtccatttggaaataaaccgccctctcctgtaaaatgagaaagcatcggcgctttttcatgaccgctaagaggaatgaatccaaacatcgctgctgcgcctaaaataataaatacaataatcgttaatactttaatacttgaaaaccaaaattctgtttcgccgaaaaaacgtacagatgttgcatttaaaccaaataataaaagggcaaacagcgcgctccatatccaaaccgaaacgtcaggaaaccatctttgcataagcaatccagacgctgtaaactccgaaccgacagataccacccaagtcagccagtagagccagccaaccgcaaaaccagttcctggcccgataaacttcgtagcgtatacttgaaatgatcctgacacaggcattgctacgcttagttcccctagacatatcatgactaaatacataattaatccaccgattaaataagcaaggagtgttcccccaggacctgctgcattaattgtgtagcctgaattaagaaacagccccgtaccgataacaccgccaagagaaatcataaataaatgacggcttttcatttttctttgtaactgattcatagatgttgtattctctcccattatgtacctcctttttatagtaaacccatccaaaaacttggtttatttacatattctctatagtctcttctatgcaggagtaggctctatttcttcgatatgtacgaattttgtatattgtatacaatatacacttcttaaatctttttacgattatatcatttttcagattttttacaacaatgaatagtaaaaaatatttcaataattctattttttatattctaactaagattaaatgaagtgatatgatatgattatttttacacctgtacgttctttcacgctatttttatactttttcatcaccatgacatgaagagaaagaacggctgatgcgatatttattttagggggaaacaatgaacaaggggcctatgatttatcattcattaaaagatcatgtatataactacatagcaagtcaaattcaagacggtacactgctgcctaacgacaaaataaatgaagccagtatttgttctcagctgaatgtcagccgaacgcctgtgagagaagcgcttattaaactggcttcagacaatctattagaatacagaccgcgcagagggtttactgtaaaggaaattgacacaccaaaaaaactagaagtatttgaaatcgtcggtgctttagatggtcttgcagctgcactatcgattgatcacttaacggaagaagattttacgaagatggatgagcttattaaaaaaatcgatgtttcgattgaattagaaaattatcaggattatcaaaaatatcaaacgtattttcatcgagtatacttgaaccgatgcggtaatgtgaccttaaaagaacagcttatgtctttacaagacggattcatcagacaaacgtactttagcaatgacaataaagagctatacgccattttacatgtgatgaatgaacatcaccgccatattctaaaacttctgaaacagaaaaaaaaggcggatgttcagctttaccttcaaaatgtccactggaaaatcgaatatccagaaatgatttgatcaaaaagagctcgagacataactaaatcaatccagtcaacagctagaagcaacgaaatacatgaaacctacgtttatcataccaataaaaaaatccgaacgaagttgattctccatcaagaatctcaattcatcgttcggatcttctttcaactaacatactgttgtctcagcctcttttatttcgctatagaagaacgttgtttttcttcggttacgtaccaaatgaatttccctgtatatccgtaaataatcgccaaaataatagagacaaagcttagccacataaacggcagataagcgaatgtagaaatcccaagcgttgtagctagaaatacaccgttgtccgtccacggaaccattcctgaagttaaggttccccctacttctgagttacgggcaagcactagacgctgtattcttaacttgtcataacttttctccataattttcggtgttaaaattaatgaaacatacattgcacaaccaaatatattccctaataacccaacgaaaatagtagaagccgtaacgtttcctgaattgacaagaattttttcgaatttagatagtaggacttctaagacgccgagctcatctaataacccgccaaagcctagtccaaaaataatgacaataatggaaccgaccatgcttaaaattccgccacgatttaacagctcacttaaaaatgtgttgtcagtattaattttaaacccttcataagccgtattaaatgcgctcgccacatccatatgttgaaagacaactgcccatataattcctaataatgagccaatcgcaattgctggaagagaaggtttcttgaatgctaaaaggacaatgacagccaaagccggaatcagcatccacccgctgatatggaatgtatccaacagcgaagattttaatccttctacccgtccagcatcaaaatcttttcctccatacataaaccctgttaccgtaaataatactgccgtaatgaggtaagcaggaatatccaacactaacattgcttttacgtgatcaataacgttcactcgagccattgacgcagataaaatggtactgtcagaaagaggagaaagcttgtctccaaaataagctcctgaaatcacagctcctgctactaaaggaagcggcatgcctaagccttgtccgattcccatcatcgcgattccggctgtaccaaccgttccccaagatgttcctgttgaaatcgaggtaatagagcaaatgataagtgtagcaagtaaaaagaatgttggattaataaactctaatccaaaataaataagagaaggaacaactcctccggcaatccatgttccaattaacgtaccgacagctaataaaattaaaatagcttctaagccgtttgatattcctcttgtaatggccccttgcagatgattatacgtatacccaagtcgtactcctagcgccataacaataaaccatgaaataaataaagcgagctgaataggtaaatcaaaaacagttgcaaatgaaataacaactgctaaaaataaagcaagcacaatcattatttcccacatagatggtaaacgggttgtgttcaaactagctcctcctaaactggtatgtagattctggaatgtggtatcgtttaagagtaaaacatccttattctattctttaattgttcctcttactgcttgaacctatgtacttctttatgcttaaacaataaactgcatctttttaagaacataaaataaggatactcgtgtaaacaataagccatttttcttttatccagtggtcataataccacaagagcgtgctttcttacaagactagttataaagcgctttctggttatttatacattttaatacataaatatatttttatttatttcattcaacgaaaagaggtaagtaacgtgaaagaatatgcaacatttgcgggaggatgcttttggtgcatggtcgctccttttgatcagcttccaggaatcagcagtatctgctcgggctacgctaaagatgaacaaatcacttctgaagctaaacaggaaagcgaatacgtagaagcagtacaaattgtatgggatccttctcatattacgtttgaagaactgcttaacctgtattggcagcaaattgaccctacggattccggcggacagttttcagaccgcggaccgtcatatcgagccattattttttatcacaacgaaaaacaaaaagaagcggcttttgattctaaaaaaaagctagcccaaagcggacgctttaagcatcctatcgtcacacctattttacctttttcttttttttatgaagcagaagagcagcagcaggattattatcgaaaaaacgcatttcactataaattatacaaagaaggctcggggcgaactgattttctgacacagcattggccaaaggaccgctcctatctaaaaaaggtcctaacgcccatgcaatattttgttacgcaggaaaacggaaccgaacctccttttacaaatttatattggaataacaaaaaacaaggaatttacgttgatctcctaacgggagaagcactgtttaaaacgtcagatcaactcccttcccatacagggtggcctgtttttaaacgccctattttatacggaaatataaaaaaggttccgatgcagcatgaaacagcactaaaaagcaaagaaggaaataactatttgggtttactattaaccgaagaaaacagcgaatactatcaagtaaattccgccgctttgcgcttcattccaaaagagaagcttaaagaagaagggtatgaagactttttaattttgttttgatacttatacttttttaaaaggataaaaataagccgtgacttgatttgcatattgcacaattaaatcgcgattgtccgccggacgcaaaaaaggctgagtaatagaatcatctcttatttcacactcccctttttgcagctcccaaggatcatgataaaggtctcctctgtagacatttccttgatgagtggtaaataagcagtagcgctctgtaagccaatgagctaattctccttttctactacgataggacggagaagtacctctatatgtaagctttactcgctctttttgtgagtctctgtgcgttcgaactgactgaaaagaaatatggttctgagttttgttgaatgtcatagcagcgtggtaataaggtaaatgaaaaaactgacgagcaatccatacccctagcggattgcttgcgtctaaactaaaaaaataaacgcctttttcccctttatatgtaacatatgtacgcaaattcagctcatatagccgtgaaaagatgggaactgggggcgttcctttaaatcgaatgtctgtcatcgtaaaaggcacaagtgcaatccatccttgaccatcataggtgtcaggctctaactgactaggcaataaagaagccaaaaatgccggatctacaggccaatgaataaacagtaaatctttccacgtttgtttcattatccaattatttttcacttcctggtccctcctttttctagctgttctttcccattaattcagcggctgccgatttccctgacaaatatgcgctctctaaccgtgagtgatttgtctcgtcttcccttcttaaaaaagcatctcctgccaccagtagcgacggcataattttagcaaagggctgatgaagaacttgttcaacctctgcatagcgccatttctttaactgaatgcttttaatatgatttgcacctatccattcttttatttcattttttatcgcccgcagcaactcatgtttatgttcatcaaaatgtttttctgaccagtctttattcatatatatgctaagaacgggcgtctttgatattcctttttgctcatgattaacgattctttggattgtgctagatggattcgtgatttgaccatgatcaccatacagcatctctgtgtaaagctccacgatagcaaccaagcagggactaaatttcagtgtattaagaattgattggtccgcttgcagcttactattattaagtacctcaataacctgaggcgacggaggtgtaagaatgatatcagtcgcttcaaaaatctcattttcttctgtatacagctgataccttccgttttgaaaatcaatggcttgaacttttcgattcacgtatatgcgtagatcttcagctaaatatttagctagcgcattcatgccattcatactttgataccgagggtgatggtcaccaaaccacttcttaacctttgtatcagctatccatttatttacgtcttgttgaaattcatcggatctcactgtaaaaaattgagctccgtgatctgcttttccatcccctactcttcgggtagccattcgtccccctacacttttacccttatcaagaagaaagacctctattccttctttttgtaattcagccgctgctgtaaggcccgtcattccagcacctactattcctactcgtctcattttttcctccttatttaacgcatttacttacagtataaaaaaagcggaatgattgagctaatttaaactgtctttttcatttaactgcgtttctgcttgtctcaaaaaaatagtctacgattccattcagctgagtatacttgttgtatacaaatatatctttacctgctagcacgtctatagataggaggactgtcacatgatgctctatgatattaagcacaaagtatattacgaagtatttaatacagctcgccctaaaatgaaggacgctcaccaaggacgaagctggggatatgtttataaaaatctcaatggacaacctacaaagttttggattgattttacgcacggacgttttatgtactttcaagttgaagacaagtggtatcgcgtgcaatatttgcagtccaacgataagaaaaaaacagcggatgtctttaaaggcgctctcattgacttgattttagatggaatggatctcaagttagtacgaggaaactttgaaaagagaagactcttagctttataacacatagaaaaacagccgtaaaagcaggactgcttttacggctgtttaattgtacgaggagtaatcaatatttcaacccttctatttttcgcttgcccctctgctgtattgttagatgtcaccggtttgaactctccaaatccttttgcactgaacatgcttggattaagcttatcgttttttaagataactttcataaagttaactgctctcatcacgcttaactcccagttggattcaaaaccagcgttgcgaataggtacgttatcggtgtgaccgctaataataatattacgaggaggatcaatcaccaaaagctctgaaatatcatttgcgatttttgtatcttcactccgaacttgtgctcttcccgaatcaaacaatacattgtctcgaatggaaattaagagaccttcctcggttagcgaagtctgtaattgatttgttaagtttttcttttgaatatacgcattaattttagattgaatttgctgaagctcttcttgatcagcttctcgaatggtttgctccttttgttcgctcgttaacgattgtgaagaagcaggagactgattgggggctgtctccacttcatttgttttttctgtacttttagctgcaggagtatttgaaggctgaaccgcttcttcagattcctgcagagcttgaaattccatcacgcccgttcctccaacgaacgcttcattaaatgcgcgagaaaggttcttaaatttttgcgcatccactgagctcatcgcaaacaatacaatgaataaagcaagtaaaagtgtaagcaaatctgagtaaggaagcagccagctttcgtcaacatggtcctcttcatgctttcgttttctgcgtctactcatttatgcccacttcactttcttgaagaagctttttacgttccgctgttggcaaataagaagccagcttttgctcaattacttttggtgtttctccttctaggagtgaaagcactccttcgatcatcatatactttacctttacttcatgtttcgatttacgctttagtttatttgcaaacggatgccatagtacatacccagtaaaaataccaagaagcgtagcaacaaacgccgcgctgatcgcatgtcctagcgtatctgtatcttccatgttcccaagcgcagcaattaaccctataacagctccaagtacacccagagttggagcatatgtacctgctaaagcgaaaatacttgcacccgtttgatgtctttcttccatagcatcaatttcttcagacaacacgtctcgtatataatccgcactttgaccatcaatagctaaattcaaaccattttttaagaaagggtcatctacatcaataatttgggcttcaagtgatagtaacccttcttttcgaacaacttgtccccattcagaaaacatggatactaaatcaacgggctgcagcattttttgttctttaaacaggacaccaaacagttttgggactcttttgatttcatttgaaggaaatgcaatcactactgctccgacggttccgacaataataattaaaatagcagccggatttcctaacacagatggattaacccctttgaaaaacatacctacaataagagaggctattcctaaaatcagtccaataaaagatgttttatccatatgtaattctcctatccttaacttcctgttctttctttttgtgtattttatcctcatcttttatttcgactatttcatagaatttttaagccttttatgaatcatatttacaattacaacttttctctattataaaaacacttttttcaacttttcatacagaatatctgaaggtccagctataatcgctacaatttgattttccacataaatagcagccgtcatcttattatcaatatcagctaaaattgcaaatccgacgttaatgttcaactttattcacctctgtcacgttcttgtttattcaacatataaaaagaacagtcttaccatttatttttccgtgttttattgacatttgtaaattttatattaagattatgtaaatgagttgacaaaatggaggtgatattatgctactagaaaaatactgtaaagacactgatttaatgattatccagtttacaatcgaactaacaaaagacattcacgctaaaatctccgcacgtactttattttatgaagaacaggtgatacgttatgctgaaaaaagaatacgttctttcttacatcctctttcccttaaacatacgctaaaatttgtctatcaatctgaaatactgcaaaccattcgattcaaattaaaaccaacttttgagcagcagcatgtattgcgctgtatttcatcttaaaaaggagttccctttagcggaaactcctttttgatttgattctacgatatagacgatatgcttttctgataacgtttaaaagcggatacggcaagcggatgtggtatttatcaataaacggataaaaggtgtaataagcttttacaaggtctgtccattttttatcaataccttctttataaaagtcagagatatccaccacataccctcttccatctttcatcatgacatttttaccatgcacatcatacgggtttaaaccttggcttcttgcatagtccaaagctgtgttcacatcttttatgacttgttctggaatctttatgccccgctggacggcatcatacaaggtaacgcctgtaagtctttttaaaatcaagtacgtctttccctcatgaaaaagttgagaataagctgggtgaacgcccagctttctatacacttgcgcttctttttttacaccataaatttctcttccgtatactttcacgacaaattcaggataattttcgtgcgtaaacacaccggcatagtttcctttaccaataagtacccactcttttgttttgttcgtaacttcaactggatcatagtcactttcactttgaatcgtaacttgcgttagtaatgatgtttcaactagcgacaccaactgcttaattgttttatccatagtcccctctaaaaatccttcagtaatctctatcaaatattaccctatgataaatctcaatgcaggatgtgtcaataaattgacagcctgatataaagaggaaaagtattcccgttcattcaagactgcgtgtgaactttgtgaacattcacattcagttcttctttcatattcagcattacgcccgccatcggagcaatagattcgggcttagtcagctgaaataaaaagcgctttgtcatttctgacagaaaaatggttactatttcagtgatatagtccatgcccctttccgcttgatgctcaatcccaagcggcatatacatatagcttgggacatcaatggaccctcctttctcaaaacggtcaggtaaaaattcacttggctctaaaaaataatcttcatggcgatgcatcatataagggctaattaacataatctccccttttttaatactgtagccatctatttgtatatcttcacgtgcttgacggccaaatagccaaagaggcggatataacctcatgctttcagcaattattttgcgcatatagatcagatttttggttgaaagtgattcgccgctagcataggcttgaatttctttatgcagctgaaggtgctccctagtattttgagacagtaaatgaatagaccagctgcatacgtgcgtaatcatttcatacatcgaaaggaatatagaatttagctgttcgtatatttctctttcatcgctgtcttctccgtaagaattcaatatatactgcagtaaatcatttccttcggttttgttttgaacacgcatttgaacgcgttcaaaaaggagttgttctagctgctcatctgagtcaggctggtgcaaaggtagacgaatataaattttgcctaacttttctttttttctcataagcgcttgaacatagtgaattttatctttatcctgaatcgaaatgccaaataccagttgaaggagtacagctacgactatctgtcttatgtcttttactatcgttcgaagctgcccttcttcccacttttccgtatgcttttcaattatttttgcgattgcttctttattataagttagatgttgttttagttgtgagggttgaatggggctcagatataatgcttcatctgtccataacatttcttcacctagcagcgttttaaacatatgcgttagtttaattttttgaaacgccttgctgtttgtaatgactacatctttaataagttgagggtctctcgttacataaaagcgtttgtgcgcaactctaaatgttgcaatttctccatactgagtcaagttttccaaaaaacccagggggttttctctaaacttttgcaggtgaccggtaagcttatacgacgaggggccctgtataaccggcaatgttatcactccttttctaaaaatgcgggacttaaacaaataaaagagtagtccactaaagactactctttttcacacaaagatatgctattgattttcacaaaaaatcttacttattattccatattgatccatacgcttttcacttcagtgtagttatcaagcgcatagcttcccatttcacgaccaattcccgactgtttatagcctccaaacgggcttgctgcatcaaatacgttgtaacagttcacccaaactgtacctgctttaataccatgagcaatatagtgtgctttctttaaatcctgtgtccagacgcccgctgctagaccatatgctgtatcatttgctttggcaatcaaatcatcaagatcgtcaaacggcatagcagctacaaccggaccgaagatttcttcacgagcaatcgtcatcgaatgatcgacatctgcaaagatagtcggttctacgaagtagccttgatcaaatggaatgtttcctcctgcgagtacttccgctccttcttcaattcctttatcaatataggttttcactcgtttttgctgctgcgcagatacaagcggacccattgttgtctcatctgctaatccatttccttgtttaatagatttcgtttgagaaactaaatcggctacgacattatcatataagcttttttggacatacagacgacttccagcacaacatacttgtccttgattaaacataatacctgaaagcgcaccaggaactgcttttgttaagtctgcatccgggaggataatgtttggtgatttacctccaagctctaacgtcacacgctttaaggagtcgctagcttgcttcataattgcttttccgacagcagtggatcccgtaaaagcaattttatcgacaagatcatgatgaacgagcggttcacctgctgttttcccgtagcctggcacaatgtttaatacgccttttgggaaccctgcttcatcggctagccgagctaagtaaagtgcagaaagaggcgtttgctctgctggcttgagcacaattgtacatccagttgccaaagcggctccgagcttccaagcggccattaaaagcgggaagttccacggaataatttggccaacaactcctactggttcatatcttgtatagttaaaatacgctccttgcacaggaatagtttgtccaaccattttagttgaccatccagcaaagtagcggaaatgttcgattgctaatggaatgtctgcatttgatgtttcacgaattggttttccgttatcaagcgtttcaagctgcgcaagttccaattgatgtgtttccattaaatcagctaatttataaataagtcggcttctttcagctgctgacatctttgtccaaggtccatgatcaaaggcttctctagccgctctgacggcacgatcaatatcctctggatttgcttcagctacatctgccaacttttcacccgttgctggatttactgtttcaaatgtttttcctgaaatagagtctacccactcgccgttaatgtatagctgtttaactccttttaaaaactccactactttcggactcatttcaacttttttcgctccaagattttgcatcaaatacatacctccccacgaattttgaaaacgctaacaatgaatattttaccatgttatctagtaaaatcaacaattttgcatacaatattctgaatttttctacatgcattctagctatctaaaacttatcttactagtacaaatgtcgaaagaggcgaaacgtttactgtatttcctttcaccgtacgaagcgtttttgttcctgcctgctcgccgtcaacaagtaatctccacgttctgttagaaggcagatgaaccgtttgagcttgtttatttgcattatgaatcaccattatttcgtttgctttatctttattggctttagcatttaacgtataacctactacgtttgctggtgcatcaacaaagcgtaaattttgatgaatagcctgtgcacttgtcattctaaatgaggaatattgctttcgaagcgcaataagtcccttcatgtaatctacttcttggctaaaagctgctcggcgtttccaatctagctgattgacagaatcgggtgactgatagctattatgatctccgccttttgttctcataaactcttgacctgcatgtataaagttcattccttgagatgttaaaataatagaagaagcaagcttatgcatctgctttctagtttgctcagtgtcagcaggggtcgtcagctgaagcttatcccataacgtatggttatcgtgtgcttctacatacgtcacaacttgatctggatcttcatacgtggcagttgaacgatcataatctattccagctgctatactttgctgtatgagcttttcttgaccctgttttccattaacaaatccgttgtcacgatcaaaaaacacgctgcctttaagaccatctcgcataccgtcattaaagtgagcgatgcgcttcatatcctgagcgtttttctgattagcttttagcttagcatcaagctcggttcctagatcccagccctctcctaagacgataatagaaggatcaattttatctaacttctttctcacttcattcattgtctttgtatcgtgaatccccattaaatcaaatcgaaacccgtcaatgtggtactcttttgcccaatacgcaacagaatctacaataaacttccgaaccatcttccgttcagacgccgtgtcgtttccaacacctgttccgttggatagagttccatcttctttataacggaagtagtagcctggaactaatttatcaaagctatgctcactcactgcatacacatgattataaacaacgtccattaccatacgaagctgcttgtcatgaagcgtttgaatcatttgtttaagctcaataattctcgtcttaggattatatgggtttgttgaataggaaccttctgggacgttgtaattttttggatcatacccccagttaaactgcggctcgtttaatttcgtttcatccaccgtatgataatcgtaaataggcaggaactgaacgtgcgtcacacctaaatctttaatatgactgagtcctgtttttactccatttggtcctttcgtattccactccgctacgcctaaatattttcctttatttttgataccgctctctttttgagacgataaatctcgtacgtgcagttcatagataatcgcatcttctggatttttaaatttcggcttatttgtactccactttctcggatttgtcttagccaaatctacgacaactccgcgatctccattcaccgttgttgctcgtacatatggatcaaccgcttcgctccagctgttcccaatttttactttgtacgtataaattagttcatcttgatttccttttaactccgctttccacgttcctttttcacttttggtcatagaaatttcttttacagctttggagttccatgacgaataagtcactagcttggctgcacttgcggttggagcccatacgcaaaaatttgtttgtttcttagaatacgtgtttcctaaatcgtttccgctatatgcatacttttcgtcaaattctttcgtgcgaacgatatttccattgactacatcagctgagccgtagcctttttgcttaactctatacgtttttgtaacatccaaaggctgttttgttatgattttaactttagtagtagcagcgtctcctccctctttataaggtatcactttctcaatttgagctccgtcaatttcaatgtctcctacactcttagaagaatcaaacggcacgtttgtttctaaggtgatttgattaaatgtgtccatagtcgctttcgtgattttccgagtgatatctactccagctctatcataataaattcgattttgtccttgaacaatccatacttctacattcccatctttaccaaccttggtaataaagcggtctcctccgtctttattttcccaatcgctgtcactagtagaatggcgtacaataaaaccaattttgtcaaataaattaccgcttccactattaatgacgtaagtcgctctcttcccaaaattcgtgtcttccgtaaattcgatttgcctgccttctttttcatcacctggccatgtccaaatgttccacccgctgtaatctccgtcgtaccgatgataatttaaggtaacgtttactttatcaaacttcggtaaatctctgtattcaccgtcaggaggagacgtatatgtatgttcatctccacttttcacccatacttctccttcaccgttctccactgaaacgaagcggtctcctccatctttttcccacgactctgttcgaacaataaaacctactttgtcataagtaccgggtaattcaacttccgctacttttccaaattgatcttcccttgtaaatgcgtaaggcttcccttctcctcctacaggaaaaacccataatccccattcctttgtatcatttggagcaggctgatagtgaatcgtgatttttgatgcatctgctacagatgcaaacgattgcataaacgggctaaaaaaagagcttactagtaagagtaaagccgtcagtaccattgcatatttaatccaactacgtttcaattaaaaccctcctgtaaaatagagtacgtacacatttttcactataaccttttttgaaagcgttatcataagcattttttcctattttatgtgaatgaagaaaaaaaatccatagttaacaatgttaactacggacgccgtgtttcttttacacttctgctgtttcaggagagattgtttgatcattgtatacgcttgtatccagttcttttgttagtttactagttacgactccggctgtcatgcttccacttacattaagcgctgtacgtcccatatcaatcaatggttctactgaaattaataagcctgctagcgctacgggcaaattcatagaagataatacaagtaaagctgcaaatgtcgctcctccgccaacacctgctacgccaaacgaactaattgctacaatggcaatcaacgtgaaaataaatgaaggcgttaagggatcaatacctaccgttggtgcaatcataacggctaacatagctggatatattccagcgcatccgttttgaccaattgtaagaccaaatgaacctgcaaaattcgcaattccttctggaacccctaactgtcttgtttgtgtattaacattcaaaggtaatgctccagcacttgtacgggaagtaaaggcaaaagccaatacaggaaatactttcttaacatatgtgatcggatttacaccgatgattgttagaataactaagtgaacaataaacatagctgccaatgcgacataggatgctacaacaaattttccaagtttaacaattgcatcaatatcactcgttgctactgttttggtcataattgcgagtaccccataaggagttaaccgaagaattagcgtcactacacgcattacaattgcataaaacgtatcaataatttttgaaaataacgccgcttcctcagcctttttacgcttcacgcctaaatacgcaattccaacaaatgccgcaaagatgacaaccccaatcgtggaagttgaacgtgcgcctgttaaatcaagaaacgggttagcaggtaataattctactacttgctgcgggattgtttttgcttctaaactagataaattgttttctaagtcctctccgcgctgaagttccgcttccccttttgtgatttggacagattctaaattaaagctcgttgttgtaaaaataccaattgcagctgctaccgctgttgtgacaagcaaaatcccaataattaaactactaatctttccaatattgctcgtcaattttaagcgagtgaatgccgctacaatcgatacaaatacgagcggcataacaatcatttgaagaaacttaacatatccgcttcctacaatgctaaaccaatcggcggtcgttatcgttacttcatgagtcggaccatacacccactgaagagcaaagccaaaaataatccctagtccaagtgccgtaaacacacgctttgaaaatgatacatgttttttctgcatcataaacagccccgcaagcaatgcgagcataataaggatgtttagaatgactaataagttattcatagatgttccccctgtaattttttccataaattatgtctctattacttataatataacaataccaataagtcaactaggttttatgttttttcttgaagacagtttttttgaataattttgacaaaacaaaaaagctaaggattttccttagctttctattttacgcttgtatgtacttcagtggtctttctttcatcacaccggatgtactacaattcatatataggattacatttcatataattcatttagccattttacaaacaaatgtctcggtaattctagttcgtgaagctcgacatattgaatatcagatagcgtcgtccctctagccatataaaagtaccactgccagccaatatctttagcaatggcataggatttagctagatcttgcctattatctgtctgctgcatatcattcatccactgcgtttcatccgcttcatactcataataatggagagtatatttatcacaccaatacgtaaggtcctgatgggaaaacggattttctccgtcacatacttgaagcaatagcattcttaaattttccggtgtatacggtaatataattttttgatctgcacgtctcattttgctaccttcctgacatgttcgtttcttttattacatcatgtacggctgcgtttagcaataagaaatggatgacgttttcattacttttcgtttacaacatttcatttgcttgcaaaaaccaccgtatcttcgacatacagaggcagtcggattttaacaatcgtccctttgttctgttcactctcaatctgcagggtaccttgatgatcatgaataattttggagctgattgttagtccaagccccattcctttttcttttaaagtaaaaaacggttctcctatatgttctagacggtctttagaaattcctactccttcatctctaacttctataaaaatatggttatcctgcgctgttttgattgtaatgtaaatatttccaggcctattcatggcttcaattgcgtttttaaaaacattaagtaatacttgaataaggtgatttttatttccatacacactagcgttatttgtttgttcatcgtataagaagtcaatgtttttcaataaagcttcatgggaagttaaactcattacatacttaaccgcttctgtaagagaaaacacgcgaaaatgttcactttcaggttttgacaaaaggagcatttcactgacaataccattaattcgttccagctcatcaagcatgatgttagcataccctattgcggatcggtctgtttctttcatgagctgaacaaaccctttaatactcgtaagcggatttctaatttcatgagcaattccagcagctaattcgcctactacagaaagcttttccttttttatcagaagcgcttctgcaagcttttgctgagtgatatctcgtccaatggtgataagagcttttcttgagccatcatcaaaaaacacagggactttaataacatcaaatgttttgacctcgccgtttggtatttcaaacgcttcttccgtacgtaccttttccttttttctccaagcttcttcatccgatgaaatacagtgtaagaaagcggcttgaaagaaaggcacaagctccccaagttctgcatcggttttacccctgtaatcaataccctttaaatgataaagttctcttccaaaatcattcaccgccacccatttgccagctccatctttaaaacaaataaaatccggcattgaatttattaatgtagcaagctgatactgttcatcagacacctgggtatgaaccgaacgcttatgaagtaaataaaacgtgccagccgttacgcccactagtaaactatcttttatcaaactgctaagagcatatgctcctttaaaaaatgccattgtttgaaagacgatgtacacccctacaagcagaagacccgctaccgccgctgcttttcgtacacgctccctattttttatcaatatttcccaccagcctttgttttttacgtgaatactctctatgtctcatcaattaagttctgaatattcttcttacttttaaactagtttaccttatttttttattcttatctaataccttttttttattacttttgactcagtttcttttatcctctttatttgtttccgcattttcattttatttgaattattttctctatcaaaataggaatttagatacggaatatactggaacatttaggtaataatactcttttttgtattttcttaatattgtaaattctagtagtaccaactacatcgataaatttagggggattttaatgaaaaaaaccgtgatttctttggctgtagcaacaagtttgactttatcttttacaagtgtacaagcttctacttctgcaaatgcttctcaccatcaaagttctgaacaaaaagtattaaaaaaaatcaatactgagaaaatttttcaagacattgcgtatctctcaaaaaaacctcgtgtggcaggaactgaagctgaacgcgaagctgctacatttgttcaaaagcgtttgtctaaactaggctatgagagcacagtagagccttttacctttaccggttacacaccagcagctagtttttcactaagcgtaaacggtaccaggtactctccaacaacttttacttatagcaccaatggaaatgtcaccgctgaaattgtagatggagggctgggtacaaaagataatttagcaaacaaagatgtcgcaggtaaaattgtattagttcagcgaggcactattacttttggtgaaaaagtattaaatgctgctgaaaaaggggctgcagccgtcattatttttaataatacagacggtgagctaaacggaacgcttggcggcgctaataataactacattccgtctcttgctgttaccaaagaagaaggtgaaaagattcttacttctattcaaaaaggcgaaaagccttcaggtacagtaaaaattgaaggagctgtcgtaagtgagcgaacatcttataatgtaaccgctactaaatcttctacttttaagaaaaaaggaacaaatgatattattgtagtaggtgctcatcatgactctgtggccggagcgcctggggcaaacgacgatgcttctggaacagcaatggtgcttgaattagctcgcatatttaaaactcttcctactgatacagaactgcgatttgttacattcggagctgaagaagtaggcttactaggatccgagcattatgttagtgagctatctgaagatgagaaaaatcgtattgttggaatgtttaatttagacatggtaggaagtcgagatgcgggagatttggtgatgaatacagctgatggaacaccaaatcttgtcacagaattagctcaagcttcaagtacaagattaaatggatcacctacgccatttcaagctggcggccgcagtgatcacgttccttttgcagaggcaggaataccggctgctctatttattcacagtccgtctgaaccttggtatcatacgcctgaagatacccttgataaaataagcaaagaaaaacttcaagatgtggctgagatcgttggaacagctatttacgatcgttcccgtcccgaccaacaaggttcttcagttaaaaagaaagcaacatttaaagctcctcacctttatcacgaacaagatgttaaataagaatctatccctgttattcatacatgatcaaaaaaagagatgtttatgcatctctttttttgataagcagatttctcaaggttttaaatccattatgctacaattattatagaggaacctcacttattgcttacataaaaaatttcgaacaaaagaggtgtattttttggattttacggtagaccattcaattcttttattatctatcctccttgtcataggggtacttactgcaaagttctctactcgccttggagtcccttcgctcgtactctttattattgtaggaatggttgttagccactacatctactttgacaatgctcttttaacacaaggattcggaatattagcactcatcattattctttttgatgggggtgtgcagaccaaatggaaagatgttaaacgcgttgttcgcccttccgtttcattagctactttcggagtcctcattacgacagttttaacgggtgtacttgccaaatatattttaggtgttacttggcttgaaggctttttattcggggcaatcgttggctctacagatgctgcagccgtgttttctgtactagggacacagaatatccgccaaaaattaaactccacgctagaagcagaatctggttccaatgatccgatggccatcttcttaaccgtttctattattgaattaattcaacatccggactctcctatcctctcattaatccttaatttcttttggcaaatgggaatcggactgttacttggtttagtacttggaaaagcatccgtttggattattaatcgaattaatttggattcttcaggactttaccctgtgcttacattgtcattggccgccttaacctatggaatttctacatttgtagaagcaagcggtctacttgctgtatatgtaatggcagtggtagtaggaaatgcagatctaacttatcgtcacacaattgtccgctttaacgaaggttttgcatggatgatgcaaattttaatgtttattttactcggccttcttgtgtttcctaatcaactgctagatatcatttggcagggtatactgttatctcttttacttatgtttgtcgctcgtccactcggcgtatttctttcgatgatgtttgctaaatactcatccaaagaaaaactgtttatttcttgggccggtttaaaaggagctgttccaattgtattggctacttatcctatgatggcaggtttggagaacagcacgctcatttttaacgtcgttttctttgttgtcttaacttccgctcttcttcaaggagcaacaatcgctcctttagccaaatttctaaacctttctcaaggtgaaaaagagacggttcctcacagtctcgagcttgtttcgatgggcaaaaccaaaaatgaaatgattgagttgaagctcgtggaacatgcagatatatcaggaaaatcgcttgaagaacttcacctccctgaagacattttagtgactgctgttattcgagatgataaactacttacccctagaggaaatacacaaatttttgcaggtgatacattatatattcttatttcgaagaaaaaacgggataaagtaaaagcatttttccaaaaaaatacgtctgatggggacgaaagagaaggaaaaaccagttaaaaaatttgttaaagcctttactagaaaaacagcacccgattattgaacggggtgctgtttttgctgttgcatcaaataaagagatttataattagggtgatgttttaaaagttctgagaccgttacaaatttatacccctcttcctttaactccggtaaaatttgttttaatgcttcaatggtttgggttcgatctcctccagtatcatgaaacaatacaatatctcctgacctggcatgattaagcacttgacttacaattttacctacgcctggatttctccaatcaaatgtatcttgatgccaagaccaaagaataatggtatactgctgatttttagcagcttttactacccgatcgtcataatagccagtaggtggacgaaacaggtaaggttttattcctgtaatagcttgtatacgttcatccgctttttcaatttcttgttcaattctctctacttcctggccccttactttcaaatggctatatgtatgattagcaagttcatgaccttcgcgaacttctctttgagcaagcttgggaaacgacgttattcgatcgccgactacaaaaaaagttgctttggcaccgtacttttgcaataaatttaaaatggtcggcgtatatttcggatctggtccatcatcaaatgtaagcgcaatcaacttctcatctttcatgggaacttcccacacgatatctccttttttttcataataaaatctgctcttctttgcagcgtccgcctgaataccatagaaattaatggaaataataatgataattgacaagcaccatttcactcaatgacctccttttttatctaggtgtgattcatgcgaattgtcaataaacgctttaataccaactgcaaataatcgttcatcacccaaacacacgcgctgttgacggcgattagctgcagaagttgatttacggtttttcatagtcttctctccattactaattgattgtgtttttagctttaccaaaaagtcaaaaataaatctacaggttctaacatggcgaaaacatttttatatagtaactacacgctgtctagcgttttgaataggagatatatacatgcgaaaattttatttagcttttctgttaataataagcgcaaccatggttatactgccttctgttaaagcagtcagtgaaagcaatgaaaaacatcagcagctcaccgtaagcgaacaaggatattctctttcattgcccaatgaatatacgcttcaaaaagaagaggatggaaaagatattcttttttcaaccaagactccctatacgtggatgcgaattgaagtcctttccgggaaagaaagtacaagcaaatcatatctagatcgttcaaaagaattgtttgatgaccagtttggaaaatcgttaaaaatttcttctacatctctatttattcaacccgttgtatttgcatctacatccgggagtaaaaaagaaacggcaaagctatatgtactaagggaaacaaaggggcaccctcctttaaaaatcacgatggttacagctaaaaattctaatgatgaaaaaaagttaatttcaattgttaactcagtaaaaacgcacgaatgaaaatagataaggaagccagctatgaaaaaaaagatatttcttgtttggtttatatgtttgatgagtggctgctcaactgcttttcgtgaagagcttattaacacacaggaagaaattccaaaagaacgcttgccacagcaagaattcacctacccttacaaaggaagcagtagaacagatgtgggttatcttaaaagaagcatcaatcaaaactatacgctttacgtactagaaggatacgagtttacagaagaagagccccgaaaagatgtcatttacaacaaaaaaaatgatgctttgtggatgcggattgaagtgtttccctcaaataaaagtgtagaggagctcaataaagaaacaaaagaaattttaaaagctggcttttcggaagtggcttcccttgatacgcacctcattcaccataacttagagatagaagctgcgtacaaagcatcagatgataaaagtaacgcatacggttttctctttcgaaagcaaaatcaacaccccactttccggttaacgatctttgctcctaaatctgaaaaagatttaactccgtttttagaaatggcgagaacgcttcaaaatgcataaaacagagaaaaagccggtttacaaagtgtgtaaaccgactttttctttatttcatatctaatagtttagtttttaaatctttttccatttgatacagctctgattctgcctcggtgcgcttcgtacgtccttcttcttgtatctttagcacttcttctaacgtggtaatcaaatcggactgcgtttttttcaatgtttcgatatcgacaatccccgcctcgttttcacgagctacttcaatggtattctgcttgagcagctctgaatttttagtaagcaagtcgtttgttgtcttagatacttgcttttgggcttccattgctttcttttggcgtaataaagtggttgcgattactacttgatttttccaaagtggaatagctgttaaaatagagctttggattttttcaacaagggtctgattgacttcttgaattaatcgaatctgcggcgcactttgaatggcaatttgacggctcagttttaaatcatgcactcgtttttctagcctattgataaattgatttaaatcattgacctcctgagccatcaagtagtcatttttttgagatgctgtttgctgaagctggggcagcgtttcattctgcagcgccactaacttgtattctgccgctgcaatgtagacgttaagcgcctcgtaaaactgtttatttttatcatataagctatctagcatcgtaatgtctcgatacagcatttgttttgagcgctctaacttatctgcaattttatcaatttcaacattaatgctttgatattttgttaataaattttgaataggcctagagactcctgaaaataatcgaccgatgactccttttttctttgcagaaaaatcatcgggattcacttggcgaatcttactcattaaatctcctataacgtctcctactggtcccgtatctttcgtttgaacatgctgtagtacagattgagaaaactgagatagttctgactgagctgctaccccgtactgtaagatagcctgctgatttttataatcaatttgatttgcgattttctgtgctttttcctgatattccggtgtcaaatcatcgtatgtgtttctttttgcagcgcgagagtccgattgtacctgcggggtaggcgacgcaaaaggatcatcaagcagcgcatctaacgattgattttgattatattctttcatcataaaatcccatcctttgcatttacgttactttgtgcgattagtagctgtcggtatatacggctgctcctcttcaaatgcttgttttagcactttaagctctacatctaacgtcagcttatcttgtgaaagagcattcgttaataaatgctcatacttccctgataacccgcgcagcatgtcttccgcttcatgaagactttcttttacttctatgcttttcgttggttttgataataaaaacatatacctttcaatgacggtaaccgttgattgtaagtagttcgtaaaaaagggctgaacatctttatatcgcgcgggctctttttctaccatttcaatgatgcttttacctactttgtatagtttagaaagttctgtccacatatgaacagaccgaattttaaaacgatagcttccaatggttcttaattgctttcttgcctcttttacttgatgacgaacgtatgcaatttcttctctatacggattttgataatgacgtcgagcactgctcataataaaaaacaggctcatcacgaccattactcctatactaatgccaaaggattgaatcatcgtggtactaaatccaaaatagctgaccggaacggctactgctcctgttacccaaatggcaagaatcttttttataattcgaacgactttcatcgctttcactcctatctcaaatgtgaccgaacttttaaacgtatacatattataccattgtcttcccgtctcttaaaacgattactgttataatttatatacggataaaacctttaaaggtttcataaaacaaaaaaacaggcagctattaaaagctgcctgttttttattgatcttcgcgcttgttgtaatcatacttcgaacgttcaattggtttgaacccttctggtgtatgaaagcggagtaaatctccgtaaacaagtttatctgatagttctagctttttcttaactagttcatcatacttatcatactgtttcgcttccttatctgaaagctgcttgcccgttgcgttgttatacactttctgatcaacttttgttactttaggtgtaacaaagtcaccgttacggaaaggtacaacttgctgatgttcttttgataataagtctgtaccaaagtcaatatagtcttttgtatcaagacctaataaatgcatcactgttggacgaacatctacgtctccgccatacgtatgatttacgccgcctttaaggcctggcgaagtaataaataatggtacgcgctgcagttgagcttgttcaaaatcattgatgtttttacccattactttgcccattgcacgcttatggttttcagaaataccgtagtggtcaccgtacatcacgaccatcgtattgtctgctaaaccagaggcctgtaaatcctcaaagaattgcttgattgattcatctaaataacgagccgtttggaagtattggtcaactgacttatctcccgtattgtgaggtccaatcgtttggtcttccttatctagcggataagggaagtggtttgataacgtaatgaacttcgcgctaaatggctgctttaagccttttaggtacggcattgattctttaaagaatggtttatcttttaaaccatagttcagcgtatcttcgtctgacatattgtaataagctgaatcaaagaatttttctacacccattgatttatacatttcatcacggttccagaacgattttccatttccgtggaacacagatgttgtatagccttgctgatctagaataccagatagcgactgataggtgttatttgcttttgttgtaaatacagaaccttgaggtaagccgaataatgagttctccatcatgaattcagcatctgacgttttaccttgccctgtttgatggaagaagttatcgaaatacattgtgttctgatcttttaatagtgaatttaagaatggcgttacttcttcaccatttaacttataaccaatcataaatgactgaagtgactctaatgaaatatagatgacgtttttgccttttgcttgcccgaaatattctttgttcggctcagcatatgttgcttttgcatagttctctacctcagccacatcactgctatctgccagcgcacgctgtgctgaagatttcgagctctggatgatgtcatagatcgtatagttatacgttcctaaatattttactaaatagttgcggtcaaatgttcttgttaatagttgaggacgatccatttccgctagtgcgatgttggcacttaagaataaaatccctgataaaaatacacctgtcacagtacgtcgactaattgttgctggtaagtcaacttttttccatagtactaaaactaaaagaataaagaaatctgtgaagtataaaatatcagttgggctaattaaagccatggcactgccgcctaattgaccaaagttgtttgactgagtcaatacaggaacagtaataaaatcattaaagaagcgatagtatactacatttgcgtacaggatgaatgaaagtaaaaaattcactccaagcagtgctcgtacttttccgcgccctttaaatagtagtgcaatggcaaaaaagaaaattgccgaaccaattgggtttatgaaaagtaagaacttttgcataaaattatctagccctaagttaaattcgatacgataaacggtatacgttttaatccaaaacaacaaaactgcaattagaaataacggcagctgtttcgaaaaaatatttttaccgtttgtcatgagctgtttcatattcccacctctgtctctattgaaatttaagctcacttttatttttatagtaaatgtaaaaagaaatctcccttacaaaaaatgtaagagagctaatctgttctttcacattttaactcttttaaaaaaattgtcaacaccgctacgtataattttcaccaaacgtgagaaaataactgctttcttattcccagctctatcggctttcaaacacaaatgtatcctgtgcttttttcttctcactatttaatacggacagcttctctttaggtttcactattttatatttatttttttttttgtccactatacatataaatttaacacttgccttagttttccttctactttacaagagaatgcataaaagcacttgtgaatattt

SEQ ID NO: 40 - DNA, 38125 bp, Priestia aryabhattai
  source 1..38125: mol_type = genomic DNA
tttatattaacaagttacctttcaattgtcaacaactttttaatattttatttctgatgaattgcgattgttttccaatcactcatcagcgacattaaataatttaacatctgtactatataaagtcaacactttttgaaaagtttttttcgttttatcaaaaaatcttatttacttccctgctttcaccgaaccttagcaagatctttgaaaggatctgatacttctcttgaatgtttcgttcaagaactacatgattcaaactttgttgaaaagcaacgtttgatctcttcatttcttctttaagtagtgcttctaactctaaacactccacctgattaaataaacaaattttcattgattcacctgctttttgcgacattgattctcaaacatcaaaataaaatcagttgttcttttccttacctgttattaattgtagacaaaacgcatacaaattagacaagtactacttattaaatgaggtgacaaaatgaatatgttttatactattcgagccaaaagaatcaaacaaacaatgcttatcgtagttgctgcgttttttacaagcttttttctctatgctcagcagacgtttcactttcccgtgttttcaacagataacggtccaagagctgtttataaggcggatgataaaaatccggaagttgctcttacatttaacatcagctggggagatgaaagagctattcccattctgaatgaactaaaaagacagcatattgaacatgctactttctttttatccgcttcatgggctgaacgtcacccagatattgtagagcgcattaagaaagaaggtcacgaaattggcacaatgggctatgactatacttcctacacaagcctaaaacctaatgagattagacaggatcttgcaaaatctaagaaagtctttgattctctaggccttaaagatgttcaccttcttcgtcctcctaacgggcaatttaataaagacatcttaaagttaacagcagatataggatatactactgttcactggagcattgattctaaagactggacaaatccaggggttgaaaaaattgtctcgaatgttacaaagcctttagacgggggagatattatattgctgcacgcgtctgactccgctcaacaaacagcaaaggctattccatatatcaagaattcattacaaaataaaaaagtctcaaacgtaagtgtttcaacattaatttcaaattcaaaaacccaagtaaaagatatccgctaagatctatttccactgtatatggaaagcaaaagcagacaaataagctatttgtctgcttttgctattcttgcgtgcgtaagaagtttcggcaaaataagaagttgatacatattacaagttagaagtggaaacaacattaggtaaagccagctttcttcgttcgttcgcagcgctggaaaccattcaattgtcgttacaacaatcataaaaaacagcgctggtacaaaagcctctttattcgtctgttttttctttgcatacgccactaacaaccccaccgctgacaagaaaacgcttaacaaaatatacttgcctattccttctcccggttgttgaaagaacttatatcgaaaataagcaacgtcaaatagtacaaataatacaaatacaatttgaaccgatttccagagtgatgcagatttaaaaattcccaacccaaatcggtgaatagttaaatatgcaaaaaaccccatttggctaattaaactaaagataaaccctacgcctacgagccatgttaaaacagcaacaatttctcctatctttccttgttgaaataagtgaccgtattccccccagcgcaccgcaaacccaacaacagctgtacttatccccccgacagctaacgtggttagaaatagacgaacccaatttcgactattcacttccatctcccccataagttacaaaattgtaccttttcataaattgtaccaatcacgttttgaaaaatctagagctcttttatgaataaaaaaccttgattatctcatattaagcgtaagcatattaggaaaggagctcattactatgaaaaagcgactcatgctcctcatttatataggaatgtgtatgcttttagctacagcctgtgcaccgcaagatgaagaaaacaatggtatggattatgatcaaacaaagaaaatggttgttgatattttaaaaacagatgaaggaaaaaaagcagtcgaagcaattatgaaagacccttctgttagacaagatattttaatggatcaaaatgcgataaaagatacaatttctcaaaccctagtatcagataaaggcgtggaattttggaaaaaagccatggatgatccgaagtttgctgaaagctttgctaaaagtttggaaaaagaaaataagacagtcatcaaacaactaatgaaagatcctgaatatcaaggaatgcttcaagatgttttaaaggatccggctatggaaaaagaagtactgactgttttaaagagtaaagaatatcgcacttatttacaaaagattatgaccgaaacgtttgatagccctctttatcaatctaaaattcaagacattcttttgaaagccgctgaagaaacacaaggtggacaaaaacaaagcagcgacgatggtggttcttcttcctctggatctgattcaggcggagaacagcaacagcagtgattaaatacgcatctcatatgaggtgcgtatttaattatgtcatttatttttattaagaaacctaaatgacttctttatattttttaatacttagtatttttatctgaattgtaaactttaattcttagctttatggtaaaatattagaaattaacacaatcgttttatagcaaaaggagggaattcgatggaatttcgcgttattaaaacgtttcaaaccattgttcgtttaggaagctttcaattagccgctgaatatttaaagtactctcagcctaccattacactgcacattcaaaagttagaatccgaactgggatttaagcttttagaacgaggaaaaatcattaaacttactgaagcaggtaaaatcttttacgagcgggcaaatattttactaaaggaatatgaatatctaaataacaccttaaaggattattcaacaggcgaagctggcactatccgtataggtgctgcagagcctacagcaagcagtcgactgccttccattctctcattatttaaaaaaagatatcccaacacagaaattagcttactcgttgcagacgaaaagcaccttcatcaacatatacgcaatcaagaaattgatttcgcgattggcactgtctcagaatcgttcagagatatagaatttgaggtattactaacggaaaaacttgtgctgctactaccattcaatcatgctctaacaaaaagaaaaacaatctttgcaaaagatttaatacacgaaacgctgattacagctgggcaatcttccgttcaaaagaaaattgagcagctaatctttgaacgaacaggccagctgcctgctaaagtccagttaggcactattagcacacttcagcattttgtaaaagaaaacttaggaatagccgttgttccacaaataagcgcaactcttccgccagatcaagtggtggttaaaacgattcatgacttgcatgacgggcctgcaatcggcattttaaagcaccagtctcacaccgtaagtacagctggaaaaacatttttagctctcttaaaacaaaaccttgcatttgatttaaaaaaggcgcagattgaactctctgtataataacaaaaagcacgcgctcgaacagcgcgtgctttttgttattttcctgttgttgctttttcattttcgcaaataaatgcaatcttgcttgcaatctctccatatatttgacctaaacgatgcgattcgtcgtaaatggaaggtgcaaaatcttcttcattccagtcgggctgacttaacgggagctgtcctaaaagctctgtctgaagttcctcagcaagttttggacctccgcctttaccaaatacatactctttttcccctgttagctggctttcaaaataggccatattttctacaactccaattacctcatgatcagttttcaaagccatagcacccgctctagctgcaacaaatgccgctgtaggatgtggtgtcgtaataatcacttctttacaagcaggaagcatggagtgaacgtctaatgcgacatcacctgttccgggaggtaagtctagtaaaagataatctaattctccccattcaacttctgtaaaaaagctcgtcaacatttttccaagcataggtcctcgccagataacgggtgaattatcttctacaaagaagcccatggaaataacttttactccgaaacggtcaaccggaataatcttttcaccttctactacaggacgctgtgtaattcccatcatatctgggacgctaaatccataaatgtcagcatcaattaaaccaactttctttcctaaacgagctagcgaaacagccaagttaacagagactgttgatttaccaacgcctcctttaccgctggcaatagcaataaattcaggtgcattcggactagttagtaagttgccagtattcggttgctcagcgcggtactgctgaagttcttcaggcgtaaactcaacaaatcgcagtccaaccgactgtacacctgctttttttaatccttctacaattgtgccttgaaggctcagctgttcactagtacctgtttttgcaacagcaatcttcaggcttatatgctgtttttcagctttgattgttatttctttaatcgcatctgtttctgatagttttttatttaaaaatggatctgtaatttcccctactacttcttttacttgcttttccgttagcatactcccaccaccatgttaaaatctatttatttatactatcaagtatatcatacatattagatttttctgaatagaaggatgctatgctttttatttgggcttttctccagtaaaataccggctgactccttcataaatggattcagctaactttttttgatagcgtttcgattgaagcattttacgttctgtaggatttgataagaatcctacttcaaccaaagcacctggtagcttagaatgcttaagaaggtaaagagtttgaatagcttttgcttcacgggtcgtattatccagattatttcttagctcttgttgaatgagtttggccacttgctcgttttcttttagggacccgtaatagaaagtttgagcccctctccaagcagaggatggaatagcattcaagtgaatacttaagtacaaatcagcattggatttattaatcatcgttacgcgattttttaagtcttctacttttctgcgactgtatcctcttgtgtctttggccgctaggtcttcgtctttttctcttgtcataataacaagtgccccttgctcttgcagatagtcccgaagcattaacgaaattttaagggttatttctttttcaagcacttcttcctctcctacggctcctccatcaacaccgccatgtccaggatctagtacaataactttcccgctaagaggaagtgaaagcgaaccggatgatgttctatgatctatctgatattgtacaatgacaaaaagaacgagaagcgctataattgtgctcattatttttactttagacattttatcccttcccttcttgcctcacctatttatttctatatgggacaagaacgggaattatgagtactttttaatgcaaacgtaaccgacgtcttttttctgcggttcgataaccttctttccaccagtcttgcacatatccttgacataaataatacagaccatcttgataaagatctgttacagacatgctgacggctccgtacaatgtatcaattaaaagagactcttcttgcttactgtgcttctgaaaatcttcgtagcctttaccacgtttactcacccgggcacctaataaaaatgattcgatggcaatatcaagacagtactcctccacatgttcgtctcctagcatattccactgaaacattggatgaaaataacggcgcagcctctcttgaagcaaatcaaacgacagttcccttaggactttgcgttcatatttcatttctttttcataacgtttttcttttaaatatgtaacctcgttcacgataacgcctcccttttttacatattgtctgcacaagccttcgtctcatacgcaaacaacaaataaaaaaagccttggtccaaagaccaaggcttgaaacgtaatataaaattaacgttttgagaattgtggtgcacgacgagcgcctttaagaccgtattttttacgttctttcgcacgagcgtcacgagttaatagaccagcacgttttaatgttccacggtattcagggtctgcttctaataaagcacgagagattccgtgacgaatagcgccagcttgacctgcataacctccaccattaacgtttacaaatacgtcatagttacctacagtttcagttaaagcaagtggttgttttactacttcacgtagtgcagcaaatggaatgtattcttcgatttcacgaccgttgattgttacgcgaccgttacctggtactaaacgtacacgagcaacagagcttttacgacgaccagttccgtaatattgtacctgtgccaagataataacctcctcttattaattatccgcgaagttcgtaaacttctggtttttgtgcttcatgtggatgtgtttcaccagcatacacatgtagttttttgaacatttgacggcctaggctaccttttggaagcatgcctttgattcctaattcaagcattttctcagagtagttagtacgcatttctaatgctgtacgttgtttcaaaccacctgggtgcatgctgtgacggtaataaattttatcagttaatttcttacctgttagttcgatttttgacgcattgataaggatcacgtgatcaccagtatcaacatgtggtgtaaaagttggtttatgtttaccgcgtaagattgatgctacttcacttgctaaacgacctaaagttttaccttcagcatcgacaacataccatttacgctctacttcgtttgctttcgccatgaaagttgtacgcatgagtttccctcctaattttcatcatcaattataaaattatttcaaccttctatttcaacacgattaatttccggggctaaccgtggggttaaaatacataccatatgatatattatatctttaagctactaatgtcaagaaaatgttacaccaggtttagttgtcatagaaaacgcgccataaatatagtccttgcgaaggcgcagttttccctgcacgaggacgtgatttgctttctagaatatcttttatagcatctggttcaatacggccttgtcctacttctaaaagcgttccaacaagaatacgaaccatattatacagaaagccacttccaacgaatctaaacacaagctgactattctcttcatacatatcaatcctgtaaatcgtacgaatcttatcttccacttctgttctcgctgaacaaaagcttgtaaagtcgtgtgtaccgagtaaatatgtgatggcttttttcatttttgagtagtctaatggataagggtaatggtatgcataagaacgagtgaaaggatttcgatcttcgccgcgcaaaatatgatagcgatactcttttgaagtaacgtcataccgggcgtgaaaatgtgcatcaacttcacatacattcttcattacaatatcatctggtagcattgaattcaatgcttttttccacttatcacatggaatatttaggtttgtatcaaaatgaatgacttgcccctgtgcatgaacatttgtgtccgttcgtccagaggcgtaaatcggcacttttttgttatgcattttctctaaaacggcttcaatctccagttgaacagttcgcttattgggctgaacttgataacctgaaaagtgtgtgccgtcgtatgcaactatacattttaaacgtttcatcttttcaccaaacaatctttacgttctaatcagcactaaaacaactgctactgccagcagaagtaaaagcataattgtatctatgcttccccatttcaattgacgatactttgtacgcccttctccgcctttataaccccttgcttccatggcaatagctagctcttcagcacgcttaaatgaacctataaatagaggaacaagcaaaggaacgacagctttcaaacgatccgtaacggggccgctgctaaagtccactcctcgtgctgtctgcgctttaataattttatctgtctcttccatcaatgtaggaataaagcgaagagaaatggacatcattaaagctaattcgtgtacaggaagcttgagctttttaaatggattcagcaagctttccatcccatctgttacttcaataggcgtagtcgttaaagttagcatcgtcgtaattaaaattaagaacaagaagcgcaaggaaattaaaacaccttgaataaggccgcctttatagacagaaagccatccccattcaaacaaaagaggaccttcctttgtcataaaaatgtgcaaaagaaacgtgatgataataataaacataacgggctttaaccctcttaaaataaacgaaacgggcactttactcatggccactatcataagggtatacacgcctaaaaaagcatagccgatagggttatttgctaaaaacacaattaatacatacgcaaatacgagaagcagcttggcccgagaatccattcgatggacaaccgaatgacccggcacatacttaccaataatgattgagttcatcataatcgttcaccttgctgcataaggtgctgcactttctctaccacttcagaaaaggtaataaccgtatccgatgcttcaagctgaaatttctcttgcagcttcagcataaagcgaagcgattctggaacatccaatccatattcttttagctgcgtatgctgaccaaacacttctctaggtgaccctttcatcgcaatcgttccctgattcatcacaattagctcatctgcgtacatagctgcatcttccatgctgtgagtcacgagaattgtcgtcaagcctttttctttatgaagacgataaatcatattcataatttcttgacgccctctagggtccaatccagcagttggttcatctaaaattagcacattaggattcatcgctagaatacctgctatcgctacacgacgcatttgtccaccactcaaatcaaaaggagatctggtgagaatgtcttctggcaaccctactaacttgataagctctcttgctttttgctttgcttcttcttccgaaacgccataattcattggtccaaaagctatgtctttttccaccgtttcttcaaaaagctgatgttctggaaattgaaacaccacgcctacttgctgacgaatagcttttaaattcttttcttttcgattggctttaatagtgcgctcaccgatttgaatttcaccagcagttggcttcaataaggcattcagatgctgtatgattgttgatttcccagaaccagtatggccaataacagccaaaaatgtacctgattgaatgtttaaatttaagtcatgtagagcaattcgttcaaatggtgtattaacttgataacgatgctctacttctttgaatataatgtccatagttcgtccaccaagtcctcatctgttaaatgaatttttgataaaggaattcctacggaagcaaaacgatggcttagtttaacggaaaacggcaagtctagtccaatatccgttaacttggaacctaatgcaaatacttcgcgtggagtacctgttgcatagatcttccctttgttcatcacaacgactctgtcagccattgctacttcatctaaatcgtgagtaattgaaataaccgtcagttgtttttcttcttttaattttctaacagtttcaagtacttcagttcgcccaataggatctaacatagatgttgcttcatctagaatgatgacagatggctgtacggcaattatacccgcaatggccacacgctgtttttgtccacctgatagctgatgaggctcttgatccagaaaagcacccatattgaccatttcgattgcttcaggtatacgcttttccataatctcaaatggaatcccgttgttttcaagcccaaacgcaatatcgtcttgaacggttgaaccaacaaattgattatctggattttgaaacaccattccaatctgcttgcgcacatcccatattgtttcttcagataaaagagtatcacccactcgaaccattcctttttcaggtagcaaaaggccgtttagaattcgtgccagtgtcgacttaccagatccattatgtccagctatcgctaaccattcacctttataagcagagagagaaaggtgatctaatgttaggtctgcttcaggatcgtatcgaaagcataaatcttttacctctaaagacatttctttcaacgctatcttcctctcagctttttctattgcagcattgcctacattgattttttacgctatttacccggttttaggtataaaaaaagggcaacgactagttacacactgtctcgcccttttctatctgtattaaaaatattaaactaattcaatgataaccattggagcaccgtcaccacggcgaggtccaacttttaagatacgagtgtaaccgccttggcgatcttcgtagcgagtagcgatatcgctgaatagtttttgtaaagcgctttgaccagcttcttcgttagctacttcattacggatgtaagatgcagcttgacgacgagcgtgtagatctccacgtttacctaaagtaatcattttttcaacagttgaacgtaattcttttgcacgagcttcagttgtctcaatgcgttcactgatgattaaatcagttgttaaatcacgaagaagcgccttgcgttgtgcgcttgtacgacctaatttacggtaagacatgtgaggtcccctcctttgttaagtagttaaacaggtagatataatcagtcgtccttacgtagacccaaacctaattcttcaagtttagctttaacttcttctaaagatttacggcctaagttacgaactttcatcatatcttcttctgttttattagcaagctcttgtacagtattgatgcctgctcgttttaagcagttgtaagaacgaacagataaatccagttcctcgatcgtcatctctagaactttttctttctggtcttcttctttttctaccatgatctctgctttttgagcttcatctgttaagttaacgaagatatttaagtgttcagttagaatctttgcacctaaagcaacagctttttctggctcgatgctaccgtcagtccaaacatccaacgttaacttatcgtaatttgtcatttgaccaacacgagtattctctacataatacgatacgcgagtaacaggcgtatagattgaatcaattggaagtacaccaattggttggtcttcacgcttgttagcatcggcaggattataacctcgacctgtgcgagcagtaagtctcatacggaaatgagcatctgactcaagtgttgcaatatgaagatccggatttagaacttcgatatcactgtctgcttgaatgtcagcagccgttactgtaccaggacctttaacatcgatctcaagtgttttctcttcatcagagtaaatctttaacgctaactttttaacgtttaaaatgatgtttgttacatcttcaacaactccaggaactgttgaaaattcatgtaatacaccttcaatttgaatagatgttacagctgcaccagggagtgaggataataggatacgacgtaaggagttacccaaagtagtaccatatccacgctcaagtggttcgacgacgaatttaccgtactttctatcatcgctgatttctaccgtttcgatttttggcttttcaatctctatcaatataaaccctccttcaaaacgtcgaaacctcggctagacggctgatttctcaaatgcctaaccgaaattccctattagacagttcccgaatgtgcacaacaaatggaaaacatttcgttgcatgaataaattctacaccatcatcattatagacaacgaaatagaatctatacatattaattatacacgacgacgttttggtgggcggcatccgttgtgaggtacaggagtaacatctttaatagctgttacttctaaacctgcagcttgaagagcacggatagctgcttcacgaccagcaccagggcctttaactgtaacttcaagagttttcattccgttatccatagaaactttagcagcagtttcagcagccatttgcgcagcaaatggagtagatttacgagaacctctgaagccaagtgcgcctgcactagaccaagcaatcgcattaccgtgaacatctgtaattgttacaatagtgttgttaaacgttgagcgaatatgagctacaccagcttcaatattctttttcacgcgacgtttacgtgtattagttttacgtgccatctgttaatgacctcccttactaattatttcttcttgttcgctacagtacggcgtgggcctttacgtgtacgagcattgtttttactgttttgaccacgaactggtaaactacgacggtggcggataccacggtatgaaccaatctcaattaaacgtttgatgtttaaagaaacttcacgacgaagatcgccttctactttatagctatctaaaatatcacgaattttacctaattcttcttctgttaagtcacgaacgcgagtatcttcagaaactccagcttcagctagaactttttcagcagttggacgaccaataccgaaaatgtatgttaatgaaattactacacgcttgtcacgaggaatatcaacaccagcaatacgtgccatatgaatagtgcacctccttattgattaaccttgtttttgtttatgcttagggttttcacaaattaccattactttaccttttctacggataactttacatttttcgcagattggtttaactgatggtctgactttcatgtttcatacctccttgatagtacggagtgcataggttttatttgaaacggtacgtaattctaccgcgagttaaatcgtatggtgacaattctacagttactttatcaccaggtaagattcgaatgaaatgcatgcgaatttttcctgatacgtgagcaagtactgtatgaccattttctaattctaccttgaacatagcgttaggtaaagtttcagcaactgtaccttcaacttcaattacatcgtcttttgccattaaagtgctctcctttctttgaaacagtaacaagctatcattaaacgacttaaaaagaacctgttctgaacatccggagatcgtaatcattaaattcaagatgattgacgctaatatacatctttaccattttaacagcaattcagacgaaaaacgatcatcgtgaatttagataattactgtttactgtccagtgcatctagcgaggaatggatagagataacatcctttaacattacaatgctgtcagaatttcatatcccgtctcagtaattgcaatagtatgttcgaagtgcgcacacattttaccatctactgtgacaactgtccagttatcaggtaatgtttttacatatcgcataccagcattcaccattggctcaactgccaataccatgcctggacgtagacgcggtcctttattcggtggaccataatgaggtacttgcggatcttcatgtaagtctttgccgaccccatggccaacatattctcttacaatcgaaaagttacgtgattctgcgtactgttgaatagcatgtgaaatattcgacaaacgctcacccggcttagcttctgctaatcccttgtagagagattgctcagtcacatcaagcagctcttgattttctaatgaaatctttcctactccatatgtccaagctgaatcaccgtgatagccaccgaatttagctccgatgtctaaactgatgatatctccttcattaagcttgcgttcacccggaataccatgaactaattcttcattcacagaagcacatacactgccgcgaaaaccattataccctttaaaagacggaattgcatcatgttgacgaataaaattttcagcaattgcatccaattctatagtcgtaatacctggagcgatatgcttttttaactcttgatgagttaaagccacgattcgtccagcttcacgcatgacctcaatttcctctggtgtcttgcaaatgatcattgcttaaccccagcaagtaattgacgaacatcctcaaacacaatgttaatatcttgattaccattaatattgcgtagataacctttttcttgatagaaatcaagtagaggttgagattgtttaacattaactgaaagtctagttgaaaccgtctcagcattgtcatctgcacgttggtaaagctctccgccacatttgtcacaaactccttctttcgcaggaggattgaatactaagtggtaagtagctccgcaatctttacaaatgcggcgtccagtaagacgctccattaaaatgctttgatctacatcaatattaatcacataatcaatttgcttgtttagttcttttgtaattgtttcaagagcttctgcttgggctactgttcttgggaagccatcaagtaaaaagccgttttcacaatcttgtttgtttaaacgctcgcgcacaattccaattgttacttcatcaggaacaaggttaccttggtccataaatgatttagcttttaaacctagttgcgttccttctttaattgcagctcggaacatatctcctgttgagatatgagggatatcgtaatgctcaacgattttttctgcttgagtacctttcccagcaccaggaaggcccattaacactaaattcatttcttgcttccccctcagtatcttatccgtttaatgggaaagcagcttgcttcccactaaacagctttacttaataaatcccttataatggcgtttcactaattgactctcaagctgtttcattgtctcaagagctacaccgacaacaattaacaaactagtaccgccgatctgagcagatgatggtaagtttgcaattttgatgaacagaaccggcaacacagcaattaacgcaaggaatatcgaaccgattaatgtcagacgatataacactttcgttaaataagcttgtgtgcttttaccaggacggatgcctgggatgtagccaccttgctttttcaagttctctgctacttgttcagggttaacttgaacaaatgtatagaagtaacaaaaagcaatgattaacgctacatacactatcataccaattggcttagtatagtcaaatgtattctgaatccacgtcgttacatcatttggaccgaaaaatgatgcaattgttggtggtgtgataataaatgaaactgcaaagataacaggaataaccccagcagcatttacttttaacggtaaatgagtggattgacctccaacaggattacgaccagctgaaccctttgcatattgaataggaatttttcgtagcgcttgttggaagtaaataaccccaacaataatagctaaaactgcaatcgcaattaaaactaccgttacgatacgaatgaataattgatccccaacgtcttcaaattgctgtgcataaatttgatttaatgttgtcggaataccagctgcaatcccagcaaagataatgatagaaataccattacctacgccttttgcagtaatctgctctcctaaccacattaagaaggcagtacctgccgttaacactgtagcaattagaagatacgtagaaattcctggattagcgatcaattgtccgcccgaaatattgttaaatcctatagacatacctaaagcctggataaatccaagcacaattgttccataacgagttacttgagctaatttacggcgcccaacatctccctgctttgaccattctgtaaacttaggtacaacatccatctgcaataattggacgatgatggatgctgtaatataaggcataatgcccatagcaagaatggagaagttttttaacgcgccgccgccaaatgtattcagaactccgaatacatttaacccatcttgcaattttagtacatccgtattaacactaggtacaggaataaatgtaccaattcggaagacaattaacattaacaaagtgaaaaagattttttgtcttatttcacgcacgcgcattaaattggagattgtttgaaacattagatcacctcaactgtaccgccagcagcttcgatagcttctttagcagttgaagagaatttagcagctttaacagttagcttagagtttaatgtaccgtttcctagtactttaacgccagcttttgctttgcttactaaaccagtttcgattaataattctggtgttacttcagttccatcttcaaaacggttaagagcttctaaattaacgatcgcgtattctttgcgattgatattagtgaacccacgttttggaagacgacggaataaaggagtttgaccaccttcgaagccaggtcttacgccaccgccagagcgagcgttttgccctttgtgacctttacctgaagtctttccgttacctgaaccagtaccacgacctaaacggttacgtactttacgtgaaccttcagctggtttcaattcatgaagtttcattccggagcacctccttagagtgacaatttatacttattgctcttttactgtaacaaggtgagctactttgttaatcattccgcgaattgcaggattatcgtcttgaacgacagtttgatttaacttacgtaggccaagtgtacgaacagttacacgttgatcttctggacgaccaattacgctacgagtaagggtaattgctagtttgtttgccattccatatccctcccttatcctaacagttcttctacagtcttgccacgtagttttgcaacatcttcagcacgttttaggttagctaaaccgttaagagttgcacgtaccatgttgattggagtgtttgaacctaaagatttagatagaatatcacttactccacccaattctagtaccgcacgaactgggccaccagcgataactcctgtaccttcagaagcaggttttaagaaaatttgacctgcaccaaattgtccaaggatttcgtgtggaatagttgtaccaaccataggtacagtaattaagtttttcttcgcatcttcaattgctttacggattgcatctggtacctcttgtgctttaccagtaccgaatccaacgtgaccgtttttgtcaccaactacaactaatgcagcgaagcggaaacgacgtccacctttcacaactttagctacgcggttaacggtaacaacacgttcttcaagctctaatttatttggatcaatacgacgcatgattttccctccttttacaattagaattgtaatccagcttcacgagcagcgtcagctaatgctttaacacggccatgatataaataaccgccacggtcgaatactacttcgtttacacctttttctactgcgcgtttagcgactaattcgccaactttgatagcagcttcagtgttaccagtgctttctaaagtcaggtctttatctaacgttgaagcacttgcgattgttactgaatttaaatcgtcgataacttgtgcgtaaatatgttgattagaacggaacacgtttaaacgcggacgagttgcagttccagataacttcgcacgaacacgagcatgtctttttttacgaactttgtttttatcaagcttcgtgatcatttcgggcactcctttcttttacctaaccggcattacttcttagcagttttaccttctttacgacgtacatattcgccttcgtaacgaatacctttacctttgtaaggctctggtggacgaacgtcacgaatatttgcagctaatgcacctacgcgttctttatcaatacctttaataacgatcttagtttgagaaggaacttcgatttcgattcctgtttcaggagtaatctcaactgggtgagagtatccaacgctcaatactaatttgctaccagatttttgtgcacggtaacctacaccgactaattctaaaccacgttcgaatcctttagtaacaccttcaaccatgttacctaaaaggctacgagtagttccgtgaagagcgcggtgctctttattgtcactaggacgattaacaactaatacgttgtcttcaactttaatttcgatttcagggtggaatgtacgagttaattcaccctttggtccttttacagttacagtgttgctctcgttcgtaactgtaacacctgctggaagttctaaaggctttttaccaacacgtgacatagttacacctccattcacatttaaaacttattaccaaacgtacgctaatacttctccaccagtttgcttttgacgagcttctttgtcagttaaaacaccttgagaagtagaaacgattgcgatacctaaaccgttaagtacacgtggtacttcgttagtttttgcataaacacgtagaccaggtttactgatacgttttaagcctgtaattacacgttcgttatttgaaccgtattttaagaagatacggataataccttgtttgttgtcttcgatgtattctacatcacgtacgaaaccctcacgcttaaggatttctgcaatttgcttcttaatgttagaagcaggaacttcaattttctcatgacgaaccatgttcgcattgcggatacgagttagtaaatctgcaataggatcagtcattaccatattaatttacctccttcccaaacttgggttttaccaactagcttttttaacaccaggaatttgacctttataagcaagctcacggaaacaaatacggcaaagcttgaatttacgtagtactgagtgtggacgtccacaacgttcgcaacgtgtatactcttgtacttggaatttttgctggcgtttttgcttcgcaatcattgattttttagccacattttcgcctcctctgcttaacgttggcagttattacttctggaatggcataccgaactgagttaaaagctcacgagcttcttcatcagtgtttgctgttgtaacaataacgatatccataccacgaactttagttactttatcataatcgatctctgggaagatcaattgctctttaacacctaacgtgtagtttccacgaccatcaaatgcttttttagatacaccacggaaatcacgcacacgtggaagtgatactgatactagtttatcgaagaattcgtacatacgctcgccgcgtaaagtaactttcgcaccgattggcataccttcacgaagacggaaaccagcgatagattttttcgcacgagttacaacaggtttttgaccagtgatttcagctagttcttcaacagcgttatctaaagcttttgagttagaaacagcatcaccgatacccatgttgattacgatcttgtcgatttttggcacttgcattacagattcataattaaacttgctaactagagcaggagtaatctcttttgtaaatttctctttaagacggttcatgtgaactaaacctcccttcacatttcattaattatttatctaaagtttcaccagatttttttgctacacgtacctttttgccatcgataacttggtacccaacacgagttggctcaccagatttaggatccaacggcattacgtttgatacgtggataggtgcctcttggctaacgattccaccttgtggatttacttgagaaggtttagagtgttttttcacaacgttcacgccttcaacaagtacacggtctttctttgggaaagctgcaagtacttcaccttgcttacctttgtctttaccagagataaccactactttgtcgccctttttaacatgcatcctattcgcacctccttaaaaggcattttgtatttgttctatatatcaattagataacttctggagctaatgatacgatcttcatgaagttgttatcacgtaattcacgagcaactggtccgaagatacgagtaccacgtggtcctttgtcgtcacggatgattacgcaagcattttcgtcgaaacggatgtaagaaccgtcagtacggcgaacaccactttttgtacgtacaacaacagctttaacaacgtcaccttttttaacaacgcctcctggtgttgcttgtttcaccgtacaaacgataacatcaccaatgtttgctgtcttgcgacctgaaccaccaagtactttaatagtaagtacctcacgtgcaccagagttgtctgcaacttttaaacgagattcttgttgaatcatgtacgaaacctcccttcggatgaatcattcttatccgatctatcttaactattagatgataacagctttttctacaacttctactagacggaaacgtttagtagctgataacggacgagtttccatgatcttcacgatatcgcctagttgagctgtattgttttcatcgtgagctttgaatttctttgagtattttacacgcttgccataaagcgaatgctttttgtaagtttcaacaagaacagtaacagtcttatccattttgtcagaaactacgcggccagtgtaaactttacgttggttgcgttcactcattctgaaagcctcctctcagacttaattatttattagcagcaatctctctttcacgaactacagttttcatacgagcgatcgatttgcgcacttcgcgaatacgagtagtattctctaattgtccagtcgctaattggaaacgaaggttaaacaactcttcttttaaagccttaactttttgttcaatttcagcagtggtaaggtcacgaatttcattagctttcattagaatcaccaccaatttcttcacgttttacaaacttacattttacaggtagcttgtgtgcagctaaacgtaaagcttcacgtgcaacctcttcagatacacctgaaatttcaaacattacttttccaggtttaacaactgctacccaaccttcaggagcacctttaccagaacccattcggacttctagaggcttagcagtataaggtttagaagggaaaattttaatccatactttaccgccacgtttcatgtaacgagtcattgcgatacgagcagcttcgatttgacggtttgtaatccaagaagcttcagtagcttgtaaaccgaattcaccgaaatgtacttccgtaccacctttagcgcgtccacgcatttttccgcggtgttcgcgacgatatttaacgcgttttggtaataacataattattttcctccttcctcagttttctttttagtaggaagaacctctccacgatagatccatactttcacaccaagtttaccataagtagtatctgcttcagcgtgagcatagtcaatatcagcgcgaagtgtatgaagtggaactgtaccttcactgtaatattcagaacgagcaatatcagctccgcctaaacgaccagataccattgttttgataccttgtgcgccagcacgcatgctacgttggatagcttgcttttgagcacgacggaatgatacacggttctcaagttggcgagcgatgttttcagctactagtttagcatctaaatctgctcgtttaatttcaaggatgttaatgtgtacacgcttgcctgttaattggttaagagctttacgaagtgattctacttcagtaccacctttaccaattaccataccaggttttgcagtgtggatcgttacgtttaagcggttagcagcgcgttcgatttcaactttagaaacagctgcatcgtttaaacgtttagcgatatattcacgtacttttaagtcttcatgtaataagtcagcgtagtctttgccagcgaaccatcttgattcccaatcacggatgacaccgacgcgaagaccgaccggatttaccttttgacccatgaattatccctccttcttttctgataccacgattgtgatgtggcttgtgcgcttgttaatttggcttgcacgtcccatagcgcgtggacggaaacgttttaaagttggaccttcgttaacaaaagcgtcagtaataactaaattgttagcgtccatttcataattgtgttctgcattggcaatagcagattttaatactttctcaacgactggagaagcagcctttggcgtgtgaagtagcactgctagcgcttcacccacttgcttacctcgaattaaatctacaactaaacgaactttacgaggagcaatacgtactgttctcgcgacagctttagcttgcatttaaaagcctcctctcatattagcgtcttgttttcttatcatcacttgcgtgacctttgtaagtacgagatggtgcgaattcaccaagtttgtgacctaccatgtcttcagtaacataaactggtacatgtttacgaccgtcatatacagcaattgtatgaccaatgaactgagggaagatagttgaacgacgagaccaagtttttactacttgcttgctgtcagtttcgtttaacttctcaattttgttgattaaatggtcatctacaaaaggtcccttctttaagctgcgacccataaatgaacctcccttcgtgattgtcctacggttcgtttgaaccgtagctcaatcccgttattttttacgacgacgaacgataaatttatcggatttgtttttcttcttacgagttttgtaaccaagtgttggtttaccccatggactcattggagacttacgtccgattggagcacgtccttcaccaccaccgtgtgggtgatcgttagggttcattacagaaccacgtacagttggacggatacctaaccaacgagaacgaccggctttaccgatgttgattaactcgtgttgttcgttaccaacttgacctacagttgcacgacaagttgcaagaatcatgcgtacttcaccagaagttaaacgtactaatacgtatttaccttctttaccaagtacttgagcagatgtacctgcagaacgaactaattgtccacctttaccaggtttcaattcgatgttgtgtactactgtaccaacaggaatgttagctaaaggaagcgcgttacctactttaatgtcagcttcaggacctgacataacttctaaacctacttttaggtttttaggagcaaggatgtaacgtttttcaccatcagcataatgaatcaatgcgatgttagctgaacggtttggatcatattcgattgtagcaacgcgtccaggtattccatctttatcgcgtttaaaatcgatgatacggtattgacgcttgtgcccaccaccttggtgacgaacagtcaatttaccttggttgttacgaccaccttttctcttgacaggtgcaagtaacgatttttctggtttgtcagtagtaatttcagcgaaatcagaaactgacatgccacgacgaccatttgaggttggtttatactttttaatcgccatctcaatttccctccttctctagtaatcttaagcttcgaagaattcgatttcgttgctctcttgagttagtgttactaccgctttacgacgacggttagtaagaccactgtagcgacctacacgcttgaatttacctttgtagttcatgatgtttactttttcaacttttacgtcaaagattttttcgatagcatctttaacctcagttttattagctcttacatcaacatcaaacgtatattttttctcagccattaagtctgttgaacgttctgtaattacggggcgcttaataatatcacgaggatctttcattatgcaagcacctcctctactttttcaactgcgtctttagtgattacaagcttatcatggttcataacgtctaatacgcttaaaccattagctgcaacaactgttacaccaggaatattacgtgctgaaagtgcaacgttttcgttaagatcagcagttactactaatgctttgcgttctactgttaagtttttaagtactgctatcatttcttttgtttttggagcgtcaaaagaaagagcttcaagaacaacgatgctgttatcttgaactttagttgataatgcagacttaattgctaaacgacgaacttttttaggtaatttgtagctatagcttcttggaactggaccaaatactacgccaccaccacgccattgtggagaacggatagatccttgacgagcacgaccagtacctttttgacgccatggcttacggccaccgcctcttacttcagaacgatttttaactttagaagtaccttgacgttgagatgcgcgttgcattacgatcgcgtcgaaaagtactttgttgtttggttcgataccgaaaacggcatcttgaagttcgatttctccaacgttttcaccgttttggttaaacaatgctacttttggcattggttattcctcctttctcgaagaattattatttagatttaactgcagatttaacagtaactagagattttctagctcctggcacgttaccttttactaataaaagattgcgttctgcgtcaattttaacgattgataagttttgcacagtgatgcgctctccacccatgcgtcctggtaataatttacctttgaatacgcggtttggagctacaggacccattgaacctgggcgacggtggtagcgagaaccatgagacataggtccgcgagattgtccgtggcgtttaatagcaccttggaaacctttaccttttgagattcctgttacatcaattacatcgccttctgcgaaaatatcaaccttgacttcttgaccaacttcatatgctgaagcgtccacaccgcgtaactcacggatgaagcgcttaggagcagtattagctttagtagcatgtccttttgcaggtttgttagatagtttttcacggatatcttcgaaacctaattggattgcttcgtaaccgtctgtctcagcgtttttaacttgaagaactacgttagcagaagcttcaattactgttactgggatcaagtcaccattttcagcaaatacttgagtcataccgatctttcttcctaagattcctttggccattagtcacacctcctaagtatcttttcattctttattttaaattaaagtttaatttcgatatctacaccagatggtaagtctaaacgcattaatgaatcaacagtttgtggtgttggattcacgatatcaattaagcgtttatgcgtgcgcatttcgaactgctcacgagaatctttatatttgtgtactgcacgtagaattgtataaattgatttttcagtcggtaatggaatcggaccagatacagccgcaccagaacgttttgcagtttctacgattttctcagcagattgatcaagaattctgtgatcatatgcttttaaacgaatgcgaattttttcttttgccattattttccctcctttttcgcctattttacaatagacattctccgcggaaatttccccacactcgccatggcaaagcggccgggtgtgtcggcaaccttccgcatcatcgcagtcaaagaccaacatttttattatactaaaaatgggttcatattgcaacaataaagttaaaaaactttttatgtgtcgcacacttttttcattatatataaaaggagatcattttgcaagtgtaatagtaaaaactatttttaccttttatcaccaaataaaaaaggagtaggttaccctactccttttactgaaacgagaaattactcgctgattttagctacaacgccagcgcctactgtacgtccaccttcacggattgagaatttagtaccttcttcaatcgcgattggagcgataagttcaacagtcatttcgatgttgtcaccaggcattaccatttctacgccttcaggtaagttacaaataccagttacatcagttgtacggaagtagaactgtggacggtagtttgtgaagaatggagtgtgacgtccaccttcgtctttagaaagaacgtatacttcagcagtaaatttagtatgtggagtgattgagcctggtttagctaatacttgtccacgttggatttcttcacgtgctacaccacgaagtaaagcaccgatgttgtcgccagcttcagcatagtcaagaagcttacggaacatttctacacctgttacagtagtagattttggctcttcagttaaaccgatgatgtcgataacgtcaccaactttaacttgtccacgctctacacgacctgtagcaactgtaccacgaccagtgattgagaatacgtcctcaactggcatcatgaatggtttttcagtgtcacgttctggagttgggatgtactcatcaacagcgtccataagctcgatgattttagcttcccaatcagcttcgccttcaagagctttaagagcagaacctttgattacaggtacatcgtcaccagggaagtcgtattcagtaagaaggtcacgtacttccatttctactaattcaagtagctcttcgtcgtctaccatgtcacatttgtttaagaatacaactaggtaaggtacacctacttgacgagaaagaaggatgtgctcacgagtttgtggcattggaccatcagcagcagatactactaagataccgccatccatttgagcagcaccagtgatcatgtttttaacatagtcagcatgtcctgggcagtcaacgtgtgcatagtgacgagtgtcagtttcgtactcaacgtgtgcagttgagattgtgattccacgctcgcgctcttctggagcagcgtcgatcatgtcgtaagccattgctgcacctttaccacttttcttagcaagaacagtagtgatagcagctgttaaagttgttttaccatggtcaacgtgaccaattgtaccgatattggcatgtgtttttgaacggtcgaatttttccttagccattcgaaaatcctccttaaaattcatgtagtttatgttttatgaggccgtgaaagggaatgagctccactttcacagcgtacataagtagttatacttcaataaagagtgaaaatcaattattcacctttattttttttaataatttcttctgaaattgatttaggaacttcttcgtagtgatcgaagtgcatagaatatgtcccgcgaccttgagtgtttgaacgtaatgcagttgcataaccaaacatttcagaaagtggaacgaatgcacgtacaacttgagcgttaccgcgtgcttccataccttctacacgtccacgacgagacgtaatgtcacccatgatatctcctaagtattcgtcagggataacaacttcaaccttcatcattggttcaaggatagctgggttacattttgatactgcgtttttaagagccatagaagcggcaattttaaacgccatctcacttgagtcaacgtcatggtaagatccatcaactaaagcagctttgatatcgattaatggataaccagcaacaacaccgttttgtaatgcatcttcaagaccagcttgaactgcagggatgtattcacgtggaactacaccaccaacgattttgttctcaaattcaaagccttttccttcttcgttaggttcgaactcaatccaaacgtgaccgaattgtccacgaccaccagattgacgagcgaatttaccttcaactttcgcaccagcgcggaaagtttcacggtaagctacttgaggagcaccaacgtttgcttctactttgaattcgcgacgcatacggtcaacgatgatatcaaggtgaagctcacccataccagagatgatgatttgaccagtctctgtattagtttccgcacggaaagttggatcttcttcttgtaacttttgaagagctgtagtcattttatcttggtcagcttttgattttggctcaacagataaagagataactggctctgggaattccatagactcaagaattacaagactcttttcgtcacatagagtatcaccagtagaagtatcttttaatcctacagctgccgcgatatctccagcgtatacttcagaaatctcttcacgagagttagcatgcatttgtaggatacgacctacacgctcacgcttaccttttgtagagtttttgatgtatgaaccagagcttagtacaccagagtacacacggaagaacgttaatttaccaacataagggtccgtcataactttgaacgctaatgctgagaaaggagcgttgtcgctagactcacgcgtaacttcttcttctgtgtcaggtacgataccttggattgatggtacatctactggagatggtaggtagtcaattactgcatctagcattaattgtacacctttgtttttgaatgctgaaccacagataactgggtagaattcaacgtcacaagtacctttacggataccagcttttagttcttcaactgtaagctcgccttcgtctaagtacttcatcattaattcttcgtcaagttctgcaacagcttctactaagcttgcacggtattcttcagcttgctctttgtattcctcaggaatttcacgagactctgaacgagtacctaagtcatcttcgtagaagtatgctttcatttccactaggtcaatgattgcttcgaactcatcttcagcaccaattggcaactgaattgggtgagcatttgcacctaaacgatcgtggatcgtttttacagagtacaagaagtcagcaccaattttatccattttgttaacgaatacgacacggggaacaccgtacgtagtcgcttgacgccatactgtttctgtttgaggctcaacaccagattgagcatcaagaactgccacagcgccatcaagtacacgtaatgaacgctcaacttcaacagtgaagtctacgtgtccaggagtatcaatgatgttaacgcggtgacctttccaagaagcagttgtcgcagcagacgtgatagtgataccacgttcttgctcttgctccatccagtccatttgtgaagctccttcatgagtttcaccaattttatggatacggccagtataataaagaacacgctcagttgttgttgttttaccagcatcaatgtgagccatgatcccaatattacgagtgttttctaaggagaactctcttgccatcttaggtatttctccttccatattataatttgttttttaaaaagtttcgttaaaagattaccaacggtaatgagcaaatgctttgttagcttctgccattttgtgagtatcttcacgtttcttaactgcagcaccagtgttgttagctgcatcaaggatttcgttagctaaacgctcttccatcgttttttctccacgaagacgagcatagtttactaaccaacgaagacctaaagtagtacgacgctctggacgcacttctacaggaacttggtagttagaaccccctacacggcgtgctctaacttctagtacaggcatgatgtttttaagagcttggtcgaatacttccatagcttctttaccactgcgctcttgtactaaatcgaatgctctataaagaatagcttgtgacttaccgcgctttccatcaagcatcattttgttgattaagcgagatacaagcttagaattgtaaatcggatctggtaatacgtctctttttgcaacaggtcccttacgtggcattctacttcctcctttcacttttaaaagtttatctattaattgttaagctattattttttagctgcttttggtcgcttagtaccatatttagaacgaccttgcatacggccatccacaccagcagtatcaagtgcaccacgtacgatatggtaacgtacccctggtaaatcttttacacgtccaccgcggataagtaccacgctgtgttcttgtaagttgtgaccaatacctgggatataagctgttacctcgataccgtttgttaaacgtacacgagcatatttacgaagagccgagttcggtttcttcggtgtcatagtacccacacgtgtacatacaccacgtttttgtggagaagattggttagtttgagcttttttgaagctgttgtaacctctgtttaaagcaggtgagtcagattttttacctttactcacacgaccattacggattaattggttaatagtaggcatttaatttttcctcctttcgccttttgtaagaccacacatccaggtggttcattttttagcaaaaaacaaagtctttgaaactaaaagttcaaaaacgtgttaactaataattgcaacagttgcagcgttaacttctatcctacaagcttgaccaagctttcgcatagaagggacatacgtatacggaacgttttcttgctgtgccgtttttgccacaatggatgtgacataaaaatcagcgtcttcagcaatgatgacttcctttactgtacctttttttaatgctttcaccgtctgctttgttcctacaataatatgatcagcctgtaatactttttcataagacattatcatatcctccaaagtaacaggtagtttataggagcacctttgatatagtatcattccctagaatggatgtcaactaacgttttgtagtttttttaaaaaacatccattctagagtaatgattttataattagtcgattgttaccgtttcttcagcttggtttttgatcggttcagcattacgatatctcgtcatacctgtaccagccggaactagcttaccaatgataacattctctttaagtccaagcaactcatcacgttttcctttgattgcagcatccgtaagaacacgcgttgtttcttggaatgatgcagcagataagaaggaatcagtttcaagagacgcttttgtaataccaagtaatacaggacggcctgtcgctggacgattgccttcaagtaatactttttcatttgcatcagtgaattggtgaatatcaagtaatgaacctggtaatacatctgtatctcctgaatccattacgcgcactttacgaagcatttggcgaaccattacctctacgtgtttatctccaatttctaccccttgcatacggtatactttttgcacctcacgaagcaagtactcttgtacagccgtgatgtcttttacttttagtaattctttaggatcaattgaaccttctgttaattcttgaccacgtgcaatgcgctgtccttcaataactttcagacgtgcactgtacggagctgtgtaagaacgagtttcaatctctccttgaacagtaatttcatgttgacgatcgcgtccttcagaaatgccggcaattgtaccttcaatttcagaaataacggcttgacctttagggttacgcgcttcgaagatctcttggatacgcggtaaaccttgagtgatatcgtctccagcaaccccacctgtatggaatgtacgcatcgttaactgtgtacctggctcaccgatagattgagcagcgatgataccaactgcttcacccacttcaacttctgaaccagttgcaaggttacgaccgtaacattttttacatacaccgtggcgagtgttacaagtgaatgcagaacgaatccatacttcttcaacaccagcatccacaattgtttcagctaggtcttctgtaattagttcgttttctttcactaacacttcgtttgttcctgggtgaagtactgtttttcttgcataacgtccaattagacgctcatcaagtttctcaatttcttctgttccttctttgattgcaacagccagaataccgcggtctgtaccacagtcgtcatcacgtacgataacatcttgtgccacgtcaaccagacgacgagtaaggtaacctgagtcagctgttttaagagccgtatcggcaagacctttacgtgcaccatgggtagagataaaatactctaatactgttaaaccttcacggaaactagatttgattggtaactcaatgatacgaccagacgggttggccattagtccacgcatacctgcaagctgagtgaagttagatgcgttaccacgggcaccagagtcactcatcatgaagattgggttgcgtttgtctaatgacgccattaatttaccttggataacgtctttcgcactactccatacagagataacacgatcataacgctcatcttcagtaattaaaccgcgacggaattgttttagtacgttatctactttagcttgcgcttctgttaagataacttctttttctcctaaaaccacgatgtcagctacaccaactgtaataccggctttagtagaatatttgaaacctaggtctttcatacggtcaagcattttagaagtctcagtaattttgaaacgtttaaatacttcagcgatgatattacctaagatttttttcttaaacggtgcgatagccggttgattcttgatgaattccttcacatctgcacctttttcaacaaagtacttctcaggagttttcacttctaagttttctcttgttggttcgttaatgtatgggaacgattttggtaaaatttcgttgaaaactaatttaccaaccgttgtaacaagcaattgttgattttgtgcttctgtaaacgtttcgttgtttaaagaacctgcatacacagctacacgtgtatgaagatgcacataaccgttttggtacgctaatagtgcttcatttgtatccttgaacaccataccttctccaactgcctcttcacgctcaagcgttaagtagtagttacctaataccatatcctgtgaaggtgtaacaactggtttaccatctttagggttcaagatattttgagcagcaagcattaagatacgtgcttctgcttgtgcttctgcagataatggaacgtgaaccgccatttggtcaccgtcaaagtcagcgttatatgctgtacatacaagcgggtgaagacggatagcgcgaccttctacaagcgtaggttcaaatgcttgaatacctagtctgtgtagcgttggtgcacggtttaaaagaactggatgctctttaataaccgattctaatacgtcccatacttcaggttgcacacgttcaattttacgttttgcactcttgatattatgagctaaaccgcgttcaacaagctctttcattacgaaaggtttgaaaagctctaacgccatttcttttggaagaccacattgatacatctttaagttcggacctacaacgattaccgaacggccagagtagtcaacacgtttacctaataagttttgacggaagcgaccttgcttaccttttaacatgtgagaaagggattttaatggacggttacctggtcctgttaccggacggccgcgacgaccattatcgattaatgcatctacagcttcttgaagcatacgcttttcgttttgaacgataatgctaggggctccaaggtctaataaacgctttaagcggttgttgcggttaattacacggcgatataaatcatttagatcagacgtagcaaagcgtccaccatctaattgaaccattggacgaagttctggcggaataaccggtagaacgtctaaaatcatccaagaaggttcgttaccagaatgacggaaagcctctagtacttctaaacgtttgatagcacgtgtacgacgttgaccttgagcagttttcaattcttctttcaaagcatctacttctttatcaagatcgatgtcatgcaataattttttaacagcttcagcacccattgccgcatggaaagtttgtccgtacttctcacgatacgcacggtattctttctctgataaaagctgtttcttttcaagtggtgtattaccagcatctgttactacataagaagcaaaataaatgatttcctctagcgcacgaggggacatgtctaagacaagtcccatgcggctaggaatacctttaaagtaccaaatatgagaaacaggtgcagctagctcgatgtgacccatgcgttcacgacgaacttttgcgcgcgtaacttctacgccacaacgatcacatacaacacctttataacgaacgcgcttatattttccgcagtgacattcccagtccttttgtggaccaaaaatacgctcacagaataagccgtctttttcaggttttaacgtacgatagttgatcgtttcaggtttttttacctcaccgtacgaccaagaacgaattttatctggcgaagctagaccgattttcatatactcaaagttatttacatctagcaaggagcctacctcccttttaatctacaggttttttcccttaacgtttatatgaaagtaattccttactcttttgtgacaggatctttttgtccttcagaaaggctttcttcattatctgcaataattgattctgttggttgctcatggtcctcttctgagtccatgatatcaatttcttgctcgtcagcagaaagcatcttcacatccatacctaaactttgtagttctttaattaatactttgaacgattcaggtatgccaggttctggaatgttttcacctttaacaattgcttcgtatgttttcacacgacctactacgtcatctgatttcactgttaagatctcttgtaatgtgtaagcagcaccgtatgcttcaagtgcccatacctccatctcaccaaaacgctgtccaccgaactgcgctttaccaccaagtggttgttgtgtaacaagtgagtatggtccagtagaacgagcgtgaagtttatcgtctaccatgtgagcaagtttgatcatatacatgattcctactgatacacggttatcgaatggttcacctgttcgtccatcatatagaactgttttagcatcacgagacatgccagcttcttcgattgttgcccaaacatcttcctcacgcgcaccatcaaatactggagacgcaacgtgaatgccaagcttacgagcagccatacctaaatgaagctctagcacctgaccgatgttcatacgagatggtacccctaatgggtttaacatgatgtcaattggcgtaccgtctggtaggtaaggcatatcttcttcaggtagaatacgtgaaattacacctttgttaccgtgacgaccggccattttgtcaccttcagaaattttacgcttctgaacaatatatacacggactaattggtttacacctggtggtaattcgtcgccatcttcacggttgaagactttaacatcaagaatgattccaccgccgccgtgcggtacacgaagagaagtatcacgaacttcacgcgctttttcaccgaaaatagcgtgtagaagacgttcttcagctgttagttctgttacaccttttggcgttactttaccaactaaaagatctccgtcttttacttctgcaccaatgcggatgattccacgctcatctaagttgcgaagagcatcttcacctacgtttggaatgtcacgcgtaatttcttcaggtccaagcttcgtatcacgagactcagattcatattcttcaatatgaacagacgtatatacatcgtctttcacaaggcgttcactcatgatgatggcatcctcatagttgtaaccatcccatgtcatgaaaccaaccattacgtttcgtcctaaagcaagctcacctttttccattgaaggaccgtcggctaagatctcaccttttactacttcgtcgccaactgaaacaattggacgctggttgtaacaagtaccttggttagaacgaacaaattttaataatttgtattgatctaagttacctttaactttttgtccgtctacttcttcatagcggcgaacaaaaatttgttttgcttctacgcgctctacaacgccaggatatttacaaatcacggctgcaccagagtctttaccagatacgtattccatacctgtacctacgattggtgcttcaggatttaataaaggtactgcttgacgttgcatgttcgcacccattaatgcacggttagagtcatcgttctctaagaatgggatacatgctgtagcggcagatacaacttgttttggtgatacatccatatagtctaaacgatcgcgacggataaccgtgttttctccacggaaacgtgcaacgacattttcatctaagaatgaaccatcatcacctagacgagcgttcgcttgggctacaacatagttatcttcttcatcagctgttaagtagtcaattcgctctgtcactttacctgtttcaggatcgatacgacggtaaggtgtttcgatgaaaccgaatttgtttacttttgcataagaagatagtgagttgattagcccgatattcggaccctctggtgtttcaatcggacacatacggccatagtgggagtagtgaacgtcacgcacttcgaaaccagcgcgctcacgcgttaaaccaccaggtcctagagctgaaagacgacgtttgtgcgtcaattcgcctaatggattcgtttgatccatgaactgtgataattgagaacttccaaagaactctttaatcgccgcaataactgggcgaatattaattaattgttgaggtgtgattgtattcgtgtcttgaattgacattctttcacgaacaacacgttccatacgagataaaccgatacggaattggttttgtaacaattcacctacagaacgcagacgacgattacctaagtggtcgatatcatctgtgtctcctacttgatgaagcaagttaaagaagtaactgattgatgctaaaatatcagcaggtgtgatatttttaacttcttctgttacatatgcgttacctgatacagtgatgattttttcaccttctggatcatttggcgcataaatcttaatagattgtaatgtaacatcgtcttctactactccaccaaccggactataagttttgaagtttactccaccttcaagcatcggaatcaagcgatctagcagacggcggtcaatcattgcgcctttttctgcaataatttcacctgtttcaggatcaactaatgtttcagctagcttttgattaaacaagcgatgtttgatatgaagctttttattaattttatagcgacctacgttcgctaagtcatatcgttttggatcaaagaagcgagatactaatagagacttcgcattctcaactgtcggtggttcacccggacgtaaacgctcatagatttctaatagcgctttttccgttgtttccgtattatctttttcaagcgtattacggatgtattcattatcaccgattaaatcgataatctcttggtcagaaccgaaacctagcgcgcgtaacagcactgttactggcagtttacgagtacgatcaatacgcacgtatactacatcttttgcatcagtttcatattctagccatgcaccacggttagggataacagttgctgtatatccttttttaccgtttttatcaagctttccactatagtaaacacttggtgaacgaaccaactgtgatacgataacacgctcagcaccgttaattacaaaggtacctgtttcggtcatcaatgggaaatctcccatgaacacatcttggtcttttacttcacctgtttctttattaattaaccgcaccttaacacgaagaggtgctgcataagttacatcacgttctttagactctcctactgaatactttggctcacctaagctgtaatcaataaattctagtgataagttacctgtaaaatcatcaattggagaaatatcttggaacatttctcgtaaaccttcatctaaaaaccattggtatgaagccgtttgaatctcgattaagttcggtaactctaaaacttcactaatacgagcataacttctgcgttggcggtggcgtccatactgaactagttgacctgtcaactgattcacccctcaaatcaagcgttattattcaaaatatataataaaccatatgtttattattgaacaaaagaaaaatggtctctttaaatagaaaaccacaatttcataaaaacgtactattgatttt

SEQ ID NO: 41 - DNA, 37502 bp, Priestia aryabhattai
  source 1..37502: mol_type = genomic DNA
tgcacaatttgttcaaactctatcatatagttctagtaattggaggtggaacgatagattatgacaactctatcacagttaagtaaagacctaataggtgtgctgttactagtgctttttggttactgctttttctttgtggatataaatacaaatgatttagctattccagcatctctattaaatgtaaattccatttttttaagtattgtacttgaagctatacccttcattttgctcggagtatttgcatctgctcttattcaagtatttgtttctgaagaactcattcaacgtctgattccaaaaaatccatatgtagctcttttaccagctgttctagtaagtgctcttttacctgtttgcgaatgtgccattattccggttatacggagattattaaaaaaaggattgcctcttcacattggcgttgtcattctagtgggggcacctattttaaaccccattgtctttgctgctactttttatgcctttcaatcaaatacttccatagtctacagtcgtatgggcctggctgttgtggcttgtctgttaattggtttatccgtttatttcttttttgaaaattcgaatcagctacggcatgtacacgttcacgaacatgaagaagcaaacgtaggcaacaaattaaaacaaacgttatatcatgccggtgatgaatttttcgacatgggcaaatacttattatttggtgcactcgtagcaagcctgtttcaaacctttttagatagacacctattaacaagccttgcaagcaatgattttatgtcttctgccgttatgatgggatttgcttatgtactgtcactttgttcagaagcagatgcttttgttgcttcatctttttctcatacattttcacctacagctcttcttgcctttctactatatggacctatgatggattttaaaaacacaattatgctattgtctttttttaaaaaacgtttcgcatttagccttatttttatcatcactgtgattgtgtatctcatcgtcatgacttatggaatagttagtagataggagaagtgggatgaaaaaaattgatcggcagtttgttctctatataagggggatattactaattggcttttcactacttatgtttaaactcatattaacaggtaaaatcgttcaatttatcgcgcccaaaatgatgccttttatattattttcttctggcaccttttttttgttgggcattctccaaatttggcgaagtagcgtaaataaggatctaacttgtgaatgcggtcatgatcatgcggaaaaaggcaaaattcgaacaacgtttatttactctttatttctattacctattatgacgggctttttattttctaatcacacacttgatagttccgttgcagtaaaaagaggattaactttttcagttactgaacctgatactcagaaacaaaccggaagtgataaaaacattgacgccactaattcagaactagaaaaagatacgaatgatttattgtctggaaattcagaggaagcaccaaagaatgttcccacaacacatcaaaatagtattgctgctaaagtggctcctaaaggtttctatgaattacttgaaaagaagctagtcaaacaaacgaagatttctataaatgacaccgattatattccagttatgaatattattgaaaacaacacaaagcagttcattgggaaaaaaatcgaggtcaatggctttgtatatcgtgaaaaaggatttaaagataaccaatttgttgttgctcgctttggtatatcttgttgtgcagcagatgcatctgtatacggtttattatctaaattggaaaatgcgtcaacattaaaaaacgatagctgggttcgtataaaagggataatacaaaaaactacgtataatggagaagatgtcccttatgttcaagttcaacagattgaggacattccccaaccggataacccatacgtatacgaactttaccaaggtgaacaactgataggtcctggtaaataaaaagaatatatgacagttttaaggtaggccactacgagctagctgcataccatccatcatttacatactcaaattattgtgctagagtattgtaaaatatatgtttagaattaagaataagaaattgttaaacggcatttcaccaacctttcatttttctatggtaaagtaaaaagaaatgttcatgtaaatattaaaggatctggttttgattatgttcactttcccagagactactctttatttatgttattaagatcattttttattagggctattgtatatatgcatttaattgtaagcttgtcccctttaggtaaatagtgtaatatcactgtttataagtgatattactctctatttaaaggggctttttctatgtttaaaaacaaatagaaaacaacatgattatttcttagttggagtgagtataatgagttcatctcttttacaaatgaacaccatttttataagtatcttaattgaagctttaccttttatattactaggtgtaattatttctggtattattcaaatttttgtaacggatgaaatgatggcaaaagctatccctaaaaataaatttggtgcgattgttctggcaagtgtaattggggctttatttccagcttgtgaatgtgggattgttcctattacaagacgtttaatggcaaaaggggttcccttatatgctgctattccgttcatgttaacaggccctattattaatcctgttgtcctattcgggacatttgtggctttcggtaacgattggaaaatcatgattgaacgtggtgttgttgcctttcttgtatctttaacagtaggtttaattttagcctttcaatttaaaacgccacaagttaaaaatgaaatccatgcacacactgcttccaagaagatgagtgaaaaaataggagatgctctgaaacatactattaatgaattcttttctgttggaaaatttgtcattatcggtgggttaatcgcggccggcatgcaaacttatgtaaagacctctaccctcatggctctcgggcatggagcagtatcttcaaatgtagtaatgatgggcctatcttatattttatcgctatgttcttcagctgatgcttttattgcttcatcgtttcgaagtacatttaatgatagtgcagttattgcctttctagtatttggccctatgtttgatataaaaaatacattaatgatgttgagtcaatttaagacaaaatttgttttctcactatttgcatacgtgtttattctcgtactagtcctatctctactcattgttcattaataaggagggacatttatgtttagggttttgattttgttaggctttactatgatttttatgcatcttcatgccactggagatatttcaaaatatataaacatgaaatattcatggatttcatatggaacgatttttttactgtggtttttaactattgcagaactagttttttatatgacaggatctgatgagaaagagcaaggtcatgaccataattgtgactgcggatgcggtcatagtcatgaatcaccgaacaagtggaaaagacgggcatggtaccctctttatttcttacctgttgtaactgtcttctttttacctgtagctacactcgattcaaatattgttgaagcaaaaggattccattttcctatttatgataaaaaagatccttactcttcgcatcagtttctacagcccgatacgagttctttttatggagaagatgcatacgataaaatgattcataaggatttaaaaaagttttcaaaaggaaaaaccattaatttagaagatgaagagtttttaaatgcaatggaaaccatttatcgatatcctggtgagttcaccggaaaacaaattaagtttaagggatttatgtaccacacgaaagaattaaaagacaatcagtactttttatttcgttttggtatcattcattgtatagctgattcaggtgtgtttggtatgttagttcaatttccggatgatgtatcatttaaaaatgatgattgggtaacggtaacgggtgaagtaagtacgatgtattatcaaccatttaaaaagacaattcctattgtaaaagtaacaaaagtaaaacgtgaagaaaaaccagatgatccttatgtatatcgtaataatcaataaataagaatagaaaacgcaggttaacaaatgttaacctgcgtttttaaattgctgtataatcgaacttttaataaaaaacaaaagttaactctaatcttcagacgaattagcttacttttatttttatatctttttttaataattagctccgcttctttcttcttaaacttaaaattaatgaaacaatgcctaatactaacgcaataatggaaagagtagtaggaagcgtagcattggagtcattgctagttgcttcattagtagccgtgttttcgttagtagctgatgtatgagaatctccctctgcaccgtttccttttactaccgttgtaatagaggcaggtgtatctgcatcagctggtccttcccatgctactgttgatccatctttatatgtttgataagccttccaaacaatcttcttagtattatcccctacttttccttgcatattgaattccccaaactctgtaggtgacaaacctgcattagtagctgtccatgtaacacttgtaatcaaacctgaagagtctttttgaagctcatatttccatccttctttaggctcgaatcgagatatttctacgtcttttggaatatcgattttcacttttgtagttggaatatctttttcagttggaacgcgtacagtaaatttttcataagagccttgtgtcgcttcttgagggtatacgacaacatgagcactcgccgttcccgcaaatgcaatcgttgaaagaactaatgtagataaaagagctgttacttgttttttcatttcttttccttctttctaaaattattatttaacatcataaacaacaatgtctttatagatcacaacctcatctaagttggatgtaacaagccgtacggcaatttgccaccttccggcataaggaatgacaaggttgtttgtttcatacatcttatactgtacttgttgtttctcctgaatttcgtctttatttacttttaagggcacgccaattggtgcaagctctcctttatttttaggagaaagtgcgacgtctatcgattgaatagaagatccatcctttggtaaagatgcttttacccagagagaacccttaccaggagataaggttgacgtttttatgagaaactctatatcttgcttgctttctttccataccaagggttcattctgtggaataggatttaagtgtgtaatcattcctacaatcagaacaataatcagcataaaacttacatcggaaattaaaaactttgcaaggcttggtgaatcattctttcggagatgttctctaatgagtatccctacaccagctactaacatgaccataaatattttagctaacaataacagtccccatgtggttttaaagagtgctgttatgtctggaagaagctttagtgtgtaaagaacacccgaaaggattaatagcataagactcccaaaggctatacgcgaaaaaatcggaagaaaagctagagcttgttctctctccttacgccaaatcatgaaaagataaactaaaccagctgcccataaagaggctgtaaccaaatggataaagtctagaatgattgtataacctggtacatctgatgctactgcgtgaccgtttaacgtagtagctactaacagcaaacctgcccatataaaatcaatgcacttattctttagtaggaagagaaaccctacacacgcaagaagaatacaagtcatccacgaccaaccagtagcagaatgaatgataaatgtttttatttggggaaggctagaaccctttaatagcgcagtaatttggacccctatactaatcagtaaaaaaatgatatatccagcttggaggtaccttacattcgttttataatcttgtttttgttgacctgattgataaggaacataccatttccatagtacaaagccaactaaccataataaagccagataataaaatgtctgtactacagaaaaacctatattatagaaagcactcggcttaccgttttcgccttgattactattatcattcgtaatagcttgatctattttttctcctatagaaaagacgtacgttcctcgtacagggtggctatccgcagaaataactgaatagctaacggtataaataccttttttggaaggtggcacatccagaaaaatcgttttgtgagttcgattcattgttgctttcttagtggtaataagctcccctttatcattgcgtacttgaagattaaaaacaccttctcctagtcgttcattaaacgtcaatgataccttgtcaggcatttgctttagttgacttccttctttcggtgatgcatccaaaaggactgcgtgtgctgatacattaagaggagcaccaaaagcaaaaaaagagatggataagagtaaagctatcttttttaacatacatttttcacctatagattcttgttttataacactcattcttagtataagtttagccttaaacaaagaaaatcactcagtagagtgatttttttaaatagcaggcaaaaacattaaacattttagaacaaatgaaaagcagcacaatgaaatagaaatgtttttttaggtgttaggctcctagaaaatccattattttaactacaattgtatagagtatacatcttataaatgtttattatcctttggtttagttggtcgttgatgtcctatattctaacatgagaactaagcttaaataattgagcttagttgcagatttgaactgattatgtagcataaataggctaaatttttgacatacttatagaaataaactatattatcatagcacgaactttagttagttgttaattattgactattcgtttttagaggtgtatttaatggaaaatgtgtttgattacgaagatatccagctaattcctgcgaaatcagtagtgaacagcaggactgagtgtgatacgactataacatttggggagcgtaaatttaagctacctgtcgtgcccgccaatatgcaaacaattatagatgaaaaactgtcaatttacttagcagaaaacggctatttttatgtaatgcatcgttttcagccagagaagcgaatgtcttttgttaaaggtatgaaagaacgtgggttatttgcttctattagtgtaggagttaaagaagaggaatataaatttatccaacaactagcagaagaagaactttcacctgaatacattacgattgatatcgcacatggtcattcagatgccgttatacagatggttcagcatataaaaaaatacttgcctcatagctttgttattgcaggaaatgtgggaactccagaagcagtaagagatctagagcgtgctggtgctgatgcaacaaaagtaggaattgggccagggaaagtatgtattacaaagattaaaactggatttggaacgggtggttggcaattagcagctttgcgttggtgtgcaaaggcagcaagcaagcctatcattgcagacggtggtattcgtactcatggtgatattgcgaaatcaattagatttggtgcgtccatgataatgattggatcactatttgctggacatgaagagtctccaggtgaatcagttgagaaagacggaattctatataaagaatactttggttctgcctctgaattccaaaaaggtgaaaagaaaaatgtagaaggtaaaaagatgttggtaaaacataaagggtctatgaaaaatactcttatagaaatggagcaagatcttcagtcttctatttcttatgcgggaggaaataagctagaagcaattcgtaatgttgattatgttattgtaaagaattctatctttaacggagataatacatattaagaaccttttaagtagggtaagaaccaaataagatcatgttaattcttagagttaacatctttccctttttccaaactatttcattggatataggcgccataataggcgtctttttttgcacaagaaaggcaatccactacgttttcatgaatgcatatgggagaatatagttaattaaaaacagccctaaagaatggggctgcttttttaagccttccgaaaattatgaacatgttgaccaaagtatatatttaaagtagatttcttagccaataagaatcttttcttctgcatatcgaatttttgattgcttatttgagcgaattgcaagcacaaaaccaatggtaagaggccccactctgccaatgaacatcataatcgtaatgagaattcgtccgataggacttaagtcgcctgtaaagttagcacttaatccaactgttccggaagcagagaacgtttcaaacaaaagagtagacatatctacaccttcttctgtgattgtgagtagaaagaaaataatagaaacaaaaataattccagaagtagcaatagaaaaagctctataaacaagcgatttaggaattcggcgtcgaaaaacattaatctcttctttatttgtcaatactgaccataaagcaaataatattaagacaaacgtcgttattttaattccaccgcctgttgatcctggggctgctccaataaacataagccccatcatatacactttcgaaggtaatgttagtgccccgatatccaaggtattaaaaccagcagtacggggaactactccttgaaagtaagctgcccaccatttatcgcccatgctcaattggcctaaagtatgagggttatgatattctaaagcaaaaataatgagtgtgcttacgacatttaggaggatagttgaaactaatacgattttagtgtgaagagaaaatctccttatgtttcgttttcgaaaaacatctgcaatgacaaagaatccagtccctcctattatgaagagtaacgtaatcataatatttacagttggatctcctacccatttacttaaattgtctggttccaaaccaaatccggcattgttaaaagccgatatagaatggaatatcccataatagattgctcttccccagctcatttcttgtgaccaacgaatagctaggataagtgctccaataccttccacagccaatgtaattagcacaacacgttggactaatgcaataacgccctgcagcgaaaaagcatttagagattctttaagtattaacctttgttgtaatccaatttttttacctagtacaataaacatgagtataccaatggtcatgaatccccatccaccaacttggatgagcacaagcagaatgagctgtccaaataaagtaaatgtagttccggtatctaccacagctagacctgttacacatacagcagaagtggcttcaaagagagcatcaataaagcttaaatgatgtctatcacttgtagcagccgggatcattaataagccggttcccagcaatattaatcctaaaaaacctacgaacaagatacttgcaggttctaggtgcttcactttatgctttttgcgtgacttagaaattatcatattacatttcccttcaaaatattttgagtaaaaacttattatatatcatacctatttatttgaaaatatggttattttttattgcactcataacttccaagtacatgctttatgttaactaagattgcatatcatatatagtcgaaaaatagaaaaacctactgctcctctacagtaggtttccaatgtttagaataggaaatttggtatgatgcctcacggagtcttgggtagtttgctcaagaatcgcatttataattcttactaataagagttgtattttaagatggagaattaacagcaagaattatttgcaggtgatttttcagttggtccaacgttatcctcagtcttatgaacctcgctatttgattttgtatagaagaattcccattcgtttccgtcaggatctgttatccagaatttatcttgtacagcgtagcagcaagttttattcatttcttcacgagcaaagaatccctcattttctaatcgtgatatatgaaaattgatttcttcaagagtttctacttggaagccgaaatggtttacttgattaccttttacttcttcacgtacatttaaggtgaaatttaatcctggttcatctaataagaatttagcataatctactttaaatctgttttatggtaactaggaatatgaggaatacgctattagtctaatcagattggcagattcatatacatacaaatttaaaaatggttcttatttaatttaacttatgtaaaagcataaacttactttttatgaatataagatattcttttagctagtttttagaaaaactttcgcctttacaattagatgcgtttattgtatgattacataacaagaacatttgttcgatattaagggtttagagatgaataaaggaataacagaacaaactaagacagttaaacacaaaactttctcgcacggagcaaaaacatttgagccaactcttattctttatcgaaataccttggcgtttattgtaaacgtactaacaatcggaggtttcaaattatgaatgataaaaaagcagcactagatatggctctaaaacaaattgaaaaacaattcggcacaggatcaattattaagatgggagaaggcacacatacaaaagttgaggcatctagctccggctcattagctttagatatagctcttggaattaatggttatcccaaaggaagaattatggaagtttacggacccgaaagttcaggtaaaacaaccgtttccttgcacgcaattgcagaagtacaaaaaaatggagggcgagctgcctttattgatgctgaacacgcacttgatccagtttacgcaagaaaactaggtgtagatattgatgagctgctgttatcgcaaccagataccggtgaacaggcacttgaaattgctgaagcattagttagaagtggtgctgtagatattattgtggttgactcagtagcagcattagttccacaaaaagaaattgaaggagaaatgggagattctcacgtaggtctacaagctcgtttgatgtctcaagctcttcgtaaattatctggagcaatcaataagtctaaaaccattgctatctttatcaaccaaattagggagaaagtaggcgttatgtttggaaatccggaaacaacgccaggcggaagagcactaaagttttattcttccgttcgccttgaggttcgccgcgctgaacaacttaaactaggaaatgacatagttggaaataaaacaagaattaaagtagtcaaaaataagatggcacctcctttccgcattgctgaagtagatattatgtatggagaaggtatctcaaaagaaggagaaatcttagatattggttctgaagtagacattgttcaaaagtctggatcttggttttcatataatgaggagcgtttaggtcagggacgagaaaacgctaagattttcttaaaagaaaaccctgaaattagagaagaaattagaaaaagaattattgatttcaaatatagtgataataataacaacaataatggtattgataaccatagcgaaaacgaaaaccaataaaagtataaaacgcctttcccacggcttgaactccactccaattgttagataaaaaactctaatgattggagtgtttttattgttgcagctaaataagcgcaaattatatagagaaacagcataaatcttcctgcatccatttgaataaatagatactcgaggaacgccttcacactttccctctggtaccttttgtcttcatatcgaaaacataattatcaataattcgaatgtcctttccacttccccctgctaaaatacctcatggtgtattttgttccttagaagtagaaaaatgacctatattaaaatcttgaattgttatgtagcttttattctctatgctaactaaacttccatctgtggaaaggctctttattttttctccactaataagtggctttttacttttatagttcctgaagataataggctcttgtgtagtacctgaacgactaatgattaattgctcataatagatgccgccccctgatataaaccgtagttccaggttgagctactttacttgcccttcttagtgttttaaaaggcttgcttttagtatctaggtttttacatctcctgtaggaaaaacctagatttcatgatgtattataggaactgctgaaggttgattagctgtctcacccctttggtttatacagcacagtaaaataagaagataccaactgcttttttcataagatactccttaaagttaatgaatttcacttacaagatttttaaattatactatggttcttttaataaggatgtaaataatcgcactatatcttattatttttaaagctacagcaatttttacatttaaaacagaaagtgctaaagtaatgctagaatgtggaggttttagagatgaataaggaacttaagttacgtcctttggaaagagaagatttaaaatttgtccatgaactcaataatgatgcaaatatcatgtcttattggtttgaggagccttatgaagcttttgtagagctacaggatttatatgataaacatattcacgatcaaggtgagcgtcgtttcatactagaaaaggacggggatatgcttggattagtggaattggtcgaaattgattatattcatcgtagagcagagtttcaaattatcattgatcctacgtatcaaggtcatggttacgccatggttgccacaaacctagcaatgaattatgccttttcggtattgaatatgcataaactttacttaattgtagacaaggaaaatgaaaaagcaatccatatctataagaaggttggtttttctatcgaaggtgagttaaaagatgaattttttgtcgatggaagctatcataacgctataagaatgtgtatgtttcaaaaagaatacttacaaaccaaaaataaaaactaagtttgaattattataagcgtcctgcccaataaaaagagacgcaagaatgaaaaacaggcttttattagggaacaaaaaacagtttaatatagaattagaatagagatcaattaaaataaaaaataaaatctatctcatagaataagatagatttttcaggaagtggtgattaagtcgggcaggaagatactctcacgagtgcctccctacccgacttaactatatatgtagtttgcaaccacattgtagcaattaatgtatttgctttaattattcaatccttaagaagagagtagctccaatatgcccaaatatagatgattcctttaatttctatgtcgaagcgctctatttaagaaacttttagttccttaggctgtaatatttttttatttaacctaggggtgtacataattaaaaaaccagatcttccaatagtatagataataaaagccagccaaagtccatggttatgccagataggagttactatgagttggataattatatataaaactgttgcgtaaatcatagagtttcgaaccggtgcaatttcagttgctcctgtaaaaacaccatataggacaaggccaaaacaagcagcaaatggatagatgacaagccatgttccatacttgactgaaatttcgataacactaggtaggtttgtaaaaagcccaataataggttcttggaaaaatgcatataagctagatataacaaaagctgttattattgaccattgccttgataaagaaaacgtttttttatataattctttgtcatttgctcctactgctttacctacgagaatactggaggcattagcgaatccatcaaagaaataagccattatgtagtgaatttgaaacaatacagcatttgcagctagaaattctgtgccaaacgaagcaccttttgctgtaaacatattaataacagccaataaacaaatagttcgaataaacaaatccttattaacattaaacatccttttcatagaatctgtatccataagtgcctgaatcgatggcgttttccatttaaatggagatgctttcacaataatgaataaacctaatacgaaggctgtaatctcagcaatcaaggttgctgtagcgactccttgcacaccaaaagaaaaagcatgaacaaagagaatagctaaaaccatatttaaaacatttgttagtatctgtaaacacaaagattctttaatcttagccattcccattaaccaaccgagaatcacatagttcatcaatgtaaaaggtgctccccatattctaattctgaaatattctactgcaaaactacttacatcagcatcgggagaaattactaggagggccgcacgttcaatcggccattgtaaaagaataaaaagcatccctactattacagctaataaaaatggacgagatagagcaagtaccccctgatctggatcgcttgccccatttgcttgtgcggcaaaggcggatgtactaactcgtaaaaagccaaatacccaatataacgtattaaaaataagagttcccaccgcaactcctgcaatataagctggagctggaagttgcccaacaacagcggtatccaccgcacctaataagggcgtagtcatcgttgagattgtcaggggaatcgccaaagtaagatacgtacgatgattcatccaactggcctccttctattattttgaactaaacataaaagcaatagcttcgattacgtggaagtctctttcctaaaatgtatgttctaatctattcgattgaaaaaagttgaggtagctcattcaacatgatacccaactattatttaatggatttagttgcaatataacaaggcatatattcagtgattttccccttgtggtgatgatcttcatagagatcttgtaaggtgaatccagcttttagttgtccgccaatttgagtttctaatgaatggctaaactgtacaccgccattttttataagttcttcatcattttccaccgtgtttttagttccatcataaggtaatttattaaccacttgtaatgctttctcatcttctccaaataaagaaagagcagggtttgcaaagccagatagcagaacgccaccttttttaagaactctaaagcattcttgccaaacatgttcaacatcttgaatatagcagtttgatacaggattaaaaatcatatcgaacgtctcatcttcaaagggaaaggtcttactcatatcccctttaactaaatcaatagaatagccttctctagtggacaccattttttctaattctaattgtttatcagagtagtcaaacactgtaacttctgcatgttgtgctgcaaaaactgggcattgctgtcctcctccgctagcaagtcctaatatttttgcttttttattttttaaatggaataaaccagttatgtggaacaggtttacaaggtgttaagtagatatcaaaattaccttcagttgcctttacaaaatcttgatgattaatagccaatgaccattctcccccggctgaagcccattcatcccacatttcggagttaatttttgtataactagctttttgtgacatagttaatcccccctttacctttttgagtgttttatttaattttatcatgttactagaagaataatttagatgtactaattaatttgttctgtttcagataattcatctgtactggagaagtaattaatagatattttttaaaataaaaaacacccttttgaaaaatcaaaaggatgtttgtatcttaaatataaaagcttgtatataaacaaggtacaagttttatttttaatggcttgtctcgaagctttcagccatcattaggtcatttttgtaggcagccattgcgagttcatacctcaccttttggctcgcttccacaaaatcagcttccttcacaagccccgataacgaatattggtgacctttaaaacctacgttcaattcagtaatttgattgaatcgaaaactttctataggaattccattcacatttttcaacaaatattgaccatacttctcgttacatgtttgggctacttgctccaatactttgaacgcatcgtccgggttttgcctatagttgagaataaggctttcatttaccctgcgtcttcctcgggttccgttctgaagttccgtaatgttgctatatgaaactgtatagaggtagccatcatactggcgaatcttcaagtagcgcatagtaatttcttctatttttccttggcggtttccgttgagaataacataatctccgtgatggatctggcgttcaaacaagtaagccagtcccattatgtaatcacggatgatatgctgaaggattattgccagggcactggccaacactacagaactagtgagaatctttccgaaatcaaagaaatggctaagcacataaataaagaaaaaagccagccctactacccttgtcacctgattagaaaaatgcatcagcgtctcttctcgtttttcatctaaaaagctcgttttgtcaaagaaaagcttaatgaatttacgaataaaataaacaataagtataatcagcagagctaccattaaaacctttacgggaaactgctggaagaattcgtaaaaaccaacctatccactccttatttctaacactataccaaaagaatgtacataaaaacaaaaatcttctgttcttcacaaaccttaatgataatagcacggtttcaccaaaatcggtatattgacgataatctctcaattaattaaaattaaaggggtaaggcgaactgtaatagactaattttcttcatttttttgtagcctattcttatatatctcttgactttttcaggctttttaataaagacattcctatatgttcatcattatttctacctagtctataattagctaaaacgacggacgcaactttcttttctttatcaacccctaaaaatgagctgaagcatcctgttccaccaccatgtaacataacgttattgtttttctttaaaagcaaccatccaagacccatatcgaacttcttagttccatcgctatgtttttcatggcaaaaagacagatatggtttatcttcgtccatatttatttttgcgtatttaagtaaatcctcagcggttgaggatactgcccccgcaggtgatataaagttttctttgtcccactgccagttgtcgcaatcattatttttgcggtcatagccatgtaaattattatttgagctgcctaaacaagtatcgtttagtccaagctcattatgaagaaagtcatccatagtgtcccaatatcctttacccgataccattcccaacacatacccaataagtgagatgccgaaattggaatatttccatgaataatctatttctttcagtctatttctttcgattagcatcttcattttgttaaaatccatatgcagcggattatttttgttcaaatcgcgtccgccaaaaatcaaacctaaaagtattttaaaatattcccgtttatttaaaggtaagcttcctgaatatccggaagagtgagtagcaaggcggagcaatgtaggataatacgtatctttcttaagctcttttatgtatttttgtatagagtcgtttaacgacaccttgttttcaaatatgtattttgataacagcgatatagtgaaagttttagtaatagaaccaatttcataatgatatctttttgacgagtcaatttcaccgctttcattatagacttttataatagattgattatccgttaagtagccaacggttagtttcaagtgcttttttcctttacaggtcttgttaattaatcgtaatgtttcatcactgatttcgatcataatgattgctctcctttatcctttatttcaaaaatcgttaaaaggattgaacagtctgctttaagataaagtagcctatcggatttatttttatgtattcttccctatattattaattgcttcacctcttcgactttcaagctcccttattactctcaactgtaattcattgtgatcttcatccatttctacgttaccttcctcttcaaatccatcgtgttcttccccatcaaagctataaagtttctttaaaagcttccacattatttccaactcttcagttgagaacttgttaaaaagttcttctaaaaagaagattcctttttctgaaacaacaagcagtgcctcttttcccgcttttgtaatttttacgttaactgcacgcttgtctttactgctaggaactatgtcgacataacccttcttttccacaatggtaattaactgtttgacgctttgttttgtggttcctaattttctagcaatattattcaacgttgtttcaccttcaggtaaatgagcaattgccaccatcgccatatgctgtcttgatgttaaaagtttaagagatttatcaccctttacttgaattttatttgccagagaaaataaggtagcgtaagtttgctgcattaagaaaagttctttataaatatccatatccaccctccattttagacagtatgttgtctaaaataagaatagtatattttggtaattaagtcaatgtactgtctattttaattttgactattctaaggagattattctgttacacgtcagttcttagaagctttacatttgcctgattttattattaaccaaatgtatatcaatggaacctactatcaccctacgtttctctatgaatcactttggaacataataggtgttcttgtcctaattgtactaagaaaatccttgttaaaaagaggtgaagtctttcttacttacctactatggtattcgataggaagattttttatagagggtttgcgtacagatagcttaatgttaacctctcatatcagaatagctcagttagtttctttcctttgcgtgttaggcagtttgattctgctatggtatagacgcaaaaaaggcttagcaactagtaaggctgtatctctctcataagtacatacatttttgtatggatcattttctaaagaattaaagaataaaaacgtacaaaagaagcaagtttattttcagtgactctgaagatcaacttgctgcttttttgttttatttattaatatttttaatcacaataatgatttatctatattttactaataatgaactgtcttttatagttaaagtacatatttcttatgtgaagctttacttgataagaatctatattggagatgaaatgcatgataaatataaataaagctcaaaagcaaaatctattctcacgaacaaatgtccggacgtcacctactgtttctgtatcggctggaggagttgcttttacttttctgtttgctttacttgcttatggcttagctaaagtcccggggtttaatcagattggtccactagcctgttcaattataatggccgtcatctatcgtcagatttggggataccctgaaaaaataagatctggaattgaattttcttctaaaaagctgttacgctatgcgattgttttatatggactaaagcttaatattgatgttgtaattcatcacgggttaggattgttactccgcgatgtggggacggctgtatttgcgattgttttaacagtttttctagctaaatggatgaaggctgatagtgatttatcccttcttttagggataggaacaggaatatgcggtgctgcagctattgcagctgtttctccgattgtaaaagcaaaagaagaagatacagctatcggagctggtgttattgctttagtgggaaccctatttgcgattggatataccattttaagaccttatatacatttaacaaatattcaatatggaatttggtcaggcgtaggcctccatgaaattgcccatgtagctctagctgcagcaccggctggacgcgacgccctagctattggcctgttggctaagttaggcagagtgctcttacttgtgccattaagctttatcttaatgtactggatgaagcgaacaggaaaaatggaaaatggtaccaagattgaattcccttggtttttaataggttttataatcatgagtatttttgggagttatgtcgttggtaagcaccttataatacctgaaacgatcatgaatgatatttcaactctaactacctttcttttaacaatggctatggtcgggttagggttaaatgtaagtatgaaggctcttcgaacaaaagctttaaagccgttgatggcgatgtttattacttctatacttttatcattccttacatttttggcgatgtaaaaacaaacgaattattacgaatagctattaaacagcctcaggttcatttttcgatagtgaacctgaggctgttatagtattcttgagaaatgacttccatctaatgttacaatagaaaaaacaatggccatcaaaaaggctgattactcggcagctcatatttcctattcttatatgccgaatagtcattgtatgtaacgtgcaaccaactcatagcaccgctcttttgtaaggcttgctaaagaagccgtatattctaaattctctgctgcactatccttatattttaatgatgcctctttggacaatgatcgtgatgtaatatgcgctcggtttgtatatactaggggttgtactgtacttgatttttcaagagcatgaggagaatgaaaaaccaaagcatctcttcccacctaatataataaagtagaggcacatttagaaaatacattgactcttttgaatcagtcatggtataaacacaataggagaatttagcgcttaaaagcataaaagcgataaagtttaaaataatattcatataaataggatacataggaggaaattgccaccatggaacatactagcaaaattatagactgcactattcgtgacggaggtttaattaacaattgggattttagcgttgaatttgttcaagacttgtataatagcttaaacgcagccggcgttgaatatatggagattggttataaaaattcccctaagcttcttcaagcgactgagcccaatccatggagatttcttgacgataacttcctcaaagaaattatccctgagaaaaagttcacgaagctatctgccttagtagatattgggcgtgtagatccgaatgacatcctaccgcgtgaacaaagtatgttagatatgattcgagtggcatgctatgtccgcgaagtagataaaggcctagagcttataaagatgtttcacgatttgggctatgagacctcccttaatattatggcactatctagcgtaccggaaaatcagctcattgaagcatttgaaatggtaaagaaaagccctgtagatgttgtatatatcgttgactcttttggaagcctagatcctgcggatattgagcatcaagtgaaaaaattccaagccatgattcctagcaaacagcttgggatccatacgcataacaacatgcagctagcttttgctaatacattaactgcgatgcgcaatggcgttacattccttgattcgtctgtttatggcatgggccgtgcagctggtaactgtaacacagagctgcttgttagctacataccaaaaccaagctatgagatgaagccggttcttgatgtaattgaaaagcatatgctagaaatgcgtcaaaagtgggaatggggctatatcattccttacatgatttctggtgtgctgaatgaacacccacgtgttgctatggcttaccgtgatagcgaagatcgtgacaaattcgtagatttttatgacaaagtaacgtctccagaagttactacgtctccagcatcaaaataagttaaaatgctaaaagtacctctgttaatcggggtacttttttgttattatacaaaaaatccatgattatatagcatatacttaaactttgataccctcgatctcgacaattagctaaatgtaaacagtcgtgctcttcttaaactattatttatgtatataaaccggcgttccaatgggaactgcagaggaaagttctagaatatcttcattctccattctgacacacccatgtgacatatctctgccaatagaagctggatcattagtcccgtgtattccatatgtaggttttgacagtcccatccataaggggccaaatacagctggaggggtagtatctttattaatgattttaaattttccagttggagttggagtgatcattttccctacagcaataggatatgtttttactaatttagctccatcatatagttttaattgatgctgctttattgagacatctatcctttttgccatagcagtacctccaatcttataagttactataaatagaattttttaattgttaaccacgtatatcgaataactattaactgaaaaatatctaaattgattcataaaaattagtgctatttataccgttctaatagtgaaaaatttctttaaaagccaaggccctggcgtaaatccaagcgttaattgccaagctcctattgcttgcaaaccaaatttacgaactaacaccatcttttgactcatgcttcttacatcttcaaaccatacttcatgcagctatcccgcttgatttctatatcgaaaaaatggcgatttgtactccttagaatatcggatgggcgactgatatctcatcgctgttttaatcgcattttgattggatatagcagatgctactgtacccggcttgtaaggaattgaccagttatatccgtacaaagggactccaataatgagttttcttcttggaacactttttatcgcgaattctattgtgctttttacttcagtaataggtgcaacaggccctggttcgctgcctgcatgatgccaatcatatgccataatgaacatatagttaacaacggcacctattcctccgtaatcatatccttttaaccaaggaatatcttcgcttgtcttggccggaacctcgattgtcagcacatagcctgcaggttttaaacgttcactcagctgacgtaaaaatcctgtaaaaagatctctatcttcggtctttacacgttcaaaatcaatattcaccccgccgtatccttttctagatactaaataaaaaatattattaacaagattgtttcttgcctgaggattatttaaaacttggtgggcaagatcagaactaaacccttcagaagttagattagtaatcgtaactagcggtgtaacacggtttttccaagtcgtttcaattgctactaaatcgtttaaatcattcagaatatctccgttgctgccaaaatgatattcaaagatagaaatggaagaggaataagttgcaaaatctgtaatcaaatcgcgatctaattctggattgcgaacggcataatattccagtgtgcctgcaatgtagtctgatatattagggatttttattttcatcccgacctgcaagtaattataatgaactgcagggttagcctttttcaattgctccaaggacacataagcttttttagcaatacctttcatcgtatcaccgggttgcactgtgtatacatatagagctataagtaaggcttgaccggtaacaatatttgtttcttctaacccattcacactcctaagctgcgcaacggaataaccatatctcctgcttattgaagacaacgtatccccaggttgaactatatgaacaaacatgttttctcctcctatgtactctttatcgaattatgttttatttcgtgacaagtttaaagaagccattcaataaatgtatatgagtattgtttgtttatataactgagttaagtaaggggggaacctctttacacactcccccctctattgcgcccctaatacggatagaaatgttccagggattatatcaaaatctatgtatcataaatgtatgcttttagcgtacttgaaaaaggacgattgtttgtcaagtaggattacattaagaaataaaactattttaaacaatatagacaacgcggcgattaatgttagtcttaatgaataattaaaatcgaaaaaccttctactctgttaggtagaaggtcattcgtgtaattgaaatgtcaatgtagtctctgtaaaaaagaattcaattctttaaacggaagtggaagaatacaagtaaatttgagtgacatcatttatttgagagccaggcttccataccacagatgaattaaagtccttgacctactttaactttattttcacctgtactcctataagcccatatgataaccggaattaatatcaaagatagaattcctccacttaatgataaaacggcataacttgattgagccacaaccattccggataaagcccctcctgaagctccagctaaagcaattaaaacgtctatagaaccttgtgttttcgcgcgcgttaagggttctgtagagtccactatttgagctgtcccactaattaaacctaagttccagcctaatccaagtaacgatagagcgatcactagaagaaccattgaatcactcggtgccatagctgctaccaagccagctaaaagaagagtgactcctgaagcaattgtcatcgccgttcgtccaattttatcaattaagaaccctgtaaataatgaaggaagatacatggaaccaatatgaaatccaattacagcccctacttcacttagttcgtggccatgatgtctcatgtgcacaggtgtcatagtcatgatagcaaccattacgatctgagtaagtaccataactgttgctccaacagccactccttttttgttagttgattgctcagtactcgttaaattcttttgagtatcactttcttgtttattcgcttctattgctcttgcaatcagtaacggatccggacgcagcataatgtaaaatacaagaccagctaatatgtatgcagcagctgctaaaatgaaaggtcccgcaagtgttggaataccaatagaaagagcaaaattccccatcacatcaactaaattcggacctgcaacagctccaaatgtggtaaaaaccatggccatactaatggcggtcccccgttgttttactttagctaaatctgttcctgcataacgcgcttgtaagttagtagctgttcctgctccataaacaagaagagaaagaaacaaaagaaaaatactattaagaatagcggaaaaaataacaccaatcgctccaattcctcctaatataaaacctgttgtaagtcctgcgcgacgaccttttttttgagaaagctttcctactaaccaagcagctcctgcagatcctaaagtaaatagagccgtcggtactcctgcataagcatctgtaccaagcatttgctgcgcaataagtgcaccgacagtaactcctgctgccaatcccgcaccaccaaagatttgagaaacacttacaacaaacaaagtacgtttatataaagctttttgtttctctggtgaattaacatattcttttaaacaagttgattggacgtctaaagcttttacatgatcctcgtttaccatcataacctgcctttcagaaaactcattttatttttaaaaatattctaactagatttggaatatcataacacgcacaaaaaaaccatacaatattataattgtatggcaaacaatattatatatagtcgttaagtaaacgtttaaggataattaacccttgctcaagctctctaatcgttttcggggcacagacagcgatccttacagctctagctggacaactgtttcccactacaaatcgttctgctgcatacacttgtacgccctgctgcgcagctaatatttctaattccgcacctgtaatcttttctggtaatagtaaccaacgaaagatacccgtttccatccctaaacacgtgtagtttttcaaacattgatttacaattcgatttctgagaatggcttgttcgcgatgattctctactaaggactcaaattggtttgatacaataatacgtgctgttagctttgctaacaatggtgaaactgatatatttaaattataaagtgcctttgcaataggatctttaaatcgactaggcgctgctacatatgctagtcgtacccctggtgctattgattttgataaactcgcaatatagatgacttgttctggtgcatacgatgccaccgctggcattggttgctcatgatggagatgatacgttgcatcttcaatataaaatgaatgaattagttttttcacttaaatcatcgaagcataaaaaagactttagatttaaagtcctttttttatttctatggaaaaataatgctatattcacttaaaaaaagcagagaccgattggccctgcttgttatttgactatcactttccctaccattccactattaaaatgatacctacatatcagttcatatgtaccgggattttgtggtttcacggtaatggttttttcttttccaggctggacttcagcgtcaattccgagcttttctactgtgaaggtatgctctttctgaccttcatttttcaatatcaatgttgtcgtttttccactcgggatagtgatggtttctggattaaagtaatcatcgttcaactgaacctccatggctttctgtcttaccacgtcggattcggccaaaacgctgagtgaccctgaagttatcacaccgataaccatcgcaaacaaaacggccaatcccgttaaccagtttttcatagacatttgcattcactcctttcctaagccatattcttttctaattcataaaataatatcaatattttttgtgaattaagtattatttttccttaatcctaatttccagaaagtacagatagttaggaaagctgggagaatcgtgagtgctaagagaagaaaatagacggcgtaatcaggaatggataagttttataaaaggagcttctcaattaagtctcttagttaaattgcctaactttataaaataatactgatactaatagagcagttccactcatacccttataagagaaaacaataaaaaggagtgtaaagtgagttgataaaagctaaggttagtttacggcctattgttagtaagataaatttacctaccgttttgaaaacaactatacttcccggtgactcatttgaaagcttatttattgcaactcaagtaggagagatcttttacataagagacggagctatacggacttttttagatattcgctctcgcatcataaaattgggtacttctgaaccaggtgtttctcgcgggggatatgatgaacggggattgctagggctagcatttcatccagaattttattataacggtctgttttatcttcattactcagtagctggaacacaaggcccaggtgcactttccgaacattataggcctaacccgtgtgatcctaaaacttcaaacttaaggtggataaatagagaaactaaatatgatcatattgatacagtggaagaatggatttttcaaccaaatgctcagcctcaaaaaagacggacgttacttaacttaagaagaccattttttaatcataatggcgtcaacagcttaaacttttcacctgaaactggaaaacttatcttaacaatcggagatggcggatcaggctatgacccctttaatttaagtcaggatgatatggaaatttacgggaaaataattgaaattgacgtaggtaagaatacatttatccataatccacccgtagtcacgcgctttagtgaactcccctcacctatacaggaaactcttacgctcattgctaagggtgttcgcaatataacgggcatttcatttcaaaaattttataatcagtacatcaaatatgtaggaaatgttggacaagacgtggtagagtcgattttttcattcgttcattataagccaatacctgtttctcaacttgttcaagcttctttaatgagagctaaacccagccaagaaggatttattaaccttggctggcggggatgggaaggagattttccaacttcgtttataaaaaggtgttctgaaaatccggtcttggatgagaaaataattgcttattacaatgaagcggtaaaaactgcagtgaaacgtcttaagcctttaactagttattttcacaaagatccccgcctcaataaatttggagggacctccctcacaggagttcagccatatatggggaataaaatccctagcttaacaggaagcgttatgtttacggatattgcacaggttaaagaatctcaatccccagttaaaggagttttagcttataccagagcaggtacagattgtaagctaaatgattttagtgttgtggaaattgattataattttggttctcaatcagcttactacgttagtttgggaacgaacctggatcaaaccaggctttatttaggagtttatggctctatgaaagtgtctgactttaatcgaggtactgtttttgaaattgttccatgattatctttataaaattcgaccgggtattgattttccccaaaaaattatagcttaattttttcaccagctattttgtaagaatgagcaaatgaactttctagaaaataaaaaagcctttaatcaataaagcccataaaagactcattttatgggctacagtacatacctttagaaagataaagaaatttatcttaatggatacgacctattcctttaaaaataaatgcgacttgttagtcctctctcttaatttcttcgtacattacatgtaagagttgatatatcgagcaatgatctaaatctctatttaacctcttataatgtaaaaacagttaactgaggtgaaattcatgtactttttaaagtctctttccaatgaggtaaaatctgcgcagcttttttttaatagactatctaaaactaagcagcttgtatcaggcgctcttttcgccagcttagcagccttttttcaatcagcaggaggtttcttaccaggaataggagtttttattagtccattatctactgcacccattcttttttgttttatactttcgctccctctaggttttattacctatatactaacaaatctgcttcttctgattatccagccaagtgaacttattatttttccttttacaacaggaatattgggaatgggcataggagccgctttttacttttttaaaaagagattgtacattattataagtggggccaccctattaactgttggaattattaccttattgtacggtttcaaattcccagtattaggtcccgtgatttctaaaaatttttctctttctactactggtttaatttttgtatttactttcctttatagttggatttgggttgaactcagcttggcttattttaaaaaattaaaaacagttatttcctagtgaacctacaaattaatcccttaacagagataactcgttaaaataatggagaaatcacaatcagctttttagaagaacgtcaattaggacaatctcacctgaattttccaaggctcttttcattatattttcaaattcaactaaactatttgctcgttctcctttaattccaaagctggttgccagttgaacaaaatctgggtttgtaaaagttactccatagctcttaccaaactttttgttcatcatttcctgctctatttttaatgtagagtcgtttaaaacaataatgatgaatgaaaggcctaagcgctttgccgtctctatttcagcaaaattcattaaagctcctccatctccagtaatacaaataactggatcattagggcaggctagtttagctccaattgagcctggtaaagcaatacccatggaagctagaccatttgagataatgagcctgttagggtttttaggttgataagttcgggctatagatactttatgagctcccacatctgaaatcacaatggtttcctctgaagagagcttgtcaataataggcaagatattctcgattgtcaaaggcagcaaattgctatctatctttttctcttcaatgtgataggattgcttaatttgctcctggagattaccagagggaatccatggtttagaagggatatccagctgatttaatactcgtaaagtctgctttatatctccaaccaattcgacttctatagggtaatattcatctacttctgccggtaaagtatctatatgtaaaattggtgtttttgccgtgttccattctttgggtaacttttcgacaaaatcaaacccaattacaataagtagatcagcttcctttaaaccttccagcacttcatctttttcattaaatccaaacgtaaagaaattttgcggatgatctttagacaatacacctttagccatataactatgggtaaccggtgattgaaggcgttcaataaatggttgaagctcatccacggctccctgtctgacagctccgttaccgataataataaaaggtctcttatactgtttaataagagtattggcagcctgaatggactccaatataggtatgcttatgggtatagatgtagggaaaataggtttaatgggaacgatttgagttgctacgtcttctggcaattctactactacgggtcctggcttttccatttgtgcaattttaaatgcttttcgaataatctcaggaagcgtttgtgcaccttttatctgaacaccccacttcgttgccggttccaccattttgataatgtccatatactggtgcgaatctttatgctgtcttcccaaagcagcctgtcctgttaaagcaacaacaggagaatggtctagctttgcactagatatacctgtcaataaattagtagctccagggcctaatgttgataaacatacccctactttgtttgttaaccttccgtatacatctgccataaaagcagctccttgctcatgcctcacattcacgaattgaatctgtttagagttggacaaagaatcaataaaatccaaggtctctttaccgggtattccgaaaatatattcaactccctcactttctaaacattgaacaagtgtatccgtcactttcatattgttcgacctctctctagatagtattctgacaagcttatgtgaaaggaatagctcattaatctttatctcattttttgagtttcaactcgcaaaaaccccaaatatatgcaaaaaaatcctattcactaactattgtttatagtgttgccattaggttcttatgttaaatacattttttagagaatgtataaataattgaatgggtcaaaaaacttggaaggaaattagacctcaatgactgtttctttgttagtgaacaaaaaaggcttcattttttctgctataaccttacagaaaggtatcctctctaacccttcctctatgttggctgattgaaagtgtggagataccctataaaaaattactattagaaagtaacattttgagaaatgtaaaaaatcccatatacaaataataagacgcatactcgtttaaattggaaggagccgtttttatgaaaagattattattaatgggatttatgttgttattttcgctaaacatgctggttgaaccaagtagtgctcgtgctgaaacacaagaacatcgtgttagtcaatctcaggtaaagtttgaaaatgaattcagaagactttggatggatcatgtactgtggacaagcaattatattacaagtgcaacaacagcagggtcagaagaccaaaaacaggtgttgacaaggttattaaaaaatcaagaagatatcgggaatgctgtgaagccgatatacggagaggaagctgggaatagacttacggatttgctcaaggaacatattgtgattgctggcaagattgtagatacggctaaaacgggaaagaaagccttggtgaatcagttaaacaaagaatgatatagaaatgctgatgatatagcagcgttccttagccaggccaacccttatttaaaaaatgaagatttgaaaaaattactgtatatgcatctaaaattagtgacagatgatttatctgcaagcttagaaaaagattgggagacaagaatcgttgcaattgatgaaggagtctcacatattatcttaatggcagatactatatctgagggagttgtgaagcagtttccaaagaaatttaataaataattttaataatatccagtattatttgaaatttcttcataaaacactgcatctgtaagggctcttttgctggatgactctaagaaaccttatgttcactaaaaaggtacacgtagatattctgcataaagcatcataaccaaaggtttattaaatttaaacactgggtattatcaaatcaagacgatgtgttaagagtaccgcccgtgcatagggtgtgtccttctctattctataaaaaatggcgcctaaaacggcgtcattttttatttggaaacaagtttactgattctagtgcgaaggttgtatttatatgaaaaaggtatatagattcctatctaatagaatgtatttttaccccactattcaaaaattttttgagtgaacttcattttctttaggaaagaccggttccatcgtgctctcttatctaatttaggctcatatttatgaatacaatgccctaaacgattgtgtgaacagtggctaatactcgacttctatcatttccatgtttagaagatcacttataaatattttgaaattttcacacgagaactccattatgatgtatatagtcatgctcttattaccttttaatggaatgaatgatgataaagaaagttaaaaagatcaaattaatttaagtttaagatgtctctattgggataatataataaataagctagatttaatgataatctggtttattttctacattttaggaggcaacaaaaaatggaacatggtaaagtgaaatggtttaatgctgacaaaggttttggatttattgagcgcgaaggtggagaagatgtatttgttcacttctcagctattcaaggtgaaggctttaaatccttggatgaaggtcaagaagtgacttttgatatcgaacagggacaacgtggaccacaagcgacaaacgtaaataaagcataagaaaccataataaaaaacagactctattttcagagtctgtttttacttaaaaagatttttatatcaacacttattcatcaataattagagttcatgtttttttaactcttcttcgaagaaaaaggtacttgggtatttgtcgactgtataagagtatcttttcatgttttttacataatgactttttaagattgtcactaattcattcgatactcttatatttactacttctccattactaaatattttctcactcatagcccttatcctttctcgcatcaaaaataatcagggattattttctatatgtttttttacggcctactgtttcttttctccctctatttctcttacgttctgtttttgcctttttattacgaagtggtgccacttcagtcaattggacagaggtcatatttgattcttttgttaagagctttaaagtggctgacagtaaagaaacagaatccacttcttctaataacttttccgccattggcttatattccacaaactctcctttgtcgatagcggtcaaaacctggtgaatgattgcttcctgatgcccagccattacctcactagaagtaggaggtgattgtctagacattttggttttcgtgacatcttcgatcacttttaagtgattacgttctcttggagttataaaggtaactgccaatcccttagtacctgcccgtcctgttcggccaatacgatgaacataactttcagggtcctgaggaatatcaaaattatagacatggctaacacctgtaatatcaagtcctcttgctgcaacgtcggttgcaaccataatctcaatcgtatgattcttgaattgacgaattacatcggcacgtttggattgcgtaagatctccatgaatgccttctgctgcatatccacgcttttttagcccttcagcaagttcatccacacgtttttttgtgcgtccaaacacaatagcaaggtctggtgattgaaggtctacgagattacaaagaacatcaaattttcgattctctggaatttccatatattgctgctcgatgttttttaccgttaactccttcgcttttacttttacgagttcaggatcgttcataaatttctgggctagactttgtacttgcttcgacatggttgctgaaaatagtaaggtttgatggggagaagagatgccaccaagaatcgtttggatatcttcaataaagcccatatttaacatctcatctgcttcatccagaacagctgtacgaatatgatttaaacgaatggttcttcgcttcatatggtccttaagacgtcctggggttgccgagataatatgcggtctgtttttaagggctttgatctgacgattaatatcctggcctccataaatgggcagcgttttaactccttttacctgtccaattcgatttaactcctctgctacttgaatagccaattcacgtgtcggtgctaagactattccctgaatcccttcttcaccaagctcaacccgctctataagaggaatgccaaaagctgctgtctttccagtaccggtttgagcttgtccaattagatctttacccgtcatagctatcggaatagcttcagcctgaatgggcgtagcctcttcaaaacccaagttatgaactgccttttcaatgtccttgcttaaattaaaatcagaaaattttttcattttttcgtgctccttctcttacttaaattcagaaatgagaaaagtactctttaattagagatgttatttattcatttctgcgtattggaaatcagtgttattattcacgaacatcttattttagcgtatctatacaaggcgaattcatgccttattttatccgcgcttccgtgtatttataaatttttataggatctataaagtgtggtttaatttagaaagatatggttctcactatttcttttttaaaaggtatactatttaggaggagggatgatgtagttatgtattataaccataggaagaaaaatcaagagcccttacctaaagaacaaatagagatttgggaatgtgaatccgaagaatgtaatggttggatgagaaaaaatttctcttatcaaaaacagcaaaagtgtcctttatgtggccataaaatgagaacaggagaacggcttttagatgcgtctcctaatccccatcaaaaataatttatgtccgtctgttgtataaatctataaaaaaattacggcacttctttaactgaaagtaaacttcttacccaacaaacatgccatatttgctttgtatttctaatgtatggttaactagttcataccttgtacccttcgtatgacccagaaaccagacttaaaacgctggtttttctattataacgagattttaaaatgagatataatatgtcttttgctagctattgaaatcaaaagtaaaaaaagactcctaggtggagtcttttttactcattttaattatgctactttatgaacgttagcagcttgtgctccacgttggccttgttcgatgtcaaacgttactttttgaccttcttctaatgatttaaagccttcaccttgaatagagctgaaatgtacgaatacatcgtctccgccttcaatttcgataaaaccgaagcctttgtctgcattaaaccattttactgtaccttgttccataatattgcctcctggtgtggaatactccacacttgtattactacccttgtccaaccatactatcttaagatgaaaatttctatggaagagatttctcttctctcaatcctacaccgaacaaaaataattaacctaagcgtaacacacagaaccgaagatagcaaatagagaaaaaatagataaaattttaaaatagaaatatatgtatcgtaataagaactaatttaaggtttactagcagtacataaattcaatggactttcaccatttttgcacctctgtagattacttaaaaaataataagcgtaataagaaacctgctgtttttgtgtatatgaaatttttcataaaattgatatcttgggcataatacaggatagatacttggtagaggggggattgtttgagactgaaggatggaaacttttatacagatagtagaaccaataaggtatatagattaaatgaagataacaagggaagctggtacctgagtacgcgtgatgatgatgataatgatcaaatgtcaagaacttcgggccgtaacatgatgaaaatgttaaagagtttttataacaaagtgaacgacagttgaaaatttacagctctggaaaacagcataaaaaatataaagctagcttaacacagctagctttatttctagtttatagagctagttatcataatggtttttttaggaattaagcaacgatactaacaaaaaacttttagcctggccgttggcaatcacctattatttaatttcgattgcagaagccttgttgtcccaatccgacgccatattagcagttttaccataccaatcggagtgtctaaaggaaactcctttcccatatccttgagatgaagtatgctcccacagcgtcgtggaatagcttgaagaaggtgatgccgtacttaaggatgaaattctgtcattccagctcgagggcaaatttttaaacccgtctctccaataaatatactgtccacctttatttttagactcatagaaatcggtacaacaggaaccactgcccatcatattgactttgttttgaagtttctgtttatctttttcaataaatgcattcagagcttccctgctcgtaaatccatacgccaaccaatcaccatttttattctgtttaggtagaaccatggttacttttatgtctgtgtcggcaatgttattcgctttagcttggaaattcacatcttttccatccactgttaaatagtgatacgatttaatcgtatactctttttctgcatacgccgcgcccgtagaaactggtataaatcccatcacagtaaaaagacaacatagtgctgaaagacaaagttttactcgcaaattcttcactcccgtattattttaatttagatactttagtaagaaaaagtagacggatgttaacagtccttgcgtaaaatcttgatggaacagccaataccggcttgtaaaccaattgatgaatccacttttattacttatgttagtactttttctgtttttacagtgaggtgtttatacttagctatcctaatcccccctaactttaatatgctatatacagaaaaaaccaaatgtatatttctgtaggataaatataatgaatattcgaagtataatgaaatgccaatactaccaaat

SEQ ID NO: 42 - DNA, 36573 bp, Priestia aryabhattai
  source 1..36573: mol_type = genomic DNA
aaacatttgtttttaaaatgccggtgtagctcaactggtagagcaactgacttgtaatcagtaggttgggggttcaagtcctcttgccggcaccacagttattgtggaggggtagcgaagtggctaaacgcggcggactgtaaatccgctccttcgggttcggcagttcgaatctgcccccctccaccatttacaggggcatagtttaaaggtagaactacggtctccaaaaccgtcagtgtgggttcgattcctactgcccctgccaattataaaaataacattgcatatatacgtggcgattgtggcgaagtggttaacgcaccggattgtggttccggcattcgtgggttcgattcccatcagtcgccccatttataaacgatatgcatattccaatattgggctatcgccaagcggtaaggcaacggattttgattccgtcatgcgttggttcgaatccagctagcccagccatatttgcggaagtagttcagtggtagaacaccaccttgccaaggtgggggtcgcgagttcgaacctcgtcttccgctccaattttaataaagttatttagtcttgagtaaatggcggcatagccaagtggtaaggcagaggtctgcaaaacctttatcaccggttcaaatccggttgccgcctccatttatttacaagctgccggggtggtggaattggcagacacacaggacttaaaatcctgcggtaggtgactaccgtgccggttcaagtccggccctcggcaccatttataattttaacttgccttttttattttgccgatgtggcggaattggcagacgcgcacgactcaaaatcgtgttccttcgggagtgtcggttcgaccccgaccatcggtactttagctttacttgacaggatgattcctgtttttatttttacttatcggtcgacaaattttgataatatttgcgggtgtagtttagtggtaaaacctcagccttccaagctgatgtcgtgagttcgattctcatcacccgctccatacatattgttatcacaacgcagtgtctcgctttcaaagccgagatgttgcgttttttatttttagcgtaaatatagcgtctatcttttcaagatagacgctatatttacgtacatcagttaatgacttgataggttgcttcgccgccgtgaatttgaatgaacatgtcacttagggatttagttagtttataagcctgttcttctgaaagtgaaggctttaaataaatgaactgtacagcttgtgttgtcttttcagttacgtacgctcggttagaatcgacataagggcttccgaaagctcctagggcatcttttgaaatgattttattttctaaagaaatattacgttcatttagagcttcataagactcttcttttttaccgatagtaaattcgatggggtcttctaaattagaggaatcataaattccaattgggacttcatattgcaatgaaaaaaagttattaatgtccacagcagaattgatagaaggcaaatacgtttgttttcctattcttctaattaaagcttctatagaaggacggtatttacttggatcagttccaaatgttttgaaaagctttctccactcgctaacaccttcgaattctgttactttttttgactcaaggtcgaaataaatggattcttgaaagaggcgcaaacgtccttttagcatttgaggagaatcaccaacttcaatatttttatactgaatgattcccattttaaaagaagggcaaagctgtttaatagcgggcgataatgtaaagttcatttttttgatcctttctattataattagtatttgttcgtttatagataccatcctatcatttcattgagtgagaaaacagttcaatgcatgaatatatagaatttcttagaaaggaggccattactcactatgaatgcgtatcagttgaaggaagaaattatttcatacagcaaagagattggaatcgataagattggatttgcgagtgcttctatgtttgatgagttaaagaatcgattgttagcacagcaagagttaggttatgcttcaggctttgaagaacctgatattaaaaagagagtagatcccacattagttgttccaaaagctagatctattatttcaattgcacttgcatatccttctaaattaaaggatgcaccaaagagcacaaaggaagatcgccgaggaatcttttgccgtgcttcttgggggcaagattatcatacggttctacgtgataggcttcaaaagcttgaaaccttcataaaagaaaaagtacctgcagctatccttcaatcgatggtagacacaggcgagctgtcggaccgagctgtagcagaaagagctggtattggctggagcggtaagaactgtgccattattacacctgaattcggttcctacgtgtatttaggagaaatgattacagatatcccgtttcctcctgataaaccgatagaggacggttgtggtacttgtaataagtgcgttgatgcgtgtcctacgggtgcgcttgtaacaggcggtcagctgaattcgcagcgatgcatcgcctttttaacccaaacaaaaggatttttagctcaagaatttcgaagtaaattaggcaatcgtttatatggctgtgatacatgtcaaactgtgtgccctgaaaataaaggaaaagactttcattatcaccctgagatggagcctgacccagaacttgcgaagcctaaattaaaaccgctcttaacgatgagtaatcgtgagttcaaagagaaatttggacatgtttcagggtcttggagagggaaaaagccaattcagcgtaatgccattattgcactggcccattttaaagatcaaaccgccgttccagatttaattgagttaattaaaaatgacgttcgccctgtcattcgaggaacagcggcatgggcgttaggaaaaattggcgatacagaagcgttagatacacttatgaacttaagagaacaagaaaaggaccaagaagtaattgaagaaatgtcaaaaggtatagagatgcttcaagagatctaaaccgtatttttattgataaagttagctaatgagtcatagcgtataataaacgcctagaaaagtggtgacattatgctaacaaaaaggaatgtattatatactttagttaaagcacgtgcggacagctatgtaaaaggtgagctgcatgaagacttcaagcctttcattgaacagcagtgtgagctaaagcggtctcttataaaaaaaagagaagttgatgttttaaaatgtaatatgaaaggttctattcaatctgctcatacggatcaggaagaaactagagtattatataaggtgcacattcaagcatttttaaaacaaaacgattttttctatatagaagaagaaattgaagatcgtttagctcttttttataaagatacgcttattcaagatgagctgctggtaaaggacttttctgaagatgaggttgaaatggatgtagaagaagtagaggaagacgaagaaagagcctcttattatgatcgtcttgcggctgttcagtatgcagaaaaatattgggataaacctaatgaaagttataagcagtttgaggtaaactgcaccaactatatttcacagtgtttgcatgcaggaaaggcgccgatgcggggatatcctaaaaaagcaaacggatggtggatgagagggaacgcctggagctatagctgggcagttgctcattccatgcacagctatttaagtaactccaaatcaggacttcgggctgtgaggaaatcttcagcaagcgaacttgtcccgggagacgttatctgctacgattttgaaggagatggaagatggaatcatacgacgattgttgtagcaaaagacggtcacgctatgcctcttgtgaatgcaaacacgtataatagtcgaatgagatattgggcttatgaagattcaacggcttacacgccaaagattaagtatgattttttccatatcgttgatgggtaacactttcgttttagcaagttagtggtataatgatgaatagatttgttagcagaggtgaaaatttgtgggagtacacgtagtgttatttcaaccagaaattccagcaaatacaggaaatattgcgcgaacatgtgcagcaacaaatacgacgctgcatttagttcggccgttaggcttttcaacagatgataaaatgttaaagcgagctggattggattactgggaatttgtaaatgtggtgtatcatgattcattagaagaagtattcgaaaagtatcctgaagcaggtttctacttcatcacaaaatttggtcagcagccacatacaacatttgattatagtgacttagagcaggatcatttcttcgtatttggaagagaaacaaagggtctgccaaagcacattattgaagagaacatggaaagatgtcttcgtttaccgatgacagaaaatgttcgttctttaaatttatctaatacagccgctattttaatctatgaagcgctgcgtcaacaaaattatgctggtttatcttaagtaaaaagcgaggttcaaattttattgaacctcgcttttttatttatgtcgacgatgatatgtagtggttattttttaacgcccggtttatcattgtatcccgctctgaagatggatgctaaaaaagcaattgttactcctaatactaaaagtaagcgcattgattttcctcctcaatctaattaaaaggattatacagctactgcagttaaaaccgacttccgatatctcatgatgataataatgacaaaataactcttctagagacataagttctctaacaaagtttaaccgttccttcttactcttttattatagctaataaatacttcactgtgaatgcttagcaaggacaaatttctgaattttacaatttaaaaagcatgttcaaacattttgctgcatagattgtattaatcttgttcactagcaccataactagtaggggaggtcctttaatggatatattaaagaaagttgaaagataccgcgaagaagagaatcgtcttaagtgggaagggacatttgaagagtacctaaagctgattaaagatgagcctttaattgctcagcctgctcactctagagtatacaacatgataaaggatgcaggaattgaagaggtaaatggtaaaagacattataaatttttcagtggacaaatgtttggacttgaagattcgctagaacgcttggtggaagaatattttcatcccgctgcaaagcgtttagatgttcgtaaacgtattttacttttaatgggtccagtaagtggtggtaaatcgacgctagtgaccatgttaaaaagagggcttgaagcttattcgcttactgatcgaggagctgtttacgctattaaaggatgcccaatgcatgaagatccgctgcatttaattccacatcatttacgtaaagacttctttgaagagtatggtatccgaatcgaaggaaacttatctcctttaaatacaatgcgattagaggaagagtatggcggcagaattgaagacgtcattatcgaacgcattttcttctcagaggacaaacgaactggaattggaacgttcagtccttctgatccgaaatctcaagacattgccgacctaacaggaagcattgacttttcaacaattgcagagtatggatctgagtcagatccgcgtgcttaccgctttgacggagagcttaataaagcaaaccggggaatgatggagttccaggagatgttaaaatgtgatgagaaatttttatggcatttactctctttaacccaagaaggaaactttaaagcaggaagatttgctttaattagtgcagatgaattaatcgtagcgcatacaaatgaaacagagtatcgctcgtttatttccaataagaaaaatgaagctttgcattcacgaattattgtaatgcctgttccgtataacttaaaagtgagtgatgaggaaaaaatttatgacaaaatgattcgtgaaagtgacgtatcagatgttcatattgcccctcatacgttacgtattgcgtctatctttactacattaacgagattaaaagagcctaaaaaaggcgatatcgatttattaaagaaaatgcgcttatacgacggtcaatctgtagaaggctataacgatgcagacgtagaagagttacaaaaagagtatacggatgaaggaatgagcggtattgatcctcgttatgtcattaatcgcatttcatctaccatcattcgaaaagatattaaatcaatcaatgcattagatgtactgcgttcattgaaagaagggttagcacagcatgcgtctatttctgctgaggatcgagagcgttacctgaattatatttctctggcgcgtaaagaatatgatgaaattgcaaaaaaagaagtgcaaaaagcgttcgtttattcgtatgaagagtccgctaaaacattaatggataattatttagataatgtcgaagcatactgcaacaaaaataagcttcgtgatccgctaacaggagaagagttaaatccagatgacaaattaatgcgttcaattgaagaacaaattggtatttcagaaaatgcaaaaaaagcattccgcgaagaaatcttaattcgtatttcggcttatgcacgtaaaggaaaacgatttgattataattcccatgagcgcttacgcgaagcgattcagaaaaaattgtttgcggatttaaaagacgtagtgaaaattacaacgtccactaaaacaccagatgagcagcagctgaagaaagtaaatgaagtagtggctcgattgattgatgagcatggatacaattcagtatctgctaatgaactgctgcgctatgtaggaagtttgttaaatcgataactcagtactaacaagaaaacatggcacttccgatctgtgccatgtttttcttatctcttaaaataaactctgcataattaggctaatgtgtagtacgcattgcacttaaccatcatatgataagtcataaacatatacatgacactagacactataaaatgaatagttaatagtgaaagaattagttagcaagtataccattcttgcgcataggataagagtaaccaacctttgaactaaaggtatttgtcagaaactttcggtatagcttatgcatgccgagtagaaacgtgcaggtgttttttaaataaggaggggaatagcgtgggaaaagaagtagataaaagttttgctgtctcaaaagaagactggtccctccatcgtaaaggccacgatgatcaaaaaagacatcaagaaaaaattaaagaagcaattaaaaataatttaccggatttaattacagaagaaaatatcgtgatgtccaatggaagggaagttgttaaaattccgatcaaatcattggatgaatatcgaattcggtacaattatgataaaaacaaacatgtgggtcaaggtgatggagacagtaaagttggggatgtagtagcacgtgatggatctgctggagatggtcaaaaaggagcagggaaaggtcaaggagcaggtgaccaggctggagaagactactttgaagcagaagtgtctcttatggagcttcaagaggctttatttgctcaattagaactgcctaatcttcagcgaaaagaatctgatcaaattgttgtggaacacattgaatttaatgatatacgacgtacaggtttgatggggaatattgataaaaaacgaacgatgatgagcgcttataagcgaaatgcaatgacaggaaaggctgcttttcatcctatttatccggaggatttaaaattcaaaacgtggaatgaagttataaagccagaatcgaaagcagtcgtcttagctatgatggatacgagcggttcgatgggcatatgggaaaagtatatggcaagaagctttttcttttggatgacacgctttttacgtacgaaatatgaaacagtggaaattgaatttattgcgcatcatacagaggcgaaagtagtatcagaagaagactttttctctaaaggagaaagcggaggaaccatctgttcatctgcttaccgaaaagcgcttgaattaattaaccaaaagtatgatccgagccgctataatatttacccgtttcatttttcagatggcgataacttaacttcagataacgcaaggtgtgtaaagttagtaaatgaattaatgaaagtgtcaaatatgtttggatatggggaagtgaatcagtacaatcgacattccactttaatgtctgcttacaaaaatattcaagacgaaagttttagacactttattttaaaacaaaaatcagacgtttttcacgcgatgaaaagcttttttagaaaagaaacagaagaccagaaatatgcttaacctaaaaggcctagacttgttatctaggtcttttttatgcggtttattcagcgcttctttggagatagtaaaagtacgactttatccaaaaggagaataagtgaatgaacgaaaatataaagagcgaaatgcaaaaacatcaacaaaatcagcggttgaacgcagctgagttaggttacttatgggcgcaatatttaggcgatacgctgtatgtatgtgttcttgggtattttctatctgttgtaaaagatgccgagattaaggagctcttaaaaaaagcccatcagatttcacaaactcatgtagacgaattgacggaattattcagttcggaaaaaattccaataccagtaggttttggggaacaagatgtgaacaaaggagtttctgctttatttgatgatatttttatggctatttatgtaaatgaaatggcaattggaggtatgaagaaatatgccagagccctaagcgcagtgagaaggcaagatatttatgatcacctgtctcgatgtgtaaaagaaagcgacagtcttttagaggattctaaccacgttattttaagaaaaagcatgctgatgagacctccggttattccttatccggtaaaagtgaattttgtggaccagaaaacgtttatatcaccatttttctctcaaatgcatcctctaacttctttggaggttacggctattcaagaaattgttaatacaaatgtattaggtaaaacgctgatgctggcatttagtcaagtagctaccacacaaaaattacgctcttatttttttgatggagttaaacttgcgagtaagcaaatcaagcaattcactgagttattgtctgaagctgacctaccaagtccgcgtctgcttgatgcatatgtaaccaactcaacgatttcaccgttttcagataaactgatgatgtatcatacttccacagcggtgacaatcgctattgataactgtggtgctggcttgtctatgtcgttccgttcggatgtcgcagtagaattttctcagctaatcgggcgtatagggaagtatggaaaagatggaattcggattatgattgagcaaggttggatggaagaacctccaatggcaacagaccgtaagaagttggcggagaaataataaggagtatgttgtagattatcattaattttgcggtaccgaaacatatatagctaagtgaaaatagattgctctagacccacttgaatgagcagtgataagataaaaaagctgatttttcaagaagtaagtcgaggtgtgcaaatgaacaacagtataagggagtccattgcgaaaaaagtagcatggattagcgtatggagcaacattgcccttacgctaggaaaagtaatagtaggatggattggaaatagtgatgctgtatttgctgatggtattcactctgcagcggacgtatttgcctctattattgtcttgttagttatacgagtagcaaataaaccagcagatgatgaccatccatatggacatggaaaagcagaagtgattgtctcaggaatcgtaggaattattttattgcttgtatcattttatgtggtatttgaaggagtcgttggtttattccatccggttgaatctccaaatattttagccatgtggattgctgttatttcatacatagcaaaggtattgttgtaccgttattctttaaacgtagcgaagcagcaccacagtaaggcaattgaggcaattgcctttgatcataaagcagatattgttgcttctattgcagcggcaattggtgttttattatcgattattggtgataaaatggatgttcaactgctgttatacggagataaaatagcaagtatctttgttgcttgtttaatttttaacattgccagacaaatgatgggagagtcttttcaaatcttaatggaaggcaatattgatgaagagctactgaaagaacttgaagaaagcatttatgaatttgaagatgtgaagcggattgatcgcgttcgagcaagagaacatggccattacatattagtagatgtacgtatttcaattgaccactttaaaacaattaaggaaggtcatgatttaggacgagaaataaaagcaacacttatgaaaaagcatgataatattcaggaagtattaatccatttgaatccttattatccagactaaataagaagcagcgaattgttatatcgctgcttcttattatttatagatgtaaaaattagtgaaataagtataataaaataatgaggttttataatcaaaaatgtatatggattcttatttttcacttataaagaatcaagtttaataaaattgtataaaagggaattgtatttatttattgatgtgataggataaaaaagcatataaatgcattcactacgaatgaaagcagtggacgggtacatatagataataataaatggttttgggagtcaaagaaggtgatgttgaagtgaatgtaagcatcaggtcaatcgttaaaaaagtcatgttcgttctatttattgcgtatacggcagtggtcatttatgctactctcatacgggaaaacgaacatgtttacggaaaagcaatgaacttggatttatttagcacgatccgtctgatgtgggacagcgggaatataatgctcactctgacaaatatactggggaatatcgtgatgtttgcgccgcttggaatgtttattcctttgtttatgaagtggtttgacggttttattcaagtgtttacgacgggtttcttaatcagttttctaattgaaattttacagtacaagctaacggaacgagtatttgatattgatgatatctttttgaatacgctaggtacatttataggctgggttattattaaaatactatattggattaagaacatgctgaaagcacgtttcaaaaaaagatgaaattgagagacgtaacgaaatcaatccaatataaagacgaacaaatgggataaatgagctagtatggatagcttgttacatcgcggttgatttccttgcaagatttcgctttctgcgggcggccggtgagtctcctcgtcgcttacgctcctgcgaggtctcacttattccgcttttcccgcaagagtcttcgccttgccttccaatcaaccgctagaaataactacatgcatgaaatctacgttcaccctaccaatgaaaaaatccgagcgagctggattcttaatcaagaattcaactcgttcggatttttcttcaactaaaatacttttggctcagcctctgcttcttgttgatagaaacacttaatgcagcgtcttacggaagaatgtgaggattcaacgataatgtgctgacaattttgctgaacaaataataactttctttcaagctgcttaatttgttctttaagctgttctacttcattattgatagatatttgaaccactgttaacaaactctttagctttttctttcattccttcttttcttacttcgtttacatctttttcattttcttgagccatgttacgaatatcttgagaaatacgcatcgaacagaatttaggtccacacattgaacagaaatgggctgttttagcaccttcagcgggaagtgtttcatcgtgatattcttttgcgcgctctggatctagtgacaggttaaattgatcattccatctaaattcaaatcttgctttagacagcgcgttatcgcgtttttgtgctcctggatggccttttgctaggtcagcggcatgcgcagcaattttataggtgataaccccttctcgaacgtcttctttattcggcagacctaaatgttcttttggcgttacgtagcaaagcatagctgtcccaaaccagccaatcattgcagctccaatacctgatgtaatatggtcatagcctggagcgatgtcggttgtaagcggtccaagagtatagaagggagcttcttggcatatttccatttgtttatctacgttttctttgatgaggtgcatagggacatgtccaggaccttcaatcataacttgaacatcgtgtttccaagcaattttagttaattcaccaagcgtttctaattcaccgaactgtgcctcatcattagcatctgcaatggaaccaggacgtagcccatcgccaagcgaaatagaaatatcgtatgctttacagatttcacagatttcttcaaagcgagtatataaaaagttctcttcatgatgagctaaacaccactgcgccaagatggatcctccgcgtgaaacaatacctgttgtacgtttcgctgtcagaggaatatagcgtaaaagaacacctgcgtgaatagtaaagtaatcaacaccttgttctgcttgttcaattaatgtatcgcgatacgcttcccacgttagatcttctgctacgccttttactttttcaagcgcttggtaaataggaacggtccctacaggaacaggtgaattgcggataatccattcgcgcgttgtgtggatatcctttcctgttgataaatccataattgtatcggctccccaacgcgttgcccatgtcattttttctacttcatcttcaatagctgaacgaatagctgaatttccgatattagcattaattttcacgtggaatttgcggccgataatcatcggttcgctctcagggtgattgatgttattagggataatggcacgtcctcttgctacttcttcacgcacgacttcaggatccatctgttcacgaatagcgataaattccatttcgggtgtgatgattccttttttcgcatagtgcatttgcgttacattttgattttttttcgcgcgcaaaggtaaacgattagtgataaagcgctcgtactgatctcttggatcactatcataataaccgttatcctgtggctgaaccgtacggccttgatatgtttctacatcgtttcgttctgcaatccacttttcgcgcagagccggtaatcctttttgtaaattaatttcataacagggatctgtataaacaccgctcgtgtcgtatacacgtacgggactattttcttcttcaccaaaagatcctgtagtaggagactgatgaatttcacgcataggcactttaaggtcttctctggatccttggacatatactttgtgactgtttggaaaaggctttttcatagaaactgatacattttgttttgacattacatattcctccggtttcgcataaagtgtagctataccgaaccataaaaaatcgggttctgtgatagacagaacccgatggaataggcgaaaaaagaataaacatatactattcttttcaagactacttccctccgctggtataacccaaatcaggttcaaagggttaaagagttttattgcactcttctctcagtctgagctatcagacacccctagtagaaataacattcaaattattcaatttacggcttaagtttaccatcattcggtaaaaaatcaacccttaaataaaaaaagctagacaattaacgttgcctagcagcatcgattgcaatcacaatagctgtaataatgtgcatgataaaccctaaaaatggaatccaagcaaccagtgaagtaacaatccctagtatgtttccatacgcagataaccctcgtctattagctaaaatgagtgtgatagcatgaagaataaatccaataaaaagaggagtataactaaagccaataacaatccccgcgccaattaaaggaattcccagcaaggcttcatacccagcagtgacccatttcattgtacgtacatttccattcatagtaaaaagcctcctaaaaaagatactactatatacgagaaaagagagaaaaaagtttcaaattacttaggggatatgtcgtataagcaagcactagttgattaaaatgatagatgacagtaaagggaatggaaaaaacataatgatttagtcattttttcacactaaagaaaaatagtctagatgattcatttttagctaagggaccggaatttataccgaacatagtgactactttctaaaataaataaaagctgatatcgtgttttttgattatagcatgtaaggtttttattacaaattattaaagattcttatctttttgcaaatacacattgtatttcatagttttaacaattatgataaaaaagcaagtgtcaaaataggaaaatagttgagcatgtaaaacgaagcgataagcttattaatttgaaagaaaggcaaggtacgctttatgtgggaaattattgtagcaatcattttagggattgtagaaggtttaacagagtttgctcctgtttcgtcaactgggcatatgattattgtggatgacctgtggttaaattcaaaagaattattttcatctccagtagctaatacatttaaaattgttattcagctagggtcgatcttagcagtagtagttatttttaaagatcgttttattaatttattaggattgggaaaaaagccagctgctccaattggaccgacaaatcgcttgaatttaatgcaggtaattgttggtctgttacccgcaggagtgttaggacttttgtttgatgattacattgatgaacatttgttttctttaaatacggtgctaattggcttagtggtcggagctgtattaatgattctagcagatttgtttggacctaaacgtccgcgtgtagaaacagtggaccaaatgtcttatggacaagcactgggtatagggctgtttcaatgtattgctctttggccaggtttttctcgttcaggctcaacgatttcaggaggggttcttcttggaatgagccataaggcagccgcagattttacatttattatggcagtgccaatcatggcaggagcaagtggactttcattggttaaaaactggcagtatttcacatcagatgcactaccgttttttattgctggttttatcagcgcctttatttttgcgctggtatctattcgctttttcctgaaattaattaatcgtatcaaattagtaccatttgcactatatcgaattgttttagcagctattctatattttgtatttttataaaataaacacgcgtgttctttagccccttaaacttctaatagagactcaaagagcaagaaaaagctattgcaatgttgcaatagcttttttacataaatatatattgtcgccttttgaaagcgttttacaaacatgggtattgacaaaacgtgtcgaaaaatagtaaattaatatttgtgcagtataaagttaagtaaaagtaagacttctgtttagttttattgactgtaaaaaacgtatgacaacgtatagatcgttttaattttataaaaactgaataataagcttaatcgtatagagcgggggaatcattatcggcagtaaagctgccttggggtgaatccttacaaaaggtaggaaactctcaattccgaatccgacagttaaccccgtttgctttattgagagaaagagcccaaaatagcgtaagtaaaaggctgttctttcttaagaatagtctttttttgttttttcagaaaaatatatacaaatgtcatacatctttggggaggtacatctatgaaaaaaattcgttttggtttggctacgcagatttttaccggattaatcctcggtgttcttgtaggggtaatttggtttaacgatccgcgtgtagtaacatacctacagccgctaggagacctatttttaagattaattaagatgattgttattccaattgttatctcaagcttagtcgttggagttgcaggagcagggagcggtaaacaggttggaaagctcggcgttaaaacaattctctattttgaaattattacgacttttgcaattataatcggtgtattggttgctaatatttttcatcctgggcaaggtgtagacattcattcagcacagaagagtgatatttcacaatacgttgaaacatccaaacagcaagaaggaaagtcagtggctgaaactttcttacacattgttccaacaaactttttccagtcaattgttgaaggagacatgctagcaattatcttctttacagtgttatttgcacttggagtagcggcaattggggaaagaggaaagccagttgtacaattcttcgacggcgtttctcacgcaatgtttcacgtggtaaaccttgtaatgaaagtggctccaattggtgtatttgctttaattggtgtaacagtttcaaaattcggcttagagtcactcctttcattaggaaagcttgttatcttagtttacttagcgttaattttcttcctactcgttgtattaggaggaatcgcgaaatgggcaggaattaacattttccacttattccgctatatgaaagatgaactgttgttagcatacagtacatctagttctgagacagttcttccgcgtattatggaaaaacttgaaaagatgggctgtccaaaagctatcgtatcgttcgttgtaccaattggttatacatttaacctagatggttccgttctttatcaagcgattgcagcgttattcttagcgcaggtgtacggtattgatttaacgatcgttcaacagctgacgctcattcttgtattgatggttacatctaaaggaatggctgccgtgccaggaacatcatttgttgtattactggctactcttggaacaatcggcgttccggcagaaggattagccttcattgctggagtagacagaatcatggatatggcacgtacggttgttaacttagtaggaaacacactagcagcaattgtgatgtctaaatctgaaggcaaatttgaccctaaaaaaggtacagaggtcatgagagccggctaatttataaattaaaaagctacttattctattcaaaaaattagaataagtagcttttttcataataattcctttattattatggaaattgaccctataatatgtaacatcaggtataaatatatccaaattttattcttacataaaagcagtcactggttcctttctttatcaataaatatagagatagcttagctagttgggggatagtagagtatgtggaaaaagcgaatatgggtcatcgcctcgatagtaatcgtatgtttgttaatcccttacagtttaccgattgtgtttgctttattaacagcattagcgcttgagggtattgttcagaaattgcatcaatcttttaaaatgaagagagtctatgcagtgcttatgaccttcattttatatgttgtttcgcttatacttattggattttttattgttcgaacaatcgttacgcaagtggttgctctttcaaaaatagcgccttcctttgtaaaagaaatctatgaaaccgcgatttatccaactattattaagtggaaatactattcaaacgctcttcctacagaagtgatttcttctatcgagcgcacgcttgaaaaaaccgtaaattcattagattctctattaaaaagtaccgtagaaatcatcattagctttgccgctactgttcctgggtttctattagagtttcttatttatttagtagcgcttgtatttatcagccttgagctgcctgctattaaaaataaaattaagtcatttttaacagaagaaacgaaatataagctacaagttgtcattactcagcttatccaagcgggggttggttttatcaaggcacaaattatcttaagtgtcatgacgtttgtaatggcttatgtagggctttggctattagatgttccgtataccgcgcttcttagtttattaattgtgattgtcgatatcttaccaatccttgggacaggctcagtgctcgttccatgggggatttttgctcttactcaagggcatgactcattagcaatcggcttatttattctatttggagtcattacagtagtaaggcgtgtagtagaaccaaaagtattttctacaaatatgggtatttcacctttggctgcactagttagtttgtacattggatttaaacttttaggctttgtcggattatttttaggaccggctttagttattttatacgatgctcttcgtaaagtaggtattattcaaattaactttaaactataaaagcgctggataaaactagcgcttttttttattgaaacttttgtagtacgtaatacgtaaagagggaaaggaaaaaactatgccgcgttggtttttatctatcaatcggctaaactatagttttgcagtcttagattcaatgacatgaggaggagaatttttgttagagtcggttttactttctttaattgaagcgctaaaacagctctcttattttggcgtaattttagcattaacgtttgaatttgtcccggcagagcttgttttacctttagtagggtattgggtgtaccaaggtgatatgaacttgtatctggctatccttgcaggtacagtaggcggtgtttgtggaccgttgactctttatgcactgggacgttacggtggacgaccgctggttttaaaatatggaaaatactttttggtgaaagaaaaagaaattgacgccgccgatcgcttttttaataagtacggcagcggggttgctttttttggacgctttattccaggagtgcgcacggctatctcttttccgtgcgggatggcaaaaatgaatgtatggctgttttctatttatacatttgttgcgatgcttccagtaacggctatttacgtatatttaggatataagttaggacctaagtggaaagaggtggggccgattgtgtctcaatatatgcagcctattggaatcgggattgttgttttaattgcattgttttttatcattaaatatgtgcggaataaacaagtagggcagagctgataaatcgaggaaaagagtgaggatatgtcagagcatgagcagttaagagtagagttacgaaaaattgaaaagtgggagaaagaccaaaaaggactttttttctgggagcggctggctcgcttgcctttttcagctttagataaagtaacgccaaagttcattcatcaaaaaatagaaaaattattagatgaaattgctaagtatgttgataatggaggccagtatttagctaatacgtctgccacgctagaaaaagcatcagcacaattacaagaaaagaaacagctttctatagaggatattcagcatttatctctgcaagaaatggatgaattggcagagtattttattgaagtccgaaaaaagaatgcacagctgcaaggagctacaaccggggtaggcgggatttttacactggcgattgatgttccttttgtattagggcttacacttaagacactgcaagaagtggctgtttcttatggttacgaccccactgagcaagaggaacgaatttttatggtcaaatgcatgcagttttcgtcttctgacattgtagggaaacgtgcgattttagaagaattagcaagcggaaatcgaacgcagagcttgcagcagctgcaagggtggagagaagtgtttctaacctacagggacaacttgggctggaaaaagctgttccaaatgattcctatagcaggaatggtattcggggcttatattaacaaacaagcgattaatgatataggcgaagttggaatgatgctttaccgtaaaagacgtattttggaaaaagtatcacaatcgcaacaataaaaagagactggtacgaaagtattttagttgaagaaagatccgaacgagtttgattcttggttgagaatcaaatacgttcggtttttttcattggtatagtaaatgtagctttcatgtgtttagttgcttctagctgttgattggagggcaaggcgaagactcctgcggaaaaagcggaacagatgagaccccgcaggagcgcaagcgacgaggaggctcaccggccgcccgtggaaagcgaagccttgcacggaaatcaacagcggtgtaacgagtgattcatactagatcgtttacctttttgttcgtgtttagatgggattgatttgcttatatctcaattactttttttcgacattatttctggggaaatatgtcgaggtgtgctaagtctatttccttaatcaaaatgaaaagtaggaatggtaatagtattttttcgtctagcaatcagtaaataaataattccgattacactccatacaataccgataaataaggatgttgtttctaagttaagccacataaaaaataaaaataaactgcccagtaaaggcataagtacatatgaaatatatccactgagagatcgtttgttttgatgaataaaataatggataaaaaccgctatgttcactgaactgaacgcaattaaagcaccaaaattaattaaagaggtagctttttcaagagacagacctagtgaaattaaagagaggccaccaataatcaccacgttccaaataggcgtctttgttttagggtgaatatagccaaaaattctccgaggcagataaccatctttcccaattgcatagagaagtcttgatgcactcatatgtgagacaagtccagaagcaatagttgaagtcaaggctgctgctacaaaaatagattgaaaaagctggccgccaattttataagcaatttccgctgatgcaccttctaaatcatgaaacaaagaggctgaagggaaaagaagctgagcaaagtaagaaactgtgataaacaaggcgccccccgtacatgcaataatgagaatccctttaggaatggttttctcaggcttaagtgtttcttcggccatggtggttacagcatcaaaccctaaaaaagaaaagcataaaatagctgctccgtttaataacagagatatagaggccgattcacttataaacggtttaaatgatagctcttggccttgagtagtagcacttaaaataataaagataatagcgactaaaatttgaaaagcaactaatagcgtaccaaaagaaacggttaaatgaacgctaaaaatattcattatggtcatgatgacaacaaagctgataatccatacggcctttggaacacctggaaacagagagcttaggtaaatatttgtcaaaagtgcattgatcattggcagaaatagataatcaagaagagccgtccaccctaccaaaaaaccaatgcttggattcattacttgctgtgcgtatgtataagaggaaccagctccgggaaaagcttttaccatttttccgtaactaatggctgtaaataaaatagcaatcaacgtgaatgcataagcgcctgaaacatgtccatctgttgattcagttacaatgccaaatgtatcaaaaacggccataggtgccatgtagcctaagcctatcacgacgatatgccataattttagttgtttaagaagagaaggttcatgattcatatttgtcatcctttctatgtataatcattctgcattatttattattatactatattgttaggtttgtcatctttttttgaaaaagaagagaaaattgcgcgctaagagataaagagcgtttaattgattactagataaagcaaaaaaatgctttttttcactttgatttttaccattgagtctagaaagtattttacataaaatgaaagaaagtaaaaaagcttcgtttagggtgatctacttgtaataaatacgaaaacaaatttttgaatgcggttacatttttgttggtatacaaagttaagaatgatggtaaaggagatgaaggaagtgattgctacaccctatataaacttggagataaacaaggcaccaggtgtgcatgtcgtattggatgaaacaaaaaaagatggtgtttattttattaaattaacggtcaagtcggttaaaaaaagaattcttccaaaaatgaaattaaaatggagcgttccattgttagatatccacctatataaatctttacaaactagtaagggcgatgtgagtgcctcttttgttcattgttttatgaataagaatggttctaaccgctacaccattgcatgttcagacatacgtcatcctattctgtgtgcccccaattggaaagaaatgtgtctagatgtagaaatgactttatttagtgcaagcacttggtctcttcatagctatgaaactgaactgcgagtagacacaagaatggttgaaacagaagagttattcaaagatttagcgaaatggtatgagagaaaagagattaatctagcatctgcttttgagcatgcaacggcaatagatgaaaaaggaaatgtctcgttagatatttgatggtaaggagaggaataaagtgggaatcttatttaatgaacgtacaaaggaatttcacctgcagggacgcgatgtaagttatatcttttcagtgttgagaaacgggcagctcggtcacttgtactatggaaaaaagcttaagcaccgttcatcttttcagcattttttacgtgtagaaacaagaggagctagcgcttcggtatatgaaggagaactagcattttctcttgaaacaatcaaacaagagtatccttcttatggaacaacagacttcagagagccagcctatcaacttcttcagcaaaacggaagccgaatcacaaattttgaatacgataaccataaaatttacaaaggcaagaagccattaaacggcttacctgctacatatgtagaagaagaaagtgaagccacaagtgtagaagttgaactgattgataaattgctcaatgcatcacttattttaacgtataccgtttacgaagaccgaaatattattacgcgtcacgcacgatttgagcatagaggagaagaagcagtcgatattttgcgtatcatgagcggcagcattgatttgcctacatcaaattatgagatggttcagctttccggtgcgtggattcgagaaagacatgtgaaaacacgaatgcttcagcctggtattcaaagtatttctagtgcgagaggtacaagcagcagtcagcaaaacccatttttaattttaaagaatccagctgcaactgaacacagtggagaagcgtatggttttagtcttgtatatagcggaaactttcttggacaagtggaagtagatcattatgatgtatcaagaataacgatgggcattcatccttttgattttcagtggcgactagaaaggggacaaacttttcaatcaccagaactagtactggcttattcaactaatggactaaatggccttagccaagagtatcatgagctttatcgcaagcgtcttgctagaggaaaatggcgggatttggagcggccagttttaattaataactgggaagctacgtattttgattttaacgaagagaaaattgtacatattgccaaagaagcgcaaaagctaggcgttgaactttttgtattggatgacggctggttcggtaaacgtaatgatgatacaacttctcttggagattggtttgtagatgaaaataagcttccgggcggtatgaagtcattggctcaaaaagtaacggatttaggtatggactttgggttatggtttgaacctgaaatgatttcaaagcaaagcaacttgtatgaaaagcatccagattggttgattcatgtgccaaatcgtcatcagtctcatggacgaaatcaatatgtgcttgatttttcaagagaagaagtagtgaattatatctatgaacgaatggaagctattttaagtgaagcacctatctcttatataaaatgggatatgaatcgaaatataacggagattggatctgttgggctgctcgcgaaccgtcagtttgaagtagtacatcgctatattttaggggtgtatgatttgtatgagcgactaacaaggaagtttccggacattttatttgaatcatgtgcaagcgggggcgctagatttgatccgggaatgctttattatgctcctcaagcttggacgagcgataatacggacgcgattgaacgtttaaaaattcagtacggcacgtcttttgcctatccaatcagttcaatgggagcacacgtatcagccgtaccaaatcatcaagtacgcagagtaacaagtctagaaacaagaggagacgttgcgtattttggcgcatttggttatgagttagatgttacgctgatgacagaagatcaaaaagaaaccgtaaaacaacaaattcagtattataaaaaacaccgatctcttattcaaaatggcatattctatcgtttaaaaagtccgtttgaacaagatggaaatgtgacgagctggatggttgtttcatccgatcaaaaacaggcaatcatcggttattatcaagtattggctagaccaaatccttcttacgaacgcattgagctaaaagggcttcatcctgattatgaatatacagtgatggaaacagatcaaacagcttatggagatgagctcatgtacgcaggtattgctctaactcatgagtattcgggtgttgaagcatacgatgaaaaatctggagactttgtatcggttatttacacactgcaagcgcaataagcaaaaagccacttctatatcatagaagtggctttttgagttaactattatttatacagtgttgacataaaaggagaagtaatggtaacttttagttataattgttaactttatatttttttagtttactaaagtggaggggaattgatggaaaccacaagtttaagagattggaaagcacttgctcagtctattattaaagggacagaaattacatataacgaagcgcttcaacttcttcatgtaccggatgaagaagtgttagaggtcatgaatgccgcgtacttaattcgtcatcatcattatggaaaaaaagtaaagcttaatatgattattaatactaaatcaggtttatgcccagaagactgtggatattgttcgcagtcgattgtatcagaagcgccgattgataagtatgcgtggttaacaaaagagaaaattgtagaaggtgcttttgaagctcaaaaaagaaaagcaggtacatattgtatcgtggcgtcaggccgccgccctactgataaagaagtagcgcacgtagtgggagcagtaaaagaaattcgtcaaaagaccgacttgaaaatctgtgcctgtctagggtttttaacagatgatcaagcacacgaactagtcgaggcgggtgttcatcgctataatcataatttaaatacccacgctgataattacgacaatatttgttctacgcatggctatgaagatcgagtcgatacggtaagtaaatctaaaaaagcaggtctatcaccttgttccggtgcgatttttggaatgggcgagacaaatgaacaagccgtagaattagcttttcaaattaaaaaattagatgcggattctattccgtgcaactttcttgttgctgttccaggaacacctttagaagacaagaaggcgttgaaaccaatgcagtgtttaaagctgttagcgatgatgcgttttgtaaatccaacgaaagaaattcgaatttcaggaggcagagaagtcaatctcagatcgcttcagccgcttggtttgtttgctgcaaactcaatttttgtaggcgactatttaacgactcaaggtcaagaacctacagctgactggggtttaattgaagatttaggatttgaaattgaagaatgtgcactgtaaagccgttgagaaatcaacggttttttgattttcaggcaatttacaggaactatacggtttttttacaaaactcaacagcttctttatatttccttcataaataaccattattataaaacatgtgaacgataagtgaatagttactaaggttatgaaattgagaaaccacaaaaaacaataggtctatatcaataccctatgcgttttttgtggttttttgtgaatgaaaggaaggcatcgttttgaataaggaagcagatttcttacaacagcttggtcaagaccgtttgattgcatccattaaaagcccaaaaaatttagagcaatttttagaaacagagatccaggccacctttttattaacgggcaatattagtgtgattaaacgctatgtagatttactcaaacagcataatcgaacggtttttttacacgttgaaaaaattccagggattagctatgaccgcgaagggcttaaattccttgctaagtttgtaaaacctacaggtatcgtaaccactaaaagttcactcattaattacgcaaaacaggaaggactggttgctattcagcggctgtttctagtggatacagacgcggtagcacaagggttgaaaaccgttcaagatattaaaccggatgcattagaactaatgccaggattaattccggagatgatagagaaagtcgttaaaaaaacaagtatccctattattacaggtggacctcattcaaaatgaaagccatatccaagctgctttaaaagcaggagctacggcggtttctacagggaaatcatggttgtggaaaaaatatgaatgagagaaaggagcgtttttaatgaaaaaagtagagctagttaacattgggaaatcatacgatcaaaaaacaaatgttattcaagatattaacgtcacaatcgaacctggagaattcttcgtattagtaggtccttcaggatgcgggaaaagtacaatgctgagaatgattgccggattagaagaagtcacgcagggagagctactaattggagatgtaaaagcaaataaactgcttccaagtcagcgcgatttgtccatggtgtttcaaaactatgccttatatccgcatttgacagtggaacaaaatattctttttggtctgcatacaaagaaaatttcaaagcaagaacagcaaaagcgctgcagggaagcagcagagatgcttggtttaagtgaatacctaaaaagaaagcctagacagctttcgggaggacagcgtcagcgtgtagcgcttgcacgtgctattgttactcattcgcctatttgcttgatggatgagccgttatcaaacttagatgcgaagctgcgcgcgaagatgaggtcagaaattcgccagattcagcgtaagttaggtattacgatgatttatgtcacgcacgatcaaacagaggcgatgacgatggcagatcgaatgatgattttaaatggaggaaatattcaacaagttggacgtccgcttgatatttacaatgcaccaaagaacacgtttgtagcatcttttataggttctccccctatgaatttatcaaacgtttctatagaaaataacttactagtttttgaagatagaagagctatttctatgagtacaccacacagtaaccttaacggtaaaaaaaaagttgtggttggagtgagacctgagcatatacagcttgcgacaaacgataatacgagttttattgtggaagtagataatgtagaaattctaggcacggaaacactgcttacatttcatatgggtgacaagcagtggatggctaagtggaacggtcaatggactataaaggtgggagagcgagttcctatttttatcgatccaaaacacctgtttttatttgatggtgatacaggttcatgcttgcactacgaaccatcaacagaagatttaactgtaaagggggcatttgtatgagtgctgttaccaaaacagcagactcacctgtttctgtttcagcaaacccaaaagaaaaaaaatcaatgcctactatcattgttggactattttatttactgccatcattactgttatttagtgtatttcttttctacccaatgattaagacattgtatttaagtctttttattacggacacacagggaaatcccttaaattttgtaggactgcaaaatttcttatatctatttacagatcctaatttcttacaaagtatgaaggctacttttctatttgtactctacacagtgcctattggcttaattattgccttattcctagcgctaatcgcaaatgaaaagctgaaaggaattggttttttcagaacaatgttttcatctacgatgggaatgagcgtagcggcttcttctgtgatttggatgtttatgtataatccgacaagcggggttatcaataaagtattaaaccttgtagggattcatgacgtgcagtggttattagatcccaagtatgcattggttgctgtgtctatctctacaatttggatgaacattgggtttacctttttaattttacttggcgggttacaaaatattgatgaaaagctgtatgagaatgcgcgtattgctggagttagctattggtatcagctccgtaaaattacgcttcctatgctttcgccaacgctgttttttattatcaccgtttcgtttattaacgcgtttcaaacgtttggacaaattgatattttaacaaaaggcggacctacagattctacgaacgtcattgtttattcaatctacaaagatgcatttgtaaactacaatgttggttctgcaagcgctcaagctacaattttgtttttctgtattctactggttacggctcttcaatttaagcttggagaaaggaaggtacattatcaatgagcatcacgagaaaatggacaacttacttgctactcattgcagctactttagtattgatgtttcctattctatacgctttttccattagttttatgagtggagcggaagtgttagaagggaagatttggccgtcatctttttcatttgaaaactatcgggacgcttttgaaaaagttccgttgcttcattatttaattaacagttttgctgtatctatctttgtcatggccgggcagctgttagtttcgagtttggccgcttttgcatttgtatttattaaatttaaaggaagagatgctattttctttctctttatttctacgatgatgattccatgggaagcaacgatggttcctaactttttaacagcacaaaagctaggatggattaacaattatttaggattaacgattcctttttttgctttagcgtttgggacatttttattgcgtcaacagtttaaaaccattccgaatgagttatatgaagcttctcaagttgcagggatcagccgctttcgtttcttttggaacgtcgtgctccctgtgtctaaaacaagtctagttacgcttggtgtatatagctttttaacaacatggaatatgtatttatggccactattagtgacaaatacagaggatgttcgtaccgttcagattggtttaaagcaaatgcaaacacaggagatttcaactgattggggagtggttatggccgctgtcgttgttgtaatcttaccgacattattactattattcctaggtcaaaaacgtcttcaaaaaggattaacccaaggtgcaattaaataggagagtgaatgtgatgaaaaagatattggctatcgtaacggcatgcttgctagttattctaggtgcttgctcaaattcaactggttcttcggaagcgcaagaaacaaaaaaaacagcatcaggtaaaacagaagtcgtattttggcacgctatgagcggtgaccttgaaaaatcactcaataaaattgtcgatgagtacaataaatctcaggataaagttgaagtaaagcctgttttccaaggaacgtatgaggaagcacaaacaaagtttaatacggtagcaggaacaaaggatgcacctgctattatgcaaacgttcgaagtaggaacaaaattcatgatagacagtggcaaggttcagcctgttcaaaaatttattgatgaagaccactatgatacttcacagtgggagaaaaacatttcgagctattaccaagtagatggaaagcaatattcaatgccgttcaactcttcaacacctgttcttgtttataataaagatgcttttaaaaaagcagggttagatcctgaaaatcctccaaaaacgtatgatgaattaaaggcagctgcaaagaaattaacagaaaaacaaggaaataaaacatcgcaatacggtttttcaattctaaattacggatggttctttgaagagctagttgcttctcaaggcggcttgtatgtagatcaagaaaacggccgtaaaggtgatgctgagaaggcagtatttaatggaaaagaaggacaaaacgcatttaatttaatcaatgatatgtataaagaaggtacattctacaatgtaggacaaaactgggatgatatgcgcgcagcatttcaatctaaaaaaattgccatgttcctggactcatcagcaggtattaaaacactagtagacaatgctccatttgatgtaggcgtatcttatattcctgtcccaaaagaagaggatcgccaaggagtagctattggcggagcatctttatggatgtctaaaggaatcagtgatgaaacatcaaaagcagcttgggacttcatgaaatatttagcaacaccagaagttcaagcaaaatggcacgtagaaagtggatactttgcagttaaccctaaagcgtatgaacaagatattgtgaaaaaagagtgggagaaatatccgcagttaaaagtaacggttgatcagcttcgtgaaacaaagcctactccagctacgcaaggtgctttaatttctgtgtttcctgaatcgcgtcaaaaagtagtaacagggatggaaagcctatatcaaggagtaaagccaaaaaaagcgcttgatcaagcagcaaaagaaacaaatagagcattagaagtagccaatcaaaaataatgtatgattacgaagctcgtctttcaagttattttgaggacgagctttttacttagtgaatgactagttaggggagatagaggacaatgaatacttcaattgatctttatgcgcatcgcggctttagcggacgatatcctgaaaatacaatgattgcatttgaagaagctaggaaaatgcacgttgcaggtattgaattagatgtgcaattaacaaaagacggggaaatagtagttattcacgatgaacgaattgacagaacgacgaatggaatggggtatgttcaagaattttcatacaaacagctgcgtttattcgatgctggcagttggtatgactctcgtttttctaaacagtcgattccgacattagtagaagtgtttgagtggatgatggacaaaaagacaaaattaacggtgaatattgaattaaaaaatgaccgaatttactatccaaaacttgaagaaaaagttcttcgtctaatcgatgagtttgatttagaagatcaagttattttgtcatcttttaactatgatagcttggctaaagtaagatctctccattcatatataccaacaggttttttatttgaaggggtgagcgaagatgcgattggaaaagcaaaatcgataggagcgcacctacactgtgatatgtcgtttgctctttcttcatacgggaaaaaagcaaagcaaaagggtttagacttacgggtatatacaattaatgaaatgaatgactttttgaagctccagcaggcttcagtaaaagtagtgatgacagattaccctaaccgtttttcctctaccatgttcaaaggatgaagtagaaagaagccgggacaaaagtacttgacccatagtgaaaaacgaacccttgatcaacatgtttgattaatggctctttttttgttgcggtgaacgtgagtttcatctgtttcgttccttctagcagttgattggagggcaaggcgaagactcctgcggaaaaagcggaacaggtgagaccccgcaggagcggaagcgacgaggaggctcagccgccgcgcgcggaaagcgaagtcttgcatggaaatcaactgcggtgtaacaagcggttcagctcatgtatcccatttgttcgtctttaggttggattaagttcgttatgtctcaatctcttttttttacaaaaaatattattgtattctgaatagtataaaatttatattgtgaaattgttttatagatgatatattgagaatagattataatgttccttatgaaagcgaatacatgttgcgtagctccgcaaacgttcatttgccggtccctagcatcgtctgttatctcttttaggaggaataaaaaatcatgtatgatcaagatactatctatattattggagatgccaaagctcctcaaagcaatccgattactaaaaaattcaatcagtattttttagggttggtagttgataaaacaaatgggaaaattattgatgtggaatgctcagcgacgattgagttgaccgttcgatttgttcaatcgatttttattggacgtcacataagtgatcccacccttatagacgaaattaacagccgctatttcgggtcttcccaaaaagcgctggtggtagcgtttcatgatgcacagaaaaaatatcagcaaataacagctgctttgtctacatagacctagacgaaatccagcctgacgttttcaaacgttgggctggattttgttttgtataaaaatattttcgtggagatgaagggggaagaataaatgattcaagatggatttatgtatgtgagtgtgttaactgcctttgctgcgctcatggtagggattgaaaaaagatttaaagccaatcgattttttaaatttatcccgggtattgtacttatttatataggagctgctcttatgcaaacggcagggttatttggggatagcgaatcaaatgtcgccatgtatacgggtgttaaaaatgcactgcttccggccatgctgatgcttatgctgttaaagtgtgatggtcgaagtgtaattaaacttggtccaagaatgctgggaggatttatcgttgcggtttttagcataatggtaggttttatcctcgtctatgccatctttaagaatttctatgtagaggatacgtggaaagcttttggtgctttatcaggaagttggaccggaggatcagctaacatggttgctctccaagggattttggatgttccagaaaatatatttggctacgctcttatgatggatacgattaactatgccgtatgggttatgtttatgttttggcttgtaccatttgcatctaaatttaataaatggacaaaagcagacgtcagctttattgagaatagtatagatgaagtcgcagcaacttctgaaagcgaaaaagaaggccctcagtttcagcatcttctttatttacttggtctaggtttgttcgtttcggcattttctacatttatcggagggcgtttgcctgaagtgggagcggttattaatgcaacgagctggacgattatgattgcttctgtggtgggtctagtgcttgctgtaaccccagcggcaaaaattccaggtacgctcgatgtatcaaacgttatgttatacatcgttgtagcgttaattgcttctcaatcagatttttcaaatttagctcaggctcctatttacttagtatctggttttctcattatgttcgtgcacttagtgatcatgctgttgctagctaaactatttaagtatgatttatttacgctcggagtagcaagtttagctaatattggtggaatggcgtctgctccaatgcttgcagctgcttataaccgtgcactgattccggtaggagttattatggctctgatgggttccttcttaggtacttattttggtatgatgatcgccaaaattttaggggcgatctaagaataaaccaaaagtacgtatgaaagaatatttgtgctgaatcgaaaggaagcgattgaaatgataattaaagacataactgtaaagcatcaaaccgttccactgctcgttccgtttaaaacagcgcttcgaacagcaacagagatagacagcataagtgtagagattcagttagaaaacggaataaaaggaaaaggagcggcttcgccaacatatgttattacaggagattctttagaaggcattcaagctgcacttcaaggacctattaaactagcgctaataggggaggatatacgtcagtttcaaaaactcttaaaaaaaattcaaagctgctgtattcacaattcaagtgctaaagcagctgctgatatcgctttgcatgatgcttatacaaagtttctcaacattcctttatatgctttcttgggcgataagcagcctatctctacgtgtatgacgataagtgttgatacacctgagaaaatggctgaagacgcacaaaaaagtgcagcggacggatttgacattttaaaagtaaaggtaggttcaattcctgagctagaccttgagcgtattaaacatattcgatctgtcattccggatcttgtaaaacttcgtttggatgcaaatcaaggatggactccaaaacaagcagtgcaattaattaataaaatggaaactctcaactttggtattgaattggtagaacaacctgtccctgctcatgattgggaagggttaaagtttgtgactgaacgagtaaacgtacccgttatggcagatgagagtctattttctgccaaagatgcattaaggcttgtaagcgggcggtacgtggatcttttgaatattaagctaatgaagtgcggaggaattaatgaagcaagaaaaatcgcaagtattgctgaggcgaacggtgttgcatgtatgattggaagcatgatggaaccatcactttccgtgggagcagctgctcatctggcagccgctcatccgaatatcacgtattttgacttagatgctcctctttggctttcaactgaactggatgtgttaaagtacagcggtcaagaggttttcttatcagatcttcctggaataggagaaatcaccgttcctatctcaaaataaaaggatagtaatatagtagaaggagagagacgatgaatataaaacgttggcttttgacggcaacaacagttattttagctacatttggggtcagtgcagttccttctgttcatgcttctgaagaaaaagaaactgcttatatagatgtcgcagcagctactctgtggacagcaccaaatatcttgcgtgaagtggacgctccgtcagctactaatcctgtagatatgaaaaagtggaccacatcgatgaatttgaaacagaagcagcagttatctagcgatgggatgcttgagacacaagcgttatatggaaacaaagtaacggttttagacgaacaaggagactgggtcaaagtagctgtagacggacagcctacttctcgaaatgaattaggatatcccggatggatgcctactaaacaattaacctatagcaaaaggtacgaacagtatgcaaagaagccttttgtaatggtgacggctgcgactacttatttatatcattcgccttctttgaaaaagaaaggtattgaagttagctataatacgcgcttacctcttttggcaaaatcaaagagtgcatataaagtattaaaaccaaatggaaagacagcatggatttctacaaaagtaggaaaaatctacgcatctcaaaaagatattcctgtaccaactggcacggagcttgttgaaagtggaaaggcatttttaaatcttccatatttatgggctggcatgagtggttttggatttgactgctctggatttacgtttacgatgtaccaatcccatggtattacgattccacgtgactcagggccacagtctcgagcagggaaaccagtagatatgaacaaccttcaacctggagacttattgttctttgcctataaccaaggaaaaggaagcgtccaccatgtagcaatgtatgcgggagatggcatgatgattcattcgcccaactccgagcggacagtagagattattcctttaaacacgaagggatatattgaagagtatgcaggagcacgtcgttatttaccttaatcaataagataagaaagaagctctttttgtgaagggcttcttttttaatatagagtatagataaaaaattagaaaatttagtttatttgcgtttaactacttctcagtaagggaagtagttaaacaagagaaaaaaatcatttttcttcttgaaacatattgactttatatgaaaagcgttatattattataaagtgtcgttgagacacactcgtaacaacgaagctaaaaaaagaattttaaaaagttgttgacattacgttgataacttgataagataataaagtcgcttaagagcggcggttgaactttgaaaactgaacaaagcgacaaacgtcaacgttaaa

SEQ ID NO: 43 - DNA, 36525 bp, Priestia aryabhattai
  source 1..36525: mol_type = genomic DNA
taccttgatacattattaatcgctcttttgctaaattaattaatccctttaactcgctaacggactgcttgttattacaatcacttaataaatctattgtgtcttgcaaaaattgttctcttctttttactcttttatattcagctttatattcttctgccatccttgctattcgagtagaaccctcacgaggagtcgtaactctttcaaaatttgaggtgcgaggctttgtttctttttcatcaaacgtagcgttgtctggattcctattcctcaatcctgattgacccaaaatactccttgccgcccgttctcttccagtggccatgatcatttcccctctctgcaattgagatttgaaataaaacgtcctgtatagattccataacaataaaataaatccttctttaaatatttagttgcagttaaataaaatctttgttattttttgagtggatgggcaagcttactgcagtagctacatagtatctaaagaatcgcgacttcgttacctaatcagtagctaattcagtaacgttaccgcgttaatacaagctttatatgcgtaatgacgcccttcatgttgctttctttattggctttattggacccttcactagttatagataatgacctcgcttctcctttatagaaaaagcaaagccgtctaaaatgttaggtgtttttttcaaaagttacaacatgtatttcattatctattaattgaaaatatgtctttggatatgatccaatataaataggtaatcttcctttttcgttctccgtataaacgttataacccaacccatcgacagtctcaaatccgtaatactcctgcccttttataatattcaagccttcagccaaaccatctaagacacatatgatttttataaatttgatttctttatttttttcactcatacttccactctcccactcacaggttttctgtatattcagaattatatcgttttaaaaagtgttactccatacgccaatcgaccctattaaattaaatatcggtgtttttatgcaaaaactgcaatctctaaaacttggatatgtacaagaggcccataaaaaaggaaacttttgttcaattgttcgaagttgagacaaaaactattgtagaatggtttgtggattgttggaataaggcagacggaaagagcattacgtcacctgccaattttagtttttatgattatgatccatgctatgatttacataaagacaaatggattactgatggtgataaatgggatgatttaattatgtttttattctttttttaaatataaaacacttaccaaaaaggctgttatttaaaagaaataacagcctttttttcattggaagtcattaagtcttcaaatcgacttagtacttctatacctaactctgtaatctctgtaccttgttttctaactccaactttaatacagttaaccttatttaacatagataatcgatgtttcaattgtgaatcagacaagaaataaggaagcatttcttgtataatgcctcttcctacacttgtttcttgttttttataaattgttagtatttttaatatggctttataatcttctgcgaaactgcctctttttaaaaaaataatagcctcttcgatctcagacaatgaatcatttgttaaattagaagtctcttgagataacaaaatttgatctggcatatgatctttaatgactttatttccttccacaataaccattaaataatgaatgaaattttcaagttcacgtatatttcctggccaattataatttattaaaagattttttacatctgagtcaaatactaaatttttcttatttaacttaaaaaagaagtctattagtgtaaataaatcttcttttctttctcgaagtggtggaatgtttagtggtaagacgttgagacggtaatataaatcttctctaaacgtgccttccttaatcatttcctgtaagtttttattggttgcagcaattactcgtacattaattggtataactttatgaccgcccacacgcattacctggcgttcctgaagaacccgcaaaagagatgcttgaatacttaaggaggcgtctcctatttcatccatgaaaatagttccattatgagcaagttcaaataaccccattttcccttcctttttagcacccgtaaacgctccaccctcataaccaaataattcactttctattaatgtttcagttaatcccgcaaagtttactgctacaaatgggccttcctttctttcagaactattatgtattgcttgagcaaacacttcctttcctgtcccattttctccagtgatcaaaactgtataatcgcttttggctaggcgacttgctttctgtttggcagatacaaccaaagggctgtttccaataatattgtcaaatgagtatttcgttgttagacctaactctgtactttttcgtctaatttcttgctccattctttgaacccttgttacatcttgaaacgtaattacaagtcctataagtttttgattaaaggttaaggggacttttgacaccagcaatgaccggttatttatttgaaatatgctatccagttgttctttttgcccttctaaattctcactaatctgaaaattaggtataacctcattgtaatgctttccaatacaatttatagaaggaagttgtagaattcgatgagcatcttcattaattaatgtaataaatcctttttcgtctagccctataattccttcgtgtactgcatttaaaacagattctaatttttgcgttagttctttctcattctgtatggataatgataaattccttcccattttcacaaaatctctaaagaattctgctgtataaaaatgagctttttctaaagataaatttaaaagacgagcaatatcaagcatagtagttaaatcgataggtcggttctctaaatcaataacgttctttatatgcctaggtaccaactcaacttgtccaagcgtaatagcaaattcgaaattttcagcctcttgggcatttgtaacctcaggaacataaggaactaatgttaaatgcccaaagccaaacgaatgcagaagatcaatagaatctctaacattttttatatcattagtaaccaatagaatttttgttttaggagccaaatctaagagtggctctagcttcgcaattcgaatagaacgtctagcaaccataataggaatattaggtttcagtgctttgatagaatcttccagcactggacttgataatataactaaatcagctttgctaataatctctttatttaattgtagagattcataacgtgtttcaatagagatttttgaaccaaaaaacatccttaaattttcttcaaatgttttgcatacttttttactgatagtgacaagaagtatagtgggttttttcattcttttctccttactacacagttgcattttgctcttattctatcagatattaaattgaattagaaaggaccccattttattaatacaccaatggttaaaaagatagcagctaagatagaccagataatagttaaaggaatcataaatttaagccatttaccatatgaaatcccactggtagccaatatagccattaatacgcctgatgttgggttaatgcagtttactactccctcgccaaataaaacagattgtactgctacttgacgagtaatgtgcaacaaatctgcaagtggtactaatattggcattaacatagttgactccccagagccagatgaaattaaaaagtgaatagctgcactacctatgaacattcctaacgttccggtaattggagaaagtggcgctaaaagagttgaaagaccatgaacaattgtatctaagagttgtccttgttcaagcaaaataataaccgcacgtgccatccccacaattagagctccatacacaagcttttgacatccatccatgaatgttttagcaatatcattaaccttcatacgagaaataagccccgcacctatagcgataaaaataaataaacctgccatttcgttttcagtccatttaaaaataagagtacaaataataaatgctaatagggaacctccagaaaataataaaacaattttgtgttgcaatgttagtttctgtatttttatctcattctcgtttgtacctaaagaattaggaaagcgttctaaacccaggatactttggctaatgtcttttttaattttacgtgcataccaatagatataacagatggtacatactaagaaagttaaataaattacaatacgaaagctcattccagacaatagaggaagctcagcaattctttgggataaacctaaggtttgtgggcttatcaatgagacattccatcctgcataagtaccgagataaataagagatacaccaaaaatcgcatccaattttaatttacgcgcaatcatcactcctattgggataaaagcaataacagaattaacaatgatacctgtagtgccaagtatagaaaacattaaacaaatgggaatgataaggagaagaattcgtcctttacatagatttataacattacgaataaacgtatcaatggctccggtcttatcaataacagctaatgcgccacctgtaaataaaataagaaaaattaatggagctccagcaaccattccggcttgaattgctgtaaagatctctagaaaattaacaggagtagactttaccaaatgataacttccaggaacagtcattgtaatgtccccttttttcactcgatcaaatactcctgatggaacaagataagtagctatcgtgcagatgattaaaatataaaataaaaggacataagcgtcaggtttaaatagttttcgtttaataggtttatgaatcgttttttcagctgtagattgcataaatataattcctcctccaaagtaaaatgtacaatattaaaaaaaacattatccctccttcaactatattgtgattattcagaaatctctcttctgaaaacagttaatactatacacttaaatacaatgcaaaaatcgtgccagtttctcagatcaataaaataaccctttaaaatagtttacattaaaaaaaacatatttataggtttatttataagttgttaacgacctataaataaacctataaaacaataaaaatgcaaagaaaggcgatttagtaagaaaacaaagttggcaaggttcttgcaatagtattaggtgagaccatacacactcaacatatatattgcagaatttagaggaggaactatattgagtcagttgttaacgaaacaaaccatttatagttatttgcaagaccatgagcaggatatgttagatgatttaattgaatttgtaaaaaaagaatcaccctcttgtaataaaaagttagtagacgaatgtggtacatatttaactcacctttttcaacgccgattagatatagaacactatgaagtaaaaaaagaatctaaagtcggaaatcacatgaagtttacgattgggaaaggagaacaacaaattttaattattgggcatttcgatacggtttggaagaaaggtaggcttaaacttaaaaaagaaggaaataaactatttggtcctggcatcttagatatgaaaggtggaattattcaatctatatgggcaattaaagcaattcaagaactggagcttcctctcaacaaaaaaattgtcttcctttgcaattcagacgaggaaatcggttcaattgcctctaaagaatatattgaggaagaagcaaaaaaaagtgaggctgtactcgtagctgaacctgctgtagctggttcaggggccttaaagacttctcgtaaaggtgcagggatttttaagttgaaaatatggggacgtgcagctcatgctggcaatcatcatgaagacggtgtaaatgcgattgaagaattagctaagcaagtaattttactacaaaaattaactaactatcaaaaaggtacaactgttaatgtcggcacgattactggaggaagtggcacaaacgtggttccagaatatgctgaagctgatattgatttacgtgtttcaacagaggaagaggcaaaaagagtaacggacattattttaaatttgaaaccactatcaaaaggaataaaacttgaagtaaccggtggtatgaaccgacctccaatggtgaaaaccgaacaaacacaggaactatttgaatgtgctcaagctattgctagcgagctagatatagacttagaagaggcagctgttggaggaggaagcgatgggaacttcacggcagctataggtattcctactctcgacggtttaggcgcttgtggtaaaggcattcatgcagcgcatgaacatatacaaattgataaactggctgaacgctcatctttattcgctaatttattattgaaattgtaataacacgaaaaaaaaagatggtgtttttcatctgaatttcgatatgaaaaaagagaagggtttactcttctcttttttatttgtctctggtttcttctttttaagatccggaaattacaagttatcatgctacccataatcctcattacgttccaatttatataaacaaaatattctagatactgcacaaggttgtaaaactttaaaagtaagtagaataaatccctaactttcttccttcccacttccacgaaacgacagtcggtgaaaggtattgatatacacaaacagttcttccccagttgtctttcttgaatcagctatgagaggaaggtacatggcacggtaggtttctggcacccatatgtagtgatgaacatattctgtgagaaggaagccacaggattgccaaaagctgatacgccttctattatctaatgtttcccctgactcagcctcaataattaatttctgatatccctcagcagctgctttctgtcgcaggtaatcaacaaaatgtttgccaagtccatgtcctcgctctttttcagatacggccaaatagtcaatgatcaacacctgattggatacaagcttccctgtgagagacataacaactggtattgacttgttatatcctacatggagctcagcaattccttgtgcaaacatatttttgatgattttaaccggtttagcccccttatcaccaaatgcctccaaataaagagggctcgcgttctgccaaagttcatcgtcccatgtacaaactgttctaattttcacaatgatttctcccacctaacttgttgttctaattttaaaccgcgcatgatcctcataccttctattttgccaatacagtatctttttatctctcgtccaatttatgaaaaagataaaataccgaattcattcagtaatcagttgcatttgactacaggaaatgtaagataaagatctttttatttaattgaagaaagtctagttggttgtacattctcattcatttcataaaaaatggaccattaggacaatcccccagcatataaaaaccatttatccttacataatcagctaccccttacccacttcggtaaggggtctttgttattttttaattgtacaggcaagcttactgcagtagctacatagtatctaaagtattgtaactccgttatctaatcagtagctagttcagtatcgctaccccgttaatacaagctgtatacgcctcttgaagccgtttgtagaatctgtaagggagctgagccgaagaggcgaagggggcgaccggatgcgtcgagctgaaaaaataggtatgtaaaaagcaaaaaaattaaaaaagtgaaagaaggtaccaacatgagaaaaactcattataatacttttcgaaacttcttccataaaccattctttaatccctacacaaaacctcgtcccttcaaggcttattcgtttgttccgtttagtccacttgccatgcttggccctactattttgaccatgggaggcattatcttaggaattgctatcatcgaacgaatattagagcgatggggcgtcatcgctcttgttgatcagtttgggaaaatcatgcgattgattctgcctgtcaccttttatgggaccttaatttacttttttgcgacttttatattctaaggaggaatgtgtatgtttgaaaagctaaaattgcgtggtcaattaataaaagcgtttcgtatcgcagagatttatcgagtagtgaaacgtggagaccggacctcttatctcttccctaaaattcatcaaatcgatcaccatcatacgtacactcggtacgctttttccttgttgaatggcattgaccctgagctcttacacaaaaaaagatgggccttgcgacaagtattaggcagcaacatcgaaataaatggtagcttaaagaactttagtattaccgttcatcacaaaagtttaccgaagatgctcaattataattatgaagttattcatcctcatatagagaaaatggagctccccgtatgcattggtcaagatatctatggaaatcccgtttcgtgggattttgcggatttggaaaccttactgatttctggcgaaattggagctggaaaaagcagtctcatgcgtgtcatcctcaccacatgggtgaaatattcctctcctgaagacttgcgtttggtattagtggatttgaaacgagctgatttagggctttttcatagcataaatcatgtggatgcgctttgttttgaagccaatgatatgagaaaaccttttgctttattacgatctgaaatgtatcgacgaggcgatttattgttagagcatggcgtgacgcatatcagcaggctcccctttaagctgcctcgcattgtggtagtcattgatgaaatgtccatcgtgaagagagaaacggatctcgtagagatgattcaacagtttgccagccaaggtcgtgcgctaggtgttcatacgattattgccatgcagcgtcccgatgccgatttgttgaattcagcactcaaagcaaacttaagagttcggatctctggaaggcaggccgatgcgataaatgcgaaagtagccggagtcattggcgcagaagaaatcgatgccgcagccagggggcgtatgaaaattaaaattgatgaagtcaaagagtttcaagcgtattttttagatgaagaagcgtgtaaggaaatgctttctccttataaaacacgggtaaaagattctgaacctcaactagaggtcgtatcacagcctatctttggattattagagaaggaggaacagcaatgagctttcggttatctcagcgtgataaagacatcatagcgtttattgatcaatttagagccgtggatcgagactcattagtcgaactattcttcaaacagctgaaatcacccgtaaatgcctgtaatagtgtgatggtacgtttatatcgattagggctaattgaacgtacacagcagtattctccgacggtctatttgcccgtagatgcaaagatcaaaaagaactctcaaaaaatattacatttcctttctattttggatgtctataaacaaatgtgtacgtatagcacacctaaacaggttattgtggaagataagcccactggacgaaaaggaggcatcgaaccagatctgttttgtatctttaaagggtcgcctttttggattgaaattcaaagaaatcaatattcggagcagaaaatgcaggataagattaatttatacgaggagtttttcttttcagatgagtggaaagcgttgcattggcagccagaggaccggatagccatattcccttccgttattttgattacgcctattcgttatgctattcattctgaccatctccgtcttatacaagtaggaagcattcatgaattaatggagaaatacaaaagttctccaaaactaacaaaagaagcaagggcaagaccgtcagcttcttctggtggaattaaaattaatctaacataaggacaaataacataaaaaagctgcctcaaaacagggaatgaggcagctttcctgatttcacactcgttaaaatgtgaacgtcatagcaaaccaaatataacaaatttattacaaaatttctatatttttcttaaaagttttatcaggtagatacattaaaaggaattttcatcccttttaattaaatccaaacgcagtaaattcgtttcataaagaattcatctaacttcttttaaattaggtattgaaatagctaaataatacatttattgttaaatgcatcggaaaatttacagtattggtaagtaggtggtaaaagatttgaagaaatgtaagattcgtttaagacaagcgttacttacagaaatagaaaaggccaaagagaatatggttcaggtggcaaaagaagaaggtataacaagtgaaagcacactgcaagtaagccagtccattgaccaactgttaaatgaattacataaggtaactttaacaaagtaatagttatcttttttataaataaaaaacgatcacttactcatatcattggcctagcatgagaaagcgattattcttcagtaagtggtgattaacttactaatcgacttgtaaattacaaataatttggataataaagtaaagttattttttatttctagttaaaaagctatctcgacatgaacagacgagatagctttttataagattgccaattataaagtaccaaaatataaccgcaagtaaagaatagcacatttttgccataatgactatttttggattagtcagcatatgtataagaggtagactctttatacaccttttctgctcacacctagagatatcacaagtatgtgaaaggtgtatgaaaagctgcatatcgacaattttagtaccgtctaagaatccttgcttctcaaggattctttttgatggtgtgtgctgaaagagtaattatgttaactacatctatatgagaattcacataccaaagaaactacctttttggcgagtgagatagtttttttgctaatcaattaggagttttaggtaaatgcctcacggcgtcttggttcgtttactcgaaggttaaagtaactatgcactttcatattaaaaactgcgtagttactgtctttcaaggtttatatatgtaatatctgcgtcttacgtgaagaatctgaggttcgaagcgatgtatacatttgtagatagcagcaaaactgtcggtattgtagttaatttcatcttttagatactgacaaatttcttttgaggtaaataaacgatttggattcgatttaagtaaatatatagattcaatcatggcctgatcttttttagtttctttcttaactgttttgtaatctgcttttttaaacatatttaattgcttacataagtgccttctttttacatttaacttctaaatagatttctttatcttccacactagttctccttgttttttagtttttataatattacatttttcgcatacaaaacaaggggattgtaggacaaaatacatatcttattgtatatagataccatattttcaacatcacaactatgttaatacaaatgggatacacatcgattccaacagactatcgtctttatttatttttaaaaacaataaacaaataaaggcacagcaattgcgccttttatatatcaaaaaaatcttgaatacttttgtttttatccattcttcgcacagtactcataatcttcttcataacgacgggcgatggtatgtagtccctattgttacaaatgcgccaaatggtatttcttgatactttacttcgctctgcaaaatcaacctgagcaataccttcttgatctaaccatctcccaaacttagatcttttaggatttttccaccagaacataaccatccctccttatctattagcctgtccacttttcatcaatttgaatcatctttggagaaaaagtaggcataaggaagggatttatacatagaataaaagaaattaagttgttctacacatgttgtcgatatttttgtcatagtcatatagcatgaatacagttaagaccgccttatacactgataagtaatgggcggtctttgttatcaatattcgttgaaattggacttcataataaaaaaccttttccctctaggaaaaggttttttatgtgagtattagataacgagataccaccattctagcaaatcatttttcaaaaaaggtttttaaccacttataaaaacttttcttttgctgttgagctttttttaacgctcgaatttcgcgagccattgaaatcaattggcgttcacgttcctcaaattttgcatcgatatagctttgtatctccttcattcgtactccgtgtggttctaagctaagggtttgtttttcagttgaaatgtttggtggagtgtctgataccaagttgaatttttttgcaacggttataacggctttttctaaggtcatttcgggacgggcataaacttcttttagttcatgaaagatggtaacgtcatcatttgtataagctaatctaccttgttttttagtaaactgcacaccaactttggcaaaatggaagttgtattttcgtatagttgataagggcaaaccaagtatatcagctaactcttcggtggtatatgctgcttctgcggttatgactctcaacatatgatcacctcctcttatcaaaagaagtattcgatatatatatgttaaaaccttcaagtaataagaggaaggaatgttatactttataattctattcctcatgcaataacagtcggtatttgaagcaagtattcttgtaagttgagctatttaataaccccatggattagatatttaccccattccctcatcgcaatggtttctccagcttcagctgctttctgtaaccacttttcaccttccagtacattctgtttgaactcatgttttccagttaataagcgatagcctaatattctcatagctactggttcatgtacgtcagctgctttccgaagccaatactcgccttcttctacattcttttctatatccaatccttcgagtagtctgtatccaagtactctcatagccgttggatattccaactctgcagattttcgaatccacttttcaccttcagcttggtttttatctaaatcttccccaacaagcaaacggtagcccaattccatcatggcccatcgatccccagtatcggcagactttctaagccatttttcgccttcttcaacatcttgtttcactagccttccagttagtaattgaaacgctaactcattcattgctccattatctccagctagggaagcttgtcttaaccatttgattccttcttctacatggatgttacttttttctttcttttcattgaaatcgataacatcggccatttgtacactcgttacattttcttcttcattttgagtcaaaatgttatcccctccctcagtatttctgttttcacttcatttacttttgatattcatatgtaaccggaactttatccattttaacggttttcgccacaacataacgacgatagccatcttttaagacatttgatcctttttcaattgtcaccggctcatctaagcgtcctgtacgcttcacaaaatcaatgactttctgtgttttctcagggttcggacgtgtgtttaagaatgcttcaggtacaatgatgtcatcaaagcttacaagatcctgtgtcccttttggttgatttggtagggttttcggttttagctcagcctttttctcttgtacaggtgcttctttcgcttctgggtgtaccgtttctgcttctttcttctgttcatttgctgcaggttgagaaacaggtacttgctcttcttcctgttttttagattccgtgtttgggggttcttcagaagatgcagaagcttcttgtttaggttcttttttcacatctgactcattcttctctttatcatttttattcgggagaacagtaatctggaaacaaattacgcctacttctccaggacattcatcaatcggaatatctaacgttggttctccttggattaagattttctcatgcataatactttttttcgtaagaccggttttattaaaagctttcttcgcaacaaataccgtgtaggaaataaaggtactcttcttcaggcccttaggcgcagatggtgatcctttttcacgcatatcaaaggcaacgtagcgatcatattctcgtaagggtcctgtggctgatccggttaaggtaattttatgtggcataatcgtttcctcctacgtagatgattagttagtgtttatttagaacacagttttaaataaacagaatctattaaaacatcggcttctaagagatttctattcaaaaattaggaagctgtgtcttttaactggttatgctgacgcaaacattcttgttcctctggcgtcaagacttgtcctaagtcctgttttacctgagctatctccaacaagctatacgtggagctgtgctcctctagcaagttctcttcttctggtgttaagtcttgccttaaatcttgctttaactgaatcatttcaagttgttgttccactgtaacgtctgtttcttgtttaaggtggtcttgctgctgttcagcttttaaccaatcaggaacgagttccttacggataatcctttttggtgtggccaatcttgtttctttgctttcgttatgtataacttcttgttggtttgcgtatactgatgaataatcctgctctttagggtttacgaattcatagaattgattttttgcaatttgatagattaatcgacacatatcccgtagggataaaggattgccttgttgattggcttcatgtacatatttatctaatcctacaatggatgtatacgcaatttcatgtatttgctctttctcaatattaatctctgtatctcgttttacggcttttgcagcattttggatgcgggcataaaagtcttgtagttgatgtccatatttacctgcatagacttgattcacttttttaggtacacctttgatataagtaaaggcctgtgaaacagatattaaatgattatttatatgatttacaggtaaatcaaggttaataaaggcatcatgtgatttatcggactttaagcttggtgtatcaacgttttcagcactttctggatacgtcacaggagtggtcacaggagtggtcatttcttctttctgaagcgtttgtacacctgttgtatcatgggcaaaaaagatttcgtcgcaaatgtgctgaaagttcttatggcttttaagaataaatacataactgtcaggatgagtacctgttgcatcctctttaatatatcgtgccacaagtataaaaggcgtcgcctttagtgagcgtacaaaacgagaaaccgtacttttggaaacattaaatttcttcataagcgtttcagaacggatcgcttgaatgcccgtagctactaggttatagatgacgtgatcgagcatttccattctttttttaggaaattctttatgtatagctgattgttgttgtttaaagtgggtacgaagactgtctaaaaactcttctttctttttccgaagtgtggacttgtgggtccataaccatttgaaccgtccattgaaggtatctacatcttttaaatagcaggttaatatctttgtcatttgttcatcttctcctttaaggaacacaaaaaagacactgtttccctggaaaaaggaaaacaatgtcttgattttgatgaactaagcccttgaaatagatgtcaatttcatataaaataaaaacataagttttattttatagaaaaactaactctattaacaagagacttcgacaagtgttttccctactgtgtttagggggaacggtttaagtgtgttggtcgcactacttaaacagttgaagtcttttttctattccggtcatttttgttagttttattatagcgttaactagtctcataattcaataaaaaaatagtaaaatatatcaaaacaagtatatttagctacgcagataccacattaatgtagagattgagtccatcatatatgagatttttagttttggggaggagaaaaaaattctcctccccaattagcttagaatatgttaaaattattgtttttttataccaaaaacgtttaaattatgtatatcttgaaatgagaataactttttagtaagtggagacctaccatataaacaaaagaaccctaacgattaattcgttggggttcttttatttaccaaatagttttgagaagaagcctttcggttcctgttgtttgtcagcatgaagttgccgcatagtatctattaacatttgatcacgttcaagttgtcgtttttcacgctctgcttctttttcttcattagttgccgccgtttgtcgtattacttccgccattgcttgcatagcatttgccattttttcattttgacgtgctaaatcttcattttgtgattctagcgtttcaactttcgttaagatagttttgtatgcttcagttaattgcgtcaaaactggagcattctcatttgtttccccctcgacaacaatatcatgaccttccgaagcaagcaaagcgcgaatatagtcattaggatgcccttcagctttcaagtcttctataagtgacaacacaggaaaaatagattctttgtatttctttgtccgaccttttccgacggtgtgcggttctacaaattccttatatgtatggagccaatcataaacgctagaccttgaacgccctagtttgtctgctattgccgttaaggaatacactttttcgtaatccattacaaaaaacctcctttgaaaaatacatcatgacataatgataacataatagaaacgttttataccgtacaaaacaacattttgaacaaataaagatataaagaaaacaaatggagtcgtacaaaacaacatcttgtacatctttcggcaaaccttcggacaaatgacagcgttagttgaacttattcgaggttttgtttaacttgtccggagtgtagtgtgcatgccggaaacttaagttcacctttagttaaacaaaaaggtgaacttaagttgaacctattcgggaatgcaaagcgtggtttgtattctatagtggtatttacctttattaaaaaggaacgtattttggtgaacaattcaatgggagagtaaaacgatttcaaaaggagaaaaggcgatgaaaaataaagcagcactactatttggagcgcttgccgttgtggtggcaggtgtaaccattttcaacatttacttgaaccacaatatctccaacacaacagcttcgaaacaaattcaagtcacaaatgacagcttaaaagaagaaaataaagagttgaaaaaacaattaagtgaagttcgtccttctgctcaagaacaaaaaaacgagattacttgaatacggttaatcaattcatcgatgtgtcttatcatcatgaaaaagatggatttgaggaacgaaagaaagttgtaaaatccatcatggacaaagagctttatgagcaattttatccttctgaaatgttcgtatatggagatagttacacttccattccaaacgatttacagctttatgtacaacaatatgatggagggcaagaagaggtcgaagtgattgctgaatttacgaatcatcttgtcataaaagataagaatgtcgacgatcaaacgcatgacattattaaagtttttctacggaaagaagagaataaatgggtggtttatcgtattgaagaattgaaaacagaaatcatgaaatgaggtggagcagatggcatttaagaagcaatttgaagattatcgatttaatttaaatcgcaatcggtcatggaagtatacagcaatgttgatctttttctttatcggttttttatccttgctgacatcaaaattctatttaaaaacagatgatcctttgtatcataccaaaacctatgaggcagtttcttctaacataacaggaacagtcaccattgaaaatcgtgtgtatcatccggctaatgcctcgctggatatggttatcaaaatggatcaaacagatgaagaggaagtaagcttccttgcacaagaaaaagcgaatccaaacatcaaattacctgttcatttattgtatgaggatgatggctattatgtggtaaggaccagcgagttgtctccaaattgggaagcacttgcctttgatctgtatcaagaaaatgaagaaaaagaaacggtaaatgtagatgatgtaacgagtgattcagaaacagattcaacagaggaaatagacgctcatgcgttaattacgacactctattctgaccaacgaaaaacaaaaagtgaagaagggaaaggaacaaaaaacaaacaagaatatgcgcttttggtgaatgatttagaaaaacaatttgttaaaaagaaaatgaaaaactatgaaaaagcaatcacagtagaagccaaacataaacgtcaaacgcaacaagaaatgaacgagttacaacgtgatatgaagtaccaagtgaatgaggaaaaagccgatactgaatcaaaaattgcgatgaaaagggatgccattcagtcgagcgatgaaagcattcagctctataaagatgaacaaaaaagcttgcaagaaaagctccaaaaattgaatgaaaagcaacaagatttagccatgaagtgaaaaaacacatgtcaacagtaggtcaacatgtgtttttttgaggttcacagtaggttcacatcattagtttttcatgttcacagtaggttcacatagaggagtttaggtcaacagtaggttcacactttagaggttttcgtgatatcacggttttgctaggctctgcctagcctatcaccccgtgtgatagcaaaaaccccttatgctcttctctcttttgtagtggggaaccacaatttacaggaaaggaacgaatgttatggatattcttttaagagatattgatccaactgccgtaaaaaaaatagatgaaattgcaaaagaaaaaaagatttctcgtcaggaattcttaaaaggtcaggttgaaacgctggctgtttttcaagaacaaaaagaacgtgaagcagaactcgaaaatatcatctataaaaatataaagatgatggaaaaatgtgcagttgcaattgaaacaatcaatggatttattcaagaaatgatgggagaggatgaagaatgataaaacaaagacgtatggtctcttttgatccagaaaccgatcagtaccttagtgattatatgaaagaacatcattttcgttttcctggcgatgccattgctcgaatatgtaaggaacatgaggaatttaaaaataaggaagagaatcattcgctctctattaaagaatctgttccgaagaatatagagtctcttttaaaagaagagctaaaagatataagagatgaagtaaatcgctcagaaagaaatattcagtattcactcactaaaaatttaatggagatgcgtgagtatttttatcaaaaggacgataaaaaatgaatcaatcaacgatcacaccaggggtagtattaaaaacaaagtttgtcacatctgataaaaaagcttttcaagattatgttgattatgtagatcgtgatgaggcgaaaaaagaacaggaagtacatgagaaactgtttactctttatcaagattatatggataaccctgataaaacatcttctttgtttactcaacaatccaatcacttgaatgatgtagagaaaaaacaattaaaaaagttgtttgaaaaagctcaaaaaaataacagtattatgtggcaagatgtcatcacatttcataatccttggctccaagaaaatggtttatacgatgctcatactcatacagtagatgagaaaaaattaatggacattactcgtcagtctatgaaggaaatgcttaaaagggaaaggttaaatgagtcggctgtttggtcagctgccatacactataatacgggaaacattcatattcatattgcgacagtagaaccacaacctacacgtgagcgaggcaaaagaaagcctaaaacattggatgcgatgaagtcaacagttgtaaatcaaattttaaatcgaggtgagcagcagcagaaaataaatgagttaattcgaaatgatatggttgggaaaaagaagcaggattcttcattaaggtggaagaatcgagacattcaaccattgtttctccaaatttataatcatcttccagaagataaaaggcagtggcaatatagctaccgaactttaaagccaatgaagccatttattgatgtgctgagtcacaaatacattgaaaagtatcataaccatgagtatcaacaattacttggaaaattagataaagaagtagaggaattaaagaaagcttatggtgaaggaaaaggagatgagaagcgatacaaggactataagcaaacaaaaatagatgatctttataagcgaatggggaacgcctttttaaaagaaatgaaagagtatgataagcagcagcaacagattaaaagaatgatagaaagtaagaaacaatcaaaacgtcctgcaagttttaaccaaaaggtctctatgcattttgcattaaaaaagatggagcgagcgtttaaatcagaatatgaaagttggaaaaaccaacaacattatgaacgattacaaaaagaaattgaacatcatcgtcaggaagagaggagttattaaatgaataaacaacgtatgaaactatcactaaatgaggaaacaaaaaaatatattcaagcgtatatggaagaaaacaatatcggatttacgggtgaagctattgctcaaatttgtaaggaacataaagaagcaaaaagtaatgaatggtcattgaaatacatttcagaagtggtaagcaacaacttacaccaggctttaaaagatgaattaacaaagattcgtcttggggcaaacagtgccgataaaaactcacaaattttaattgaatacatgaacggtcttttcttccatcacggttttgatggattaatgacaaccgatttacaagagttagatagcacaaaagttgcgaaggaagcagttgagaagcgtattgctcatcaacgtcaaaagaaagttgatgcagaagaatcaagagggaaacaaccatctcattgatggatgtatataaagatagatttaaacatgtagaggaggaatggaatatgttttttaacaaagatttagtgttagcttcgatcaaggctgttggagaggatcatgtcattgtacagtatcaagacaaagaagtagaggtgaatttaagtccagaagaggcgaaggagtttcatcaatatgtcgtacatcaagagaatatgttggtgccaatgaatattaaaacacagaagctttttgtggatttagaggagccttggtatgaacaagaattagaagaacttaaggggatctcctatcaagaagaggaggatgacaatgagtaaaacgtatgcgaaaaaatctgtggaagataagcgtaaagaggttgaagagttaacgaaggggatggagaagaaggtggagcagcattttcattctgccgaagaattaaaagactatttatctttcatgggtaagttttatcaatactccatgtcgaacacagctcttattcaagaacagttttttggtgctcaagctgttggttcatttaagttttggaaagacaaaggcttctctgttaataaaggagagaagggtattaaaattcttgtaccaaacaaaaccgttccaaaatttaaagatgaaaatgggaaattaaaatccatcaataaagctactcctcaagaaaagaagttaattcaagaggggaaaaaagaagttactcaaggccgactgtacttttccgtcggccatgttttcgacgtggcgcagacgaacgcaaaagcgagtgatttacctaagatctttccgaatcgttggttagaaggcaatatagaggattataaggcactttataaaggaatggaagctattgcggaagaaaacggtatttccatcattgctcctaaagaagaactaggatctgcaaaaggagtttcttatacattaacaaaagaagttgcgctaaatcctcgtaactctgaacgtcaaaatgtaaagactttgatacacgaattggctcatgcgaaacttcacaccaaagacacacatctaaactatacagctgcggaaaaagagtttcaggcagaaatgacagcttatacggtttcctcttattttggaatcgacaccagttcctattcgttggattacttatcgcactggacaaaaggaaagacctttgaagataaaacaaagctactaaaagaagtacatgaaacgtccgttggttttattgaaacaattgaagagacgttggtaaaagaacgagaaaaaaatcagtcaccagaaaaaaacgatgaaaaacagcaacaagcagatcctctttcttctggaaatgtacaagagaaaatgaaagaaggatatgaagattataaacaaaaacagcaacaggaatcggcacaaaatgtagatagcatattagatcgtgtcacggctgaagaaaagtattattcaaccaaaacacaagcgattaaaaatggatggatgacaaaggaagaagtcgtgaaacttgagcatcagatcgactcgaacatcactaaaaacgagaaggggatcatcaatggtcaagttcaagagaaatctcttacttttcaagaacgtgttgaagtgggtaatcaaatgtaccctcaaaaacgtacaggcaccgtcaaaaagaaaaaagatgaacaggaactcgaaaggtaagggagcataaaaagctctcttttttattgtccaaatatgaattaaatgggggaatgaataatgaaaaaaattacgtctctttcaaatgaccaatttaaaacgcttatttccgataaacgagaattaaagaagtttatgaaacacccacaaaatgaaaaaatcgaggcaggttgggcaaatatcagtggtgaacagctgcaagacattccttctggtgctgtttacttaacacaatcagctctaggagaggaaaaaccgcaagttttacttgtttctacggatgaaaaagggcaaaaacaagcctataaaagtgaagcaacacttgattttttaaagagtcatgatgtgaatcctgttttagagaaagatcgagaaacacatctcaaaacaagctacattacgtttttacaggctcatgacaaagagaaacctcaagatattgatagtatgttagcccgtgtgaatgcagaaaacgattatgtcatgttgaaatcaagtaccttaaaggaaaagcagttcacctctgaccaattgaaaggcatggagaatgagctttctcatcagtttcaagcacgtaaacagatacaagagaaggaccgatatcaagaagattacaaacaagaagtactagaggtgatgcagcagcctagtgaagaaacacagtataagcagctgtttaagcaaagcctgttatcccaattaggtatatcagatgaaaaagagtcttctaaagaagtgaaaaaggaagctgaagcagaaaaggctcctgtcgaaaagcagctcaagcaagaaacacctcaagagaaagagcagcgtgtggccaaaatgaaggaattcgaacaaaagcattcctttgataaggtgtacaaattaaaaaaagaggtgctgcaggaattaaaagagcttaatttgacagattctcaacgtgagaaattaaccaagcttgaaaaggctttggacacagagaaaaaggatcatgacaagcagaaaaaggaagagaaatcacagaatggatttacaaagttttttgcacggaacaatggagcactttcttcaaaaaaacagaaagagacacaagaaatagaacgctaaaaatggcaaaagtttgaaaagagaaagaggactaaatattatatttagtcctcttttttcataccgtgaagtaagaagggggggattagatgggagaacgaaaacatgtcaaggaggaggatgttatgaaagcgagagatattgatttgttgtcgtatctggaagcaaaaggcgaaacctttgtaaaagagggcaagtattaccgtcatacagaacatgatagtttactcatcaaagggaacatgtacgcttggaatagccgaaatgaaaaaggatatggagcgatcagtttcgctcaaatgtattatgggatgtcgttcccacaagccgtattagatattaacaaaggggattataaagaagtttctctttcacatgaacaaccgtcgctctcaacatcaaaagagccttttcgctatccaaaagagttagaggtaaaggatcaaagcaaagtaaaagattatctcataaaagaacgtaaaattgatcctcgattagttaactggctccttcaaaaagatttaattgcccaggacaaacggaataatgtggtgtttaaatggcgtgagcatggaggcaaaggaaatgtgattggggcggatcgtcaaggaacagcttcactaaaaactaaacgaggttcttttaaacaagtcttacctaacgataacccccatacaggcttttcaattgacgttggtcgcccaaacaagattcatttctttgaaagcccaattgaccttctttcttattggagtatacaggagactcaattgcagaatacacgccttattagtatgaatggattaaagcctaaaactgttgctcagtcttatatcgaagctcgaagagaaggcttaaacattaaagaaatggtgctagctgtcgacaatgaccaagggggaaaagaatttattgacaaaatgaaccaaatcgttaatgctgatttaataagagcagatattccaaagggaacaaaagactggaacgaggagttaaagaagaatgggaaagtcattcaacctgtagcatcacgccttcggaataaacaaacagaacaggagctttcaatgaatggataaggtgtttcaaagtgtattttatctttttcttatcataattttagttaagctttctcaatttgcttatcgtgtctttcgtgaacggaagtatatgaaagagctagcccaatcaggtatgccctatattgataaaatggacggttatcagtttgaaatttatctgaaagccctttttcagcaattaggttataaaactcaagtgacgcaaaagtctggtgattttggagctgacttggtgatgaaaggcaaggataagattgtgattcaggccaaacggtatggagttaaaaatcgggttagcctttcggctgtacaagaagtttatggagcaaaagcgtattataaagcgaatcaggcttgggtcgtgaccaatagttattttactaaacaagcaaaagagttagcagctgcatgtgatgtgaccttagtggatcgtgcagatcttcaaaagtttattaatgaagtcaaacctgtttttaaggcacgagaaatctttgaaaatatcacaccagaacctcgtaagtgtccgaaatgtgggcaggatctagtcgtacgagatgggaatggtactcgtttttttggctgttcagcttttccagaatgtcgtcataccgaaaagattaataagcaataaatgttagcttaaaacaaaggataagcatcgctgaatgattttgacaatatgtttattttcaatgataatgtcttagtaactaaggttataaaaggatgagtagcatgaaaaaatcagagaaatttacctcctaaaaatttaataaaattattaggaggtattcaaagatgaaatttaaatttattgatcgagaaaattggtatcgaaaagagtattttgagcattatttacaacaacagacaacttttagcatgactaatgacataaatattagtattcttttaaaaaatataaagcagaaaaagtataagctatatccggcatttatttatatggttacaaaaacggtcaattcccacagggaatttagaacatgctttaattctgaagggaaattaggttattgggaagaaatgattccgtcttatacaatctttgacaatgaatcttcaatgttttctagtatatggacacaaaattcaagtagttttgctgaattttatgatatgtaccaagatgatgtaaaaaaatacaatagtttggggaaattgtttcctaagcccacaataccagcgaataatttcccgatctctatgctaccttggagttcgtttactggatttaacttaaacattaataatgggggagactttcttttgccgattattacagctggtaaatattcaaaaaaagaaaatgggatctttttgcctatttccatacaattacatcacgctgtttgtgatggttatcatgccagtgtttttgtaaataatttacaaaagcttgctgatgaaagtgaagattggctgtagaagggtagaccgaatgacatttttaatacgtttctaaggcaccattatttgcatcgaataagtaattatacgcaaaacaaaagttaatttcgtcagagagcgtttctctgcatgtcaaagttgtcgattaactaggtttttatttataaatgatcgtgacgaaaaagcatctttctaattgaaaggtgctttttttgtttcctataaaaatataaaaaagaggagagtttttatgaagaacatttttatgaaatcaatgaccgttcttatattattaatggttgcattatgtggagtaaatcaggggaaaacagaagcagcaagcaaaacagcgaatcaagatttaatcatcattaacaagtactacaacaagcttgcatattttcataatggttatattgaaatcgttgatccagtagcaacggggaaagcgtgggataaaacgcctgttggcttttttaaagtcgtgaacaagattaaaaatcgtccttattatacaggacatattcctgggggcgatcctcgcaatccgttaggaaaacgttggttaggattaaatgcaaacggtacgtatggtgatacatactgcattcacggcaataacaatgagagtagcattggaaaatatgtgagtcaaggttgcgtgagaatgcataatgcagacatcgaaaagctttatgataaagtccaagtaggcacaccggttgccattacgtattcttataaaagcttcgttgaccttacgagcgtatacggatataaattcaaaggatacgagatgaaaaacaattaatatctgaacagcattccatgttttgaactgccccctgtcaaatagacagtggaaataaataaaactttctaaacggctttagctctgtattctaaggggctaaggccgtttaatcgtttttgtagacgctcattgttataaaagtatatgtattccttaacttccttctcaagttcttcataggttttatacttctttaaatagtatttttcacacttcaatgttccccaaaaagattccatcggtccgttatcaatacacctgcccactctagacatactctgtactacttttgcttcttctaacttctttttaaaggaaggagaagtatattgatatcctctatcactatgcaataagggagtagctcctggctctctcttcaacgcttgttcaaacgttttaaaaactaaagggttattgttagaagtacctaagacgtagctcacaatagagccatcatacaagtctaatatcgcacttaaataagccttctcagatcttccatagctaagttctgttacatctgttaaccacttttcatttggtttcttggcatggaattcccgattcaggacattctctgtaatatgcttaggtgaacttggtttatatcttgttcgtttacgtcgaatgacagactgaataccaaataatttcattaatcggtaaacacgtttgtggttaattggttgcttaaatcttcgatttattttcaatgtcatccgccgatatccataaattcctcctagtttctcgtgtagccgtctcacttcttccactatttcttcattcaacttctcattcgtagatggagtgcgttttagccacttgtaataggtggaacgtgacactttcgctatttggcataatagtaaaatagaatatttttcgttctggtgaagttcttggatggccatatatatgtctattgaacggacttttcttaaaatctcctcctttcgatttcttctaacttttttaaaaaggcattttcagcgcgtaagcgctcgttttccatttccaattgttttatttctctttgatgtttttcttctgatgtaagttccgattcttctctttttttgccacgtttatcaaagagcccacctttgccacctttctcaaattttttcacccactgatatacctgttgatacgaaacactaaaatcttctgcagtctgcagataattctttccattctctaaacaatgtttcgctattatcactccttcttctagagtagtagaccgtccttttgccatagattttctcgtacctttccccacgtttttaaatgctctatggccattataattcttgatccacttcattaataccgaacggtgagatatttcatatttacggattatttctgattgagaatacttccctgaaagataatcaagggtagccgccgtttttatctctatagagtatcttttccattcacttgaagtttggagtccttctaatccatatgttcgatagagataaatccatctattaattgtcgctctatacaaatcatatttactacaaaattctcgtgaggagacacttcgcttttcatatgccaagattatctcgtatttttcctgtgcagaataagtttttcgtctcataaaaaagcccccaattaagtaaacagattttttatttactctgtctacttaattgggagcatatcatatcatggaatgctgctttttttatgaataatatatcagtagtgctacaagatgtttcattttctatacatacatgtatcaagggttatagcacatcattctcatgatatactatcggttaaggtatttttatccatattagtattttagttcaaagataggaagaaacaaataaaataaattatttggtctctttgtacctgaaggttcctcataatgggaaggggtacatttatttatgaatataactgaaataaaaaaatgctttgtactctcattgaatatgaagatagcacaattacccataccatacctgatttaattgaattattatattgtaaggcatctcaaacctttcaaattactacattttcagatgataaagtttccacctattatgatatagatactgcttgtgacgtcttacatctaattttaaatcctgtaaaagaaaaaggcctttaataaggcctttttctttgtatatcatatacaaaaattcagattaccggaaaccacaggtaaaaaagcccttatttatgaagttaaataaatttcttctaattcatttaacttcatatctaattcttgacttacctttaccgtgttatcacttacaagtccttcctttaaagcagtatatatcataatttccctaatacgctctatttcttctaataggacttcctgtgttacatgtttatttcccatccccatcatcacctaataaattcccatgttaaatattgataaatttcacaataactttttataatgtatttttcaacactcaaatttttacaattttaattgctattaaaagttaatgatttggaaaggcgaaaactataatttttataagtaatagctaacatactttcttaaaaatggttttaactattacacacattgtagaaaaattgctaatttttccctcataagaatatggataattatcatttgcatgataaatcactatctgtgtttatatttcaaaaattttcaagggttatcctaaggccttttctcattgacgcaagggattctttgtgacggtcttcttctacccctttgatgtacttgtagattgcgcaaccccaactaatgtatcattaaaataaaattcgataactaataaagcttaattattattggataagaaggtgaagtgagtttaaacttacgacattctccatatcaaagttgtataaacagtacctaaaaccataccactagttaaagaaaatccatatgtggtggaccttttgagatagttataattatgtaaaaatgatagcaaggaggcaaaagaagtgtttaatgattttaagcttgccgataaccgtccggtttatattcaattaaaggattattttaaaaaaatgattatgaacggacaccttctggagcaccagaagctcccgtctacacgagaacttagtaaattattatccgtcagcaggaatacagttctcactgcttatgcggatttagaacaagaaggcctaatctatgcaataaaaggaaaagggaattttatagggaaagtcgatacatccaaaacaccatctattgagattaactggaaagaaaagcttaacgaaggtatcttgctagctgacgaattagatttaatgaagcacggtgttcgctgggaaaaaggcatgatttcattcaatagcattgctccagacgaaaagctttttgacgtcgaaaactttaaaagggcttttttaaacaggatgtccattgaaggagatatccttttgaactatggatacgcaaaaggttataaacctctaattaattaccttcttcactatatggaaatgaaagggatagatatttccaataaggatattcttatcacaaatggcttcactgagggcctggatattttattgtcttctttaactaaaaaatctgggcgtattatatgcgaaaatcctacccatcattctgcattaaagctttttcgattacacggacttgatatccatggtatagaaatgaaggatgatggtatcgatattaatcaagtggagaaaagcttatctgaatcggattttgattttgcatatctaatcccctcttatcataatccaaccgggattgtcacctcctctgaaaaaaggactgaaatcataaaactcttttcaaagtatcaaattcctatcgtggaagatggttttaatgaagagttacgttattcaggttcccatttagcacctttattgacttttgccggatctggaaacaatgttatctatatcagcagcttttcaaaaattctttttccaggattacgtgttggttggattttagcagataaggaattaattcactggctggaaagtatgaaaagggcacgaaccattcacacatctacattggatcaggcagtactttttcaatatttacatgatggctattttgaaaaatacttaaaaaaggccaagtcagtttataagaaaaaatacgaattagcccgtcatgcttgtaataagtatattccattaaatagaatgactggagatggagggcttcacctttttatagaattagaaaaaagaattagttcgcgtacacttttgaaaaaatgctacgaaaagggagttgttttttctcctggggatgttttttatacagatggaagaggaagtaatacgtttcgcttagggttttctagattaacagaagaagatattgtgcgtggaattaagataattggtgagacattaaaaaatacaaattgggagttagaaaaatgagagtaggcgttattatgggaggagtatcctccgaaaaacaggtttctctaatgacaggggaagaaatgattgcacatttgggtaaagataagtacaaagtcatgcctattaaattaaataacaaaaaagaacttattgaaaaggcaaaggatcttgatattgccttattagctcttcacggacaatacggggaggacggcacaattcaaggtaccctagaaacccttggtgttccatataccggaagtggtatgctatcaagtagtatttgcatggataaaaatatgtcgaaaaaaatgattcgttatgagggcattcaaacacctgattggattcatctttcaaaaatggagaagcctgattttgataaaatagataaaatggggtatccgttagtagtaaaaccaaattcaggtggttctagtgtaggggtaaagattgtatacaataaggattctttattttcttcccttgaggatgtattcaaatgggattctgaggtagtaattgaaaaatatataaagggcgaagaaattacatgttctattttgggtggaaagcttttaccaattatttcgattcaacatacggctgatttttttgattatcatgcgaaatacgatgataaggctacaattgaagaggttgtagaacttccggctacaactcatgaacgtgtcgctaaagctgcaatggcctgttataaagcgctaaaatgcagtgtttatgccagagtagatatgattatagaagatgaagttccttatgttatggaagtgaatacattgcccggtatgacgaaaaatagcttactgcccaaaagtgctcatgccgcaggaatcccttataacaagctattagatatgattattgaaacctctttacaggttagggaaagtgaaggtttctaataaaatagcaaatgaagcgttaaattatatttaatattttgaagatttagataaataatataaagtcattgttattacatataggggggatacatcgtgactagttggtttctattagataaagaatatttaatgtctacgtatcggcgaatgccggtggctataaaaaagggagaaggttgtaagctttatgatgtaaatgggaaagaatatcttgatttattctctggcgtaggagtgaatatattaggctacaaccatcctaatattgtaaaagccactcatgaacaagttgagaaattcctacatcttccctttcatttcttgaaccctgttgctattgaatatgcaaaaaagttagtcgattattcattaaaggatgggaaagtttattttacaaactctggtgcagaagctactgaggcaaccttaaaactaatccacaagtacaggtacataacaggtcaaaaacgtgatggaatcattgtacttcaagaaagttttcatggacgtacattgggtgcacttcacttcacaagacaagaaagtgtatatcaggactttcctcgtacgtctattcctgtatatgaagtagaaagagagaatttaaaggaactagaaagaaccatactcaaggaaaatccgattgctattatgctagagccaatattaggaagtggagggatataccctttatcgggggaatatttaaagggtgttgaagagctttgtaaacagtataatatgttatttattgttgacgaggtgcaaagtggcatagggagaactgggaaattatttgcttatcaacattttggtattacgcctgatattattcaatttggtaaaggtgcagggggcggtacacccttaggagggataatcgtgggttcacgactttatgatacattttcaccaggtgatcatggaacaacattcgcacattctccaattggtacggctttagggttaactgtattaaacacattaattgatgagggtctaatgcacagttcttatgaaatatccttatatttaaatgaaaaacttcaaaaaattcaggaggataacccttcttttattggcgaagtacgtcattgtggaatgatgtttggaatcagtattcatgaaactcataaaaacgtagaaaagctacagttagaattactgaataagggcatgttagtggaccttacaaacggaaatactattcgtttactccccccttatattattacaaagacagagatcgatgaatttattaatcaatttatttcctgtatccccaaatccgtagccttgacaagcagaatgtgatatgtgagatctttaattatttggaatataaacgttaaagcattaataagaagtctgtttctcaattacttgaggagaaaggaagccttaatctctatatagcaaggcttctttttgatgagtttcttctatctacataaatttatgaactgaacgtttttttacaaaaatctcttatcttatgaataaaggatcgtttttttacacattttaactttataaactataaaggagttgcatacaatggcaaacaataaaaatagcaacacaaatgaactattagtatatggtgctcaacaagcaattgaccaaatgaaatatgagatcgctaacgagtttggtgtcaatcttggtcctgatacaactgcccgtgcaaatggatcagtaggtggagagattacaaaacgccttgtacaaatggcggaacaacaacttggtgaaaaaaacatccgataataagatttttctaactaaacgtgtaagaaaaggagagatgggttcccatttctccttttcttattgtaaagaattcttctttactttcatttgggttagtaaagaacgtatgtttgaccagtgtgcagaaaatatgatatattctttacctatacatactatatccagtaagaagatgaggtatttaaatatgaaaaaagctgaattaattgatgcagtcgcaacaaaatcagaactaacaaaacaagattcgaaaaaagctgtagacgctttgtttgaaacgatttctaatacacttgcaaaagaagaaaaaattcaactagttggatttggtacatttgaaatacgtgagcgctcagagcgtacaggtcgtaaccctcaaacaggtgaagaaatgacaattccggcttcaaaggctcctgcttttaaaccaggaaaagaattaaaagaagctgttaaataaatataccttataagcaagccccctctagagatagacttctaaagggggctattttttatgtggaaaacttctaaatacctacaccaaaatattatctaatcaaggtttctattttcttgagtcgtcttagagttcgaggtaggctcttcgccaagtctaggtttccaattttctaacctgttttttaagtaatcctttaaagaatcacgtttcttttttcgtctcttatccctgtttttcataagaactcaccacctttaggttacttaccagagtcaatttatccttattataactatgctaaaaaaactactatatatgctaaatcaggaccgtcaataattttgtgtagataaaaatttataaggatgaaaaagtagcgaaaagagactttgacgcgttaaagaaagaattactttatggtaaagaagaaataaatacgtaaaagcacccctgaacgggggctgtgaattaaactatttcatcgttcaggttttttaggaacttactctctaactctaattgcttcattcgtcgttgtaatcctaaattctctaagtcttgttctaactcagaagataaaccagttcgttctttagctttgtccattaattttctagtagttgccaatctcttttgttcttttgaattcatattaacagcccctttcttgtgacttgctagattcgacatagcagatgaaatatcctgtaaaaagccatttacctagaaatgcaacagcagcacaatacaaaaaaacatccgtttagataggatgtttttattctactcttatttcattttcatctttatagcctgctcctggcgagcttcaattttttcttcaatcttttccatgacctttttatcttctagtattttatgtctgttttcattgactaggttttgaaaagaggtttttaactttctcataatggcacttctttcttactgtttagtttagtccgtatacaagtatgattataacgattaaatggaataaagcaattatttgctatcaatatatctatgtgttacactacaattaacttgtttttgttcggtataagattgagagaagaaaaaatcttaaacagaagtttttatcttgaaatagtatgattgagcaagagaggtaatacatttgtggagtattccacagcaggaggcaatattatgacacaaggtacagtaaaatggtttaatgcagacaaaggtttcggtttcattgaaatcgaaggtggagacgatgtattcgttcatttcagtgctattcaaggtgaaggtttcaaatcattagaagaaggtcaaaaagttacttttgatatcgagcaaggtcaacgtggagcacaagctgctaacgttcacaaagcataatcaaaagtgataacaaaaaggactccttatgaaggagtctttttttgtggtcttataattagaaaaccatgatttatctactattagttcaatagaaaacccaggcttttaaaaagcctgggttttagacaagacgatcgatacaaggtataactagttataacataaaatagaaatagaaagcaaatgcaaataaattaactatgttttcaattaaattaaataatatagtagtaatttttaatctatgtgatagcgttggtataaattatcttcgatggggattaagggggattttattaataagtcgttctccagctttcatata

SEQ ID NO: 44 - DNA, 35914 bp, Priestia aryabhattai
  source 1..35914: mol_type = genomic DNA
atattgtcctaaatgtaaaaaagaatatagtacaaaagaaaaacatcaattatgtgaatgtggctcgccgctattggtagcgtatgatttagagaagctgaaagctaatctaagtccagaagatgtccaaagcagagaaccaaatctatggagatatcatgaattgcttccagtagaagatccagaaaacgtcgtttccttaggagaagggatgactccgcttataaaaatgcctaaactaggtaaagaaatggacattccaaacttatatatgaaagatgaaggtattattccaacgggatcatttaaagctagaggcgccgctgtaggggtgtcaaaagcaaaagaactgggcgttgaacaattagcgatgcctacaaatgggaatgccggagccgcttggtcgctttattcgtcacgcgctgacataaaagcaaccgttgtaatgccaaaagatgcgcctgttattacacgaaatgagtgtgctgtcgctggagctgacctttacttagtagatggactcatcagcgatgcgggtaaaattgtcggtgaggctattaaagcctggggtctttatgatgcttctacgcttaaagagccgtaccgaatcgaaggtaaaaaaacaatgggcctggaaattgctgaacagttttcttggaatctccctgatgtgattttatatccaacaggaggaggggttggtttaatcggcatctataaagcgttaaatgaattaaaagagcttggctggattaaaggtgatcttcctcgtttagttgcggtacaagctgaaaactgtgcgcctattgtaaaagcatggaatgaaagaaaacaagaatctgaattttggccggattcttcaaccattgcctttggtatcaacgtaccaaaagcaatcggagactttcttgttttagaagccgtatataatacaaatggatgtgcgattgcggtggacgaagataagattgtggaggaacaaaaaaaggttgcacagcttgaaggttcgttcatttgtccggaaggtgcggctacattcttagctgcgcgccgtttgcgagaagaaggatggatcaaagaaaacgaaacggttgttgctttaaatacaggacttggaattaaatatccaaacacggtagacatcgaagtccctgttttagagcgaaatggcagccttactaaaaaataaagcaagtaaaaaaatagatcttcttctaagcggagatctatttttttattttatcgcagattcacacttatcgcatgtaaaaaattgtaataagtgtgaatctttatgttcaaaactatacgggtgtatttaggtttaaagttcgtcttatggggtatctaagagaagaaagagggtatctttctatctggaaaaacagcttggtgagggagtggagctggcatgttacgcaagttgaagaatatgacaaaagtagcactgcaaaccagcttgcttttacagtagaagacctacatgaagccacgagcgattataaggagaaaggagttgaatttttatccctagaaccccagccaactcttaaagttttattctagggaccgaatcatccattgctgcacttgttagaacgagctttatatttatttttaagactacataattgttgtaatagaaacagtgtatctattgcaacgataaagcttatatctaatgggatgtaacaataattgtcagataacctgagcggaaattgctaccaagcacattgtaaaccagatgcgctatctttaacgacaagttactatttcagcggctgtaattccatcgaaaacggtccctattttaggcgaaaagcgtttttttaatagcgattaattgtacgttgaaataaaaaagtttattttggttttaattaatttatttgttagcgttccttcctcagctttttttggcttcaatccctttagccataaccttttttaatatttaacatcacatgaatagttttcgttttttacttaaaaataaggagtgttccaacacatttaagtgtgaaatacagtaagtcaaatttgactttactactcagtcttgtataatcgtataccgcggaggtgacgtaatgaaatgaagtttaataagaaaaaaattaacgtcgtagatattgacaaagctaaaaaaagcgtctttgctacaggggtaggaaacgcgatggaatggtttgactttggcttatattcatatttagccgttattattagtcaaaacttttttagcgcagttgaaaatgatcagctcaaattagtgttcacatttgctacatttgcgattgcctttttaatgcgtccattaggcggtattatattcggtaaaattggagacaagttaggaaggaaaatcgttttaaccaccaccattattttaatggccttctccacattgctcattggtttattacctacatatgaccaaatcggtgtatgggcacctattcttttattaattgcacgaatcattcaaggtttttcaactggtggtgaatatgctggtgcgatggtgtatattgcagagtcgtctccagataataagcgtaatatgcttggaagtggattagaaatcggtacacttgttggctatattcttgcttcactgctagctagcttgctgtttgttcttctgtcggataaacaaatggcctcatggggatggagaattcccttcttattaggattacctttaggacttattggtttttatttacgaagaagtttaggggaaacacctatttttgaaaatgaactttccagtgaagatgaagttgaagaagaaagcttcctctctattttaaaaaaccacaaaaaagacgtgtttgtttgttttgtagccgtggctttctttaacattacaaactacatgctattatcgtacatgccttcttatttaaatgaaattattggtttatcaaacacagttggtacggtattaattacggcagttatgattttaatggtgccgcttgctcttatgtttggaaaactgagcgacaaaatcggaaacaagaaagttttcttaatcggcttaggcggattgagcttactgtcagccttttcgttctatttaattaacttaaatggtttagtctttgtttcaatcggtatccttattctaggtgttttacttgctacgtacgaaggaacaatgccaggaacgctgccaacaatgttctacacagatattcgctaccgaacattagcgatcacgtttaatgtttcagtttctatctttggaggaacgacgccattagttgcgacatggttagttcatgcaacaggcaatcacttagctccagcgttctatttaaccattgtgagcatcatcggatttttcgtgattttattcttgtttgcgaacacagcagggaaatcactcaaaggttcatacccaacggtcgcttctaaatctgaatacaatgaagcagttgaaaatccaaaagattcattatggtggaacacggagcaaacagaaaaataaagtaaataaaaagcagctgctgcattaactgctgtgcaaaatatgaacacttaaaaagagccttctccttgtatcgcatagagaaggctctttttaccattcaaagacttatctcattccctgtatttgctatctttgattctttatggtacgattaagttaattatttttgttcggtataagattgagagaagagaaatctcttccatagaattttttatcttaagatagtatggttggacaagggtagtaatacaagcgtggagtattccacaccaggaggcactattatggaacaaggtacagtgaaatggtttaatgcagacaaaggcttcggctttatcgaaattgaaggcggagacgatgtattcgtacatttcagctctattcaaggtgaaggctttaaatcgctagaagaaggtcaaaaagtgacttttgatatcgaacagggccaacgtggagcacaagctgctaacgttcataaagtagcataattaaaactaaaaaagactccacataggggtctttttgctttggattttaataattttaaaagattacttaaaaaataagtagagacatttgtgacagaatgctattaacgaagagctacctatatgtacaatcccgtgtcgcaaaaaaatagaaaaacccccttatggttatagaactgtatgctttaggagtacatatacgcctgaaggtatcaaaaataactaaccttcgctgaattagccttgagagatgcacattatatttcccgataaataaagttaaaaatttgattatttttgataggagagaggatgagggatatgagtataagcttattttctaatggagaaattgtaaatataaaagcatctaatgaaagagtgatcatcttaaaaagccattatgtaaaaaacatgaaaagatactcttatacagtggataaatatccaagtacgtttttctttgaagaagaattaatgaaacatgaataaatattgatttatagtttggattttgtctatactatgctatactgaatttaccatttgtattaccgattactatttttgtattaataagccctattcctcagtggatagggttttattatgacattttcaaggaaatgaaaaagacagactccatggagtctgtctttttctatttatgatggattacgctttttgaacgttagaagcttgagggccgcgttgaccttgttctacgtcaaatgtaactgcttgaccttcgtctagagatttgaagccttcgctttggattgctgagaaatgtacaaatacatcgtctccgttttcgcgttcgatgaatccaaaacctttttctgcgttaaaccattttactttaccttgttccataattgttgcctcctagtgtgacacgcacacattgtgttactatccttgcccaaatctacagacgaaagttatttaacttatcaatctttaccgaacaaaaataattcttcttaaacttaacagaaatagggacttattgcaagggtagagtctgtacagctagaatttctcttttatctatgtttgcactatgtgagctaaaaaacgatacgtaagcctccttagttcaaataaagagaatgtttgtggtacacttaaatagtaaaaaacatttaaaagtgaggaattatatgaacacaactaaaaaacatcacaggcctaagcggctaaaaattgctttccgagcattaatggtcattatcggaggaattattgcagcttacggcttagaaactgtcttaattccaaaccatgtttcagatggaggggtaacaggcattagcatcgttgcttcaaacctatttggcttgccacttggggttctcatcgccgttatcaacattccttttgtatggttaggatatcaacaaattgggaaaagctttgccatattttcaatcctcggaattgtctcattagctgtcggtactagcctcatgcatcacactccagcaattattgaaggagatacactactcgtaaccgttgtcggcggtattattctagggtttggaatgggaattgcacttcgtaacggcggggccttagatggcatcgatatgctggccgtgctgctttctcgaaaattaccgtttggaacaagtgatcttattttgttcttaaatgcgtttgtctttatttttgtttcattagtatttggtctgcaaggcgcgattctttctgcgattgcatactttattgcatccaaagttatccacatcgtagaagtagggctaagcggctcgaaaaccttccagattatcacttctcagcctgcgttaatggtagagacaatacgtgatcgtttaggtcgaagcgctacatacaaagaagcttacggcggttattctcatgaaaaatttaaggaaatcacatgtgtaatcaaccgtttggaagaaagcaaaatgaaagaaattatcaacgaaattgacccgacggcttttgttacggtatatgacgtagcggaagttaaaggcggtaatttcagaaagaataatattcactaagttcataaattacttcatttgtacgaacactctacaataatctacttttaggctggggtgtagagataagaaaagcagcgtgatgttttacatccgctgcttttttatatcataaaatccatttggtacaaggcgcccgttgtatagctaacttgcttagctagcagagggttttaaaaccggatatgctaaaaaagtgaaacggtcagaattaaggtggataaggtaacagcggacattaatgtgatgatttttctcttcatctaacaaatccaacagaaaaaatctctgaacataaaagaacagagattcaacagaatgatggttcttatataatacaaaggatgactttcctgtctcagaaaggtcatctttatcgtaccatcagcaatgacttggcgctgtgcgttttcttacagcgggggaagaaaaaatctgttattgtatagaggtcggagtaaactttcttaattatgtgtgcttctttcatatgtatcgaacctgctgactgagatcagcaggttttttttatgttaccagctagctgtcatcttcaaggggacaagattggttaatctttatagacaaatagactttataccattttacctatacgtaaaataggttaaaataaagaggtgaggcatggagagaaaagagttaaataagaggtgcgtaacattataatcacaatttatcttacagggttataacggtgattatactaaatggtgaacgttgaaaggggatacatagttttgaacacaaaatatctagatttacttgcacaaaagtatgatacggaagaaaaagtggtaaccgaaattattaaccttgaagctattcttcatctgccaaaggggactgaacattttgtcagtgatttacacggcgagtatcaagcttttcagcacgtgctgcgaaacggttcaggaaatgtaaaagagaaaatcaaagacctttttaaaaatgtattatctgacaaagaaatcaatgaatttgcgacattagtgtattatcctgaagaaaaattaccgttgattaaagcgcagtttcgaaacaaaaaagaactatatgaatggtatacagaaatcatcgaccgcatgctcaatctcatttcgtacgcttcttctaaatacacgcgctctaaactgcgtaaagcattgccagatcaatttgtgtacattattgaagagctgctatataaaacggatgaatttacaaataaagaacagtactatacaaaaattgttcagcagattatttctctggggcaagccgataagcttattatagggcttgcttatacgacgcaaagattggttgtggaccatctgcacgtagtaggggatatttatgaccgtggacctgagccggataaaattatggatacgctgattaactatcactccgttgatattcagtggggaaatcatgatgtgctatggctaggcgcttttgcgggttcgaaagtgtgtcttgccaatattattcgtatctgcgcgagatacgacaatctagatattattgaagacgtatatggcattaacctgagaccgctgcttaacttggcggagaaatattatgatgataatcctgcttttagaccaaaagtaagctcgagtgacaaactatccgatcacgagcgactacaaattacgaaaattcatcaggccattgcgatgattcagttcaagcttgaaagtccgattataaaaagacgtcctttctttaatatgtcagaaaggttgttgcttgaaaaaattgattatgataaaaatgaaattacgatatacggacaaacgtatccactagaaaacagctgctttgcaacggttaatccggcgcaacctgatcagctattagaagaagaagagcaggtaatggaaagactgctgctttctgtgcagcattcggaaaagctggcgagacatatgaagtttcttatgaaaaaaggcagcctttatttgaaatacaacggaaacttattaatacacggctgcattcctttagatgaggaaggaaacatggaaaaaatgacgatagaagataaaacgtatgcaggccgcaacttacttgatgtgtttgaacattatttacaagaggcttttgcacatcctgaagaaacggatgatttggcaacagatatggtctggtacctatggacaggagaatattcgtcactctttgggaaacgtgcaatgaccacgtttgaaagatattttatcagtaataaaacaacgcataaagagaagaagaatccgtattattacttacgggaaaatgaggaagtctgccgaaacatcctggaagaatttaaattaaatcctgatcatggtcatattatcaatgggcatacgcctgttaaagaaattgaaggagaaaacccggtcaaagcaaatggaaagatgattgttattgacggcggtttttcaaaagcgtatcagtccacaacagggattgctggatacacgttattatataactcttacggcatgcagctagtcgctcataaacactttaattcaaaagaagagattttattagaaggaacggacgtcttatccgtaaagcgattggttgacaaagaactagaaagaaaaatggttttagaaacaaacgtcggagaagaattattaaaagaaatttctattttaaaagatttaagaaaatatcgctatagttaaagataaaaaaagagcagtatgcctctggggcttctgctcttttttatttagcggtactacaccgtcatttcccagctcgacatttccagccagttctcttgttcacgataattgggcatgattttcccgacaagacgccaaaaagaccggtcgtgattcatatgaaccatgtggcacatttcatgaacgactacgtaatcaattacgtgctgcggtgccattgccagccgccagttaaaggttagctgacgcttggaatcacacgtgccccacgcttttttgctatcggaaatcgaaatggagcgcggctttgttttaaaatgtttttgataggaggagatactcttggttactagcgctttacattgttgatagtaaaagcgtttgagcgcttgttttatcgcttcatcgtcgtgctgattgacataaatctgaagcgtgttcgcttcaaacactacagaatcctttgtaatagtcgaatcgtgatgaatctgtatcggatagtattttcctacatacaaaaagcgttctccgtgttcatagacttttttctttggtccatgcgttctatctttcatttcgtttattttttgctgaatcaatgcccagttgttctctaataacatacgtacttgttcagtagacgttcctttaggagcaaggacttcgaccgttccgtatccgtctactttaattgcaaaagaacttcggtttttatatcgtatttcgtaatggatactctgatttgaaaaagtgtgtatcattttatcttctatattgtacggttaagcctcttaggaattttcgtgcaaaattctctttgcacggtttgtaatttttatggcctttttttcgtaataaagcacctaattctgctttagatacacgtatgccaccgtcatcaaatacttctaacatctcttcacttgttagggataaagcaatttttactttctttaataagacgttatacatattttgattgctctgaaccggcgctggaggtgcttgccctggtttagggtcttgttttcctcttttaaaggtaataaaaccgtttaaaaaagaatctaacatactgttactgcacgagatgtgttcgtctgcatgaactgcatcctcgtcctcttcgtccggtgttctcgtaaggatttttaatacgtcttcttttgttacgtctactccgccaagattaaagatctctatcatttctgtattttttaaatccaaggcatatcgtaatctaattaaaatatcgttattatccattcttgctcctcctataacttgcttgctgtatgtaaaaatcatgactgccacaatctgaacgaacttggtcaatatcagtacaattatagtaacaggttccgctggaattctaggttattccattcatttctacaaacatataacttctcatatttatcagccttcgtcaactcttgaaaaagaaagatttgctcatattatgcccgaacagactctttaccataacaaaaattaggcgccgcagtctgctaaaggaagctgaggcagctttattttttaaagaacggataggacaatttttgaagttggaggatccctgtgtgctgctagaatgatataccttactaaataaatagttttacgtatttattaagtatgtaattaggagtatgatagtagtaaaaaaagaaagaggtcaacagatgaattcaacatactcacgaagagaatcaaccaaaatcaaagctttatccatgcatgcgctttttatcgcactgacgtttgtagcgacaatgtttatcaacataaagcttccaatcatgggtaacggaggcctcatccatttaggcaacgttcctctttttatagcagcctttatttacggcaaaaaaacaggagccatcgcaggggcttttggaatggggttattcgatctgatctccggctggacagcatgggcgccgtttacgtttattatcgtaggggccatgggctttttagcaggtcttatatctgaaaaagcacctggtaaaagagcacttgtgaacacactggcagttgttgctgcgctgattgtgaaaatcgtaggctactattttgccgaagtgattctttacggtaactggatcctcccgcttggctctataccgggaaatgttatgcaagtggttatagcgggtatcatcgtcgttccgcttgtagcacgcttaaagaacagagcggtaaagatttaatcgctcaattgtaagtcgttttaccattatcctatccttaagtgatatacttgatagatattcatcaagtgaaaggggcggaagacaccatgaaatatttaaaatcacagatgaaacagctcattaaagacaatcaggaactgcaaggtaagctgaatggactgatgaaagagcacagccttgaaaaaaactttgctcttaaagctctgtaccatgcagaagtggctgaaggcgggaaatatcagcttgcctatcaagcattagacgcaccgaaaaagtaatggccttgttgctcattcgtatatttcttcattataaaaatggcagccgaatcgcgtatttggctgtcttttttagcaaacagaacaacatagcattattttggattttgcacaacttctttctaactgcttaaatcttgataaatagggtattaaaaaataaatgctaccgatcgttctaattatataagaaaagaggaaaatagcgatgaccgtatctgctttagaacaagaaaaagtagaattatcaaatggagaaataataaattaccgaatgaaaaaaggcggaaaagaggtacttttgttaattcacggaaacatgaattcttcccttaactgggatgtgctaatgaacaaacttccagaacatatcacggcttatgccatcgatttaagaggatttggagactccacttatcatacacctatccacacaatcaaagacttatcagatgatgtcaaactgtttgcagatgctttaaagttgtctgcttttacaataagcggatggtcattaggaggagcagtcgctatgcaatatgtgattgatcatccgaatgatgccaaaaatttaattctcttaagctccgtcaacatcaaaggatatcccattccaagaagaacgtttctagaattgcctattcctaacaactttatacaaaccaaagaagaagtaaaagaagcatttagaatggtagaaaacgcaaaagaaacaaaaaacacatggtttttaaaaatgatgctgcgtcaatttttatatacaaaaaataagccgtctgctgatcaatttgaaaaatatttagaaggaacgatcaagcagcgcaacttaattgatatcaattacgccctcatgagatttaatatttcaaacgagtttaacggtgttgtggaagggacaggagaggtgggaaaaattacgattcctactatggttattcaaggagatgaagataagatggtttcgacaagagatgcatctgacatcgcgaaaggcataggggaaaatgcgacgttaaaaattatgaaaggtgtgggtcactgtccgctgttagatgatttaagcagtttaatggacttatacaacgctaatttaagcagggcttagaaaaagtgagattttcgctgctaacagaagtttgattattgctagatgcagcatgttctaaattaacacaagaaaaaggatctgcctgcaaaatgctgtgagataaacaaagcctgttaccttctaaggaagcaggcaactagtaaataaaacaattacaaaaaacgtaaggtctttttgaagaggcttacgtttttttgagtgcacttagcctattcgattctgtttttcaaaataaagaaacagattggtaatccattttgatagcagtatcacaccgagataaaatacaaataaatgaccgtaagtagcccattcatgcagctggaaaaagccaatccctgttaatagcggtttgaaaataaaagcaaaaaacaaacaaagagcagttgcatataaatagtaatttttatgatggttaattgtccattgataaagaagcataaaagagacaggaataagcgaagcatctaggctaaagcttacgggtatgattgtgttgatttggtagggatacgtccacagcccgttataaactccagcggtgtcactatagtgaaaccaaacgtgcacgttaaatccataaaaccctaaatgaaaggctttttttcgatcaataaaaaaatagagaatgactaaaggcaaaataaaagcgcccaaggtaacccaaaactgccaagagcctggactggagtagtgatgccaatattcagcccacgctttggctagattttcttgtaggttatgtattttttttagatattcctgttggtttggtgtcaatgtaatccatccttttaagtaagaaaaatttcgttacttttaaaatgcccttttcttaagttttggatacctttccctgttgagttgtttgtatttttctgcacgtaaaacgatgtacgtatttggggtgatctgcttacttacgtcggttttgctgctcggagggtccgtttatcagctcatcatctaaaaataaaaagcagttacagcgactgcttttttccatttttatgaaacttttagcgcggtttctacgtataaaaggtatcaataaaacagtagaaaaaagagaggtttttttgtctgaagaaaagaaaaagacagattatctaggaatgggattaggtctgggcgttgcgatgggggcttctcttgggatgttgatggataatattgggttcggtattgcgatcggaacgtccttaggtgttgcttttggaacggcaatgaatcaaagaaataaaaaggaataaaattctgaaagaaggagtgtagaatgaaatattttgacgaagcaaaagaactatggttaaactatgttccgagaaatggacagtcggatatcgtagaaggagaggtcatccgagccattgaaaagcttcgctgtgaagctcaaggcaacggaaatgccaattgggacggcggatttgagatgctagtgttatatatactagacgtattaaatgacccggatgtattcagcgtagctatgttagccgaaataaaagccgatgttcacaccttgctcacttcggcagaaaatccgtatttagaagacgacgtatacgatcgtttaacggaccgcgtcattgagtggcatatagccaaaggcggacctatcaaacgagaaataaatcctcaattgtatagataaacgtgagaaaggagctgttttaaacaagctcttctttttttttgagttcctgaagctttatttaactaacatgcatctaattgcatcatgtgctaaataaatacatataaaaaatcagcggtttacatcgcagcagtatagcataagcttcataaaaaatcggttcataaatggttaaatgtttgctgacctccataaaaagttcataactgacgctgttgtaaacacgtatagtattatatcttttactaaataagaaataaaggagaagcgccgatgtatattccaaagtattttaaagtgaatgatgaacaaataatgtatgattttattgaagacaatggattcgccactttgttttcatatcataatgaaaagccttatgctactcatttgcccctgatgttaaaccggaaagaaaaagctttatacggacattttgctcgtccgaatcagcagtggaaagatgctggaaatcaagaaattttggttgtgtttcaagggcctcactgttatatttcaccgtcttggtatgaaacgaatcaagctgtaccaacatggaattatgaagctgttcacgtgtatggcaccatgaaaatgattgaagaaccaacagaactgcttgggctgctgaggaagatggtggagaaatatgaaagcccgagcagtacatatacactaaatgaagttgatcctgcttatatgaatggtttaagcaaaggaatcattgggtttaaaatcgacatcagcaaaatggaaggcaaacaaaagataagtcaaaatcattcagtcgaaagacagcagttagtcatagaaaaattagagcagacgtctcgtgaaaatgaaacgaaaattgcggagctgatgaagaaaaatgtgcagctcgtgcttaagaaataaccgctgttggaaaagatcagcagtttgttaaagggaagataaagagaaactaactatgtgtttagtttcttttttatgttcacaacattttcttgttattgacaaacagtctgtacatcctttaaaattatctttaattagagataattaaattaaagataattttagtgaaagttaaaaaatttatatattacgaaaagaggcggagcagatggaattgttagggttgcatcatgtatctattttgacggggaaagctgagaaaaactatcagtttttcaccaaagttttaggcatgcgattagtaaaaaaaacggtgaatcaagataacactcagtcttaccacttgttttatgcagatggggaagggacgccaggaacggaagtaacgttttttgatattccggggcttgcaagaacgcatcaaggttcatctgacatttcgactgtttcgcttcgcgttaaaagcacggattctctgcacttttggaaagagcgattcgagcagtacggagtggaatatgaagaaatagctaaacgagctaatcgtgatacgttagcatttaaagattatgaagggacacgtttgcttcttgtcgcggataacggtgaaaaaggggtaagagcaggcgtgccgtggaagcgcgaagacattccgttagaacatgcgattatcggcttaggaccggtcacgctaacggtgggcacggcagaaccaactgttgatgtactaacaaacattatgggatttcgctacgtgggttcttatccatctcttgcaggagatcatggagatattttgatttatgcaacaggtgaaggtggaagcggagccgaagttcatattgaaacgagacccgatttgccgaaagttcgcttagggagaggtggcgttcatcacgttgcattccgtgttccaaatgaagaagaatacaataagtgggcaagtcgattaaatgaaaacagtctgccgaattccggtaaagtagaacgatactattttaaagcactttatttcagagaaccaaacggcattttatttgaattatcaacggatacacctggatttgcgaccgatgaaccgcttgaaacgatgggccaaacattagccctgccgccatttttagagccgaagcgcaaagagatcgaagagaagctgagaccgctagatttggatgaaacgttatagggtttgtagttattaaaacatgaaaaaactccagtatttatactggagttttttaggttaacactcatcgtgccagaaaccgcaaccacatgcaccaataataatgagtaaaataaacagtacgatgataatggcgaaaccattacatccatgatgaggaacgccatatccacattcaggaaccatatatccatagtcaggcattgaatatccgcagtgtggcatcatatgctcataagcaggagctgtatagccgtggtgagccatagcaggtgagaacggcatattttcattagaaccaaaaggtgcgtttacgttattatgcattttgatatcttcccttcatttataaaacttttataaagctttgataacttattcatatgttccaaggtcctcatatgaagcttattcacagcccaattatggttaattaactatattttatggtgaatggaaatgaagcagtgagttttacggtgcttgtggccttataagttatgtcagaagggaaggggtttacctgttttcgattgcataccgctgtttctagagtggttatgatgaacgttttgattttcttaattctatatcgtatacgtacccaagctttcgatggttcataacgtcttcaggagttgtattccaaggatacatcggatctctaaagttttgaccaaatggcccgtttcctattcccaataaggaagggttacttctgggttgattgactgaaggtcacgttcaaatcgtaaaaggtattcacgatgccacggcaaaaaagcagaactcatatgtgctgcatttcgatcgctgcccggaggagtatgaaatttacccgctgcaccatgccaagctatatagcggtcatatatccctttttcctttagtattagcacggtacgaacaaaatctcttttttccatgtcggtaagatgcaatacgttctttctaactctgtacttgttactcattttttaacctctttctaaaaaaaggatccaggggctgtttcttttttacatttagaatatgtccaagaggtaaaagtgctactgtaaatttacagagacttttttaaaggtgtaaatcataaatagaggtaaaatcaaaaaaagcaggcatgcgcctgcttttattcactgcattattattaatgaccaattggatacatggtcgttacgctgtagtcgtagtctttgcctctgtagtcagtatacacaactctaacttcttggtttaaagaactaatatacttttctttaacgtagttgccagatttattgttggtgccgtcttcaccttcgttgatgacttcttcagcaatagacatcgcttgtttttcatttaaatacttgctgaattggcttttcccttgataattgtcaacgcctggtttttgcatatgggcgacaatgtggcaatatccgtatttatcatttccttcttgtaagacaagttctttgccggtaaataacctgtcgctttgagtctctgcagagcattggttacttgatatactgtccgatgtgctgcttgaattttcatgctgctgaatgagggaaataggcgaattgttggtagatacagcgatgagggcaataacaagtgctacaatagtgtatagtattttgctgtttttaaaaaaatccattcctttatgcgtctcctttttgaatcaacgttaaaatcaaatcgactttcttttctagctgatcaattaagttttgttttacttgttctgattgtaataaagcgcttcttagttcgtccatatctttttgcatatacgcacggttttctttttcttgctgcagctctttttgaagagcgtgtatcgtggacagcaattctttatcttggttcatttctgcgttcaccgcctctgtgctgataaaaggcaacttatgcccactatataaaataccactatctccgctgtaaatcgactatttggataggaaatgagtcctcccgggtgaggttttagcaggatattgctagttgagaggagaatagtatggtttaccgtagatagataagctgcgcaggaaagagggaagaaaatgtttccggaattagagacaaaacagctgatattaagaaaaattgtagaaaatgatgcgggtgagattttagaatgcttttctaatgaagaggtgctgcgctattacgggcaaaaatctttagaatcgatcgaccaagtgaaggagatcattaagaatttttccaaaggctacgaagaaaagcgattaattaaatggggaattcagctaaaaggaaaagaaaagctgattggaacaatagggtttcaagagtggtattctgagcataggaaagcaaacgtaagttatgctctttttccagagcactggaacaaaggatacgcaacagaagccgttcatgaagcaatttcttatggcttcaacgaacttcaattaaatcgcataggagcgattgtatttacgcaaaatagtggatctatcgccttgttgagcaaattaggatttaaaaaggaagggacgctaagagagtacatgtttcaaaacggcctcccgtttgatacatatgtttattcgctgctgcgcggggaagcaaagatataattgcaagcataaaaaaaggaacatggagagatgttccttttttttatgcttatatttgttattagaacgtacgtgcagcttctttagcgcgagcaatgccgtcttctttaatttcttgtgctttatctggcattgcagcctgtccttctacaaataggcttccgatagaaggaaccccgaagaagttcatcataatgcgcatatagcggtgacccatttctagttcaccagcagggccgcgagagtagataccgccgtttgcttgaatatgatacgcttttttatctgttaatagacctacagaaccttctgctgtgtatttaaatgattttccagctactgctacagcatctaagtatgctttcatcactggtgggaatgagaagttccacattggtgtaacaaatacatatttgtctgcttgagcaaattggtcacttaactcgtttaagcgagcaactttgcgctgttcttcaggagtaagcgcatcaaattctgcgccgcttccaagtttaccccatccgctgaatacatcaccgtcgatgtgagggatatgttcttgatataaattaacgtgaacaatctcatccgttgggtttacttctttatactcgttaatgaatgcgtctcccgcagccatactgaatgattgcgtagcatcgttagggtttgctgtaatatataatacttttgccataattcttttcacctttctgtcttcaatatataaatgttgtttcgtgaattaaagataatatgttcgaaaacatctactacgttattaatagtaacttacgtaacaaatttagtcaaaggttttttattgggttttatcatattcacaaacgtctttaagagtattacgcttttggattttgtggctaaatcctttaaaaataagagtttttttcattttaaagcgcgattttaaacgttattcatttagaggaactatctttttagaacgtagataattaaaaaataaaaaaaaaatcgtgtatttttgtttcgtgcgttattaatagtaacaaaaaataacagcgtttaatggttcatttaagacatatttttagcgtagaacgatttagaaagagtggattatttcaagggaaatataagatagaaaggaggaaagaaaagaaaaagacctcgatcggtttcgaggtctttttgatttttattgaatttaaaacgtcttggccattgaatgggctttttggagtgctttttctttaatttgcggaatttgatccgggaatttcacttgcccttcaataataatgctttcaaacgcttcgattccaaagaagtccatcatgatttctaaataacgatggcccatttctcttgccatttcagggccttctgaatacacatctccgcgggattgaatgtgaattgctttttttcctttaagcaatccctgagcgccttcttttgtatatgtaaaggttttgcctgacacggtaatcgcatcaatgtacgttttcataatcgcaggaacggaaaaattccacattggcgtaacaaaaatatatttgtcagcgagtacgaactgtccgcctagttcggctaatcgtcccacttttaatcgttcatcggttgataaatcctggatggaagagtgagaacgaagctttttccatccgttaaatacgtctgcatctaagtatggaatatctgcttgatatagatctaaatgaaccacatcatcttctggatgtgtttgcttatacacgtcgataaattctttcccaacagccatgctaagcgattcgtcttcagctaaagggtgtgcagtaatatatagaacatttgccatgatgctcatcctttctatggagtaattttaataacgaaaactaatcttggacccagctttctgcccactggctaatcggccctaatattttacctaactccgttcctttttgagtcagcgaatattcagaacgaatagggcggtccggaatgacatttcggacaacgattccgtggtcttcaagctctttaatccgttctgtcaaaagccttctgcttaaggctggtatactttcatttaattcactaaagcgtttaggaccgctcataagtacataaatgattaatcctgtccacttcttgccaatcagttcgaaacttttttctactttaggttgaatatcttttggctcgtccatattacgtatcctccttcaaacaatatggatgaaaaataacttatgcatttattgtaacagaaaaagcataaaaacatgtggaaactttgggtgaagaagggtaaaatgaataatttcactagtatttgtaccttgcttttcacttcttgaaaacttttcacacataggcttgtcacagcatacgatgtatgaattcattttaagaaaaggtggtatggtcatggcaggagttattaacatctgtaacacaagaattaatggtatggcgagaaacggatcgatgaattttggagaagttcttcacaacggacacacagcggatgttaaatctgttggaattaactcaacctatggagacatttcagctgcttgtgcgcgaatgaaaaatacggacctggatccggatatatttgatcaaacagatttagcgaatattgataacgcatatggcaatcagatataaaaatgagcagcttataccaaataaggttataagctgcttattagttgccttttttctaggcgcatactggacaagcatttgagcttttccattgttgtacgctaaaactaatttctttatgttaatggtaaaaaggtggtaaggtatgacatgtgccagaaagaggagagactataaaaagaagcgttataggcacattatcacgctagttcatctgtttattcttaataaaattggtaaaaaatgaatctttttagagcttggttcgtactagtaagtagatacataattttgatgaagaaaagaggtagtacattgaaaaacaaaggtttgatcgctacgatcattgtgttagtgctttttgtgatttacggagtgagctcttacaacagcctcgttagcgcagaggaagatgtagacaataaattttcacaaatagataatcaactaaaaagaagatcggatttaattccgaacttagtggaaaccgtgaaaggctatgctaagcatgagcaggaagcaattgattcggtcactcaggcaagagcacagctagcgggagctaaaactcctgaagacaaagctgatgctaatcaacagttaagcggtgcattaaaccgcctgctcgtagtggttgaaaaatatccggatttaaaagcgaatgaaaactttagaagcttaatggacagtttagaaggaacggaaaatcgactcgctgtagcgcgtaaagactataacgatgaagttgcaaaatacaataaatcggttaagagatttcctaaaagcatcttagcgggtacgtttggctttgaaaaaaagccatattttgaagtaacaaatgaagaaaaagaagcgcccaaagttgattttgggagcgataagtgatgaaatttcttgcttcgtttgctttattattgtctcttttatgtaatatggtaagcgttgcttttgctgcacctgatattccaaatccggtaggcgatatttacgttcaagattttgctcatctattaaacgatcaggaaaaagctgatataaatcaaatgggcagaaagttagatgatgaaacgaaagctcaagtagcgattcttaccgtgaattcattaggtgattcggatgtagaagagtacgcgaatgaagcgtttcgaaagtacaaactcggtgataaaaagctgaacaatggcgttcttattttacttgctaaaaaagaacgaaaaattcgaatcgaagtaggatatgggttagaaggagccatcaccgatatcaaatctggagaaatcatcgacgcttatgccattcctaacttaaaaaatggtaaatacgatacagccctagaaagcacatacaaagctgtttataaccaagtcgtaaaagagtatgatttaggaacagattttgaacaaaaagtaccaaaagcagatcctccctctgatagcggcgttcatttaacaactcttcaaacgctgctgattgcagctgttattgtgggcttgcttattatcgacttcgtcttttttaaaggagcgattacgcaatttctgctaaactttcttgtgatgtttggaggaagaggcggcggaggtggcggcagtggaagcggtcctcgcggagggggaggcggcagctctggaggcggcggagcgagccggggctggtgagaagatgagagtgaaaaaccaagcaggtatagaacctgtttggcttttttgctttgtatgcctatatcttaaaaaaagatttttttccattatataagcataatcagaaaaaattagggaactaagaaaaaagttagagatttacaaataaaaaggaaggtcttatatgaatacatttagatggatagcggcaaggaaacagctttctcctcgtgcgttcaaagatgagttaaatagccaaatatggtttagccccttaatttatgctcttttttctgttcttttagctgcactgacgctgtttcttgactattactgtaaagtaggagagaaagttccttcatttttttcaatcaacctggatttaacgaatacgttagtgagtacgattatgcccggaattctatcgattacgacgtttacctttaatttaatgcttgttgtgtttacatcctttgcagctcagttttctcctcgcgtgttaaaaaactttgcttcttctaaatctactcagcgaattctggggatttttatagggagttttttgtatacactttttgtctttctctttttaaacagttcacaagtagacggatattttgcgattccatttgtgacgacggcgctatcggtttttagtgcgggcacgtttgtctactttattaatcactctgtgaagtggctgcaagtaaatcatatgactcaatcgatgaaaacagcgtccataaaagcaattaagacaacgattcgagaggaactggagattcatcgaacgcagtctagtcatagcgaacaattttcctttccagaaggagaaaaaaaaccggtatgtattcaaacatctggctatattcaaacagtgaactacagccaattgattcactgtgccaaagagcataatttagttataaaaatggagcgtgaagtaggggattatgtgctaagcggaaccgtattgttttattattggcatagagattcgacagagcacgatgaaatggattgcaccgtttttcaccaatatgtccatgtagggaaatctcaaactgatattcaagacactacgtatattattacgaagtttgtggagatggcgattaaatcactaggaaatgatgacttcaaaacggcggttaactccattcaccaaattagcgatattcttcgggaaatttgtgacgctagccaattttcttcttacttagttgatgataaaggcgtcatacgaatggtgataccagacaaaaagtttgaggactttttatatgatggatttgctaatatccgccactatgcgagacgtaatattatcattacaatggagctgcttaaaacgcttggaaatctcgctgaggccattgggccagcttattacgacaacatttgggagtttgccgtctacacgtctcaaggctttgaagaagaatatttatttgttcaagataaaaaatattttttacatattctttatgatttagctatttctacagaaaaggaagaacaatatgaacaaataactaaacaaatgaagaagtaaaaaagccgaagtcaactcgtgacgtcggcttttcttttctttatttatttgaacgttttaagatgcttttagcatgtgaaaatgtatcaaagcttgcttttccgtgatacgcacccattccgctgtcaccaacaccgccaaatggaaggtagtgagacgtcatgtggttaattgtatcgttaatagaaccgccgccgaatgacacgctgtttaagatttgatcttggactgcttcatcttcagagaaaagataaagtgccaatggttttggacgttttacgattgcttcaattacttctgagatttcatcgtatacgatgactggaagaattgatccaaagatttcatcttgcatcacatcgtcttcccatgagatgttgtcaagaacagttggttcaataaacagacgagaacgatccgttttgcctccaaaaacgatatctccgtttgttaagaagctgttaagacgatcaaaatgtttttcgctcactacgtgagggaagtctagattttgtgaaacatcttcgccgtacgtgtttgttacgacttgttttaggttagctagcagctcgtcttttacattgcgttgaacaagaatgtagtctggcgctacgcaagtttgaccagcatttgcaaattttccgcgcgcaatacgttttgctgcttcttcaatatttgcatcttcgtgtacaattgtaggactttttccgcctagctcaagcgtaacaggagttaaatgtttagctgcagcttctgctacaattttgccgaccattgtacttcctgtaaagaagatgtaatcaaagttttcttttaataaagccgtgcttgtttccacttcaccttcgactacagtcatatattctccagggaagttctcattaaacatcttagcaagaaggcttgacgtatgaggtgttaattcagaaggctttaacaccacgcagttacctgcagcaatcgcgcctactactggtgatacagcaagttggaacggatagttccaaggtgcaatcactagagctaaaccgtatggatcttgataaatgtagctttttgctccagcatgagtagatggtgtttctacttcttttggcgctgcccattctgcaagattcttaactgcaaagtcaatttcgctcagcacaaggccaacttctgcacgttttgcttccatttctggtttgttaaggtcagcttttactgcttttaaaatgtcgtcttcatgacgtacaacaagttctcttaatttttttaaggtctcgatacggaacgcaacgtcttttgttttaccgctattaaagaatgaaagttgttttttggtaagttcttgatagttattcatcagaaagtctccttttccttcacatttttagctctttatttactaaatagaactagctgctgcttatttccacgttgtaaccgtattgactggtaaacggtaagaagcgtggccttcgcttgctgcttttccgattgagataagcataatcggaatataacgttctttatctaaaccgaatgcttctgcgattaattctttttcgtatccgccgattggatttgtatcatatccgtgagcgcgagcaacaagcataagctgcatagacacaaggcctgaatcaatcaaaacgatgtctttcatatctgcttttggcatgttctcgtaaatcggcttgaagaaatttagctgctgctctttaatgtcttgaggcatatagccaagctctactgctttgccgaaaatttcgtctgcatattcgatgttgttcatgtcaccaaatacggcaataacagctgaagatgtattgacttgttcactgttaaacttcgcaagttcagctagcttttcttttccttccggtgtttcaattacaacaaagcgccatggctgcatattaacagaagaaggagcgcgcatagcttctgtaagcatttcttccatttcctcacggctaatttttactgaaggatcatattttttaattgaacgacgttttaaagcaatttcgttaaagtcttttgtagtcatagtcattattcctttctttttaggcgttttatttatttatttattgtcatttctatatttttgattgtgggcgattgtttgatatatcaataattgatacatcaacaatataatacattgatttaagaattgcaagggaaaaagtttaaacttttgaagtggtgttagttggaagtgtgaagccacatcctgcggggaacagagatgaagagagcaagtggtgaaaataaataataagaatgataaaacaaaaagtttgactactttatttctcttggttactataagtaacgataagaaacaaaagtgaatttgctgtttttcaaatgaatgacagtttgagaaagaagagatagagaaatgcttattctttttttaaaacctaaactgtatttgtaattagtacagtatagcaaggcatatcacatagaaaaagtaggaggacttcaagatgtatacagatttaaaagataaagtggtagttgtaacaggggcttcaaaaggattgggtcgcgcaatggccgttcgttttggtcaagaacagtcaaaagtggttgtaaactaccgcagcaatgaagaggaagcgctagaagtaaaaaaagaaattgaacaagctggcggtcaagcaattgttgttcgaggtgacgtaacaaaagaagaagacgttgtgaaccttgtagagacagctgttaaagaatttggtacattagacgttatgattaataatgcaggtgttgaaaatcccgttccttctcatgaattatcattggaaaattggaatcaagtcatcgatacaaacttaacaggcgcgtttttaggaagccgtgaagcgattaaatattttgttgaaaatgacattaaaggaaacgttattaacatgtccagcgttcacgaaatgattccttggccactatttgttcactatgcagcaagtaaagggggtatgaaactaatgacggaaacattggctcttgaatatgcgccaaaaggtatccgcgtgaataacattggacctggtgcaatcgatacgccaatcaacgctgaaaaattcgcagatccagagcagcgtgcagacgtagaaagcatgattccaatgggttacatcggcaacccggaagaaatcgcatcagttgcggcattcttagcatcatcacaagcaagctacgtaacaggtattacactatttgctgatggcggtatgacaaaatatccttctttccaagcgggtagaggttaataggtagaactgaaggaaaaagacctcggaatattccggggtcttttttgtatcttataaatgcatcgggtatttaccgaatattgaaacttttattaaagtgctacgtatataagctaacgacaaataaaggacgtgttgatatgctaccggaaacgattcaacaaaaagtagatcagtatagaggtttttatatcagcttaaaaaacgagctaaaatggaaagtggcagatccgaagcagtttatggctatcgcttctatgtatgtagtgaaaggcaaatcgctccagctgcagccttatattgagttaagtgactatattaaaaatcaagtaggaatgttttctacattaaaatcatcgcagcgttttacgatcgcagccatgttagatacccgctatgagaattcaaaagaaatgtttcatgaatttcttgacgtatatgatcaattagtacaaggcgggtttactagaggcgcatttacgtatatcgcggcttccgctatgctgtcgaatcagtcaggtcaaagtcataaagaaatggttcgaaggtcagtaaaaatttatcaaggcatgaaaaaaaagcatctcttcctcacatcaagcggtgatgtacctcttgctgtgctattagctgaaacgagcgaatttgttgatgatctgatgcatgaaattgaacacttttataccacattggcgcagcatggatttaaaaaaggaaatgaccttcaatttttaagtcatattctcgcaatcgataaaaacttacatggagatacccttattgaaagatgcctagcagtaaaagaaatctgtgaatcggcaggtattaaagtgaaagcgatgcattatccagtcattggcttattagcactgtttgaaaaaccagaaaatgaaattgaaatcatttatgaagtggtgaaacagttaaatacagacaaactttttaagtggcataaagacatcaatgttatgctggcggttaatctggttattagtgaaaagctgaaggattctaggctggtcgaaacaggcatctacacaacgattgaaacgattattcaagctcagcaagcagctatgatggcggttattgtaagcacttcagcagttgctactacgactactacttgataaattagaaggctataaaaagaggttaggacataactacattgatctaacctaaagatgaaccaatgggataaatgaactagcatggatggcttgttacaccgctattgatttccatgcaaggcttcgctttgcgcgggcggccgctgagcctcctcgtcgcttgcgctcctgcggggtctcaccaattcagctccgtgatatccgtaaaaataagcagcaagccgggactgttgttagcatactgcaaaggagaggtgcgaacttgatacgtatactgagattgatccccagaaaaaagctgcagctcttgactgctgtttttattttctaatgtaaaaggaaacgaactgcctgataacgttaaccaaatatcagcaaaacgttttccgaacatcgctttttttagctgcggaaacatgtttttagacgctaggttaaattcaattagcctgtaggattcatcaagtacgataacaccgtcattaatactgttaaatatggcgtctttcgcaacgggcatgaccgtaaacatacgcgatgagttaatggaccataaatataaaaaagaagaaacccataaaaccatcggaactggatcaattccctgcggcgtaaagcccattaaatagacaaaagctgtgacgatagggactaattgcccgaccattaatgcaattaactgcaggcggtaagctttggctgtttctttccagcggtaaacggtgagcaaaaaagcaacgaacatagacgaaaagatgaacatgccgtgaatcgtgtaccatggtccaatttcttgatgaacgtaaggagcacctaaaactgggtcaatttcaaacactcggtaatgaaggtgatgccagtcatttgttgcgaccataatcaaactaataaacggaatgataaaaagtgcaaaaatatgttttttcctcacctttatgccgacatactgcataacaaacagcagtcctgcaggaggtgaaaaaggcatgcccacgtattgaataacggtccaaaatttcatttcctcgaggttaacggatagcaagctaaatgctgcacctatacaataaatagcggtgaaacctgtatgaagaataaataaatgcgcgatattgctgtagtggtgacgtttaataaacacgtaaaagcacaagtataaattaagaacaccagacgtacagataagcgttatataagctgttaaatctaaattcacaatcgtgtccctcattaagaaagcatttttaattaaatgtagcacagttgaaatgaaatgtggatattttatgtaggaaattagtagtgttggagatagtagagggactataaggataggtcaggatgatgaaaaaatggtgcctaaacaacaagtaattgaaacgaacggagaagatttatcttcatctccaaaagtcaaagtttctcagtaaaaaacacatgcctgaaaacacgcggtgttccttcatctgcgtgttttcaggcttatttttattgtgagtctatttaaattttacaaaggtgccacctgcatttttttctgtctaaaaaaaacccaatcggtaaagccgatttctttaagacgtttttttactagttcaaagtcgtccccaatgcgctccgggtcatgagcatcagaaccgaatgtaatatgtaccccgtagtgcagagctctttctaaaatatcatctgcaggataccagcctccgcagtctttggttttacctgatgtattcacttctatggcaatgtcatgtgctgaaatcacttttagcgtctgatcaattacagctgtctcgatagaagaaaaagagggatagaatcctttcatggcatcaatatggccaagaatttgaaacattctgctccgggcggactcttcgatcagctgataatacgtttctttcgtgcgctgcttttcttgctgagaaagtccttcccagcgcgttttatgaaagatgctgatttcatcaacttggtggacagagccgattatgtagtcaaacggatatttttcataatggctacgatatatcgccgcatgctctggaaagaaatcagactccacacctaacagcacttcaattttttctttatattcttcttttagtttcaaaatctcagctacatatccggaaaatgcgctttttcccatcgcaatgtgaggatacggctgatcttcttcgctcgcaaaataaggagaatgatccgaaatcccaatgatatcaaggcctttatcaagggatgcctctatataatctcgaatcgtaccgcgagcatgtccgcatcggtcgtgatgggtatgaaaatcaaattttaactcagtgttcatgtatcatcacctctgttatctttttatgtagtttatagaataattctataaagaaacaacgtattcccctgtagaaatggattaagagaatatttcttaggcttactggtgtttcatctactaaaaagattgtacagaaacaagttattttatttaatttgctgcaaaaattgaaatggaatccataccaaaagttacatttgattcggcaagctaaaacgcatatactactcatagacgatctgaaataacgttcaggtaatcgctgcatcatttgatgtagaggaaagtccatgctcgcacggtgctgagatgcccgtagtgttcgtgcctagtgaaaaaataagctagggcagcttggcttatagcttagctgacggcgggaaaaaccacctaagtcctcggatatggtcgagtatccctgaaagtgccacagtgacgaagctttgctggaaacagcaaaggtggaacgcggtaaaccccacgagcgagaaacccaaacaatggtaggggaactgtctctaaggaatcaaacggagagacggacggttacatgtgtaatcgtagatagatgattaccgcctgagtacgagagtaaaatcgtttgcagtacaaaggtacaaaacatggcttatcgaacgttgttgaaacagagactgactataaaatacgtaacccaaacaaaccaatgaggtttgtttttttatttgttcttttttaaatgatagcgcagatgcattgatggagtgcttgaattttccttattgtagcacgaggaattaaggtgatatataaatacatattaactaaattgcggtatagtttacttgtacttactaaatacgggaaaagggaggaatattcatgattaagaaaatggaacatacagcaattattgttggagatatggatgaaacgattcactactacggggatatgtttggctttaaagttcgccttcaaggctctaccgaaaaaagagagatggcttttttgtatcttgaagaacagccgggtatcgaaattgagctcattcgagatattgatccgattggcgaatacaacaaaagcgggattgtgaaccaccttgcgtttacggtagaggatataaataaggcgattcaacattataagagcaaaggaattgaatttttatcctctgagcctcagccaacactcgaaggcggacgtatgattttatttcacggacctaatgatgaattgctgcagttagtagaacgggttaaactttaaaaagtttactttaagaggtacatacaagaaaaaatgtgttttacattctcaaaaaagacctttctttgattgcgatagaaaggtctttttgatgtgaatttactacgatatcttagttagctttttaataactttccttacgtttcatgacaaatgcttctttctgctaaaaaatgatgagtataaaattttataagtgccgtatacagcaatcgtcaagatgaattaaaaacttcctcgagtatgtttccattttttatcgtaacacccgctatttataatgtataattcattataattacattttttatgtatttgtgtaatgagtgaagtagctcggtaaggagatggtacgaagtggaatggcagcagtttaaatattttcaaacgctagcacgtacgcagcatatgacgcgagcagcagaagagctgttaattacgcagcctgcgctcagtcgttcaattgctcgttttgaagaggaagtaggagcacctctatttgaccggcaaggacgttccattcaattaaatcaatatggtaaagtttttttaaagcgtgtagataacataatgaaagaatttgatcaaggacaagaggaaattcaagcgctgctagatcctgaaaaagggcaggtgtcacttgggtttttacatacgctcagcacagatttgattccagatttaatcgcgtcatttcgcagcttatatcctaaggttaattttcagctgaggcaaagcccttctcacgttcttcttgagcagctgcagctgggcgaactggatctttgtttgattgcgcctatggaagagaaatcggtcatcaagtggcagcatctttggagtgaagagctgtttgtgatcgtaccgaaaaatcatcgttatgctgatcgtgaacgtattgcactagaagaaattgctgaagaatcatttattcacttaaaagaaggtttttctcttcgtcttacgtttgagcagttatttgaagagacaggggtaaagcctcacatcatgtttgaaggagaagaagctgataccgtagcgggacttgtaggagccggcttaggaatttctatccttccagatttacacggaatcgatcaaagtaaaatagtgaaaatcccattagctaaagccaactgccaccgagtaattggactagcatggattgaaggaagatatctatcaccggctgttaaacagtttagaaactttgttttacataaatttaatgaccagaaataaaggagtttcgtagcctagacttgtttacaaacttagttcttttttcgttggaataatcgttttaaaatcgatctctttttacctactacgctgctttcttttgaagcttctactaattctgaaatggcctgctgttcacgcaagcttttacgcaaagattgaataagctgcttatctttttcctgaagaacttgttttgtatcaggctcttgttggggtgaaggctgtaccggctgttcgggagatgtcggctgctggccgtcggcctcgggctggtcagctgcttctgctgtgttctctgtgtcctctttgtcttcggcttcttctatagacacggcagcttgatcctcgcttgtagttaaagagaattctttttgcagcgcttcattgatttcttctgcttgacagccctcatcataaagctgcttaattttcagtaaaacggtcgcagccgcagcttcatattgttttggtcgatgatcttctttttgtataaaggaatattggaatttatctatatatcttctaatcgttgaagtaggaatactcgtttcttcagataactcttttacactaagccattttgtcattttctcaccactttttaaatgattacttattcgtcagcatcaatttgaatttgtactagtatctactgtttatcttatcatgtaacgcttctacgtaccttgctgtgttggtttctgtaacgtttttataatcacagtgtcataaatgaggtataagctgccactcgcacaaagatttgttagttgaagaataggaaataatcagtaagcatttgtttggagtatgttgaacaatgatgagcgtacttcttattattatcttataatgttgctgaagaaaaatcgagtgattacttcaatgtttaatgattatggtaatgttgtactaaagaataaaaggaggggcagcatgagttttacagaacgagcagtagcacttattaaacaaataccatccgggaaagtaatgacatacggacaaattgccggcctggctggtagtccgcgaggtgcaaggcaagttgtacgagtactgcattcgatgagtaagaaacataatttcccctggcacagagtcattaattctaaaggagaaattgggtttaaagacgaagaaatgtacgttgttcaaaaactttcactcgaagcggaaggaatactcgtttcttcggatggaaagcttgatcttaaagtctatctctatgaacctgacgtgtataaatgacgaaacagaatgagacagaacgaaaccaatttcatctaaaggctaacaaatgagataaaggagctgaactgcttgtgacaccgctattaaattccgtgcaagacttcgctttccgcggtcggtcggtgagcctcctcgtcgcttgcgctcctgcggggtctcacgatttccgcttttcccgcaggagtcttcgtcttgccctccaattaatagctagaagcacttacatttaccctgccaatgaaaaatccgaacgagtttgattctccatcaagaatcaaagtcgttcggaacttccttcaactaacatattttcttatttatgtttttcaaaagccagctttaatccaaaactgattaaaacgactcctgttgctttatccataaagcgctgaacgctaggtgttgtgagccattttcgtaaatagttaataaaaaagacgaatacgaaaaaccacgtgatagcaaggatcgtgtatgttattcccataagaagtaattgaagcgttacgttttgatcactttgaacaaattgaggtaaaaaagttaagaaaaacacagctacttttgggttaagaacgtttgagacaaggccttgacgaaaagcggatgtttcttttgactgctcctcttttataggagaaactgtatcggtttttttagaaagaaaagcagagattcctaagtacattaagtacagggctcctgcatattttacgatttcaaatgccagagctgactgaaggagaagagcagataaaccaaacgcggcggcgagtgtatgaactaaagagccgctcgctaagcctaatgccattttatagccgcccgtttgtccatctgccatcgttcgtttggtaataagagcagtatcaataccaggactcataataacaaataatgt

SEQ ID NO: 45 - DNA, 33993 bp, Priestia aryabhattai
  source 1..33993: mol_type = genomic DNA
caacaccgaaaactttactattattcagaacgaaatttacttagcaaaacctctcttaaactattcggcaatgcgtctacttacagaactctatctagcttttatacatatgtttaactttgtcaaagtatcttttttataagatattgacattttagtaaggtacctttattatttgataaggtaccttattcttttaaaaaaaaataggtcattcctatcttattaagaggataaaattttttgtggagataagtctaacgttaaattagcaaggaggcttttatcatgaatgaaagagataacgaatatttacacgagcaagatttaattgatcaatttttcaggttccagagacagctggcaagatatcagcgacactactttatcaacagaagagatgctggagcattaggcgatcagcaccgagggcaaggacggatattaaaattattaaaactgcagcctaaaactacacaaaaagagctgtcgtacttactggacatgagacctcagtcaataggtgaattacttagtaagttagaaagaaaaggttatattgttcgtacaccatctgagaaagatcggcgagtactttccgttgagctaacagaagccggactagaggctatcgaggctacggaggaacaaaacaataactcgggcatctttgatattctctcagaagaagagcaagatactctttcacatctaatgcagaagttaaatacttatttagacgaagaaatgttaaaacaaggtcatgatgaaaaccaagaatttcgacgccataatgacctacggggatttggacctcaccatagattctttggtggtgatccagagcacgggccaaggggctttgggcgcggaccttggggagacggtgctgaatctagaacaccgagattcagaaatcgaaacccccgagaaactaatagagataataatgagaaatgattcacatgctgtttagtgattatttctcataatttcatgagaggaaacgcaatatggaaaacatctcaaatgttggagagcaagttttaaataataaaaacaataaaatattagtaatgactggattaatgattggaattattttttctgagcttgatgaaacagtcgtaaatacagccatgccaacgattatacgtgatcttggcggattatctatgtacggctgggttgcaggcatctatatgctagcgctatctgcttttatgcctatcctaggaaaattagccgatttatttagtcgaaaaaaagtctacttcgcttctatgggcttctttattggtggctccattatatgcgggctttctcattcaatgattatgcttttaattggacgaggaattcaaggccttggcgcgggtggcctgatgccgctagccatgacgatttcgagtgacttgttccctattgaacaacgagcaaaagttcaagcgtttatgggtccagttatgtttatccctatgcttttaggtccgttaatgggaggcttttttgtagatcaagcaagctggcattggattttcttcgtgaatattccagtgggattaatagcagtcatttttttagcaagtgggttaaaagaaacacatgaaagaaaaaaagtaacaattgattgggctggagccattcttctagtagctgcgatcatttcattattaattacgcctgttttagtcgaaaacgaagggtatacgtggagctctccattcatcatttcgctactatgtgcaggcgtacttttaatcggtctttttatttgggtagaatcaaaagtagttgagcctatcgtaccgctgcatctatttagaaatcgtaatattttagtattatcactgcttgtttttactgtaggctgcggattaatgggctcattctcatctttcccttactttgcacaaaatgtattaggccttacccctacggaatctgggtatttaactttgcccatgatggtaggtgctgttgcaacctcaatcgtttctgggtttctattaacaaaagtgcggtatcgcgaattattcgtgatttctttcattatgcctgttattggtttttatttattctccaaactaaatattagcaccactaccctacaggttatcattttctttttcatcacgggacttggcttaggggtcatgtttggcggagataatttaattgttcaagaatctgtagaaaaggaacacaaagggattgcattagcaacggttccattgtttcagtctatcggtgcaactgtgggagtaagtatgtttggtacgctattatcctccacacttacttcaaagctaagtagcttaggcgatgaattaccgaaaagtatggcagataatatgaatagcctagcagcaggaggaattccaaatggccttactccagagttatttatgaaaattaaaatattatttattgaatcatttcagcatatctatacttacgcatttgtgcttacaatcattgcatttgttttatgcttctttctaaaaaaagaagtgctatcttcaaaatcagaagaataataaattattggcttagttggttataaagaaagcctttgctacaatattttctgtgttaatgcacgtgtaatatagtaatatacaagaagcagactgttatagacagtctgctttttattgtctctatgaacataattaccggcgaatttggtctgagaaaaggttatttctattaattatgagtaatttccctttaaagtattttgtacactattaattagttaccaggatgtcatctatccagagtaaggaacagtacctttaaccccgccaaacttactcaaacctaaacccaatcccaccatctacaataatgttttgacccgtaacaaaagatgcgtcatccgaaagaagccactttactgcttttgccgcttcaagcggatcaccaattctgcctagcgcgtttagcttttgataggattcattaagctttgctttttcctctgaagatagatttgaaaatctttcttctaacaaaggcgtacgaaatgcacctgggcaaaaagagttaattcttatattttgatggccatattcctgagcaactgatttcgttaaagcgatcacaccgcttttcccagccgcatatacgccagtccccgctgaacataaaatagcgtccattgatgatgtattcacaataacaccgctgttttgtttggtcattacctgcagctgatacttcatacaaagccatacactttttaacgtaacgttgatcaaatggtcaaagtcctcttctttgaattcatgggtagcactagaggaagcctcagtgttagccgcattgttaaagcccacgtcaatttttccaaatgtagagtatgtttggctaacaaggtttttaacatcttgactattcgttacatcggttttgataaaaagagatcgaggagaccactttcttaatatagaaagagcttcttctcctttttcactatttctagaagcgatcacaacatgcatgccctcttttgcgagtaattccgctgttgctaaaccaatccccgacgttccacccgtaataatacctaccttttcttcaaacatatctttctccccttttgcgttcaataagatcacaacaaattaaatttagtagcattagtcataagagttattcagctttggatagattaatacctgcttcgaaacactaaaaaacacctaataaaggtattaggtgctcttttggattagccactaacttgattatgagaaacagataaagtagattttcgattccataaatagaaggcatatccgcttaaaaataaaagcagcgcgtaattaataagtaaagaatcgttagctttaacagggcttgtaaactgaagaaaattatttaagccgtgaaatacaatcgtaacgccaattgattgaccgttaacgatcagcaaagccagtactaacccaataacaaatgcaaatagaatttgaaaaattgtatttgctaccgattgaccgcttagcatattcaaactgtgcgtaaaagcaaataggaatgatgatagaagaacggccacttttttgtttttgttagataaaatgctattccaatcgccaaagggacgattcctaaaaactgaagataatgtgtagtaggatgcgtcatgctcacgtatgcaccgtttaccaaaaaccaaaagataactaagatttctaggccaataactttccacaaaagctttgacttgatcatcactataccacttttctgctttaggtttcattgataacctatactattcgttttaaggattttatatgttttcatccttttatcatttgagctcaaagaccatgtgagacaacgcttcttccctttaaaataagaagatagttccttacttttttaatataactacacaaggtacaaaaatacacaaaaccctgcccacgtgacataatcactgaactccatttttttaccgcctctaacaagtacactaagcgcccaattggaaacacttccttcaggcgttttgtgtatatatctgctggctaaagcgtatgctcccactcgaaataagtaatagcttactaaacataaaaaagatatggtcataaaactcacatttaattctttcacccggtacacctcattatttttctgctatttcatcggatggcttacgctgcatacccttttacccttgttcataaaaatcttttttgacgtcttttaaaagttttaagatatctttataaaaacaagtaattaacattccagcgatgttggttaccatcataatcataagattgccgataatcaggctaagaaaagtaccaagaaacataataccaattccaatataaaaacctgggtgaagcagctcatcatcgtcttctttttcttcttcgctaatgtttattttgttctgtaacgcagcatcctttttaataaattcatcaatggttgttccatagatgtcccctagctttaaaagatgctgaatttcagggtagctctgattatgttcccacttatgtatgtgttgtaccgatacatttagctgcttagcaacctctttttgagacattttttgttcttctcttaatttttgcaactggtttcctaacctcaactcattcacctctgtaaccatggcagcgtgtaaacaaaatttgcttgcactacgttttctcgttttctacaattctaacatattgtggtaaaaaagaaagaaacagttaatgaggcgtataccaaaacctacaacgacagtaataaaaaatagtgagaattctcatgtgtaaaaaatgaaagaatgcacttttatctccatccttttattgtttatactaaatagtggattgtacgaacatcgaaataaaaaaggaggaaaaataactatggaaatgctacttatttatatattggttatcgctcttattggattcattatttggagaaggattaaaaggagacatagacccattaaaaggaatggacttggtatattagctcctattttgttcatattaattgcattttcacttagtctaagtcagatgatgcacataccaggccagccatttcacttacctccctactgggaaatgatgattgctggtgtattaggtgttatattcggactcattatgcttagccaaacagactatgaagtaagagaagacggcttcatttattcaaagccaaataagaattttaaatatgtgattatcgctattatcttcataagaatggctttgagtcagtactttaaaggattagattcgatagacttcgcggtcttaacgatgacgctagcctttatatatattgttatttggagagttggcagctatctaaaattccgtaaattaaacggtgataattacagcgtaaatgctgggtaatcatcaatatgaatggtccttctttctgcttggaaagaaggatcttttgtcatagtaagtaaaaggcccttgtgttgtgtaagaccgtacatatgttgtataatgcaatatgtattttttataatagaaagtctatatatagaaacaaaccagatgaaattaaaactgtacctaatcacccgctttttaatttacaggtatattatgaaaggaatcatactatgacatttatcaattctgtaacaggcccagtcaacgcatccgaactagggctaacgttaatccatgagcatatgcgcgttcgttctgaatctgttcacgcacagtttcctcatttatatgatgagaaacaagaaatcgcgaaagcagtagaacaagtaaatcgcgcgaagaaactcggagtcaaaacaatctgtgatcctacggtgatggaacaagggcgcgatattcgttttattgaaaaaattgcccgtgaaacggacactcaaatcattgcagctacaggaatttatacgtataactacatccctacccactttcaaactcgtagcattgattatatggcggatctgtttgttcgtgacatcgaagtcggcattcaacacacgtcgattaaagcaggatttctaaaatgcgctacagatgcacctggcgtaacggcggatgtagaaaaagtaatgcgcgctgtagcacgagctcataaaaaaacgggcgtgccaattatgacccattcacatcctgcaagcggcacaggcttaaagcagcttgatatcttacttgaagaagatgctaatccaaatcaaattctgattggacatacgggagatacggataatcttgagtatatttcaaacatcttaaaacaaggggcttttattggaatggaccgctacggtttgacaagagaatgttcaactgaaaatagaaataacacggtcattgagttagccaaacaaggatactcaaaccgcatgtttctatcacaagactactgctgtacaatggattggtttccagaaggcgtaattgaagaacgttttccaaaatggtcaatgagctttgtgttagaagaagtcgtaccggaattacaaagaaaaggcgtaaccgaacagcagattcaacatatgctttttgataacgctcgctgttggtttgaaggaaagtaatttagatctagttttcgttacgattaaaaacccccactttaagcctgctaagtagggggttttttggcgtcgatgaaggatgaagcatgttatacgttcgttagcccgtttttcttaataatttttgtttctctttgctctttcttatcataaagtgtgcaccagacaagcataatccaacggctattcctattgttaagtttgtaaacacagttaatgaaaaggtcgtaagtagaaccagtgaatgaaacgacttttcttttactacctttgcaaactgttcttttttacttatattccacgctacgaccatcaaaaccggcgcgagactggcaagcgccacgtatgaagcgtacggagcgagcactagcagcacaatcaacacaaagatagcgtgcgtgattcctgcaattggagatgaagcaccgtttttaatattggtaacagttcttgcaatctctcctgctgcgggaatacctgaaaacatcggcgttaccatgtttacgattccctggccaatcagttcttttttgctgctgtgctttgattttgtcatttcatctgcaacgcgcgctgtcagtaaagattgtaacccgacaagtacagcaatgacaaatgcagaaggtaaaagagtgaccaccctctccactgttatatctggaaacgctggcgccgggaaatgacgaggtatctctccgtaaatggacccaatggtttcaaactgatttgcaaagaaaaaagatgccaagcccgttgatacaataattccaagtaaataggacattcccagcgacttaggtgaaaagcaaagaacaattaaaatcgttgctaggcacaatcccgctgtagcgatactatagatgttgatgaagtgtaaattaccaaagatctcttttatatttaaatgaaaatactgatattttttaatagcgtgtaatccaaggaagtttggaatctgcccgctaaagataatcagcgcgatacccgactgaaatcctacaataatagaggacggaaaatacttgattaaagctcctactttacatagcgcaaagataatgaggagaattccggacataaagccggcaattaataagttttcatagccatattgcaacacaatccctaataaaacaggaacaaacgcaccggtaggtcccgcaatttgaaacctacatccacctaaaatagcaattagcaagcccgctacaatcgttgtataaagtcctgtaacaggcgatattccagaagctatcgcaaatcctaatcctaaaggtatagctataatgccaaccacaatacccgatagtatatctttcttcaaatgctgcaaggagtaatttcgaaaaacctctagattcataagtgtacatcagcctccattttaagtagtgaggttacccattcgtattttcgtcatacaaccttattaagctttcaatcattcaaaataaggtgggctactcgattacttctatcttaaaggagacaacttacaaaaaaataaagaagaaattagaagtttcttagcaagttattaaaattttcttaaaaattcttactatttattcttttagttattttttagataaatttaggtgaaacgcattcatttatctttacgcttgcccataaataaagttttaaaagctataaatagaaggagtaaggaaattgttgtccacatagacctaggtagaggcttgaaacagcggctcctagtcaaaaagttttaatacgtattgctcttagcaaataaatctcttttatccaactatgctatcaatgtataaataaaaacaactagactccatagccactatggagtctagttgtttttacttatcgataaagatcatatttattaacagctcagattgtaattatattttccttttctaacatcctgatctaatccattgatagttagcttacgctgctctttttccggaaggtgaaacgtaatctgattataaggtaattcataagaaccttccttgttaatttttatttgaatctcatcttctgtagtttccatatcaacatgaatgtacgcaaatgtgtgcaaatattcgtttgttaacccatcatcttcgtataagctataagaagatttccctttccctctacaaggaaataataaaaatcctctttcatccatattcttcgttgaaaaagttacttctgcttcattaatcgggatgattgctcccgccttagctagcagcggcgtatagtttaagggtgcaggaatttcaaccttttttcccccttcataccacgttccaacatgaaaatcgtaccatcctccaggattatttggcaaatacacttctcgctctttctttcctttttcaacaacggaagcaaccagcagagactcgcctagcataaagtcgtcattttcttcaaaggtagtttcatcatgttcaaaatcataaaaagtaggccttataataggatggtagctattagaggtttcgcgcaactcactataaatatatggaattatttttgttctaaatttaattaattctctaattgagtctagaacttcaggatacatccaaggttcattaactgtctcgtcatcgttccaagagtggatagtgaatctcggatgaacaattccattttgtatccatcttacgaataattcgggttcaggagcaggacctgaaaatccgcctacatcatgtccaaaattataaataccggataaacttagccctatccccatcttaatattgaattttaacgttttccaactggtgcgattatcgcccgtccaagtttgcacataacgatgcattcccacagagccggatcgtgatattaaataaggacgcaactgagggttattttccaactgtgcttcataggaagccttcatcataagcagtggatgaagtgcacgaatcagttcaaactctttattgttcccaaaaccgtgacagatcgcttccttactccagatttcaaattcattattatcattccaagtggaatcaattccataatccaatagcttttcttttacttgctctttccaccagtcgtaggtttctttattggtaaaatctaaataagcacctatttcatcccaaaattgtgccatttcaggttcttcgttatgactatttgttataaacatctttttttcttttaactcattaaataagggatgatcttttaatagacagggcttaatatttgcacataaacgtaaacccttatcatgaaagtcgtttaccatcttttttggtgaaggaatttttgattggttccaattaaatacataacgcttatcttcaattgacgtatagcccgacgacaattggaatgaatcacataagatatcatgtttttcacacagctttaagaattcgtttaactgcatttgtgcatctggagcatcggtataactcattgtcgatccagaataccccaagctccacttcggtggaaagattgtttgtccagttaaccatgaaaatttccgagtaacatctttaacttttgggcctccaataacatagtaatctaaatcaccttgtttagcttgatagtatctgtatagctcatgatagttatcgagttccgtacctagttcgaaaatagaactggacaaattatcatagaagaccccaaatgagaatcctgtttttctatgcctcgtgatgtaaaaaggaatatgtttataaagaggatcgctatattctgcatcatatcccatggcatcaattgcttgcattcgatagcgctttccatgtttatcaactgatcctgtcttttctcctaatccaaaatattgttcatctaaatcacgctttaaataatgaacgatcccctcaccaagtgaaccatcaagattatacgcctgagtttttcggtcattcgcaaaattcacccacctggaatcctcacggtaaaaccagctaatcttaaatccatttaaatcaacattaagctttaacgctgaagtttctacggtgcattcaccgttattattactaaactcatagcttggtagtgaaaaaccgcttgtatccaaacgtttgcgcccctccaatggaacatctgtctgtcctggtgcaacgctccaagttttatctagttgtaactcttcaccgtctgtaaacaaaaccctgataatgtccgtttcaagtaccataattttcgcgtatatgttactctctgctagttcaaattgaagaacattattagcttcatttaagaaagtaaattgataattctccttaatactcatgtcgcatctcctttactgtgcatgtattataaaatagtatgtcaagctgctccctaataaaagtttataaatattgtctttactagctcatattaaaaatactttttatcaaattcttttagttaaagctgcttctctctttcaagtcggcaacaattttactgtataaattatctgtaaggttataaaagaaaaataaaatgattaatccaataatattaagagccgccggagcaagaaataataaccctttaagacctaacaatgtatctgaagactgctgaatatttggaacgtacccaattaaactcagtgcaactcctggaataaaacctgccaaagcctgcgcaagctttcggaagaaactgtatgttgagtaaacaatgccttctgtacgttctcccgaattccactcatgatagtcgatggaatcagcaatcattacccacggtagaccaagcgcaaatgctaatgcaaagtttcctaatgaaaaaatagttaaaaacgttactgtactcgttggtaatataaaatttaaaacatcacaggcaatgcaaactaaaagcccaagcatgaatgtatttttcttccctattctttttaccattgctgggatgaacattgaaccaactacagcaagccctatacttaaaaaggaaagtattgacattaattctggactttttaaattatactccaaatagtacagctgaacagcgttgcgaatattggaagaagcaatcatgaataacgctgctaaacacagtacaataagaggacggtttgaaaacaattctttgaatagtttagataagggcaccttttcttttcttggtgctctaataacgttttctttagtattacgatagcaaattaaatgaaacaaaattccgaatattgacatcacagatatagctacgatgtacccgacttctttattagcaaactgtaatacaataggaattactactactcctgaaataagaagagctgtttgactgccaattgctctgaatgaacctaaagatgcacgatcaataggatcttgtgtcatcgctgcagacaaagaaccatatggaatattaacgaatgaatatgctagcccaaatcccatataggtagcaaatgcccaaacaatctttccggtgtctgaaaagtttggagccaaaaacgagatgactgtcattaatgctaggggaactgttccccataaaatgaaaggtcggaactttcctctttttgagatatttgttcttgaatccacaaatgcaccaacacttgtatctgcaaacgcatcaaatattttagagattaaaaatactagccctccccagtaagcagagattcccaaaacatctgtataaaatttcagaaggtataactgtcccatatcaaacataagtccgttaccaatatcaccaaaaccataagacatcttttctttgaaagttagctttttagaaaccgtaactactggccttttacttggaaccactggtaatgccatataactatcccctctttctcccatttacattccccttttgtaaaccctttcattaggaaatagacatagatgtttcaatatttaaaatctatcacacccctttcagatttctctttttaagttagtagcccacaaacttaaagcatcaattttctcttttctttaactctttccatacttgttcatatactttttttaaaggaacgctgtaagtctcagcaatgaacttacaatcttcaaattctggtgccctttgtacaacttcacctttcataagtccggtttttactgtaacgcttccccattcggtttctactttatggaattctcgttccagccggtgaaccgacaatggataatagcgaattcccaaagttgttgtttccttaaataaaatctcctttattttatctacatatgcctctgcacaaagcagctgaagtaaaacacccggcctgtttttcttcatgtaaataggcgtgtaaaagacgtcgttggctccggactctaaaagcaagtccataatatatcccagtaattcgccagaaatatcgtcaagattcacttccatttttatcattttacgatcgatgtgctccaagttaggaggaatgtgtgaaggcaaaatagtctctcctttcttttagttcttgtttactttgagatacgatacttcagactttcaattttcctcaccgatgattactcggagcacattaggatgtttttcaaaatcttttgttcctgctccataccccactgattgtaccgtcatagaaggaactgtacagaattcttctgaaagcactgatacaatagctgcacctgtaggcgtggttaactcgctttttatattgctttgctgaagaggaacaccttttaatatttctaaagtagcaggtgcagggattggataaatcccatgatcaatatgtactttcccagcacctacacaaacaggtgatgattttattttttgaatttctagtttgtttatcaaaatagaagctcctacaatatctataatcgagtctacagctccgacttcgtgaaagtgtactttttctaaagaaataccgtgaatgagaccttcagcttccccaatttttctaaaaatgtttaacgaagtttctttcactttttgagataattgacttccgtcgattagctttacaatatcttggtaggcacgatgactatggtgatggctgtgttcgtgatgatcgctatgttcatgcttgtgatgatggtcgctatgttcatgttcgtgatggtggtcgacatcttcatgtttatgattatgttgatgtccatcagcatacttgtgatcagctgtttccgatagttctacatcaaacttcgtactagagattccatttttcacaacttttctccagctcaatttatactcttcagaaatatttagtttttgaagctcctcttctaaaagagttgaatctcctccagcatcaataagtgcaccaatgaacatatcaccactaatgcctgaaaagcagtcaagataaagcgttctcattatgtttagctcctttttgaattaatcggtgaatcaaagcagcgttgtaagcagcgccgaacccattatcaatattaactacgctaattccggaagaacatgaatttagcatagttaatagtgctgataatccgttaaaatttgctccataaccaatgctagtaggtacagcaatgaccggatgggaaaccaatccaccaacaacgcttggaagagctccttccataccagctactaccactgtcacagtagcattttggatctcatcaatattatttaagagccgatgaataccagctactcctacatcataaatacggcgaactttacacccgagtatttctgcagttactgcagcttcttctgccacaggcaagtcagaggttcctgcacaaacaatggcaatatatccttcaaaaaaagaatcctgatctgagtccttccaaaagagaatttttgctacctcgttatatgcaaaaattgggcatgcttcaagcacttgatttgctttttcttttgatattcgcgtcacaagcactgacttatctttcagttgcagcgctttaataatagaaatgatttgttccgctgttttcccttcaccaaatactatttctgaaaaaccttgacgtttttttcgatgataatctaccttagcaaaacctagatcctcatatgtagctaactctttttcagcatctgccacagttagtttcccttgctgaacttgtttcaaaatgtcttttatcattgttcgtcacacaccttagattgtttattcagtgaagtttcgtgtcactactccactttggataaagcttgattcatactaccactttgataaccagtcaaatccaatgtaatatatttatagcctagtccctttaatttcttagtaatgatattgtttttttccataatgaagttcatatcctgaggttccacttcaattctagcaatctctttatgggttcgaactctcacttgaccaacacctagctcttttaaataggcttctgctttttctactttggttaatttttcttttgtaatatactccccgtaagcaattctggaagataaacaagcaaatgaaggcttattccaagttggtaactctaattgttgagataactctctaatttcttttttaaacaaattagcctctagtaaaggtcctcgtattcccttttcctttgcagccttcattccaggtcggtgttcattcatatcatccgctatagcaccatatacaatcgttttaaattggtattcttcaataattggcttcagatgattaaataagctacttttacaaaaataacatctatttttgttgttttccgaatagcctggaatagctaattctgatgtctcaattgtctgatgccttaccccaatttgccttgctagcaccttggcttcttctagttcacttgatggataggtctccgaatctgcagttactgcaatcacattttcatttcctaatgtttcaacagcgacttttaataagaaagtgctatcgactcctcctgaaaaagctacaacaactgattccatatctcgaagaatagaagttaaaatctcgtattttttgtccaacatgttcttatcctcccgtctttgacaatcttcttacttttaaattgtcatgcttccaaatccaccatcaacccgtattagcgttcctgttacaaaactagaagccttttctgaagaaagccaaacagctgctccttgtagttcttctggattaccaaatcgcttcataggtgtatgtcccataattgactctaccctctgtgaacttagtaattttttattttgttctgctgggaaaaatccaggaataattgcgttgacccgaataccgttcggagctaactctctggctaaaaattgcgttacactattaagaccagcttttgacacagaatacgtaaatactttagataacggagtagtcgaagaaacagaagaaatattaataatactgccttttcttttttgttcgatcattttttcagcaaaaatttgacacgtaagtacaaccccttttagattgacatccataatatcatcccattcgtccatatctagctcaaaaaaaggagttccactgtttttaccaggagcgttaagaagaatatcccatcctcctgaccatttttcaattgcactagctacttcaattaaggattcacgagcactgacatcagcttgaaaagcttttgcttttcctccattacgttttatttccttcactacatcttctgccttttctaaattacgtcctacaatagcaactgttgctccatgattagctagtcctatcgctatagatgaacctaaaacactatttccaccaattacgactgcagtttttttagttaaatcaaataattgtttcatttctgtcctccactctcaaaaaatttccttctttattaaatgatatagaatacagctctgaactttgttgcatatgaggatgagaatggatatgatttagcaatgcctcagaaacctcaatttcacttagctctaacgtatttttaattcgcaccatctttacttgagtaaagtctaatatattacttgttttaatagctgcctgaatagcttggcgatcattaggtaatgtagtaggtatttttgtaggcgctacaactgttgaagttaagccgttggcatacataaattctaggtttgctttatctactaacctttgagttgtaaagtctgcagttccgactccatttgcatttccttctgtttggggagtcaagtccaacacaaccatcttattaacggcgggtccgccatgagcatatggagttgggtagcgtcctgtgacattagggtccattccatccccactaatatttttgccaatttcatcaataaccagcacgtctagctcatcaaagtataattttggcaaaagctgtttagctataatttgtagattcgtctctttatcctcaatttgttcagaaggcagcacttctattacagctactttgtcaaaggagttttcgatactagcaatgccaaatagaataggaagttcttgcataataattttagccattgcaggaacgttttcagccatatatttaaaccctagctgatggcaagcttctgcccctttttgttttcctaaaccaatgctaatcattttcataagaccactttccactggaccgcgaaaagctgtatgtggttttattcgatttacaacgataattccatcagcttttgaagcatgcttatctacaaagacaggtaatccattggataattgtccaatttccactacctccattgaagaacgaatctcacattgtacactctcttcggttattccaagatggcgtaaaacttcttgctggccttcagcagttgctccgccatgactacccatgcttggaacaataaaaggattagctccaagtccttttaagaattgtactgtggtagctgtcatttcgactatttgatcaagccctctactacctactgctatggcaatttccattccaggcgttatccttctttttatattttcttggtttaacttttccgttaatacatgttgaacatcatgaatttttgtatcatcaaatgccacttgtaccttggccattttgggaataggaatatcttttaataaatcttgcaaaatacccatctttttctctcctttcttttaatctgtaacaatagaattatccgtaataagaaaaagtactattcatgttaacgttgtaaaaagtatctctctgcattgtaataagaaatattttcaatcagcgcttgcagaactgtagaatcattgggaacctttccttgctctacccattcgccaattaggttgcatagtattctacgaaaataatcatgtctttcataggagagaaagctgcgagagtctgtcaacataccgataaaatgactgagtaacccaacgttagcgaaatctttcatttgtctctccattccatcaatgtggtcgttaaaccaccaagctgtcccaaactgaatttttccaggaacgccattttcataaaaattccccatcatagcggcaagtacagaattatctttaggattcaaattaaataacacgactctcggaagcgcatcttcttgatcaagcgcattcagaaattcagataatcctcgtgcgatatcagcttctccaattgaatcaaaccctgcatccgcccctaaaaggtttttcatttttgtattgttgtttcgcatagctccgatgtgtagttgcattacccattgtttgtgagcgtacatttttcctagttcttttaaaagaaacgatcggtacttaattaactcatcttgtgaaagaagttcgtcattcatacgtctcgtaaaaattatttctgcttctgctagagtcacctcttggtatttcatgtaaggaatatcatgatccgctgctcttcctccattatcatgaaaataatcaactcgctgtttaagcgctttaattaaagttgctaaagatgttacttgtttctgagctacgtgttcaaggttcttgatccatctctgaaaagttggacgttcaataaacattgctccatcaggacgaaaggttggaacaacttttgtttcaaacgtagaattttgctttagcaattgatgatatttaagagtagaggcaggatcatccgtagtccctataaatcgtacattagatttcttaattaacgattgaggtgtaaactcggcactttgaagtttttcgttgcattcgttccaaatttcaagtgccgtatccgggctaagccttttattaataccaaaaaagttctttaattccatgtgagtccagtggtacaacggatttccaattaaagagggcaccgtttctgcccaagcagaaaatttttcccagtcactagcttctccagtgataaaatgctcagctataccattcatcctcattgttcgccacttgtaatgatcccctgctaaccacagttgagtaagatttttatattgtttattttctaaaatttcttttggatctaaatggcagtgaaaatcaaaaatcggcatttctttagcaatgtatttatataacttaacagctgtaggtgtgtataataagaaatcgtctgctaaaaactctttcatgttattttcctcctaaggaaacaaaattgactttatggatatatgtaaacactttcattttctgttataattaatttgttcgtttactaaactaattaattatagaaataatttagcatgtatacaaaattcagtcaattaaatattttaaattttacaattaatatttttccacatgaagatgctataataaaaaaacaatgtcaacgaaaatttggaggatatatttatgcctaacggtgatgcagcttatatcaaaaaattaaatcgatctttaattattagcaaaattgtagaggcaggaatgatttcacgagctgaattgtctaaggttacagcattaacaaaagctactatttcagcacaagttgcaagtctacttgaagaagatattattattgagacacagcaagactattcaaacgttggaagaaagcctataatgttatccttgaacgaaacggcaggatatgcactaggaattgatctagattatggtcaaatctcatttactctttctaatcttcttggacgtccagtttcttcagataaagtcaaaatacacgatacaaattactcaaatatacttagtgtattagtaaaaaaaattaatgaatataaagataaatgtcttatgtctagatacggcctgattggtatagctatttcgatacatggtctcgttaccactgatgaaattattcactacatccctaggttgcagtggcatgaaattgctttaaaagaagacttagaagcagcagtaaaggtgaatgtttatcttgaaaacaatgcaaatttgctagcttttgctgaacgagcttatacacatcataaatctgataacttagtatgtataacgcttcgttcaggtataggtcttggaattttaataaacaacaaattatctaaaggtcatgatggctatgcaggagaaattggtcatatgattgttcaaccaaatggagagctttgtgcctgtggaaacaaaggatgctgggagaaatatgcatctgagtcaagctttttaaagaacctttcccaaaggaaacaagttggtaatatgtcttttaaacatattgaagaagagcttaatagaaaagatattgaaacccatcaagaaatggataattttattcattacatttcaattggtttgaataatgtcattaatatctacaatcctgaaattttaattatcgatagtgaattactttctcgatacccagattctatacaaaaaattaagagcagcctttcttcctctataagtcactaccgtgaattattaatctcctcaactggaaaaaaggcatatgaattgggtgcatgcgcattagtaattaagcatttccttgaaattacaatgccaaacttggtatattccgagtcaacagaaagctcccttttaaaataagtaccatctacatttcagcttgtatagtaagagtaattaaagataaatgtttttaccttcgaaacaagaaatgaaagattaattaagaatttcaaccttcctaataaagaaagtaaaatgattgtagcatgagcttaaactaaaaccggagctatcttacctagacagcgattaaaaattgcctcctacttgctacgaggcaattcttttatttctatatcttaatccccataataatactttaaaaaattcatgatggataacaggatgactaaaataattaaaaatccttctactaatatccttcacccttcttttgaggatttcttttgttttttatgggcgtgaaaaatcagttttcgaaaggcaccgtgcagtaaaatgataaaaaccaacataccaatctttacgagaattaacagctcatcacatcctttttaacaaacaaaataaagaacgatcggccaattgataaacaacttagctatgaaactttttattttctttgttcttttggtactctacaaaaaatgagactgggactgctccaatacctatgcctattgaaataaacagcgcctggtttagctgaagactcgtatttcctgctgctttactatacatcataaaacatacgaagcttaagaagcctatagctaaaggaatgagtgcgtgcttgtaccatttcattctagtagcctcctctctttttcaacccacctagcttgataatagcaacatttttttagattgagagatgcgctcaacattatgtatctatcattcttttataaaaagtgacttcctaaaataaagctggctaaaagaacgattacagctactcctctcaatatatagctttggctttcactcaaaggtttaccctttctttcacttataacaggatgaatataaaaaagagaaaagaaatcccatgcctgctgccacagctatggtaatttccaaattatcacatatcctttttcttccttttcttcctgttaaacaattttagccaagtagtcagctgcgcctctccaggacatacgagtcatcttaaaatcgcacaaaaataaaaaagcaggatttctcctgcttttttgcgtatgtaattcctcttcattatgtcaactcaacacttttagcgagcataaaagcggagatactaaacaaaataataaataaagacgtggcatgtaacaataaaaacagaaatttttgaccgcctttaatgaagaacgaataaatcattcctaggattgtcactaagattaaaagtgctgctgctattttaattactatagcaaagaaagctcccgcaaatacaattgacggaataaaagacgctacaataatgatatacaaaatcagtgtagcaataaaagcgttttttgatacgtttgaagcctgtttaaacaaattccccatataatctcctttcccattttaaaactgcatcttttactataatacatgtgtctagaggacacaattaacttttgtgaaaaccgtaataagttaagcttgatcaccaataatatcggctatatttttgagatcttgtttgctcagtttataaaattttgttggtgtttctttgtttaagttatttgttgataaatagccctgttctcccctgtctgttaaggttaaatgcatttctttatgggaagaatctttgtattcaatataaatatcgtacataggtcttagaatcatcacatctttattagttggagcagccgattcaatagctctttctatcgtttctgtcatcttttgatcttgcgaagagtagaaatagtcatcataaaaaccattgtatcctttcgattgagaaatagagatggtttttggttccttttttagttttactgtctcattattactttggcatgcggtaagtccacatgcaagaagcccgctactcaggcttaaaacaaattgtcttaacatactacgtcctttcctatccataaaaaataaattacaatacataacatttttacacatttaatacaattataaaaggttttattattttaaaagcgctattttctttttatggttcactcactgaacatttataagaagcggatgactgtgtaatgaggtaacagttttgtagccctggttaaatagacagtgcaacaactaaaaaaacacacatagtgtttactagaaactacatcataaaaaggcatcctaaataggctaccttttattactttgtttgaatgaatatactctataaagctggtttacttataggagaacgtcaaaaagctaagtttcttttgtacataccttcatacgtttgatgaaacgacgcatagaattatagacgggttcgtgtatatctaaaattcctacatatcctaaataaaaggaatatattcctttttatggtataattaaaaaataaaattcatagggagtgaatacattggagactaatacaaaacctcaagtaaataccacctctattgtttctctaactctaggtgtcctgtccatttttattcctatcatcggttttattacaggtattattggcatttttctctataagaaagcatcaaatgaaatagccgctaccaatcaaggcggtaaagggctcgctatttccggacttatctgcagtatagtaggagtggtttctcagctactctttgtgttaggaattattacgtttgtattcgcgggaaccacgatggagtagaaagacttggttttttatcataagtagcaaaaagaaatgtaagaaggtaataatcttgcataaggttatcatgatttctacgtcaggtatgtactgctaactttaaattcattgttaaacaaccggatccttgctaaggatctgcttgtttttaacgtttggataaagataataaatcttgtaactagaattaatataccactaattaccactatcaaaatacttcttagagccgatgcccaattgtttattctaaagaaccctgcgataccgataaaaaatagaataattgctaaacaaaaatttatgtacaataatgaagggtgattaaaagcgagaaaccccccccgcacagtaatgcaaacgtaaatgaccagaagttgatgatgcgtgctacttcaattagcctcctttctctttaaaatctctctgtttaaaaacatcttgaagtatttattttaagtctgtttttaaacactgcaagaaaaaatcgcaaacttcattttgaatgcactgcttctatcattttgtttgacaatcgttcttagctttgcttctaatgaacacaaagtaataaaaacggctataaatcctataacgccataaaacataacggcttctccccttttttaaaacaatcaaccatatacgccttacatcttaaaaaagctatgtctttccactttacaaaccctaagcgaaaacttttgataccattctgttttccctttgtgctgcgctgcgcgatgggctgagttttctttccacattttgattgattctaaagaatcccagtatgaaatggtaatgcctaaatctttgtccctggcactttctattcctaaaaagcctttttgggcagaagcaagctccaccattttgtctgccattatcccataacccttctcaccttccgttctttcagaagcaaaaataacggcataataaggtggttcgggggttttagcaattccagccatgttgatttcctccttttaaagtcagattaatagcaaaaagagtctaatataaagactcttttactcttgatacgtagaagctactactttatatgttttcactttcgctagttctttgtcagggatttgagatgaagtggaatcaaaagaaatggattttccaggagttaactgtgcttcttctgattgaaatgtagttcctataaactcatcatgttttccgtataccgctgcgccaaccaggatatactcgatagattgtttggtgttgtttgtagctgttcctgtgatatgtaagatgtgattttctttttcttgattcattgcatcctctttaaccttcaaacttttcacatcgcttgcaggttttatcggattaatctttacctttacatcatatgtatctggctctttattaataattccttctgctgaaatatatccttcctcgcctggctttaatatataaggggctagatgaacgtcaggatcatttggaatgatatgcggatcaatgacttttccagttttgtttacatattttatatgttgtatcattcacattaagcgttttgtcactttcattttttatgaccgcagaatagctcagtacatgatcatgagtgatggaatctacaagtgtataacttttttcttctactatttttattttcccttcttttgttttttctttcttatgctgagcagtgtccgtttccttgttgcatccagccagaattaacaagaatgctaatagtactcctagcagtagtcttacattcatgatgattcctccgtttaataatattttttcacaaattccattataatacttttttggatttatctaaaggttatttaaactataaatatagattgtgttctttcattactttttaaatttcagcttttattagactgctgtataagaaagcctgaaattctttattatttacaaattgttttagcatcataaaacaatctatacacatcaaggatatcggtgttatatttcatagataataaccaaaataaggattttaaaagagttttatagctcatttatcgcgtaaggaaaccttattatttgatacatcaactaataaagagtaaaatttttctataataaagattaaaagcgaaaggatgagtaacatgtttaaagacggttatgtaaaagtgaatgatgtaaacctccattacgtgacaaaaggtgaaggcgagcttatgctgtttttacacggattcccttacttttggtacacgtggcaccatcagttagaagagttttcgaaagattatcgcgtggtagctgtagatatgcgaggctataacttatcagataagccggaagaaatttcttcttacagcatgccccttttaatagaagatgcaaaacagttaattgaagcgtttggtgaaaaagaatgtgtgttagtggcacacgattggggcggcgctgttgcatgggcatttgcttatacatatccgcagtatgtcaaaaagttagtgatgtttgatgcaccgcacccttatacatttataagagaacttgctgaaaatcctgctcaacgcgaagcaagcagctatatgagctttttccaacagccaaattctcaagatgagctactcgcaaataatagtgaaaagctaagaaatatgctgacggagcccggcattaaaaaaggctatttaactaaagaagaagaagctaaatatgtagaggcgtggaatcagccaaatgcaatgaaatccatgcttaactactatcgtgcgtcttccctttacccatttgaagagcgcgttcataaacctgtagccctgccgcataaagtatttcaatctccgactttaattgtatggggaaatgcggacgaagcgtttgaaaacagtaatttagatggcattgaagagtacgttccaaatgtaacgatccaccgcttagacggtgtgggacatgcacctcaacatgagcagccagaaaaagtgaatgaatttatgcgagacttcttaaacaaataaactagaaaaagactgcaaagtacaggatacagcccctttgcagtcttttttatagattatgaagcatattatcaactattcatttctattattagattatttttcaacgtttcaacaggtgtacaccgggtataaattttactgtacagatgcagtcccccaaaggaacatgtacatttctttcttacttacccttttttgagctctccttttggagggttcttttttacggttttacttctttcccatcggaagaacaatcttaatcaatgctcctcccgtctctttattatcggccgtgatgcttcctccgtggtttttcacaatggaatgagcaatataaaggcctagccccaaatttccgtgaccgcttgttctcgacgcatcttctctgtaaaactttttaaacagctgttctttgttggatagtgtaaacccagggcccgtatcatgtatttcaaagattacttcgttgtgatgaatcacggtattccaagctatctcccctcgttcaggcgtatagcgaatacagtttgtgatgacattatctaatacttgagaaatgcgctgaggatctccgtaaaattggtttgatgcttctgcttcactaatcgaagatataaatgtaatctcttttttttgacataaaagctgaaattcgtttgctttctcatgaacaaatgtgttgatatcaataggctcactctttacggcaaagcctggattttctatgactgatacttcttgcagctgatttaatagttgaatagaacgaagtgtattcgtgtagatcgtatgtaaatatctattaagcctctccgggtcctttttgcttccttcaactaaaatttcggtgtgaccgtgaataattgtaagaggcgttcgtaaatcatgtgcaatcgcagccgtcatatctttgcggtcttcttctagctgccactgtttagatagcgattgctttaattcttttcgcatttcttcaaaggcatgtaagagctgacttaattcttttgcgtcttgagtcacggacagcgaaaaatccaaattattatgctgaatgtttttcgcggctgtcatcagctcgttaaaaggccgttcaatttttttactaaatcgtcttccaaacaaataagcaaacaagtaaaagtaaagaaacggactggctagagataaaaacgttacaagcacgaccatccatttaatatttggattagtagaagccatatttaattgatatcttagcgcaatggccccgtttacttcgtcttttgaattaaaaagaggataaacttttataatatatttacctgaatggatatttgtattgacctgagaataaagatcccgtttattttttatgtatgaagtggacatggatccatacacgatttgcccttctttatttataatttgataatccattccttctagcggaataaccgattctacttgttttttagcagttttagaaagaagagcatcttccttttcgttcacgaactggacaatttctgggattttcttttcataataattcgccggattcagtgctccgggcataaaaaaccagttcactgagatgacaattccccacgttaaaagcgtagcaaacaggctatacagcaaaatcaaatgaaaagataaaacaaactgagcctttaacgttgctcggtgcatccatttttttattttacccatttgtagccaatgccccaaacggtcgagatgtaagatgtttcgtcatattttaatagttttgctctaatttttttcacgtgttccgtaatcgtagacgaacccccttccgcgtcgtagccccaaactttttcatacagctgctcacgtgtaaaaacctgacctggatgaagagcgaggaaatgaataatctcgaattctcttgaagtaaacggaatcacttcattgttatgtaaaatttgatagccatttaaatcgatggtcaactctccaaagtgaagcctgttataggagttattgctaatcctctgttctcggcgcagatgagcataaatgcgggcttttagttctttcatactgaaaggtttaactaaataatcatctccaccgaccaatagtcctcttactctgtcctgctccgtttgctttgcgcttaaaaagatgatggggcatgatatgctttttcggatcagttcacaaagtgcaaagccgtccatgcctggcatcattacatccagcacaattaaatctggatttatctttagcttttttaacgcttcttgaccttcgtaagcaaacaccacctcatatccttcatcttgcagcgcatctttcataaatgaaataatgtctttttcatcgtccactagtaaaattgtttggttcatcttcagctcaccctacccattctttctttttccatacgaataggtttattataaggctaatgattaaaattggaaataataggtttactaaaaattcagagttcgagctgcttaattcatggaaaacagaatcggttacggagaaaaagaagcttagtttatccgaaacataaacacttccaattaaagcaccaatggttgccacgtaagataaaatagagttaggcattaggacactcataatgctggcgatactaataatcgctataaagatacaaaaacaaatgccataaaattttagcgaatatagtaacgcccctaaagtccctagcgtatgtccgcctaaaaacgttgtttcattcacgtgaggcatagctagcttaccaacacacgtgcccactgcccaagtaatacaaagaataagaaaaactaacaaacattgaacggcccattttacaaaaaacagctttacacgatgatgcggtcgaatcaataccatgcgaaaagctccggacgtgtactcgccgttaaaactatctgccacaaacattggaatgataataaacgtaataacaaacgacagctctcgaagaaacaaaggcgcggaatttaaagaatcaattttcacgtcatgatctgcatcaaaaaacgaaatgcctcccatttgaaataaaaagagccaaataaaagcaagtaaccctgcgtacacggctaatacaattgctgtcttttttcgtttaaacgttcgctctaattcactgataaaaagtcctgtcataatttcttctctcctttttatagaaatgattctttttttcgaatagctacatacgttaaactgctaaagaacagaacataaaaacctaaaacaccgaaattccagcctacgaactgcggtttttctgccatcatgactgtgatcccctgccattgaatcatcggtacggatgtaaaaaacagctgtccaaagagctcttcactcatccactgcttaaaccctgttaataaagtcgggtacgaaaaggaaatcagtataaaagcaaccccaacgccaacagccgtagtggtcgttttgctgatgacagagataaaaaacagcacacagcatatcgcaacagtcgttaaataggcatatccataaaacgaaagattatataatagcgcttcttttatgttgaaagcatgactgtgataaaacacaaagtaggtttgcggatgttcaaacatcagaaagcctatcgcatagctcatacaaaaatacgtaataaaaaacagtaaattaaacagcagaagcaccgcggctttcgctatgatgatttctttaaacgaatacgatcgtatcatgaccattcgcagctgtcctgaccgatactctccagtaacaacgagcgtaataaaaactaagaacatggcattaaaaacggtgaataagatttcagctaagctcagtacaggaaagtttcccgcaaacgtatactgtggtaaatcgactgtgagtactccattttctttttggagataggaagaagcgactaacagcaccaccggcactaatagaaaggtaagccacgccacttttcttttccaaagtctttcccactccgctactaacagctccttcactgtgacaccagctctacaaacgcatcttcaagatttttaccggatgctaactggtctagagcgccgtcccacattaactctccttctctcatcacaacaatttgatcacatactcgctgtaattcatccagcaaatgactggaaatcaaaatcgttttgttatagtcgcgttttaaagtaaaaagcagctcgcgcagttcacgtacgcccattggatctaagccgttggctggctcatccagtatcaacaagtccgggtcgcctaaaagcgcttgagcaatgccaagcctttgcttcatcccaagagaatacgttcgaactttatcattttctctcccggttaatcccacaatatcaagcacttcttttactctttgttgccttttttgttttgtcgaaaatgaatgcaatcgagctaaatttgtcaggttttcttttcccgtcatataaggaaaaaagatgggcgactccacaattgcaccaacgctttgcagcgcttcttttctttgtgaaagaatggttttgttattaataaaaacttctcccccggttggtttaattaaccccgtcaataaacgaattaaggtcgttttaccagcaccgttaggtcctaacagtccacatatttccccttcgttaatttgaaacgatacttcttttactaagtggcgacgccttactttttttgaaacgctctttacctctaaaataatatttttcatattaaatcccccctacacgtagtataggagggaattataaagaatttataaagtttatcaaaattatcgtacaggttttttaactacgatataggataccactgcgaataaaagcacaaatacagataaaaacaaatagccagtgccttcaaagcctcttacctctacatagccaatataaaaaagaacagcggcagccataacggttagcattgaaggaatctttctaacgactttgttccacttcatctttctgaacagccaggttacaaggagtaaaagcacacctggcagcaatgcaataagtaaaggaccgcctatcatcatgatttatcaacctttcaagatatctgttattgatgagtagatgtagaaaaatatttaagtattgtgtttaatttagttttttattccctttcccataaatcacaactttgtaagaatcacctttcactttatttttcatttcttttgtttcaagaaattcagcgataatttcttcaagttcactcgcaaatttcctgtgaccttcggaaatgcctaatgaagtgtagataagcacttgtggttcagggtgaacagaatagcctaccatctttacatgatacttttctttccctaataaatcttctcccacatctgtaacaatatttccccatcgattatcttgatcacgtttcttaagatttattttctttatttttattgaagcattctctgctttattttcagccagaacagcatgaatgagggcttttatttcttctactctcttttctgtattaggaatttccagctctactcttggcggagaattaaaactaacgttagctattaaaaagtcataatgatgcttctctaattctgtagaaatatcagtttgaatcttttcaatttttttctcttgtgcattcggttccgtatagacatacggctccattctttcaattttaaaagtataggcatcataattcctgttggataagatttcagttgcaatctcagtgatatctcctcgtaccttattaaaatactcctctgatccttctactgatacaactaattctttttttcctccataataggtctgccccacgctagccgttttatatccctttttttcaagctcttgatacaatacatcggatacaggcttttgcttaaaaagctgtcctacataaggaattttagcagccacttgggccattgctggagaaacaaaagctgaactaatgaatgcaccgctcaaaagaaagagggcaataccacaatatacactatttcttacaagacgattttgttttatagaaaataggtttcttttagactttacaggtggtgaagattctaattgatcaattgtttctacaagcctttgtttatgtttttgcttcctcgttggtttccaaatcaatccctcgttcaatttttctagcgaattgtcatctatataagaattaaacggtttcttcatatacgtatccatcctttactaactgcttttttaaagcaggaattgccctaaactgcgctgattttactttactttcagaccagcctaaaatagtcgctgtatctttaacggaaaaaccttgaactttgcgcagtaaaataactttacgatgtgaatctttgagctttcctagcgcttgatacagttctagagaagtttctttaagctcaatcatttcttgaggtaaacgagcatgatcctttttcgaaagaagaaagtcttttaaaagactagtaggcttttgttttcgaaaataatcaatcgttacattatgggcaatacgaaataaccacggcttttcactagcgttttgctgaaataaatcataggaaagataagcttttacaaatgtttcatgggtcaaatcttcagcttgctgataatcttttacgagcatcaaaataaattttaataaggcgtcactatgttcgtcataccaacgctcaatctctgcttttttcgtattttccaatgttctgaccatccttttaactaatattcgttacttagacgtaatctagaaaaaaagttgtggtttttatttacaaaaataaaaaagctctcctaattaagaaagcttttactatcacaatccatgaaatttttagttaaccaaagacttacggctcggaaattccatttgcaattgctaataaaaaaattaaaccagaaagcaatacaaaaaagatactgtttgcgataatgctaaaccacacaacgctcggttttttcgttcggactcctaaaactaatgccacaataaagccaacgtctatcgcgaaaaacaaccccagcggaatagtcaagtcaccggtttcacttgggaaaattgaattttgaggaaacagccaatttgcaaaaaatacaacaaatgcagccgccagcaaaatagctgtcagtaaaatcggcttattttccttttgaacactcatttcaaataccctcctaactaaagaaaataataccatatattattaaatagaaatatacagattccatagtctcaacatcaaaaagaaaaaaggacatagatttttatttacgggttcttttctgaggtgcaaaatttaatttca

SEQ ID NO: 46 - DNA, 32830 bp, Priestia aryabhattai
  source 1..32830: mol_type = genomic DNA
gttttttggcagaataataggaagagaaaaacgaaagaagtataaaaatggaaatcatctattttttatagattaattttataatcccttttaataaaataccctttttcatgatctaaaaaactatctaaattagatacaaaaacacactgctttttcacttgaaaagtcagtgtgtttacttataatcttaataattatttaaatagggttatgcgggtattcatctagatagcgttttattaattctttggactcttcatcttcaggaatattatttaaatatttaaattcccataaagttagctgttcgttaaaatcatagtctgtattaaaccagtttgtgtaatcaaaagagattgaaagctttccttccctatcgagccccattgtaaatgaataccataattcttgattatgttctttgaatatatttctaagctcagcacttaaatcaaaaagcttttccttctctttattaaactctgttaaagaaataggaaaacgatctgggatatctaagctgtaatggtaatattcttgttcttgaggacaattatagaaaaagtatgttcctcctcctgtttcagatatttgagcgtaaaaataaaacttttcccattcttctgggatcatgttattaaccgtttctgcaatctcttgatagatttcttgcaattgactttctatagacataattattatcccccttctttattcaaaatagttctttccactcttcttttaccttcaattttatataggatattgaatttaacaggtcttagtgaatctccttcatataatggaactatttgaagtgaaacttttttgggtggtatttcgctaagagccttggcccattgctgttccattttaaaccattctccaccagaacggttaatttgactattctgagcaacaagattatcaatatcacctgatccatggaattgtgttgcaattaaatgtccaccatcatcgtctggtaagcgatcttttcttcctgcaattcgttgcatccataatttccgtttaccttttttgaggatgagctgtggagcttctacactcgcaattctacccgcggcatccgtggtatacttgtagccttcttgtgttacatatcgaacattaggctccaattccttttgacgcaatgctcctcgtttcatatggtctccatatcttactgttgttatggttgaaccacttgtagtcgttgatgaaggagatgagttccctctagtaagcgtactattatctgcatttcgtaccgaaaacatccgtccaacatctttgcctgtgatccactcatccaccaccggcatacgcattctagtcatcggttcttctactactcgaaccttctttggagctagtttaatatctctggcttggctgattttctttttcatataatctgcagaagaccgataaactttctgagcgctttgcaagggcggcataatacgctgagtagcttgtttactgagtacattccgcatctcacgaagcttcttcgtcccgttcgcaaccgtcgtagctccagcttttgctgttttacctgctactttcgtagacaatgctccggctccggcaattcctaatgcctgcaggagacttgacttgcgctgttcttcactgattttgttgccgaacatatcgcgtccggtcatgtattcccctaggccgtttgcggctacgagaccgtagaggcctttttcagtttgctgcagaactttaaaggatttcgctgatttgtatgcgtctaacgcatgatcggctgcactcaggcctttagcggttttgtagatggcttttccgccttttgcagctcttcctacccagccgaccacaggaatgaatccggctgctgccatggctcctgctgcgacgcgctgtgatgtagacagtttttctccagtaacagggtccacaccttctgctgttctcttaaaatcataatacccactaaactctcctgccaagtctaagcctttttcgtaccatggtttgttggcttggatttgtctttgtctctcggcttcaatggccgcttttctttctttaatgtcttgtttttgctctacttttccctctacatagcctgaagctactttatcaatttgctgctgggttttgtattcttcgctatttttataaactttggcatcaaaggtcagctgataagcacttccaccttgagaagtcagttgttccaaaccatttacgctgaactgcacagattcgtagaagtgatctaacattccatattcacttgaaagctggttatctaattcctctgctgcggtgatggtatctgttctttttttctcagctgcgcttatgtcatcttcaaatgcgtccgtggagaacggtgtaatatgtataatatcttcaatattgcttaaaatcgattcaagttcagcgtgctgctgttcgaccatctgcttggaacgatcattggcaaccgccacctcttgttctaaaaaagatacatctacaattgtatcaccttttaatttagcttgttctgcataatctgcgatactattaaaataggattgatgtgaagaaacaagacttttccaatgtgtgacgatatccacttgagttttatagaaacccttgatgttgtcggcaccttttccttgaaattcattatcgagtgtagccactgcatgaagggctttttttaatgcttctagctgctgatcaaatgctttatacgcttgtacacggtcttttgcataggccaagagcgtattggcttcatatatttttcccattcattataaaccctctttaccttatgattagtgcatctctgatgcagtattttcctctattatccattataaaattactaatacactatctaaataggataataagaccttttataagttcgttgatgtattaaaaaggatataatttcaaatttaaagagaatagtcataggtataaatatttatattgaatttatatcatgtataaaaacatcatgcttcattttcaatgaaaaatgtatctttactcccgacgcaaaaatacataaaatgatattcaaggaacaccaaacattgagagatgttgattatagaaatgtctaagaagatgcgaaattggctaattggtgtcattgtagtaatagtgatcgttactatcgctggtgtatctgtatagactgttactgatcatcataaagaagtggaagtttataatgaagaacaattgtaaatgaaaggggaaagcaggatttcatatctgcttccaaagaaacaaaattgttcacttcgttaaagtaaataaggaggctgtatgagaaaagtttcgaaacatcattctgtccaacaaaaatacaaagagaaaatacagaataaacaagatttaaatacatatgtaaaaggttgtttattctgtattttttattttatttactgtattgttcgttgtattcagttggttttttggcggtatgtttatgccttatctaaaaatgtaatatagaagaaattctttgcagataaaaaaagatttggctgcttttttagcaatattgcacaactagaattacattttagcctcttgtaccactaattgcatttgaaatatatctgattctttaattcctgccttttttagctcatcttgaagggtcattccctcttcgatctttattttccttttagtaccgtctcttaatgtaaagatcctcatttgatacatttaacaaattccaccttcggggtcaaaataggaagtcgtcttttcgaaattcttcatctgttccattaattttttctcttcattattcgttggtttcttatttaagtatttatattcaaaataatcaatacgactagaaggtccaaaattagataaattccaattgttatagaaaaaatcaatttttaactgtccttgagcatttacaatcatgtttattgaaaaccgtttttcttgattatttttaataaacacttcttgcaggtcattaacaagtttaaataattcgtgaatttcttgatcatattctcattcttctacaaaatcatataaatctgggatgtcatgggagtatatatattcatttgctttacctttttctttgaaaaagaagaaaactcctccttctccattctcaacttcaccattaaaatagaactcttcccaatcaactagaattatatcattaattttttgtccaatttgttgatagatagtatttaactgttgttcaaaattcatttgaatttatccccctcctttattttttacttttcggaacgtctcttaatattaaaatcctaattttacacattttgtaacttattctcaaataataaataggatttttagattcaatttctcaaataaccaataataccaccaaagattcctattgcaagcgaaataggaacagcagctattcccccataagcaaccgcaaaccctaatccgtctgcaagtgatggatcatcagttatatgatttgcttgtatagcaacccaaattagtaaggcgccaaccattacaacaaaagaaataatagtagtcagtaaaaatgcggtaaaagctttaaccatagatttcccttcattctcatttatgtagagtatttgttcttgttattgtaacaataatcgggaaaagattctattgaataaagaacgtttgttcgtgtaaaataaagaacaaacgttctttattgaggagttattccaatggattatgggcagctaccaaacagagtcattatttgcatcgacatgaaatcgttttttgcttcggtttcctcagtcatacgagggctagatccgttaaaaactaagcttgctgttgtaggagatatcaaacggtcgggatctgttgtgttagctgccacacctttattaaagaaagagggaatcaaaacaggaagtcgcctctttgaaattcctaaacggaaagatatccatgtcgtgaatccatccatggagaggtacatcaaggcttcgaactatatttctagtttggtgttacagtatgtggctcctgaggacttccatgcgtatagcattgatgagttgttcattgatgcaacggcttctttgcatttattcgctcaaacaccagaagagttagctcatcgaattatcaatgagatttatcgaaagacctttcttacagctacagcaggaatcggtcctaatcttttattggctaaagtcagcttagatcatgaggcaaagaacagcccaacaggggttgcttactggcgatatgaggatattccctttaagttgtgggcaattcatccgatgaaggatttctgggggatctcttctgctacagaaagacgcttaaaccgtttaggcatctataccataaaagaactcgctctttcttcgaaggaaatgttacaaacagaatttggcatcatgggcgaagaattgcaccaacatgcgaatgggattgatttaagtcgtatttccgatgtgtacatccctagttcccgttcctttgggaaaagtcagattctctttcgagattatacaagccgaaaagaagtggaactattactattggagctattggacgatgtttgttttcgtttacgcatgcatcaagtggtggctcaaactatccatttgtccattggctacagcaaacaaacaggtggaggcttctccagacgaaacaaaatggggcgagcttcgaacttaagccaagatattttcccttattgtttaaccattttacataattttgataatggaatgccgattcgatccattgggatttcgttatccaatactagcattgaagaagaggagcaaatgagcttatttgaggacatcgatcagcgtgaaagagcctatgctcttgccaaaacgattgatgagattcggatgcgttatggaaagaatagtgtactacgtgcgtctagtcaccttccttattcaacggctcgttatcgaaacggccttataagtggccataaatcttaaggaggaaaaagatatggaacatagaggaatgaaaaaatggcgcccttttgctaccatgccagagcaatacatagggttaaaggaaatgatagataagcaaatagaagtagctcaacctgttttaacagaagagcaaatggaacaaatcaatttcaccttgattgaagccttacatacaaataaacaagtgtaccttacatattataagcaaggccaatgcctaacagagacaggattcattcagtttgttgattctttaggagaactatttgtcttcattgatgacgtatttgagttaaagaatgaaatgaggttaagcgatttaattgatgttcactttgtatagtagttgaaaacaaaaaaatagcgaatgtaaaaagccacttgtataaaacaagtggctctttgctacgttgaatacattatatcattcacgtatcattcccatcactattatagcataattggtctatctgtttagtatatcgttttcttaatccgactatttctacaaacttcttttttgatagtggttttaattctttttgttcagctcttattcttttttcattcatactcaatacttctgctcttatagccttcgtatctccttaatttactaggatatttttatctgttatctctgtcattgataaaaatccaatttatttaatagtgattccgaggataaaggttgtagtatcttgaaattctgtagtcattcaacctgatatattgaaaaatatcttaagttggcataaatattgcagattaaataaatcaatcaacctgaattttgaaggaggtaatacgaaaataagattgattgactgtttatttaattcaattttgaagacaaggagacgaaaagactatgatcatgaaagtaccagtagagaattttgtggaattaaatgtttctcatcaattcttgcagtcatttccatttttgaatcatatctataaggatataacattagacacatgtttagattttataagcactaaacaaaaacaagggtatcaattttttgccctttatcatgatacacacattgtagctttggcaagtattaactggtgtatgaaaaggaaaaacgtctatgtacagggactaattactgaaccatgtagtgttttttcagatcaatatataaaaaaggttgttcttgattctttatatgaatggataacaaacaagggagctgactccatgcaagtagaatgcttagtttaaagatttaatcatctctttaagaaagagaaattaatgcttatataaggactatattggcataaaacatagcagctcctaagaggctgctctttttttataccaatatgtaaattttgtatataaaacctattgataattatgtaatagagcataagttatgcaaatatgggtaagatcaggaaagccatatacagataatcagtaaattagatgtggaattatcttgtagatacaactcttgcaaggtggtataaaaattgcattgttcttaattgagtcagaaaatttaaaatagaaagaaatataccatttttatacatattatctgcttaagctattggtattagtatttagagtggataaagaacgtatatatgggcttatctatttttttctattaataggaggaatgataagtgaaacaggtagagttgaaacgttcattaaagttatggtcaattgtatttttaggaataggatatatgacaccgatggtggtattcgatacctttggcattgtagctgaaaaaacaaatggacatgtaccaacagcttatatattggccttagtggctatgcttttcacagcgatgagttacgggaaaatggttaaagtttatccggtagcaggatcagcttatacatatactcagaaaactatcaattcaaacctgggttttcttgttggatggtcatctctgttagactatttgtttttacccatgatcaatgctgttttaacaaagatatatctttctgcacttttccctagtatcccatcttggttatttattgtggggtttgtaggtgtagtgacgtttataaatttatttagtgttaatgctactgcaaactttaataatgtcttagtcaccttccaaatattagttataattattttcattattttggttgttacaggattatctcgtggagaaggaacaggcagttttttttccattcaacccttttttcaatcagatatgcagctatcaagtttaatatccggagctacgattctttgcttttcatttttaggatttgatgcagtaacgacaatggctgaagaaacagctaatccaacaggcacaatcccgcgggcgatattcctaacagctcttgtaggaggggtattatttataggggcttcctattttacacagtcctattttccagatatatcgcgctttagtgatcctgaagcaacttccccggaaatcgctttatatgtaggggggaaattatttcaggctttctttttagcaggaactgtaacaggaactctcgcctcagggctatcttcacatgcgagtgtatcccgactattgtatgtaatgggacgtgacaatgtactgccaaaaaggttttttggctatatacatccccgttggaatacaccttttctaaatgttctatttgtaggagctatttcattatccgcaatatcttttaatctgataacagctacttctctaattaactttggggccttaattgcctttacttttgtaaatgtatgtgtagttgtacattatgtaataagaaagaagcaacataagacaattttgggttttataaactatctcgtgttaccagggataggagcaggaacagtggttgttctatggatcaacctaagtgcagactccctcatattaggtcttatctgggcaggagtcggtctcatttacctgacttatttaacaaaattatttacttgtaagcctcctcaatttcagtttgaagaggcaaaagaattgtgaacgcttaccgaaaggataatgtaaactctaatatgtaatttaatgttggagattaatttgccttatgaggaattcatatatggggcaatattcaattcttgggaaaataaattttaagaaaggaattcttataaaacaatggaaattttgctggaggagaaagaaacaccaattgtttattattattgcatcgcaacaaatgattgtcgatatgacttttcaattatttactcaaatatgttttgtggaaaagccatggtcatttctattcaaacaggaaatatggtgctattatgtagcgatgatatggaagatgaggaactatggatagaaaagctagggattaagatgttagatattgttaagtgcaaggcgtttttacagctagttttgcagcagatataaatttttacctcctattagagcgtccggaggtaaaaagaaaggggatttataatatgattagtcatgagtttattatgagttcgtgttatggaattatcgaagatatactcattcaaattcactcacaaatatgtgcaggagagcctttatttacgataaggaatagggaaggaaatattgaaactgtaagggtcgaactaagtggaaaaatacattctctagaggtacaaaaaggagatcgtgtaatacctggcatggtacttgcttttgttaaagaggattcccttttaattgaaaatcagtaaagaggaaagctgccagagaggagatgaataaccatctcctcttttcccagtgagaggaaatactacagttgtgataggttcaatagaaaaaaatattttcatataatcagattttttcaaatgataaaataaggagatagaaggaggaacatctatgtttttactagctaaggagaaaataagaacaattatttcaatatcaattgattgccctgaagaggggtggcaacatcaactaaaagattactctgatccgtttcttttcctcatgaaagacagtcaactattttcttatattcgtttgaaagattttttattaactaatcaaatagagaaagatactacgcttacagacttagtagaaaattctgttccattagaaaacgtatgtaaattaaacgaaacaatttcgttacctctcctttttcaaatcattggagaacctattgctcttgttaaagataaacaagaagaaatcataggttatataagaagggaagacgtactagttgaactttttaagcaggaaaatagacatagttttgatttattaaaaatcattcttacttctattcctatgggaatctttgtagtggatcaagaaagaaaaattgttaattgtaatgattcaggaataaaaatgatgaaaacgatccgtgaggatgtaataaataagtctgctaaaaccctttttaatggtgagcatatagatacggtattttcctcaaatgagaccattttaaatgaacttgaaattactgataaaacaagtgttctagttgattatagtccgattacaaactttaatcagaaagtagaaggggttcttatcattgttcaagatttaccaatggttgagaaaatggctatggaaattgaacatataaaaaatttaaataaagatttaaatgccattctttctaccatatatgatgagatccttgtggtaaacaataagggcgaactcattcgttatagcgatagctttatttcagagttctggcgtagagatttaaaagattttattggaaaaaatttaatagatttagaggataaagggttgttcagtccatccgtaactcgtttagtcattgaacacaaaaagaaagtttcaatcgtgcaagaaacagacaatggtaagaaaatccttgcagtgggaaaccctatttttgatgaaaaaggaaaaattgaacgaattattatcgcatcaagagatatcacggaaactactaagttaaaaactgaactaagggaaattaaaaagattacaaatcaatataaacaggaactggatacatttaagagtaaaaataaggtttttgaaaagttgatctattgtagttcaaaaatggaacgggtcgtagagcaaataaataaaatttctaatttttcttctacagttttaatctctggcgagtcaggggtagggaaggaagttattgctcaagctattcatcaattgggaagccgatcaaatcagccatttctaaaattaaactgtggtgctattccggaaaatttactagaaagtgaattatttggttacacccaaggatcttttactggggctgataaaaatggaaaagtaggttattttaagaaggcagatcaaggtatcctgtttttagatgaaattggtgaaatgcctctgagcttacaggtaaaattactccgggttctgcaggagcaggagatcattcccattggaagcacaacgcctatacctattaatgtacaaattgttgcagcaacgaataaacgtttggagaaaatggttgaggaaggaacatttcgcgaagatttattttatcgtttaaatgttattcccatttatattcctcctttacgtgagcgatcagaggatattcccttattagcctttcattttttacaacaattaaataaaaagtacaataaaaattatcatttgtcaccggatgcgcttaacttattggaggtgtatccatggccaggtaacatacgtgagcttcaaaacatgattgaaaggttagctgtgtctgctgatgattccactattgacggtgactttgtaaatgaatttttatctgctagtcatcattttagaaaagcaaaaccaacatttactcaaattatgccccttcacgaagcacagaattatgtagaagaacaattaattttgttagcaatgaagagatataagaccaccaccaaagcagcaaaggctctcggtataagccagtcttctgtcagtcgaaaatatcagaagattttaattgaacaacaggaaaataattctttatagttttataatttcgtagtaaataagcgatacagatgtaaatctgtatcgcttatttgttttttatacatctgtacataaagtatgcatctatgcatacctagaaacaaatttctgatgaaaaattaaaagaaaccctacttcttttgcctggcatagttcttgcaatgttcataattaaagggggaattaaacatatcaatacataatagagaaaattatgaaataagaaaattgaattttattaacttatatagaaggagcaaataaaatgcagaagcatatcacgttaaatacggcaatcccaggaccgaaatcccagaatctattagacagaagaaagaaagtagttccacgaggaattagcaatggatgtacagcctttgttaaacaggcaaatggtgctcttgttgaggatatagacggtaataaatttattgattttgccggagcaatcggcacagtaaatgttgggcactcacatcctcaggtggtagaggccctccaaaaacagctagaaaattttattcatacaggttttaatgtcataatgtatggatcctatattgaattagcagaaaaattgacagaactggcacccggaaattttctaaaacaagcagctttttttaacagtggtgcggaagcagtagaaaatgcagtgaaaatagctaggaaatatacaaaaagacaaggagttatttcgtttacacggggatttcatggtcgtacattaatgacaatgacgatgacaagtaaagttaaaccatataaatatgaattcggtccctttgcccctgaagtatataaggctccttatccatatgagtatcgtagacccaaggaaatgactgaacagcaatataatgaatttataattgaacaatttgaacaatttttagtaacagaggtttctccccaaacagtggctgctgttgttatggagccagtacaaggggaaggtggctttattattccgaacaaagcatttgtacaacgagtatatgaaatttgtaaagaaaacggcattgtatttgttgccgatgaaattcaaactggttttgcaagaacaggaaaatattttgctattgagcattttgatattgcccctgatcttattacaatctcaaaatcaatgggagccggggtaccaatcagtggggttattggtagaaaagaaattatggatgtatcagaacccggcgaattgggtggaacttattcaggaagtccactaggttgtcgtgcagcattggaagtcttggacattattgaaaaagagaaactaaataatcgggcaaaaggattaggaaaagaggtgttgaataaatttgaatatttatctaatcgttttgagcaggttgacggggttcgaggtctcggggcaatgtgtgcgctagaaattgtaacagataagcatacaaaaaaaccagataaagaaatgactcagaaaatcgtaaaggaagcaataaatagagggctactcttattaagcgcagggatatttggaaatgtgattcgtattctaatgcccctcacaataacagatgaacagcttgaagaagggttagcaattttagaagaatcaatagaatctgcagtaacagttcaacatatctaagagaggagaaataaaaatgaagactggtagcacagaagcaaaaaatcagctatttagcatgtatattgatggaaattggataggtagtgaatgcaaagaattaaagaaagtagtaaatccagcaacacatgaagttgttgggcttattcctcaaggaggattttatgaggccaaacaagctgtagatgctgcttatcaagctttaaagaaatggggaaacagaacagctgaagagcgtagtcaagtattgatgaattggtttcatttaattgatgaatgtaaagaagagattggaaaaataatgacaaaagaacaaggaaagccaataaaagaagctattggtgaagtcatgtatgctaatagttttatttcttggtacgctgaggaaggaaagcgaatctatggagagacaattccagcttcacatcctgataaacggatcctcatccgcaaagaaccagtgggagttattgcagccattaccccctggaactttccagcagccatgattacacgaaaagttgcaccagcgctcgcagcaggctgcacagcagttgtaaagccggcaaatgaaactccattaacggctttaaaattagctgaattggccgaaaaagccggggttccaaagggagtgttaaatgttgtaactggcaagtcccaagagattggtaaggcgtggctgaatgaccaccgggttagaaaaataacttttacagggtctacagaggtaggaaaagtactaatgaagggcgctgctgaaaatgtaaaaaaagtctcccttgaattaggcgggaatgcaccttttattgtaatggaagatgccaacttatcgaaggcagcaaaaggattaattagctctaagtttcgaaatgccggccaaacttgcatatgtacaaatagaatatatgtacatgaatctattgaaaatgagtttattgaaatctttaagaatgaattagaaaagctaaaggtaggaaacggatatgaagagggaacggatattggaccattaattgatcaggcagcagtagacaaagtaaaatcgtttattgaagatgcattgttgcaaggtggagagactgtctatgtcggcactaatcctgaatcaaatgatggattttattatccacctactattattaggaatgtacacgatcagatgttatgtgtaaaagaagagatatttgggcccttagctcctattaccacatttaaaaccgaggaagaagtgattcaacgagctaataacactaattatgggttagcagcttatgtttttactcaaaatcttagccgtgcttttcatattagtgaagaacttgaatatggaatcattggtctaaatgatggattaccttcggtagcacaagcaccttttggaggatataaagaaagtggtttaggacgtgaaggcggtcatcatggaattgatgagtaccttgaattgaaatatatatcaatcgagttaaataatgaaaggtagaaaggggaaatttacaataagcaataagggaataaatcaagtaaaatgggcgttcaattgtagaagtaacgactcattataaagattgtgaattaattactgacctttcaaaagaattggtaacagtaatgaaaggcattgaaatatctactattttacctgagcatagaatgcaagagcatggatggcaaatgcatttattttactctatttgatgaaatctactatatttatcacctgtatagtgaatgataatcagtcattttagattgtgaataacaactattaaatgaaaaagaggggtccatatgaaaaaagaacttataaaaatgacgaacactgcaaatcatggggaatcagtagagttaaataatcctctagaggaatttcaagaaacgttaaaagaagccattagctatctaaattatccgaaagaagtatttgaatttttgaagaagcccatgaggtttttagaggtaagtattcctgttaaaatggatgatggcactactcagatatttcaaggatatcgtgcccaacataacgatgcaactggtcctacaaaaggtggaataagatttcacccagatgttacagctgaagaagttaaagcactagcagggtggatgagcttaaaatgtggtattactgatcttccatatggaggagcaaaaggcggcattgtatgtgagccaagaaacatgagtttatcggaattgcaaaggttaagcagagggtatgtaagagccgtcagtcaaattgtaggaccaacgaaagatatacctgcgccggatatgtatacaaattctcaaattatggcgtggatgcttgatgaatatgatcacattcgtgagtttgattcaccaggatttatcacaggtaaacctttagtgcttggcggatcagaaggacgagagacagcaacttctaaaggggtcttatatacaattcaattagtaagcgaaataaaaaatattcctattacaggcatgcatgttattatccaagggtttggaaatgtagggagttatttagctgaatatttacatgaattaggcgcaaaagtagtaggagtttcagatgcattgggagcattatacgatccacaaggattagatatcccttatttaatggaaaatagagattcttttggtgttgtaactaccctttataatgacacaatttcaaatcaagaactattagagaaggaatgtgatatattaattcctgctgcaatcggtggagttattacaagagaaaatgcagaacgccttcaatgccaaattgttattgaagctgccaatggtcctacttctaaggaagccattcaaatattagatgaaaaaggaataatggtagttccggatattctcgctaactctggaggcgttattgtttcatattttgaatggtgtcaaaacaatcaaggttattactggccagcagcgcttgttgatgaacgtttaaaagagaaaatgacagaaagctttttaaacattgtccatacagccgataagttcggaacaaacctaaaagttgcagcctatatacaaggaattcgaaaaatagtagaggcttctcgtcttcgaggatggtttgaattttaagggatcagagaaaaataaaattattttattgcaaatagtgatagctctttagacagatcgtcgataattaatatgtaattataattaatagcaatactcgggaaaaattaaaagtttttattcaacaaagaacgttcgttcttttaaattgtaccatacatgccctcttctcctgaaataaattagttcctagaaccaaacttatgtcaattcgaaaagaaaaagcttgtatctaagaagatacaagctttttcccatgctgtttagaaatttgtttgcccttgtgaggccctttcgttacgtatatcggttcataaccaaagtgccttgtgtaagataagaatatctactttcaatttgaggtaatacgttcgttgaagtcgctgttaagcctttcaaaactaatcagccccttcatagactaagtacttacctttttacaacaagcaataataatattggtgttgtactacatgtgtaccacatacattaaagttaaaacattaatcatacaaatttaatttataagcttgttttttaaatccctatgagtgatagatacatgttttacaatgagttaggtttatttatctccatctcaatatgaggaatgccatcttctaaatagacttctgacactggaatgaagccgaatgaaccataaaattcttttaaataatcttgagcctgaatggtaattttattttctgttagctctgtctcaagaaattctaatcctcgttgtaacaattgttgagcaagttgttgtcccctatattctcttttcacaagtactctgcccattgaagcagcgtcttcgtaagagactcctgaaggaataatacgcaaatatgcaacaatctctcctttgtcttctttaaataaatgataacaaagagggtcttttccatctacctctgggtaagcacattgttgttcaacaatgaatacagaaacacgctctttcataatttcataaagttcattaattgataattcatcaaattttttcaaatgccagctcattcttgcttacctccatatgtacacttaaatatatagcgttgacacataattatatgttaagacgtttgataatttaagcttaaaagacagattataaaactttttattatacaaaataaaagcaatcaacctatgcatccttagttgattgccaaaatgaacacaagatagagataaacagtcagtgactttcaccgtctatctaaattaggaaagctttgctgctaaataaagaaatgaacttgcagtccaagcaaatgagcgatctcttaaaggttcgcctgtatgtgcattaaaattttctgcaaatccattttcagatgttaatcgacagtatttatcagcgatttcttcggccagatttatctcttcgcattcctctaaagcacctactaaaagaagagtggttggtccccaaatagccccacgccaatatgcatcgtcttcataaaggggactgtcaatagcctcagttgccactccccattcagtaagataacacttgctacttaaagtgctcactaaattatttttgatatcctcaggaatgtatgtagtaagttttgggtcacctaacatcaccctaaattccttttgtctagtatatcattaaaaccttaaccattacttttcttaagtaatggttaaggttttaatggacaagaacggactattgtacccttcttttcttaagcttaatggcatttttaaattctctatacctaagataccttattcatctttattaattagtacagagatatttgcccaaccataagcaacatcgtctactagcattccgccgaactcactttttctatgaagatattccttaccacccatacgttcataaaaaccaagtcctgatttattttgctccatcacccaaaccatcattgactcaacgcctttttctttaaactgcttagcaatagccgaaaccagttgtcttcctgcacctaatcccctagtttcttttaaaagataaagtgagtataattctcccgcaaagttttcatcatcattatttttccctgctgcaaagcctataactttttctgcatcattaatggcaatataaatgaaagactcattttcattatgtaaaaagtgaagccatttttgttctgcttcttcatacgacaatttttccaaataatcgtctggtactaaaccctgataagtagtcttccaaccatcaacataaactcttgctatgtcctttatatcttctttatttgcttttcttattctcaaacaattcacctctaacacttttattgagaatattatagcattcttaaaagttaaattttatcgtttgttatatatgaaaaggatcaaatgagcttctttgaaggtattgattaatgtaaaagagcctatgctctcgtcaaaacgtttgatgaaatccaaatgaattgtattgcattccaattaggatagcaataatcgggaaaaggtatgatattccattagataaagaacgtttgttcgtatataataaaaggatcaaatgttcttttatttgaggagtatttttaatggaggatgagcagctaccaaaccgaatcattatatgtattgacatgaaggcgttctatgcgtcggtttcttctgtcataagagggttaaatccgttgaaaacaaagcttgcggtggtaggagatatcaaacgatcgggatccgttgtattagctgccacacccttattaaagaaagaaggggtcaaaacaggaagtcgtcttttcgacattcctaaaaggaaagatatccatgtggtcaatccatctatggagcgatatatcaaggcttcgaactatatttcgagtttggtgttacagtatgtggcgcctgaggactttcatgcctatagtattgatgagctgtttattgatgcgacagcttcgttgcatttattcgctcgtacaccagaagaattagcccataagattatcaacgagatttatcgtaagacacgcctgacagctacggcaggcataggccctaacctcttactggcgaaagtaagcttagaccacgaggcaaagaatagcccaacaggagtggcttattggcgatatgaggatattccctttaagttatggtccattcatccgatgaaggatttctggggaatctcatctgctacggaaagacgcttgaatcgtttaggtattcactccatcaaagaactggctctttcttctgtagagatgttacggaaagaattcggtgtcctaggggaagaaatccatcaacatgccaatggcattgattacagtcgcatttcggatgtgtatattcctagctctcgttcgttcggaaagagtcagattctctctcgccattacacgaagcgaaaagaagtggagttgttgctgttggagctgttagacgatatttgttttcgtttacgcatgcatcaagtggtggctcaaaccatccagttatcgattagctacagtaatcaaacaggtggaggcttctccagacaaaagaaaatggggagagcttcgaacttaagccaagatatctttccgtattgtttatccattttacatacctatgataggggaatgccgattcgctctattggcatttccttatctaataccagcattcaagaagaggagcaaatggaacaaatcaatttcaccttaattgaagccttacataccaataaacaagtgcatcttgcatattataaacaaggccaaatcgtaacagagacaggatttattcagtttgttgattctcttgggaatttatttattttcattgatgacgtatttgagttaaagaataaaatgaggttaagcgagctaatcgatgttcgcttggcttagttcttgaagaaatcgtgtacaggaatcatttatttgggtggaggtacgttcatgtacaattttagagtatatacgttacgtgacggttcaaaaagaagcatcaaactaaaagaaggagaatcatttaaagaggaactccaaagagcaggtattcaagaaacgcaaattttccagatgcaactagtggaaaaaccacagtgatccacatttcaccatgaggtactggaaggcttaaaatatagattatgatagtggagaatgtatgaagtataaactctgaaaataagaaagagagctgacggatagaacagcttcctttctttatattaataatacaaaagagtaaaaagaggttccagttagtttactaaaacctcttttagtttaagtaaattctttttataatccatgttgaaacgaacaactacctataattacacgttcctttctaaaattcctcctactttttaggccatttcctttggagaataaggcatttcattttttatccactaaccctttcttttaaaaaacctagaaatccattttggactttgattatatgatcacctaaccaaatattattgaccctgaagtaatagcaattcccatcttttcttaaaaacttactaacactgtaaccctctttaattaaataggcctgaatttcttcttcatgatcattaaacatgacattccctcctattcaaaattattaaaactttctttttactaattcccatattattcaagaagaaaaccgtattccttattattcaaatatgctagtgttatctacgctatataagctgtataaaagtagataaactataaaaccacactaaaaaaacgttcaaagtttgaacgtttttggttattatgcgtttgagccgtccaatcagatttctgctacttttccaccttctgctaaccaaaattcaagtgtcacatggagtttttaatcaacatatccaataatatctgtaccttgttctaatcgattataataagttgaattataaagaaagaatatgtcttttttcgtgttaccaatagctcttccttttgaaatcagggaattagattgaatctcgatgagatggttctttttacattgtaacttctctagagaagttacaatgtaaaaagaacctgtgaaattatttctatacttgaaaatagtgtctatatttagaatattatgttaatattaaagtgattttaaaccgggaggtgattttatgactaaaaccattggtcttatttgtggaagtttacgaaaaaactcgtataatcgagctgttgctcaatcattaattgacttggataattcggctcaatttcgttggattgaaatagacagtcttcctttttttaacgaagatttagaaatcgccggagcaccagaatcagtaacgtcctttagagatgagatacaagacgttgacggtgtcatcattgtaagtccagagtacaattccggaattccaggggtattaaaaaatgcattggactgggcatccagaccaaggacctcttctgttttaaacagaaaaccggttggtctaattggagcaacccctggagggttcggtactgcctttgctcaaatgcaaattagagaagtactcgaagctatgcaagttaatgttctgccatttcaaaaaatgctaatttcgcaagttcatgaaaaaattgattccaatcaaaagatacttacggatgaacaaacaaaacgttatcttcaacgctatttacaacagttcatccattggattgattatgctccagttcctgttctagattaatagaaggataatagccctcactaaaagtcacctcagaaatagcttcctttctatacatgttattaacatattagtagattacaaatgaattccaaaaacaatttgaattatagactgcttatagaagatataagaggtatatttaccttttgcaattgataaacttacttgattaatttaaggaggattttaaaatgtctgatctttattctcgtctttcaaaagatgatgctgctgtccttttggtggatcatcaaactggccttatttctggtctagtacgtgactatggtgttgatgaatttaagaacaatgtattggctcttggtgacacggctaaattctttgatttaccggttattttaacaacgagttttgagaatggacctaacggcccattaatgcaggaattggtggatctctttcctgatgcaccaaaaatagctcgtccgggacaaattaatgcatgggacaacgcagaatttgttaaagcaattgaagccactggaaaaaaacagttgatcatcgcgggtgtagttacagatgtctgcgttgcttttcctgcgctttctgccattaaagcaggttacgaagtgtttgttgtaacagatgcttccgggacattcaataagcaagtggcagatgcagcgttaacgcgtatggctcacggtggcgcccagcttatgaactggtttagcgtagcatgcgagctgcagcgtgattggcgcaacgacgttgaaggatttggcaatttaatttctagtcatcttcctggttatcaaaacttaatgggcagctatagaggagctcagcgagatcttagtacacaaaatgcataagtttagcgctgatttaatcagcgctcctttttaaataagaagtatagcaaggcttttattttacggttacagctgaaactactaattgcctttaagatgaaaccattttaaaaagggagtgttttatcatgagtaatttagaattgttaactccggagaacagtgcattaattttgattgactttcagcctcaaatgacttttggagttgccagcattgacagacaaacattaatgaataatgttatgctgcttgctaaatcagcaaaaacatttaacgtacctactgttcttactacagttgaaacacaaagcttttctggttatttctggccacaaattctcgacatatttccaaaccatgaaattatagaacgtagttccatgaattcttgggaagattcaaaatttgttgaggcagttaaggcaaccggtagaaagaaattgatatttgcagcactttggactgaagtttgtcttgcattccctgtacttgaagcaattaaagctggctatgaagtttatgcagttgatgatgcttcaggtggtactagtttgacagcacataacgctgctatgcgtcgtgtagaacaagctggagcaattccagtgacagcaattcaagttttacttgagtatcaacgtgactgggcacgcaaagacacttatgatgctgttatggaaattgtaaaagaacatactggcgcttatggtcaaggcgtggaatacgcatatactatggtacatggcgcgcctccaagtaggaaaatatgaatcaagaaagcgtaactgtcgaagaaactcatgcagggaacacgatggatgctggtggtccagtaacaacaattgttacatgggtaattcaagaaggtaaagaagaacagtttgaagcttggagacatgaaatcgaagctgctgctactaaatttccagggcatttaggcgtaaacctaatagtccctaataacgggtccagagagtatactgttgtttttcgctttgatacgtatgagcatttacgtgcttggcaagaatcagatattcgtcgagatttgttaaaaaaagcagaaccatttcaaactactaatccaacttacaaaactgaaagcagtttggcgtattggtttgttactcccaaaatgccagttccaccgccaaaatggaagatgtctattgttaccgttcttggtgtatggcctcttagcaagttggttcctatagtgataggacctataataaaaaatatgaatcctattatgtcatccttttttgtttctgtatgtatagtatccttgctatcatgggtagtaatgccgattctcggtaaaatatttcatccatggttacagaataataggaagtagacgaggtgtgaacatgaatttaccggatatgattttatataacggaaaaatcactactcttgacccatctcaacctgaggtatcggctatcgctataactgatggtttaatcaccgcagtaggtggagatgagcttcttaatagtgccacagaaaaaacccaaaaaatagaccttaaaagaaagagagctattccgggcttgaatgactctcatatccacgttattcgtggcggtcttcattacaatatggaattgcgctgggaaggtgtgtcatcacttgctatcgctctagaaatgcttaaagagcaggcaagacgtacacctgctcctcagtgggtaagagtagttggaggttggtctgaatttcaatttaaagaaagacggatgccaaccttggaagagattaatgctgtttctgaagacacacctgtctttgtactacatctttacgatagagcactagtaaatcgtgcaggactgcgtgcactgggatacacaaaagatacaccaaatcctccgggttgtttaatagaacgagataaacggggtaatccaacggggcttttaattgccaatcctaatgcttctattctttattcaagtctaggtagagctccagtacttaattttgacgaccagattaattcaactcgtcattttatgcgcgaattaaatagattaggtattacaagtgctattgacgcaggtggtggattccaaaattatcctgatgattacaaagttgttgaacatttagccgagaaggatcaattaactttgcgtattgcctataatctatttacacaaaatccaaatcatgaatatgaagactttgcttcatgggcaaaaatcgtttctccaggtcaaggaagcgataagtataaaatgaatggtgctggagaaatgttagtattctcggcagccgattttgaaaaatttcaaatgccgcggcctgacctagctacggtgatggaagctgacttaaagaaagtaatttctctattagtggaaaaccgttggccattccgtttacatgcaacttatgacgagtcaataacacgtttcttaaatgtttttgaggaagtcaacagagaaattccttttaatggtctacgctggtggtttgaccatgcagaaaccatttcagatcgtagtatggaacgtgttaaggctttaaatggtggtattgccatccaagaccgcatggcttttcaaggtgaatactttgttgatttatatggaaaggaagctgcaaagcgtactcctccgattcatcgtatgctagacctgggtatacctgttggcgccggtagtgatgcaacgagggtttccagctataacccttgggttgctctttactggatggttgcaggaaaaaccattggtggtctttccatatacgatgaaaagaataaacttgatagaaaagtagccctagaactatattctaaagggagtgcatggttctccggcgatgaacataaaaagggaaccctttcagtaggccagtttgctgatattgctgtattgtctgctgactactttacagtgccagaagaagaaatcaaagacctcgaatcattactcaccattatgggtgggcaggttgtttatggaaatgatgaatttaaaaatttatcacctgaattgccgccagcgtcacctgattgggcaccgacgggggtttatggttatggtggtgctaacctagcccacaatatactttctcacaatgctcatgatcacaaacatagttgcagtaaccctcttcatcaacacactcataccgtaataggaaaagatggaactaaatggggtattggttgtacttgctttgctttctaataaggattaaatgattaatgcatgttatttaaactataattaatataagaagccacttgtataaaacaagtggctttttgctacgttgaatacattcaatgattcacgtattattcccagcgctattacagcacaacttatcgatttgtttaatacattcttgttttactacggctgaaaacaggattcatacaatttgttgattccctggggaatttgtttgtttttatcgatgaagtattcgaattaaaagataaaatgagattaagtgagctcaatgatgttcgtttcacatatgctcatcacagcaaaggattttcaaaattggaataatggtaatactttatcattttgtctaattttaaaggtatattatacaccgatgcttcaaaatttataaggctaaattttgaaatgaacgaaccatttcattctcattgaaaagagaattgcattaagagaagagatgaatactgtagaaattagataatcagatattttacatgtcctttgtttccaaagtttgtataaatctcctttaactcttcatactaacaaggtataaaaaacgttcaatggataacaaactagaaaacctgactatggtgacagatatagaaatagtgtggcggtgaataatgtgatgaaacagataaagaaaaaaacaaagacattatctatagaaaaacaaccattgaatagtctatctgacttatttaataccttgtcgtcttctgaagattttagtcgctttcaatttgattctcaaggaacgtcttgttggatttcttatttaaaaacaatggtaaatccagactttatccatcaaagtgtattatctccattaagccaacattcttttaccttattgcaagaaatgaaagggattctacctattgaaaatataatcatcacaagtaacgttcaggaaattcaggatagtcttatgactggttatattttcattcaactatatgaacaggattcagaaggaattcttttatcgggtgtagcaaatgaaacaagacaagtatcacctcctgaagtagagttcagtgtggtaggacctaaagaatcatttgtggagacactagatacgaatattaatttaattcgtaaaagattacctattcctcaactaacagtgaaagaaataaaagtaggtaaattatcaaaaacacgtgtttccatcctctatatagacggaattgctgatcaagagaatatcaacactgccattcagcgtattcaagatattgaatatgatcaaattccagatagttcattcattactcaaatgatggctgataatagcaattcgcctttccctcaagtagtcgataccgaaagacctgatcgaattgcaagtatacttgcggaagggaaactggctattttagtagatggatctcctatggttctaacaatgcccgttaccttagttgaatttttttctgcatttgaggattattttttaccttggcatattgcatcaatctttaggcttattcgtttgggcgctgttacattttcagtgacaattacacctttatatgtggcagttttaacctatcattatcaaatgattccgacagacttgttggcaactcttatttcttcaaggacggatatcccctttcctcctattatcgaagtagttattttagaattgtctattgaattattacgagaagctggagctcgccttcctacaaaaattggtcaaacaatcggtatcgtaggtgggatcgtgattggtacagcctcagttgaggcgggattaacaagtaatgttcttcttattctcgtagcattagccgcattagcttcatttactacacctatttatcaaatgggtaatactattcgtctcattcgctttccttttctttttttcgctcaattatggggaattataggggtgtccacttgttttcttttctttctggctcatttgttacagttaacatctttgggacgcccttacttaacacctgtttatccgttgcgtttaatggatttaaaggatgctttgttccgccttccttttaattggcaaggaaaacgacctgttcaactacgaacagaggatcctgaacgcttttactccgaaaaagtcaaagaaaaaaaagataatgaaaaataacaataaaaagaaaggagattgaatatggacatcatgataaaggacacagagaaagtatcccctttttttgcattttttcttattcatagtgtacaaattggcgttggtattttaggtttccaacgtgcgattgttaaaagtgctggatatgatgcatggatgtccattattctggccggaatagctaatcaagtgattttatggttgatgtacgaactattaaagagaggaaatggagatctaattcatatccaccgaaaaatcttcgggaaatggataggaggctttttatctactttatttatattatatgtacttctagcagccactgtatttcttcgatcttttacacaggtggtgcaggtttgggttttccctcaactctctacctggattttttgtgcagttcttcttttgttagcttgctattatattgtaggaggctttcgcactgtggcagggctttgttttttaagtgtcatttatagcctccccctcttaatagtgctgtacttccctttacactatgcacatttttataacttttttccccttatgactcactctcctatgcagatactacagtcagctaaggcgaccactatggagttcttaggggttgagttgttattgttattttatccgtttcttaaagaacccgataaatccagaaggtggggacattatgctttactctacacgactatattttatatagcctttgccattgttgcatttgtgtattttactgaagaacaattaaaaagcactatttgggctacattatcattatggaaaatcgttgaattcccaattgtcgagcgctttgagtatataggaattgcgatttgggttgctgtggttgttcctaatttgtgtatatgtttatggggggctaattatgggatgaaaaggatattttcttttaaaagacgcagagttcttctaattttagccttaatagttttccttagttgtagtttattaacaagccatcctcatattgagaaattaaatgtggttttctctgaaataggattttatttcctttatacctatatcccgttcctttttttggttcaacttattctctacaaggttagggggaaacaaggatgagaaaaaaggggctatccttactattatgtattattacattagcagcttgtgttccccctcatattattgaagacattcaaatggtagaggtaattgggtatgactatgttaatccacatattgttcaagtaacggcttctgctagtacgtatcaagggagcgaagctggcacaaccgttcataatgaaacacttacaacccaagctcatacaagtaaagataatcggagggctatgcaagggctatcccctaaacctattcaaagtggaaaaattaaaacagttttatacgaggataaattggctaagcgtgggattttttcttatatggattctttaaaccgtgatgctacagtaggaaaactactatatctggccgtgacagatggaaaaacacaaaacttattagccggaaactatcccattagtacatctgtctctaaatatctgtccgatttgtttgaacaaaatatgaaagggaattttccagaagtcaatttacatagttttctctatgcttatcatgctaaagggatggatccctttctccctttcatcgaacaaaaaggagataaaattcaaataaagggattggcgttatttaagaatgatcattatgttgattctctttcttttaaggattgttttatttttaaaattctaaatgagaaggtgaaattagggctatatgaattgagagttaagcctaatcaattcctagatattgaagcgattggttcaaaagttgcttatcacataacaggggggtccactcatccaactatatggattcgaattaagctacaaggaatggtgaatgaggctcctaaatttaatttacaaagtgaggatagctataaacgaatagaaaagaagttaactcaggatctcgagaaaaaaacacaacagatgattaaaaggttccaaagagaagggattgaccctctgggactaggagatcaagcaaaaagtcaaaatagacgttggaatgaacaacaatggaaagataattatcctcacgcagaagttcatgtgaatattgatacgcagataaaggaaaccggaattaaagaataaaaataatatcaacatttttctttttcatttattaacaaagctattaaaggggcgactacaatccatcctattaatattaatatcattcctgttgctaatgtatctaaatgaaaataggcaatgaccataaataaaccaaaaagaaggaacggactaaaaaaaataaaagtaatcatgttttcttctcctttgttaagcctatataagcttgatttgtttaagagttatattccttggacacccaaaattgagatgttcacctttgagtgaagaattagaataaacccagttagtcgtaaaatacagcttaatgaacaaaaagaaagtctatatttagattggaatgacttatgtaaagttatcttgtagaaaaagacaggtttttgcacacttttctttactatcaatgaaactggataattaagctgacccagttttgaaagctgggttttattttttgatttggttccgcgaatcactattatataaactaaaacagctatcttaaaaacagaaaaaactcctggtgcttgggcagaagttttttctaatgtacatacaaaaaaagcatgtgattcaaaaatggagtagtcacgcttcttttgtagtttacttaatatatataaattcattcattaaaaaagaaaaaactaccgtccctcattaactttagtcgttggaacatcgttcatttctcgtccatttcatgaaaaaaataagcctctatgccaatccctagcctataaaaacccatcacttcttacataaccatctactccttacctactgcagtaaggggtagatggttatttttcgattggacaggcaagcttactgcagtagctacatagtatctaaagaatcacgactctgttacctaaacagtatctagttcagtatcgataccgcgttaatacaagctatatacgcttagtgaagcccttcatggaacctgtaagggagctgagccgaagaggcgaagggggcgaccggatgcgttgagctgaaataattcatacatggaagacaaaaaaattaaaagaatgaaagaaggtaccaacatgagaaaaacaaaaggatttacctttcggaaaatctttcctccatctcccaaaccatctctcacgagacctcgtcccttcaaggcttattcctttgttccatttagtccactagctatgcttgaccccactattctgaccataggaggcattgtcttaggaattgccatcatcgaacggatattagagcgatggggtgtgatcgatcttgttgatcagttcgcaaaggtgatgcgctttatcttacctgttaccttctatagcgccttggtttacttttttgcgactttcatattttaaggagggatgttgatgtttgaaaaactcaaattacggggccaattgataaaggcgtttcgtacggcagaaatttatcgggttgttaagcgtggggataggacctcgcatcagtttccaaagatccaccaaatcgataaccgtcatacgcacactcggtacgttttttccttgttgaatgggatcaatcctgagcttttaacgaaaaaaagatgggccttacgtcaagtattaggcagcaacatcgaaataaacggcagcctaaagaactttagtatcactgtccaccataaaagcttaccgaagatgcttacctacaagtatgaaaccattcaccctcatatagagaaaatggagcttccggtttgcattggtcaagatatctatggaaaccccgtttcatgggattttgcagatttggagaccttactgatttctggcgaaattggagcaggaaaaagcagtctcatgcgtgtcatcctcaccacatgggtgaaatacacctcacctgatgagttacgactagtcttagtggatctcaaacgggctgatttagggttattttatggaattgaacatgtagatgcgctttgttttgaggcgaaggatatgagaaaaccttttgctttattacgagctgaaatgtatcgacgaggagatttactgttagagcatggggtaactcatatcagcaggctt

SEQ ID NO: 47 - DNA, 32586 bp, Priestia aryabhattai
  source 1..32586: mol_type = genomic DNA
gctatttagtatctaaagaattattactccattacttaatcagtatctagttcagtatcgataccgcgttaatacaagctttatacgcctagtgaagcttttaaaggaatctgtaagggagctgagccgaagaggcgaatggggcgaccggatgccctgagcttaaaaagcccatacccagaaggcgaaaaaaataaaaggaatgaaagtaggtaccagcatgagaaaaacacaattgtttacctttcgaaacgtctttcataaaccttctcgtcctgttaatgcttattcgtttgtttcttttagtccatttgcgatgattgcccccactattcttactataggaggcattgtcttagcagtagcattcatcgaatggttcttagatcgatggggtgtaatggatcttgctgatcagtttgaaaaagtgatgcggtttatcttgcctgtcaccttttatggtgccttattttacttctttgcggtatttatgttttaagggggattctatgtttgaaaaactaaaattacagggctttttttatgtggaaaaggactcctaatttgattgaataaggagccctttcttttattgataacaactgaaattatcggcgaaaccttaatttgaatgtttagaattaagaatgttgaccgtgaagtccccaatgaggtgcttcgtaatctgtgtgatttccatgctgatcataatgacctggtatgcctacccaatggaatccttcaggtggatggatttgaggaggcactccttgtggttgttctagcacttccccttgacggtagtagccaatgtgagcaggctcgaattgacctaagtgaacgtggtcaccatggattacaacctcataatgatcaggaatatcaacatgttcccaatgttcgctaccaccatgattgtgttcttctggcatttaacttccctcctttgtaatttgatttcataggtattattgaacaaaccctttttcttaattctaggtttaaaaaggtaaatcactaatgtctttcaatgggtcggacattctttggtttttcgcctatctcatgaaaaataaaagccaatttgatgatgtgtttgagttaaggaataaaatgctactaacagcattaattgatcttaggtttaaataaatttataagcacaaactaaaaaagcagccaaaataatatattttggctgcttttgagcaagttgaacaacaatataagtcgattctaacattatatttatcttttgtatattttcacggggtaacgcacatgaaaagtgaagtgatgaagaattattcttcaatctcaaataaatcttctactgacatttccagagctttagcaatactaaacaaatgccaatctaaatgttgttcgtttttgtcaaaacgagaaatgcttgcctgtgggatgcccgtcatttctgacaattgtccctgtgtaagacctctttcttttagtagctctcgcaatctaggctttatagttaccatgttcattcctccaacttgatttcaattcattatacagtagtgaataaattttgttaaacctatttacaatccttaatccactatcgtataatggattggagtgaaaggttaattttaggaggtttcaaaaatgaagatgaaagaaagttattatcgcttagttttacgccattttctgaaataccctaacgaaatgttgaacactatgaatgatgatgcttgcaaagaagaatatgaaaaaattgttagtaatgctgcttggaatgaaaattttcacttgtgaagaattaggaagttttactacatttttaaattctaaatgtgtagtaaaacccaaaaaggagctggttttatgaaagtgaaaacaacagagcctgggtatcttgcaaaacaaaaatcaaaagggaaaacttatttgtttataaaaaaaacctatcgtgaaggaaaaagagtgagaagtaaatcactatatagtttcggagccatgccagaagctcttgaacgtctttattggattcgcgatcatccagaacgtttcccaaaaaaattggaggaaaagggttttacgcttgctcatttatataagtggattttagctattgaaataagacaaaaagagaatgggtccccttttgatgtgtttaattgagcttcatacaaataaaaaggtcactccataatgaggtggctttttgctacattaaaattgtcaaaaggtcataaggtagcaaccttaccgcggtaactacatagtatctaaaggctatctacttcgctagtgttaccgcgttaatacaggctttatgtacgtattggagccaattttggaatttgcaaggaagctaattcggagaggcgaaaaggcgactgagggagtaaactgatgtgtagagtaatgaatttaaatatgagataatttcgaatataagggaaaataacaggatgggagattaaaaggatgagcattgaaaaaacggaaatcgaattcaaaaaaatggtatgtgtctttgagggtcaggaagaaggattgagtattaaaaaagaagaagaatattacggatttgagactgctgacggacggggttacaacgtttttttagatatgaaagtggataagggtgttttatctaattggatagggtcgtatccaaaggcttattttgaattagttgatgataaaaaataggttgttgcgttggaaaaaaagtatgtaaaaatataatcaatacatgtaagggagaatgagaaaatgtcattccacacgtttgtagaacacgttagaaatccatactttcgcggtgaggttaatcatacaactgattttgctaaaaggctagatgaatgttcagttgaggatttagttaaaagagcacagcaacatgtaacgaatttattgacagctcaaagagaattgttttcgatcaagatgtatgccgcacttgaggaatacttaaataatgacattttcttgttgcttagtctggttgctgatgcgttgcacaacatgcctcagcatttgacaaactcgaataaagaagaattaaaagttgagttgctacggttttatcaactaaaggaatcgattctacagtatataagcgagtttgcggaaaataaaaacgttaaaattgtatttgaaggactataaatcaaaaaacatctaattcaaaattaggtgttttttgtacgttgaaatttatcgattagacgtccaattacattaaattatacagttagttttatgaaaaacattataggtgattcgttatatattaataggtatttttaagtatatctaaataagtatatttgttaagtttttaagaggttatacaaaggtctaaggatttataaacatccactgtaaaaacttatagttacacatattgtgacttcaatcaaatactaaatgaaaaccttcgataaaagccttactgtaaataatgttaaagcttatttagtatcgctagtttaaatatcaaaaaaatcatctgtttttttacttttatctattgttcttattgttttcattactttttttagtgtagatgagcttggaatataatctttttcgttgtatagcttccaaaccgttcttctagaaactttacttttatctgcaaagtctatttgtgttacgcctttactatcaagccattttccaaacttagaacgtttaggggttttccaccacgacataattaaaacctccttgctaataaccatcattgccaatttgagcaaaaatattctcattgtctgcaaaaaaatgcgaataatgtacaagttacagctcatatcatttattaagacgtctagaaggcatcataatctcatgaatggagcgagtaaagtgacaaaagaattagcattctttttattaaatcgaaaaggtgtctatttgacaccgaaaggtaaaaaggtattggaggccattttgaaagaaaagaacgcgtatgcaggaaaataagcaactgacatctttcagaataatgtcggaatttttgtcataaacatatagcatgaatatagttaagaccgccttatacactaatacataatgggcggtctttgttaaagatattcgtatttttatagaaaaatagccttgttcttataagaacaaggctattttctgttatgcacaatgggataagagccttttagtgtatcattttacaatcagatttttaaaaaaaatcacaaaaatttcttttatttttcaaaagtaaagattactaagaagtaataatgctcgcttctggaactttacttacctaataatcgttggaaccaacctttcttagtaggttgctcctcatgttgacttactgcagttagttttttaccttctaacatctcacgcatggcagcagtaagattttcatttctttcttgcaaggtatgttctatataagtattttgcttagttagttgttctgctaagttcataagtacttcatcacgttttttatcacgttcttctaactgatcaagccgttctctcatccttctcatttcatcagctaatatcgaatcagcacttatttctggaacaggcttaaacgcttctcctcccgtgtcaaggtataaagctatctctttaagtgtatactcttgatctcggtttagatgtttaattaattgaaatctttctaacccatcttttttaaaaatacgatatccatttttctttttcgtaaaaggaatatagccctcaagttcttttaaccaattacgtatggtatgtggctcttcttctaaaatttctgatatatcctttataatatattcacgttcttcggtttgttcttcaaaaccttgcttttcatctcgattatcatcagtatgcatgtttttacctctcttcctatcaatgtaactatgaaacttatgtaaacacgattatcagcactataatagttagaacctaatttaaaacttatagaaaactattacgttaaaatcataatatatcctctttttaaattcaaaatctttttggttgttcctgtgtaaagataattatttcaaatgttaatacatatgttaaaaggtgaaaagtgcctattatacacttcggtaatagtatttgaatatggtaaaatgagtgaaaatccgtcttagtttaacttaagttagacttaaaatctaaatttggatgtttctatgtgtattgaattaactagttgaacttaaaaggtgattatgttgatatatagcttatttaaagagtttgttagttcaatttaaaaggtataaacctatgtacatatgaaattaccaatctttagtttaatttaagttcaactaatgtaaccttgttttaagtataacctaattctttaaggaataataaaatctaataaggttaatgctaaagtattttattttaaaaatgacaaaacgcgtaaaatcttaaaagatctcacgcgttttgaacattgactatagcattaaaggtgtaactttataacataatactcgataaataatacacagtgattataacatgttttaggaacataaggtatagaaaaccaatgtaagatatgattgtttacacgcttagttattagataatttagaataaaatggttatgttttttcattttatacttgtaaagtggttaagtttagcagtatcatagaagtacaactaaatgaacggaaaaaaagcaaaaagctcaagcgattagaatcggattgccgtcctatctaatcgttcaccgtaatatgcctacggtaaactgctgctcaagcttttcactcaatgtacgtattcaacgtacataatgtattttcctacttggaattttactacaagtaggaaatataatcaagatattatgagtgattaatttgaacagataacgctaaatttatagggtttctctatacataaaagcgtcgtttaccatttaacggtaaacgacgctttttgtgtttccgagtaaatggagggacacgtgtaatgagaaaccttgcgcaacaaatctatggaagtcagttgacggaatattcaaaaaaacaaacacaaaagcaaaaaaacggttacagtagccgtttaggctgggtatttgtatcaaaagactttacgaaagagacaacaaaagccgttcgtacatatggttcgttatttaatgtcagcaaagaatatacatactttacgccaaatacgttttatcgtaatgatttgcgtcgtttaagtacgctacgttggatcaacgcgatgtcgattgatattgatggaaaaaacggtgagaacgaggggatggctcttccagatgtgcaagaggccattacacaagcagggcttccaatgccttctttaatcgttcagacgccctcaaaagggtttcatgttcattggttcttagaacaaccaaaacgggcttcagacaagttaaatgcacattatagccgtattcaaacatgcatcgctgaaatgattcatggagatgtacatgctgtgggcccagagcgtttattccgtttacctacagacgaaaatactgtctttcattctcagaaccgtgtatcgtttgatgaattatgtgagtggtttcaactagtacaagaacaagataaacaagacgtacatacatacaaaaaagggttctgcaaaggctatgaatctcttttaaaacatcctgctgttcaaaaaatcctagaaggtgtaaatgaaggccaacgtgatacggcttgctacactcttgcgctcgcttataaggctgctggatacgatgaaaaaacagcagaagcacacttacataattggaatcaaaaaaatgtacctcaaatgcgccaaattgaggttaaacgtaaagttaaaagtgcgtacaatggtcgttttcatgctccatccgcgaaaaaaattcgcgagttatcgggcatgttatttagctatgttatttgggaagaagcgaaaccacgtgaagaacgtacatatagccatatcgaagagtgggaaggggatgttttagcgtttatccgtgcgcaaggaggacaagtttcaggggcgcagcgtgaccttgctgagcaaatcacttcaagtgtggatgctgaaaagaaaattccttatgccacttttaaaaaagtggttgctagattagaagaacaagaaattctttcgaaaagggtctctggtaaaggaagaggggcttcaacagagttacgtatcattaatgaagtaaaagctcgtagaacgcaatctgaagcctcaaaaaaagagcaagacactggttctaaaaataatgggctcaattcaaatacaattaaagatacggtggtgggtgggacggctctatctctctctgcaggttctcgcctagctcttccgaaagaaactttaacccctgttatcttacctacgtcttctacgctttctaagcctgctcctatccctgggaatgtgcctagtgcgtttgttagtgctctttacaaccgtggttttatagatgggcgtgttatcttccgtgcgtggggcaagatcctactcgctttcaagacgtttggtattacctatcattctattgcagctactggcgactatacacgcttatctgtggatgctgtggcggtaactgttgagaaaaaaggttccctgattgcaggagactttcagggcgacgaaagtttcttaaagtatcttttcggcacgatgaagggtttatttgcgaattatcgttctgatcagattaaacagtttgttgaagaaattgagggtttaggtgacattaaactatcacatgtaggcatggaattagaggacgaattgaaggatgctagggtagtagatcgagagttagtggagactaaattagctgaaattgaacgtgagcaatctgcacgtcaaagacgcaaacactataacaactattctgcttttgatttaaatgctagtttgaaccagttcaaacttttcatgaaaaaggatgattaatttctgtaaaaaaaagaatcaagaaaagatataaaatctcttcttgattccactcacgaagttaactattccccttacagaataatcaaagatagtgtatacaaataacgaaataaaggcaatgattatcttgatttgattaaaattttattaaagtcttagaggatgtattaaagagcaggatgatatatacattatcgaatatataataataggtttaataatacataattaataggtttatagtaatgcaaatatgaagataaaataaggattttctaaaaaatgtgaccttaaaggttcatgtagtaaaacttctactaggtattaggtcagttttactggaaatcccttgaagctctaagatgtaagacatataatggaattacgtaataaataacctgattttttcaagatactttcctagaggtaacattgattacgttagtaatcatgtaccgataggagaagctctctattactcctatttttatcgtttgtatcgtttattcgtatcggcggggcgcgcactaagcgtccaatcaacatggccttacacatgctgacacccatacgaacctatacaaacaaactcaaaatcgttcttccttacaacgcagaatccaacttcaaaacagcttagaacccaacatccaaagaacctcgttcctcgaaaacttcatagctcttttccttcctctctctcaacaaggggggaaaccaattgcaagaaaaaccgtcaaaaaaacaagcaacgatatttgacgatattctcgaccaaatgattgaaaatccacgacagggaatagctgtcgttattcttggcttggctggcattggcgtttggaaaaaagaatggtttttgtctcttttaccatacagtccagaaacgattcagcattggctgaccatttgcattcatatcattcaaattctagttgtattgctgcttctatttcttttgattcgatggatatgtgccatatttcggattcaaagacattttgattatgttcaacttttaccacatacggatgatggtgtttcaaaagaaatgcttagtcagttaatgcggaggattcatggtacaaaaagaaggtggattgaacgtctattccttggacgtgaacgcttttcgtttgttattcattacaccattgatgatgaagcaggggcgcaatatcgtttctatatgggggctgaaaagaatcaattagaagcgattaagtccaactttcacagtgtatacccaaatttaacgttttttcccgcggataacttggagtttccaagtaaaaaagcagtggcagggcgtttgaaattaaaaagcaataacttgaaaaagtcattgccactttcacgctacaagtcagatcaactaccaggaatcatttcacatatgaaagctgatacgtggttgcaagtcggatttacacctaacgatgggtggaatcttcgaaaagccattcagaagctggaagaggacttgaaaggggataaaccttttaaagatcattcagcctttgataaagaagaattagcgagcctaaagcatcgctattctggaaatgaagttgcctttgattgtaccgtgtcaattgcttccgaatactatcctggtgtacctgttgttaaaagtatcgcaaacgccattcactccgttctaaataatgtgaatgaactaaagtataagaagtggaaaaaggccgtgcaatggtatccaacaggaacaccctatagcatgacttggacgggaagcgaacttgcaaaccttcttcatttaccgcactttgatgaacgaaatattatgcagaagcttgcgaaagagataccacattcgaaacgtggggaagaattacttccagatcatgttctaagtcatgaagaaggttctgtcgattttggtgtgcagcatcatcaatttgttaaaaatcgcactgtgagaattttaatgagtgtcctgcaaaaacactggtccttacttggtgtgacgggttcagggaaatcaacgttattaaataatgtgttaatgagttatgttaattcattcataaaacatggaatcgaaggtaaaaagtctcctggtttctcatttgttgacccagccagaaacacagccatgattttattaaatcaaatgttgaaagctgaatacgacggggcagagattaactggaataaggttcattggatctcttttaaagatacggattatccaccggctttaaatttattgcatcgttttccgaatgaatcccctgaaagagtgacgcaaattattatgcgaattatcagcgaaaacttccaagtggccaaacaaaccgaacgccttttagtgaattgtattaaaacgcttgtattggacacaggagagcgccacaccattttaggtgtaaaaccattaattaatgattttacgttccgacaacgggttttgaatcgtttagaagataatccagaagcttatgacgtattagatttttggaggaatgaagcagaagacttaatcgatgctagtcgcattgctttatttaatcgcttagatacatttacctcgaatccattgttgcgcaggatgtttggtcaaaaagaatttacccttcctattttggattggatggatcaaggccacatcattttttatgacttcagtggactagatgaagatgaagctggtttaattggtgggtttctcacgtatttgtattaccgggttgcggatacaagaggggggacacctctcatgcatcaatttgtttttgatgaagccgcgcgactagagaaaatgacgattcttcctcgaattattgcagagcaacgtcaaaaagggttatcgctagggattggaacacaatccatgcaccaattagaccaagagctgaaaaatgctttaaaagaagttcaaggtaacttctttgtgtgtcgacaggggccagaaggtgcggcagcagctagtaagatgtttagtgttccaggttcgaaaaaagatcaacctcttttttcagaatcctattttacaagcttgccggatttagtcaccgtcattcgtacacaagaccaaatcaatggttcgaacgaaatcgttcaatgtgtcgtgaaattaccaccactagatcgttatatgccgaatggacaaaaagccacgtatgggaatgaagtagaggaagctaaagcaaacgattggacaaaagaaaaagtaaaagaattggcttctaaaaacggttatcacaaatcagaagttgatttaatgattcgtgcttatttacaaggtgaagaatacgtgcctaaaaagaagccgccaaaggaaaagaaaaagccgagagctcctttacaagctcaaccagaaacacctatttctttgcaaaagaaacagcgtgtagatactgaaaatgtaggtcccgaaaaagtagttgaagctggaccggatgttacgaaagagatagaagtagaagtgaagccagaaccaattcagccggctatcacgctttcaagaaaaaaacaggttgaaccaaaagaacaatccatacaagtacagccatttaaaccgatggttaaactttcatgggctcaatccttaaaggcagaagaacagtcgatgaaggaaacggctgcttctgttgaacctgttttagaggatagagaacaggttcaagaaatagagactacacctattgaacctgctgtcacactttcaaagaaaaaaacagaagagttaccaaaagaaccacaacctattgtgtcattacgaaagaaaaaaccttcagcaaaagaatgagtagagacagaaggaaaagagagcaaataaaagttttatatgaagaggggaagactttttaaacactcacgaagttaacgttcctcttatagacaagggagaggggaaacagaatgaaaaaatatatcacgctgaatgaacaagatacagacttactaattaaactacatgatttcatctacattgattcaaattttattgttgactatattttaacgaattacgcagatcgaaaatatgtgatgcagcgtttacgattgctcgaagaatctaagcatatcaaaagttttaccgttccaatgccaggctatgaaaagccagggaatttatatacgctggatgcttttggtgttgaaatagtagaagagctgcaaggtttctcgaaatggcagaaaaaatggtcaacagatgtacctgcttggtaccaacaccaattgatgttaaatcgtttggttttatcgtacaccaaacaagcagaagaggtagggcttgcggttaaagagtggattccagaagcgaggggaaccttccaatatgggaaagcgaaatcagatgtgattaagccggatggtgtattggttgtaggtgaagtagatagtgagcaaaatattggtttgttcgttgagctagaacgtagtgtggctaagcgtcaaaataccattcagaaaatcattcggtacaatgactttttgaaaagaggaaaagaaacgcttgaaaaatacgatatgcatgttggatttgaagaacctattttagattggcgggtcttatttattgcagggaatgaaacgaataccaaaaaaaccatgcgtgacctcttgagtatcccagctcaagaacgaacacacattaaagttcctgtgttagcagctaatcttgaagaaacaaaacaagatgcatttggggacatttatcattatgtatttagtaactcgtcagatgtaaaaagaggattgtaaggagggctagctagtggttcgtagtttatttaaaacccttctttatatcgctggaatttgtctcgtaggaagtttcatcctacgaacatttccggaagcgaacgtactttgggaaaccggaaaagatcaattttcggttttctataaccaaagcgttgcaagttatggagttacaggaacaattattcttatagctgttgtagtcttcttgttttttggtaaaaagtaaggaggaatgacaatgagaaaatggcagaaaaaaaagaggcctactcctaacgaatcgtcacaaggaataaaggagaaggcaaaagaaaaggcgagtgcttctaaaaagtatatgccgaatctcttgaagaaagatgaaaagcaaaaagaaaaagatcaagccatgattaaacgagcgagtatgaaacgttctacagctacaacgattggaagagtcatcatgattggaagtatcgtcattgttgcgttaggcgtctttagtgcctttcgacataaccttgttcttagtgacttagaagatcaagtttcagctcaacaacaagatcaaagtcctgaaaataatctaaatactcaaaatattccggccgttgaatactttactactcaatttatgcgtcattacacaagcatcgaaccaggagaggagaaacaaaaggaacgtgaagaagctttacagagctttctagcaaccggtctagataaagatgctggaattgattatgctaatatccctggtagtcagcgttatgacagtagtgacgtggtttcgattaagcaaaaggataatcatacttcagacgtatctatcaaggtcaatgtgacctcaactaaagaagtggaaaagaaatcaaaagacaaagatggaaaagaaaaagtcgagaaaaagaatgaagagaaacaagcgacactctattatttggtacgtgtctatgaagataaaaacggttatagcatcattgatctaccgcaaccctacatgccaaaaccaaatcaacgtgtaacggttgcagaaaacgaagaaaacaaaaataccgatgccgttgtcaataatgaggttcagagttttttagaatccttctttaaaacgtatacagcaaaagatcgaagcgatgaaacaaaattcttttttaaagattctagtaaagctcagtctttaaatggattaatgaattataaatcaatgaacaatgtatctgtttatgaaaagaaatcggctaaaggtcagtatattgtcagatgttcagtcaaattagaacagcctgtaacgggcattcaaagcaatcatagctacgaattctctattcaacgtgatggtcaagataaattcgaaattttaaccatgaaacctgtttcttacgaaattaaataaactcttagggggataagaaatgcttacaacttttttacaatcatttatgttgggtgatatcaatttgcaaggtgttagtagtcaaggtgacactaacgttatgagcgttttgcaaaccgtcttcatctgggtagtgctgtttgcgattattggttcactagtcatgaaaaaatatcgcggtgcgcttatggttgttgtgttcggtggaattattggtgtatttatttatggcccaagcaacattatttcgttgggtgattcgcttctaaaattcttcggtctttcaagctaaggaggtctatgcatgagacgtgttacaggatattgtaccaacaagatttttgccattccaaatatcgtgagagggctagcagggggaagggaaagcatttcgcttcccttttctgtgactgttactcaaatcattgttatattcgttttctttcttctaagtcttcttttagttgttcctatgaccccttttattcctaataaagttgcacgagttattgttgtttgtgttgcagcacctacattttttggttatctcttaggttctcaaaccaaagaacatatgaacattattcgttattggcaagtaaagtacaaaacatttatggagccaaaggagctctttcgatttgaagaagtcgagcaagcaaaaaagattacctacaaacgcaaaattcctatttatcgaaaatgatgtgaggagtgaatgtgaaaatggatattcaaaatgacattgtagctgtttggcgaaatgttgtcataacaagagatagtcgggaacaaggatggtttaaatttagtgggtttcataccagttttgattcagaagcacaattaatggctcacttttctgaattgaaacggttgtttaaagagatcaaacgagagattcaatgtattgttgtcccgacacggcaatcaatcgatgatattcgagaaaaatacgcatcgatgattcgaggtaacttacgagtggttgccagttcacatattcaatccgtttttaattacctaaaaacgagtgatgaattaggggcagaagaacgtcgttacgaattttacatcggagttgagctaggtaaaagcacgctagatgatgatgcagaagatatgacgtataaagaaatgtaccaagccctgaaagattggctttcctctaaatttgcaaaaatccgcggagatcatcacttgtatttaacagaagatcgcttgcgaaaaatctctcgttccaataaagaagtcacgaagtttcttgaagggttacctttttcttttacacccgtaacaacagaaggaatgacaaaattaattccgtggattttcaatatagggttgcgcttccctcctaattggcagaattgggaagatcgcttcacacctattttcaataaaaaaggggagctcattgcccgcattcaaaccgaagatgatgtattgaatcttcaattaacaggaattgaaaatcctaaatcaagacgttatttaacgttgcaccaaaccgatgcgaaaggatataaccatcagacacatgttgccttcttgcatatggtgggtatgccggaagaaattcattttccagaaacacgctggctagaagctttacggtccttgccttttgcggtaggtgttagcttgaaaatgagttatcaagatgcagaccaacggttgcggaagctacgtcgtaagaaatcaaatttagaagatcaagcgaaccacttgaacgcattcggagaagatgcaggttcaaacgtttatcaaggtatttcacatgctgaaaatattattgccaacgttgagaaggagcgagaaggcggctacttaatgagtgctattttctcggttagttcttctgatagagacgaattaatgcagcgtgtcaatgacttaatcgacgagtacgcaggtatgggaattacgcttcaaaatacgtatggtcttcaattacggagtttacttgaatgcttaccaggttcaagacgctatgtaactgaatttatccaagacgtagacatcaacgcggtaacagctagcttttttggaaatcgacaagagctaggggatgaatacggctattatgccggaagaacattaagtggcacggctgtttatgtattacctggcttagccgcatcgggtgcggctcttacacaatctcttgtaaccgtatatacaggaaaaacgggttctggaaaatcaatggctgccaatcgggatatttatgaagcagctttatcaggagctaaagtattattgctcgaccctaagtctgagagaaaagacatttgtaaatgggatgaaaaattaacggaattgggaagtgagcttaactttatttctttttcgacaaaagatgaagatgcagggaaattagacccgtttcttttatttgataacagagccgaagctgtcgaagtttcccgagaaataatctattacttgttaaacattaatattcgaaatgacagtgcaaaaagttcgattgtgacaaaggctgttaagcgtgttggtcaattggcagagccttctattcgatttgtaaaagatgagttacgacatttagtgaacgaaaatgacgccctgccagaagatcatcgaccaatggcattggagttagcttctatcttagaagaatttgaagatgtgtcactagctcgtttgatctttggaaagcgtatgaatgatgaaaacgtcttgaattacgcgaatcaatttaatgtactgcaagttgataatttgcagttaccgaaaaagagcacgccaccagaagagtatacagaagctaacattgtgtcagtagctattctgtttagtttgacagcatacatgatgaaatttttacggatgttccaaaatgaattaacggttgttgcgattgatgaagcatggaactttttccaaaacccggcaggggagcgtttaattgatcgtttattccgtgaaggacgttcattgttctcgccgatttatttaatgactcaaaacttaatggatattccaagcagtatgcgcggtcaaattggtacagcctattgcttccgtacagatataccagaagagattgaaacaattcaagagtttatgaaattagaagatagtgcaggtctagaagatatgatgcctaaaatgcagtcaggttactgcttgtatcgtgacttgcatcaacgaacaggcgtaatgcaggttcgtatcttacaagaacatctatttgatgcatttgacacgtctatagacgtcagggagctcgcaagtcaagtgtagagggtttaacccttcgttctaacaaaaaacgaaggatgagccttttagaaggtttagggagaaggagaataaaaatgaaaaaaatattaacctttatttcaatcatttcaatcgtgggtgtgcttgcaagttgtgggaaagaggaagcaaatacagagccgaaacctaaaacatgccaacaaattgaaccttgtaaaacagccctgaaatatacgacttatattgaacgaggtgcagaagataaggcctataaaatggagattaaggatgaaaatcttaaaagttatgagagtttaaaggtagcaaaggaatatatagcgagtgactatgaacaatatcaacatcaaaaaatcgaaaaatatggagttttagaatatgacgttgttccaggtggacagtatatttataaattccgatttaaagattttcgtacaggagaagttaaaaatttaacagttggggtttctaaacaaaaaaataaatatttgacaaatgcctatgttggaggagccttaaaaagtgacgttacaaataacggagtaatagcagcgcatagaaaatactactcaaccgggttaacacaacaagaaaaggatgtactaagccccgatccgattgaaaaataaggaggatggaaaatgaaaaaaagtctgcacataaaactgctgctgttattgtttgtgttatgcctcttgtgtcctctgtcatcagcatcagccgcaacaccaaacgttatggatgagttaatgcctaaaagtgatctacctcaaactaatgcacctttgctccgatacaatgaggtgcctttggagaattacgatatcgatgtttatgtaaaagagagtaatgaaggtgataaaggttggtttgattccattaatatttttaacgttgatgaaaaagtatataacaacattgcagcctttcaacaacaaatactaagtggtatctggtatggatatttagtggttgtaaatttcgggattttcttgatggagcaagcgttcaccttcgacattattgatagtatgttgtcctatattacagtctttatttcggaaacgggcggcacatatggaatcggtcaatttatgagctttatgatgataatggtagccggttggttggtttattcatttgctaaaaggcagtatcgcgccaccatatccggtttgattgtagcagctttattatcagccgtctttacagcgtatgtgcaaaatagtgaccaattgttaggtcagttaaatcaagcgcgtaactatatttctggggctgttttaacatcttctacttactcgctaggtgatggaaacgaagatgctataagagaagaaatgattaaagatcgacaagtagatcaggctacgcagagttacaaagacacgtcttcagtacgttatggtgtatcaagaataagaaatttaatgcatgatctgttaattgtaaaaccatacttgttacttgaatttggtaccacaaattatggtgtgattggtggaggaaaagctgataatgcttcgccaactcaaataaaaaaaggtaaagagaaagtcaaacagttacttaatgaaaaacctggtagtagcaaacggaaaactcttgttaaacaaaatgctaataattctctttttgcaccagaacatactaataaacgaattgtgttagcattgttaatttgggttccagcccttgtcatattagcaatggttggatatttagcaacattcattcaaatatatggtgtaggattcttacttacagctattacaggagtatttgttttattccttagtatttttccaacgtttcaaaggtttgcaaaacaatttgctatgaaactgttagggtttttggcgatgtgtataggactcaccgttttgttaattttattgtttagctttgtcaatattgcctataaggtagcaagcgagaataactgggcctatgctcaaacgattgttgccgttcttattattgtggcagccatatttgctcttcaaaaacagctttttggctataaactttacgatgaaaagaaacaacaaataaaacaagcgtggagagagaaagttgatgccattaagtatcaagatcagcaacgacaatatgcacgaatagagccgttttatacaggaaataacgtacattcgcagtctttatctagtcagccaggcactacagatgctagagctagagaacatatggaaaaagcaatggaaagacaaagtaatagaccgactttgcgccgaaataaacctattgataagaatggaaatgtaattgaagatacaccaaaacgtaatgtcatgccatttaaaagacgagaagaaaaagaaggaaaaagaggtctatcatctgaaaatggtgtgattccaaatcctcataaaaaagcaaaagaaaatgaaccaaattataatcaatctgtatctgaccagatggggaaacaacaaaagcaaaatcaagtcaatgcacccttaaaagcgcaacctaagagcccagaacaacaagaatctataaaaaataatgcttctggaaatcagaatgaacaagttataaaaaagatgcgtcaacaagaaaatcaagaacatgcacctataaaacaacagccgcagcaagagacatcttcttctactcaatcaagtaaagtcatcgaacaaatgagaagacaagaagcacgttcggaaaaacaacaagcaccgattcaaagctctagacgtttagttccggctaatggagaaatttcaactaaacaattcaatcaagagcaagcacccttaaaagcgcagccaaaaccaccacaaaccgaaaaaacaaatcagcaatttcataagcaaatgagacaacaacaggtacaacaagaaatacaacaaggtaaagaacaggcttctgctgctaatgaatcaaatagagatcatatagaccgttctaaagagattgaacaaatgaggcgacagtctcgacaagactaaaggaggttcttttcatgagtgttcagcaaaagaaaatgcttgtgttcctaagtgtcattgtctttttgggcattatgattagttcctttattgcaaaggaaaagcctgcttcttcttcacaagaggagaagcaagatccttcttctgaatccgtacaagaagagaaagaggtaatgattgaaggcaaggaaaatccctatgaccaaacccaacgaaatacaaaagaagatttacagaatacaaaagaaatagcaaccgagtttgtcagagcctttgcaagttttaacgggaaaaatccttctgagcatattgaaaaagcaaagccttatatgtcagaagaaatgtacgaaaattataaagaacaaaaagagcgaggtacactcacttatgataaagtcgttcccgaaaatcttgaaacaacagaggtttcaaatgataatccagacgttattcaatggaatgttgttatgcaagggaaagtttatgatgtggaaggaaaggcggagccagaagaagattggtacttagtaacactaaagaaacaagatgatggatataaggtggtgggcgttcttgtcaacgtaccgaattaaaccaatccataaattaaatcattctgctaaacgagaatctaagatattactagctattattgcggccttattggtgctaggggttgtcataagtgcaatggctatggttagtgtatttggcatccttctgccagatcaagaagaagtaacagggattgacggtgcaggggtaagttttggagatattcaaatatctaaagtcggagaagggcagatacctaaagaatatattccaatttataaagcagcaggtgaaaaatacaacatcccctggacactcattgccgcgattcatcgcgtcgaaacgcattttgggcaagatttaaacgtatctagcgctggggcactaggtcacacgcaatttatgtcaaaaacatgggtagggtggtcttatccgggtggaacaaggttagggaacgccagtattccaaaagccgttttagagagtccagcagccattaaaaagtatgggggattcggcgttgatggcgataatgatggtcgggctgacccttggaatgttgttgatagtatgtattcaacagcaaactatctagctgctaatggaggagcttctggaaactatcaaaaagcagtttttgcctataatcacgctagttggtacgtttcacgagtaatgggatttatgaattcctatacaaatggttctgttgaagttgtttctataaaaggcggttccgccaaaggttccgcagcaattgaaaaggcgattcaagttggttcttctatagttggaaaaagcccatatgtatggggtggcggaagaaatcaaagtgatattgctgcaaggaaatttgattgtagttcctatgtaagatgggcatatagttcagccggtgtggatttggggccagtaagtgctactacaacagatacattaatcaagcgcggtaaagtcgtaaaagcaagtgaaatgaagcgtggagacgtcattttctttgatacgtataagattaatggacacgtcgctatttacctgggagacggaaagtttcttaatgacagtagttcacaaggggtttctattggtgatttaaacaatacgtattggaaggcaaagtttaacggaaatgttcggcgcgtagcttaatctttagaaaagaaggtgaggacatggaaaaagaacaaatcgaagaaataaaagaaacagccgtaaggaatataaaaggacttttagaagagcattggctgcctattgttgcttttgttgtgttaattgtttcgtgtcagttgttcaattggacgcatagtggatttttgtatctacctatgtttgtttccgggtggttggttgtgatgtttgctttaaaatataaaagcgaaaattcaatttttccctccaaaaggtctactaaaaacatgcagcaagatacttcatatgaaacgtataccgtattacgcgtttacaccaatgacccaaactttcaagagtatatgcaaaatcaagagtatttccatagtcaacatgtccagatggaaaatagggtgattgaccataatcaagatatcgaatcgcaaatcatgtttatacgaaagccagagtttgctttttgttatcacttattaatggatagaaaaaatgaaatgtattttatcggtgaatatgtgtaaaaagagatccattctcttaaataaatagaaaataaggtgttgctgagaagcgctgtggctaaattaacttttgttttacgtatactggttcataaaatgtgaaatctagcgattttcgcaatctctgtttaaggaggaatttatttcaatatggaaaatacttcattatttttcggtgtaactacgatgattatctacggtatagctatagtaacaagtgtatggagcgaaaaaacttcattattcaaaggctggctcgcccttgccactattagtctggcgatgtttgtgcaaacggcaattttacaagacggtgcaacagttaagtcagttatgggttctccttatggaactaaccctgttgaatatgaagtaatgaaatatgccgtaggaataacaagctttttaatctttacagttgtactttattgcaccacgtatatagcttctcgttttatgtttaagctttttttgaacggaaggtatataggaaattcaagagttattgactattttatcgctcctattgcttttctagtaatcaactattatgtttcttttgattacataataagttgaaaaaataaataaagattggagaacagtttatatgtcaaattccgttattatcgccctaattacaacagctctcatttttattatagctactggaattggtaaagctaacagaaaaatagagagtgaagccattaacaaaaatcccatgttagtaaaaacgttcattacccaaaaggaattgttgctccaaaaagcaaatcaattactaaaacagtgtcgtgttcttatgctcatcgctttagcttcaagtattcttttcaaatatgtaacgccttttcctttccttgctcctttgttttttattgctacttatgcatttctagtgatgtatatccttacaggaacgatgagaagtagcttaacaaaacgtattgaagagttaaagggatactctaataaaaggaaaaaaataaattaataaagggtggaatgaaatggtgagccaatttcaaatggtattaaataaaagaaaaaggagcatatataaatgaaatcaacaggtattgtacgaaaaatagatcaattaggaagagttgctattccagttgagttaagaaaggttcttgctattaaagaaaaagaccttatcgaaacctttgttaatgaagatcaaattattctaaagaaatatacgccttacaatgaatgcattgtgacaggtaaaattacttcccagaataaggagtatgcaaaaggtttagtgttaagtccacgaggggcagaaattttaaagaatgaaatagagtttaagttcaatataaaagcttaatttacgcatgattttattcagtacgagtaatttgtcaaaggcttgaaaccttgataaatcaattatgtataaacgataaattttagtgtagcgcaatcccttaagcgacaagggattgcgtttttgtttggttccgcgaatttgatttatgtaaaatagcatggcatagagtatacagcgctacttgaagaataattataataatatggtataaaaaggtatttttaaagggatgtgtatgtcttttattcttaaccattgtgtagtcattagcatgatttttgttttaatacttttcgtaagtatagcattttaaaaaagaataagtgctcttttagtttttttgattactttatcatttggtttgtttttgattttttacgcttctactgaaataagaggatttgaggctatagacgtacagataaagggcttaatcattatcggagaaggtttaatcttattagttattacgagtatattcatagtggcacaggagctaaagaagaaaacactctagggtaaaagataaaaccttttcctctgaatttttcctataaatcacattatataaactaaaaagaataatatatacaaactatctttctataaattttatgataaaatggtttttgtggaaaaaaaaggtaggtgattattatggaaatagatttcttttggcttgctgtaggattagctgctcttgggtattttataggtgatggcttaaagaactttgctaaaccacaaaaaaaatcaaggtacccttatttaattaaagaaaaagatctacattatcattttaatttaagtaaggatgaaatcgaagaattgttaaacaaatatcctgacgctcctaggatagagcttaaagggactacatattattcttatcacaaattcatagattggctatcttctaatgatatctacaagggataaaatagaggaaggggattatatgaagaaattttttaaaaatgctttaaaagtgtcaatagcctctttagtcatttcgataattttgtatgtagttataattggagtttttcttttatcagctgttacagcaggactgattcagattactgtttctattctaattttgagtacaatagttggttttatatacgctttctttatcaaaggtaaacaaaaattcatctttttatctttacattttgtttctatatgcgttatttcatttggtgtatatctttctattgcacttcgggactttgcaccttaaaaaacaattatatatctaaaaaaagtaggagcaatcctacttttttatttccggttaaattgaaggtttctctccctgttatttcatcaaaagcgttcgtaaatatgtgtggtttccagaagacgttcgtaattttttaaaaaactttaatgaacgataaaaataacagattttctccccgaaagaaaagtccgtaaacgtatacttttacgaactttgtgatgtttaatattataaattattgaggatagctaaaaacataacgcgttaaagtctcatattctttgctattatacatatcaatatggggcaacctattgtaaatacttgtataagtaaaattacaggagggatatagatgcgtagatgtattatttctttactcacaattactgtattgtttaatttaattgcttgttcacctactttggccaaaacaacatatcctgatacaattaaacgtcaaattatagacaacttaaaggataaaagaacggattttgattcatcaaaacctgttaacattgtaaaaatggttaaaactccgaagaaaaattactatattgttttatacacttttagcccataccatacagagcatttaggcgacgccatatttaaaaaagaaaaagataggtatacatttgttgggggattggcttctactgagcaaaacataaataattacgctatgtacattgataaggttccgtataatttggtttacggatttaatgaggataatcgcattcgaacactacgacttgctactctgaataaaaagtcttcatatactgttccaattaaaaaaggaacgtattttgtgaatataaaaaagctccctcgtaatactgatatagaaaaaatggagcatttttatattatggattgctatgataaaggaaataaacaaattccttggaatgagtgtgtagaatagagtgagtacacattataaaagtcattttaataaattgttactctaaggacatagaagtattaccgaaacagaaatgatttttacaatacttaaacctaagagagcgctacactttccctagcgcttttttaggttggttcggataccaacgattatggtaactaagtataggccttttatttcttacaaaatataatttcaaggaaagtgagggcttttaaatgattaaacttaaagactatattataaagaatcccccattagttcctgggatatcatttctcatgctatttggaggccaattcattttggggtatatgagagagaatattttttatatttttcatttaacacttggaattctagggttactgatgattgtatcaagtttattaataaaaaagaaaaagcaggaaagtaaaaagagcatctaattgaactattagatgctctttttgatgaaatgtaggtgatagagttttgctcttaagattcccttgcacattcatcccaggtcatttcatgatgcttttggtcatagcatgttaattttgtgggataggcatccttcatcttaaaagatgatgacaatgcctgaaagtgaacaaagtatggtgaatcgacagccttaatggaatatttaatgggtttgttgattaattcagcgtttatagatcctatctgtttttcagtattctccccatagataacgttgtacaattgattatcgactgtgattgtcgtgtgccctaccttatctataccatagccgtgtccatctacatgttgatattcgccattctttttgataaaagaagcatctcctaggtaatccaaggagttcgatttgaatgtaaacaacgcggtataataattcttcttgggtactttctccaatttaaccaccttgactttaatagaggaatctataccgtcgccatattggataatttcttcttttatgcgtttttctaatacttccgtataactagtttgagctacagcagtattaccagcactaaacataagtaataacacccctgctaaaaagctagcaacatacttcaacatccctgcacctccgttattttcgttcctaaatataaaggtaatatgcccttgttcgattatgcttatgtccgttcaagcatgcaaaaatccgaatgagtttgttctcaacaggaaaatctaataaaaaactaggagttgagggtcataaaaccttttattttaatgttgtttatgctgttagctacgactgtttctccacttcaaacacacgctgataaaatgccctgtaccatttcattagaacctgtgaataagaaccttaaaaataccaaggggtcagcattaatttacaacgttcaactaggcagtccgcctagttttccacggacaaatattagcattttaggagttcaccttccggatccatcgtcttacggtcaatatgatagttatgagggttacgcaaccatacccaatgaaattagttggcgattccgcatgtatccaacacctgaagaagatggacctacttgggctggtcgaattgatttgattacagcagatatgagaaatgtaaaggtgcaaattcgtctttcaaatgcaaaacttgaaaagcttggacctcctgtattacaggggaaaataaatatatgtaagtaacccgtttacaaacgcggaaaacgaccaaggtgtagataaaaaaggaaggtacagaaatgaaaagacttgtatgcttaattcttacgattgctttactattttcaggaactcagatagcgtcggcttatacagacactaggcctgccttatacgacttcgttcattctttgacaaagatgggaagtgaacaagcacaaaaatacgtgtctccagacgcggaaattccagaaatacgagaagacacacccttacgcaatattcaaggcttgccttcttcaaaagaaaatgaacgtatccttattggttatttcaatgatgagaaaaaaacgaatgaaagaattgcattcatttggaaagttacttttaataaagctcaaattacaaatattgacgaagtatacaatggatctaacccttttatgaatgagttccatgctatcaataaatacgagaagaaatttaatgtggatatattggaacccacaacttttccttttgaaattacgcacatcgacactcaacaagataaagatatgttaattattcgttatcgaaacaatacatcaagtagcttgtttcaattaaaggtcatagagactgctaactctcttgaggattataaaggccctaaggatatttcatatactttaaaaaacggaacaaaagctttatatcagccaaattactttccagcaaagcaattgctgtttcaacgaggtaagctaatttatacaattggcattagcaaagctaccaaaaaggatattacagtagatgatttgctcaaaattgcaaactccatgatttcaaattaaatatattctgaaaggtaaatgtaaaaatgagaaagattatagtaactatatttactctgttgctgctatcagatgcttcagtaacttatgcacatagggacttgccaacaaatacaaaagcaacgcgtgaaaatatcttagaggatgccttaatagatttgttatatcctcaaatgatacaagcagcagaaaaatattatggtgcagaaaaaagcaaggcaatacgttttgactgccagaaagtaatttcaataaagaaactagaccatccaggatcaatgatgtttcaagcaaggcttgaaggaaggacattctcaggacctcacaatcctccaaatgacttattcacagtcatcataagaagtgattaccaaaccaatggatgggaaatgaaatcatttaaggtaagaaagttaaagccccatgaaaagtacgaatgcagagatcctgcttagaaagaaagttaccttccgcccatgctttatgagtaattaagtaaatactcaagcattctggtattattccagtttttctattcactttagatgatgtataataggcgctttttctatagtaataaacaagaagattatttctataaagtacatcaatattttatttaatgatatggagagaaagaaaaaagcaacctcgtctttgtcataggagagaggttgctttttagggtccacactcgttgaagaatgaacgatatagcaactaaattatatcatattttttccataaatgatataatttcccgaacgaacatatgtataaaaggtgcgctttttatacaccttttcattaatcacccatccgaagaatgttgctacatcaaggatgtataaaaagctgcataagctataaaaagtggagatgaaagagcccttctgccgcaagggctctctttttccatgtgttccggaaagagtgattatgtaaacttaatttgtatatcttatacataatatttaaaagtaaaataagatgtattatgttaaaatataactatatttactttttttattattggtggtgaaatggatggataatcgaagcttagggttactgctagtaagtacaggaacaatctttttaattttaactttaacattacatatagctggattattatatggtgttatcttaggtagcagcatattattaaatgttttaggttcaggcatccttatgaaatttgtagctgatcaaaagcttgctaacttgtagagaccttataaatcaaggtctcttttttattcctagaatcaacattatagtaactaaatttgtatatgacatttacgttctttatttaactaatgaggcatttaaggttcaaagaggagagtatgaaagaatgtagaattctcataaaaaacttactagggggatatgaatgacgattactaataatgttaagtgtatcattcgaactggtaaaatagaggatgcagaagcaattttatctatagaaaatgcagttatttcagaaagagattatttaattacactatacgaagagcttagtgaaacatcggttgaacaaaaaagggaatggatacaaggattgttagaaaataaaaaagaaaccttacttgtagctgaactaaatggtcaagtcgtcggttggatagtattttattctcaaaaaagaaaaagattgtcccatactggctcttttacaatgatgataagcaaaaaattcaggggtatgggaattggaaaaatgcttgtaaaagcattattggaatggtcaaaaaagaactctctaattgaaaaggtaagtttaggagtattctcaacaaattatagagcaatctccttgtacaaaaatatgggattcattgaggaggggcgtaaaattagagaattcaagttaaatgataatgaatatattgatgatattcttatgtataagtttgtatagttcttactgtatagcaggacttaatatgaaacaatctatgtcttcgaccgcggattatgtaccctactgaactaggatttgacgttcaattgtagaaaatgatgagaaaaacgttaggaagtgtttaaatgaatccactgttattagatttccctacagagttctatactgagaggctttttatacgaatgccccttccgggtgatggaaaagttgtagctcaagcaataaatgaatctattgaagaattaaagccatggatgccctttgctcaagacaaacaaacagtagaagaagcagaaataaatattcgaaaatctcatgcacaattcctacaaagagaggatttaagacttttgattttttttaaagagacgggtgaattcattggatcttctggtttacatcgtatgaattgggacgtaccaaaatttgaaatcggatattggatagactctcgttttagcaggaaaggatacatgacagaggccgtcgaagggattataaattttgccttaaaggaattaggggctagaaggttagagattagatgtgattcgaacaatgttaaaagtcgtgctatacccgagaaattaggatctaagttagagggtattttagaaaatgatgatgtagcagctaatggtttagatttgagggatacctgtatttacgctaaggttttaaaaacgagttagtctataaagtttttaataatatggttgataaggcctctgcttcttaccagaggccttatttttatttttatatttagatttccgataatacctgctatgttaactaggagcgaatattgtacacatcaagttactgttgaaaataggaatgataaagggtaaaattattattgttagatttttctaaatttaagttttagttgaggagagatgagtttagatgagcagagcagagttttatgagcaagttggggtagccatgacatgtaggtcttatggagagtacgaaaagatgtttttgctagaagacgattttcttaaaaaagggaaaatcttagatgttgcagctggagcttcttcctttgtagcagaagctaacgaaagaggctatgatgctgttgctgtagatcctctttatgatttaacagttgagcaaatgaccttacatggacagaaagaaatgaaagaagccaccgaaaaactggctaaaaatatttcctccttctcttgggattcttataaggatctagaagaacacgatacgataagagaagattcttttaaactctttttagatcactataaagaaaattccataaaaaaacgttttattactggaactttacctaatttaccttttgatgatgagacattctcgcttgtgttatgtaatcatttcttatttctttatcaggaacagtttgatcttgagtttcatttacaggccattcgagaaatgattcgagtaactaaaaaaggcggtatgattagaatttatccgttagtagggtttaaaaatgaacgttatccttatttagatgaattagcagaaacgttaaatgatgaaaatacagtagttaaaacggcagatacaacatttcgctttgttcctgcagccacagaacttttaactataaataaattataactatacacaacaagtctttctctaatggagagagacttgtttttgtaggaagagataaagagtgttaaaggaggtaaaaacattggaaaacgaaagagaatactggcaaaatcgcttgaaggaattgaataaagctattgtagatttaaacatagaaagaagaaatgtacgtaagcaattgattcacttagaaaagaataaacaaaagcctgttcctaaagaagatatgaaacataggacaacagtagaaacagtatgtcttttaacaagtcaccctagtaaggtttttacttctaaagagatccttgaacacttgcatcgtgaagtaggatatacaattaacaattttgctcctgtttatcgttatgttaaggaagtggagcccaatatagtccaagtaagacgtggttattatatgtataaaccttaaataacaattcggaaaagctctaagaaaatgaaagagcttttttat

SEQ ID NO: 48 - DNA, 32230 bp, Priestia aryabhattai
  source 1..32230: mol_type = genomic DNA
acatactactacgtactcaggggtgagggagaatgtctacgaatgaagcgtcatatcgagataaaaaagtcatgtctattgggattgtaaaagaattaaccggtttatcagaaaggcaaattcgctactacgagaaaagaagcctgctctttccggaccgaaccaatacgggtatccggaaatattcgttttcagacgtcgaacgattaatggatattgccgatcgaatagaagaaggagttcaaacgagtgaaatacgcacagaactggccaaaaaagatgaagcgaggaaaatgaaagaagtaaaaaaccaaatgcttcaaggtcagttgaacgctcatttcaagcggaagctataaagtatacatacggtgactttcctgtctccgtttttatttctttacggcagacaaaaaagcgcatatctaaagatatccgcttttttgtccgttaagctgagcgccctttaaagaatttcggctgatgagaactcatgaacttagttttagataaaatgaacataaccgatccgccccaaatgaacaaaaaggcaatcatctctacgctagaaaacggttcatgatacacgaatacccctaataaaagcgtcatggtaggagcaatgtactgtaaaaaaccgaccatcgatagcggaataagaggggcccctttagcgaaatataatagtggcatagctgtagcaacaccgcctccaattaaaagagcactcagatcaagcgactgaagggaaaaacttgaagatcctttcactaaaagaaaaagaaaataaataactgcaataggtgcaaccatcatcgtttcaatcgttaatcctacttttgcttctaattgaatagtcttttttacaagaccgtacaaaccaaagctaaacgctaagcttaatgatacccatgggatatgcccgtatgtaactgtcataacgataacacctatagcagctaatccaacagaagcaccctgccaaaaattaagcttctcttttaaaacgactataccaagtaaaatactaacgagcgggttgatgtagtaacctaaacttgtttcaataatatgattatggttaaccgcccaaatgtaaacgaaccagttgatgctgatcagcactgaagccacaaataaaatgaccgcttgtttcgtattgcgaaataataaaccaagcgtcttctttaaagcattcatttgctttgtcacaagcaaaagtaaaagcataaaaacaaatgaccatatgacacggtgagcgagtatttcattcgcattcacctcgccaagaagcttccagtaaagcggaaaaagcccccacataatgtaagcgctggctgtataaacaatacctgctcgtttagaatcttgattcatttctcaacctcttttctttatctctctgtctcttatcattatagatgcatttacctcttttttatagctttattttgcctatcgaaatagctcattaaaaaaacgatcgcttttagctcgaccgttttttataccttattttttaggctgtttaaatactttggcactgcgaatatattctacatcttgtacattttctcgcgcgttagcgattcgagccgcagcaaagaaataatcggataaacgatttaaatactgaagcaccgccgcattaattttatgctcacgctgcacgccaacaacaagccgttctgcgcggcgtgtaatcgtccggcaaatatgaagcgttgtcgctgcaggtgtgcctccaggcaaaataaaacgctcaatggccggcgcttctgacatatagacatcaatgcgcttttcaagtactgatatcatgtcgtttgttactttgtacggatgatcatcttttgcaaatgctaaatcacttccacagtcaaaaagctcatgttgaatcgtaattagctcttcttttacatcttttaatgttgtttcatccagctgataaatcgcttgacctacaaagccatttagctcatcgatcgtaccgtatgcttccactcgaatatcatctttatttactcgtcctccaattaagcttgtctgccctttgtcccctgtttttgtgtaaatgttcattgtatttcctccttcaatcgattagcaattccgtaccaaatgtgatctactttccgggcatgtgtcgctaaatgctgatacgcatacccgcattcatctctccactgccgctctgttggatctaaaggaacaatccctttgccgacttcagttccaatcactattaacttttcccatacaccgctgtctctccacttctgtattaactttttaacaacaaggtgcggagactccagctcgctatgtattaattccttaacatagtgctcaaatccttctagcactatgtaactttcttcgaactcaaacgccggtaaaacagggtcttcataaaaacaatgccattttaccgactcactggcataatgctgcttcacccattttcttttgccggtaaatgcaccgccgaatacgaaatgcatgctcttctctcctttgcctgtttgtatgtacacgttactgaaaaaccttctccataagaaaaagaaacatcccaaagcgacgctgtctgtttaaaatgggatgcaagtaaacgcagtggtccgccgtgtgaaacaatagcaatgtgacgcaattgctgactggccgccaaatcgaccgcttcttcccacgctgcccaaactcggtttgaaaagcttgagaagctttcaccattcggaggcgtatgttctgtccagtgatcaatccaatttctatacgcccatatgttttttaaatcttcatacgtcttctcttcccaatctccaaaatgcagctcacgccaatttttacttttaaccacctgagattttggaaaaacaactgcacttgtttctagcgctctttttaagtcactggaaataacgagctgaggttctagaaaaagctctttcaattcatttttcccttctatacttaaaggcggatcactccaccctatatattttttctgttgattttcaagcgtcatgccatgacgaatacatgtgataaccaaagaattatccataaaaacgtttctcctccttcaatggttgcccctataacatctcctgttacgccaccaaactgcaaacgataaaatcgtatccagagccataaaaaaccggcaaagaaaagaataatgaatttattgtccataaaaataacgaaaatagcaactaagaataggctcatgatgataaatccgtaaatagaccgtttggtgactcctttttgaaaatatgcagccagacccgtctctttagcgggcttatctctcaacaacaaaaaggctgctccaattcttggaagcgtaaagacaattaagcatgcccaaattgataaagaagaaagagacactaattcatagatcgcactaaaacgcagcagcagcagaaccataagagaaagaatagcaaaagacccaacgtgcggatcacttaaaatctgcagttttttttcctttgactgatgagaaaaatacgcatcgcttatgtccatccagccgtctaaatgaaggccacccgttaaaacaagcggtaaaagcaaaactaaaatactatcaacaatcgtagtgataggtgaagattgaagcagctgtaaaaagctataaaacatcaagcctagtaacataccaatccaaggcagcacaaaaagtgagcgtgccgttcttttttcagtccattgaacggttttagccagtggtaagatcgtaaaaaactggagagaaattcgtagtatagctatccattctttcatatatctacacattcctttccttttttaaaacgataaattcccgcttctacacaaatagccacatctgctttttctacaatatactgatgtaatttccctaacatcttcatatagctatatgtgggctcttctaatacgcccgcttcaaacagttcattagatactagcacaaccgtctgagactgcgcaaacagcttattgagcgcttttatcatatgaagaaaaacctcttgtttgccttcttttgttcgccacctgttttctgttaaaaaaagctcattggcaagccagttcgtgacacaatccaaaagtatagcatcatcactttgaagatttggaagaatttgttgtaaatttacagactgttcgatcgttacccaaggcgtgttcgctgcttggcgttctttttgatgaagctgaatgcgtttttgcatttccttatctgtttgccggcttgtggcaatataaacagcgcgctctgcacaaaaagtttgaaccatgttctccgctgcacgtgattttccgcttcgaacgcctccgctaataaagatgatcatatttcatcgagtccttgtttgattacgttaagtaaatagtcattttcttctttcgttttcacagccaaacggatatagcgtccatttaaaaatgggaagttttcagtatgacgagctaccacgccatagcttgctaaatagacaagccattcgcgcgttttaatagaagacggaacgctgcaaagataatagtttgtttgagaaggagaaaccaaaagtccccattcctttagttgactcaagatccgttcccgttcttgtttaatataatgtacggtttttttcacaaaatctttttcatccacacatatcattcctacttgctgcgacaatccatttacactccaaggaggctgctttttagacatctggctaatgattttttcatttgccaaaatatagccaagacgaagcccggcaatattaaacatctttgtcatggaacgcacaacaatgatatgctcataatccagaataagagaatcaaatgaaggctgatgttcgacaaaatcaatgaatgcctcatcaatcattaagtatgtaccatgatgagcagcagcttttactactttcatccattcctcatgactatacataacgcccgttggattatttggatggcaaatccacagtacttttatgtccggaagaatgctcataatcaactctatatcccagctccagccattttcttcagctaaaggaacgtatgtcacttcacatccataagctttacttgcctgttcatattcaacgaaggtcggctgtacaatccctgctttctctcctgaaaataacgaagcaataaggaaaaacgcttcagcggcgccatttgtaggcagcacttgagcagctgaaacatgatgatgagctgcaagtttatttttcagctctgttacttgaggatcaggataactaaacgctgcatccttgaattcgttccacttttcgtgaagcacaaggggagcccctaaaggatttgtattcacgctaaagtcttttatatgcgataaattctcggcccctattgcttttaaaaagacattaggattagctccatgtgtaggtaatagcactaataactcctcctaacaaaagatataataaccacgtagcatagaccgtccttttcataatgaaaacagcttgttcaatatgaccggcttgcaggggaatgagtggttcacccatttttgcacgattagattctatgcctttatatgtattaagcccgccgagttgaatacctaaaagagcagccactgcgctttccccgtatccgctatttgggcttggatgcttttgagcatcgcgcttaatcaaactcgttacatgcccaagagaataccggctttttgctacattaacagccgtcatcactactgcagttaaccgacttggaatatagtttaatacgtcatcggtttttgcactaaaatagccgaacagaaagtagcggtcatttttgtacccaaccattgaatcacatgtgttaatagctcggtaaaaaaaggctagggctcctcctcctataaatgcataaaaaagcggagctgtgataccatcacttgtattttcagccacggtctctaccgtcgctctggcaatttctccttctgacaaacgatctgtatctcgtcccacaatcatgcttacttcatatctagctttctccatatctcctagctgaagaggcttttgcaccttataagcagcttcgcttaaagaacgagtggatatagtagtcgcaatcattacgccctctactaaaacacctgctataaaatgaactccgtacaaagcatggaggaataagaaaggaacaactcctgcgagcacaaccatacttatcacaagaagcaatcctttgaatcgttttcctgcacctttatttaatctagaatccatccaataaatccacttgccaaaccagcgaacgggatgcggccaatgttcagggtcgcctatgattcggtcaattagtaaagcaatcgtcatggccgtcatgtgtgcaattatcgcttgtgtaatactcatttcttcacctctttcctttaagtccctgctctaagcttattttcaccagcttggctaccgcttgacctaaagcggtcatagagcctgcatattcatataatggtcctttctgagacgctgcaactgagatgctgtccgtagatgttcccgtagcaatcgtctttgtagctggatctatgacacccagctgggacagcgtttttgttttggcttctgtggccgcgataaaaagctgtaaaaatgcagcatccgtaagcgtaccttccacgaaaaaaaacatattaattgtaccgggagaagaatagaacgggacagcttcgtcagctgtaatatctactgcgtttcctactccagccgttattacggaagctactcttactccgtagccttcataacagtaaaccgctctttcttttaaccaaacggctgtcatcaaccctacgatttgctcttggcgcacattttctttcatcaaatattgctcatactccaaagaaggagtatctgaataatagtctttgtgaacaaatcgattgtaaaaggtgtccgtttccgtaatgcctgttcctaaaacccctgagctgtatgttttataagaagtctcggttttcatgattaaaagctcaggccgttcttcaattttaagatgtgaaaagggaccaatccccttttcaattcgaactggaatatggtccctctttttatttattgtacacctcagggtatactgcttttgctaagtcctctaagccatctacaatacgaggtcctaagcggttgattttgttttgatcaaccttctcgatgttaccctcttttacagcagtcatgctgctccaagcgggacgcttcataatctcatttttgtctgcatcatacgttgcgataataacgtcagggtttaacttaacaacttgctcttcagaaaacttaacccaacccttttcactagccgctacgttatcagcaccgatcatagtaagcatttcgttcatgaacgtaccttttcctgttgtataaatctcaggagctcctgatacctctatccatacttttttacgatcttcttttgaaatcgtttttgcttttttctcaattgaagctactttttctttcatgtctttaattgtttgattagcttcttttgttttacccgttaatttaccgatttgcgtaatagaatcataaaccgtatcaaacgttgttgaatcttttacaacaaataccggaatacccgcactttcaatttgtttaaatacttcatccgaaacgcccatacttgaagcgtgtgccagcactaaatcaggatttaaagcaattactttttctgcattaacgttcatatctcctacctgcgcttttttctttacgcttttaggataatcatcgttgcttgtgacaccaactaattctttttcaaggccaagggcatatacaatctccgtattacttggcattaatgaaacaattttcttaggctgttttttcaacgtaatttctttatcacgcgcgtcttttaccttcactggaaatgcagcttgtgacgtttgtgccgtatcttgcttcgtttttttatcactgttgctttggctgcctgcaccgcatgcagcaagtacgatgactaacagtgcaataatggaatacgaaagccattttttcatctaaatactccccctatatattgttcattgtgaatacgaaacctccacgttaaagaaaaagcaaatgatcatgcaaaaagcagcgctatcccgttttttccgctttgactatgtatactgctcgccggcagcttcaaaataaaaaagctttactttcaattgaaagcaaagcaggtaacgtcaagataagcaggaaaagaatccgtttactatacttgatatgtatgttcattaccctgcttcacccttcctcgaaggtttcacagctaacaataaggcaggtctcctgacttacgcacaaagcgcttacagtggcgggaccgcgctggtttttcaccagacttcccttttcactcaatctttaaattgagaccttattgctttacgtttattcacttgtcctagtataccccactcatggaaaaatggaaatagccattctcacaaaaaaagctgcgagaatgctctcgcagcttaaggaattaaagagttgctaaaaattcacggaccgcttcaggcgttttagcatttgcactgtgcaagtgcgcaattttttcaccgtttttatatacaagaagagaaggaatacccattacattgttttcagcagaaagttcttcaaactcatccttgtcaattttaaaccatgctttatctgtattttcgtcaacgatttcatcaatgaacatatccaaacgtttgcaatcaggacaccacgttgtcgtaaaaatcccaacacttagtgtttcattcttaatttgttcgcgaaattgtttttcttccgtaaattgtttcattgtgttacctccagcatctattcgttccttctcactattctatggtaagaagtctgacttcattataaacgatttttttatcattgtgctaatgtttcagcttatttagaccataacggttttagacgtaaaaaaatgctagcttaaaaaagctaacatttcgaaatcgtagaatgttgtgtctattatcagctaaaccatttaggcggcatgtttcggttccaataaattttccctaaatcataatgtttttgaaaattatctgcagccgcatgatagtgaaaattaaaccagtatccatcttttggaggattttcacgccgtacatgaaaccgtattaagtcctgaccggtctcccggtcatatacatggaaaatcttttcaccgtagccagcagcaggatgctcgcttatctcgagattctgaattgactgttcacgttcagtgccaatgtcggtcagcacttcttcaattttaggtaacactgcttgacgaaactcatcttcaatgacaggcccaatttttgttccgaatttttccactgactgtttttcagctgattccattgcatacgtaacaaatgatgaaacgtcttcatattttggttcttcatatggcaaatggatatcttctataacagccgtgacaggagttgtttctcttacataccctgctttatgttgcttgtccgcttttgcatcatcaacgtataaatattctggtggagtgacaagcccaaatgtaaatactgtaataaatacaactagcattctttttatccatctaggcattcgtatctttcctttctcatcttttcccatatggtcttttcatatcgtaaaattcattgttataactcactaggtattgtaacatacttattaattttttacctatatttgcttattcatttatgctgcctacgggcattcgacgactttttagttagcaccttccttcttctgtttgaggttgtcacaccgagcggaaacctatacaagatattccttttttgctggatgcttaaacacagaagtatttttatgttcaaaaatatatcatacttttatgaactttagatgaaattcataaaaaaaacttccaaaactttttaattcctaaaaggttttggaagtcttttcaatgatcgtgattcattttacttttttgtttatttttgtatatcaattgtcccgtaatgaaattttgatgtttttcgtttttgcacggtaaatccatgttcttcaaaacgagtgcttttccaatgatcttttagcacgatcttttgtttggctactctttttgcttcttgtatagccattggcgtcagcgtagtatacagtgctattgctttaataccgttaattccattcgattcatcaatttgctcttgaaacataggatcaaagtagacaacatcaaaagaattatcttcacaacacgccaaaaacgattcaaaattttgatgaaccacgtttatacgcttcattgcatcgttcaactcttgtacgtcactttcccaatttaaaagcccttgtttgactaaataagctacatagcggttgccttctagtccgacaactttcccacttttccctaccgctgcgctcgccatcatactatccgatgcaagaccaagtgtacagtcaagcacgctcattcctttttctaaaccagcagcttcaataaacggatcacgttctccgcgcagccatctcttcactctaaacatagcggagtttggatgaaaaaaaataggttcctcttcgttttgaacgtgcaactctactctattcttaccgacaaccagcacatctgcagcttgaagattctgaagatctgcaaccgatttcttctctcttactacaaaaggtatacttaaaccagcggctacttgtttggctttcacaatcatctgttcatttgttcgaccagcagtcgtaacaatcactttcataactccccctacactgtttggctatttacataaagaaaaaggatgccgatagacatcctttttcttataaagtatatgcgatttttctctaaaaatctatatactagatgtgacaaaagcaggacattttatgaacagtgctgcttaaagccatttaaaatgttttcaaaaataacttctaacggctgaccttcaatttcatgtcgaggaataaaatgaacgacttcttttccttttaaaagcgccatagacggtgatgaaggctcaatatccccaaaatattcacgcattttagctgttgcttccttatcttgaccggcaaaaacagttaccacttgatctggtttttgctcagactgtaagtacgcttgcgttgctgcaggacgtgctaaaccagcagcgcatccacaaactgaattaacgacaacaaaagttgttccttctgcgttttccataaaatcaactacggcttcctctgttgttaattcttcataaccagcttgagttaattcttgacgcattggtttaactaactgacgcatatattcttcatatgccattgacatattaacattcctcctaacaatcattcacgctaaaagcatactataaaaaccaggaaaaatctagctactcactcttcaaatccttatcgttgtcccattctcatttttcatttgacaaaaaaagattaaaaccgggtcatatcatctaatttttttccataaaaatgtcgatttttactattaatattccattttttgtactatagtagtaaatagtagtttagtagaaaggatttttaaattgaaccagcgatttaaaccgaacaaacgatttaagccaaacaaacgattttatgcatttttgtctttagtgttagtgatcgtcgcttctttgttttttattacagaagccaaaggaagtaaatccgctgcatctcagcaagtcttagcatctactgcattgccgctgaaagaagctgcatcttcagcacagcctgagaagctgcttaatacacttcaccataatatgtatgtaggaaatacgttaaacgatcaaaatcaagctcttacacagcctgtttaccttacgtttgacgatggcccaacacctgatacccttcacattttagatgctttgcgtcaatataacgtaaaagcaactttctttatgttaaagcatcaaattgacgctcaccctgaaattgctaaaaaagtagcacaggaaggacatgctatcggctgtcacggcgtctctcatgatattcatgtcatgtatagtgaagatggcgcagcgttaaaagaaatgcaggagtgtcaagcgacagttaagaaagtaaccggtgttgacagtaagttaatccgcgttccttacggcagcgttccttatttaaaagagccccaccgtacagagttgctaagccactttaaattatgggactggaatgtagacagcgaagactgggcacttcgttctgcacctagaattattcagggccttgaacctcatattcaaggggttaactccaatggaagaacaccagtcattttatttcatgataaatcctttacggcacaatcccttcctgctattttgacttacttaaagcagtcgggctatcagcctattaaaattgataacactatgcagcctatgcagtttccaactcccgctgcaaaacagtcgtaaaaaagatcattcaagtgaatgatctttttttatgcttttctgctttccgtcatttgtttccaaacagaaccttttgcttcttctccgccttcgatacgttcaattgctagcttgatttgtaaatctacctcaaattctttatcattctctgctgcttttaatgcaggaagagccgtctcgtcccctacctcgtataaatacatagctgcacgccagcgaacaagcttgtttttatcaccaagagcttcacacattgccggaataccttcttcaaaacctaaatctgacatgcagtctccagcagtacggcgcacagtgactgatttatcttttaatgctttgtataaataaggcagtaccgcttttgattcaatcattcctaagtagaccgtagctaagcggcgaatagatgctttttcatcatcaagcgctttatttaaaacgtctaaatcagcttctgttggatccatttgttctaaatgggcatagcgcactgaccaatcgttgtcttctagcatttcttctgtaactttataggttttacgcggctgtacaacttttccgccttctttttcttcttgtgcattagacacaaggcgagttaatctttcttgcggatatgctgctgctaactcttccactacttcgtctccgatagccgataactctccgtaacgaacgccttgttctttccatttccgctctaataccacattatctgaaaaacgttgaagttctgctaccgcttttgcgaatcgctcgggcagaccaaagcgcttttcttcatttccgtccgttagcttgacctgcatcggtacatttttgaacatttgaactgacacattgacctcaccaaaatgctcattcattttgtgctgttcactgttgctttgcaaatcttcaccaaacgctgcacgaacttgcggcaaaatttgcttccagtcatatttggcatttcgctctactgccaagaagtccgctacgtggtagactccttttaccccttctactttcaagatgtcttgaacaacttcaggggctgcttcagcatttttttccgtatagttattgctttttccgcctgatagcacttcgtctaaattaattttcattgtattcggacttggcgttggctcaattgatttaatgttcatatcgtatcgtactcctctcattaaaattgtagcatgtgccttatactcagtctaacgacttgtttacgcgttttcaatttcttcaatcagctctgaaagctctgcccagcgatcaagcagtgcacttaattcttcatttgctttctcttgttctaacgataggttatgcgcttttgtataatcgctgcccacctgttcaatttcacttgttaagcgttcaatttcttcttcttttgctgcaatattatcttcgatttcttcccattctttttgttctttatacgttaagcgacgctttttcgttttctccggctgttttggcttttcttctttcactttagcctgctgaaccattgcctgcttcttcttcatcgcttcttccaattgatctgtataagcgccaaaataaatcgaaatgtttccttctccttcaaaaactagtaagtaatctgctactttatccaagaaatagcgatcatgcgatacggtgatcacaacacctggaaattcttcgagatagtcttcaagcaccgtcagcgtttgagtatccaaatcattagtcggctcatctagaagcaaaacatttggcgatgtcattaataatttcaacaagtacaaacgacggcgctctcctccggacaacttttgaatcggtgttccgtgcgtatgagaaggaaatagaaatctctcaagcatttgcgaggcagagatcattttcccatccgtcgtatgcacaacttctgccgattctttaatataatcaagcatgcgttgattcaagtccatatcatcgctttcttgggtatagtaagcaactttaaccgtttgtcctctgtcaatttcaccgctgtccggctcaatgcgtcctgcaatcatattcaacagggtagactttccgcttccattttttccgacaattccgattcgatcttgttttttcacgatgtgcgtaaagtctgaaagaatgattttattttcatacgtcttagagacatcttttaattcaaacacttttttccccaggcgactgcctgctaaacttaaatccagtgattctttttcagaggaatcgattttcccttctaattcatcaaatcgctgaatacgcgctttttgcttagtcgtacgcgcttttgctcctctgcgaatccaagccaattcattgcggtataagttgcttaattttgcttgagttgctttttcctgctcttctcgaatcgcttttccttctagaaaagcagcatagtttcctttatagctatataaatttccaccgtctaattcaaaaattcggtttgtaacagcatccaagaaatagcgatcatgagtaacaagcagcacggctccttgatatttggataaatattcttcgagccatttaacggtctcataatctaagtggttagtcggctcatctaagatcaataaatcaggtgtttgaattagactttgcgcaatggagacgcgctttttctgtccacctgaaagctcaccgatttttgcactcatatttgaaattccaagcttcgttaaaatcgactgtgcgttagaattggcttcccacgcgttcatcgcatccattttctgctgcaaatcatacaatgtttgctgatttttttcgtttgcagagtcttgctctaacgcatacagagctagctcatagttttttaataagttaagaagaggcgtatctccgctgaaaacttgctccaaaaccgttaagtcttcatcaaaatccggatgctgcggtaaatatgtcacgctgtagtctttagcatgaacaatatctccttcgtctccgagctctaaacctgcgataattttaagaagcgttgatttccctgttccgtttacaccgattaagccgattcgctcattttccgtaatggtaaatgttagttgatgaaacagctctttttctccatacgtttttgttaagttttcaacagtcagcattttcataatgataattccactctttcttaaattgaactaaaaattctttcatatatgtatgtcgctcttgcgctagataccgtgctgttcgagtattcattaacgcagtgagctttaataacttttcataaaaatgtgcaatagccgttgatttcccgtgtctgtattcttcttccgtcatctcacttcgtacagcaatgttctcatcatacaaagccgtgcctttagcacctgcatacataaacgtacgtgcgataccaattgcaccgatcgcatctaagcgatctgcatcttgaacaatttgaccttcaagcgtagccatagccgaacggtttccgcctttaaatgacatcgtttgtaaaatgtgaacgatatggttgcagttctcttcttctacctgctgactcttcagccactcccacacttcttcgtacgccttttcaacatcttccactagcttatcatctacaacatcgtgtaaaagcgcggctagttcgataacttcccgattgccgccttcttttttatataaaagtactgcatttcgacgcacgcgatcgatatgctgccagtcatgacccgttgtgtcatgcgcatgccttgcttgaacccacttttccgtttccgctattttattcatttgctcacctcaattatatccaccattattttagcacaaagtgaggcgctcgtctcactgacagctgatcaccgtttgaaaacccttgctgaaaaataaaaaacagatggagatccacctgcttttacagcaattcttttatatctttttgaatatcttttggtgcagtttgaggtgcgtatcgcttcacgacttcaccttgacgattcactaaaaactttgtgaaattccactttatccctttggaacctagtagacccggtgcttgttctgttaagtatgtaaataacgggtgtgcatgctccccttttacatctacttttgcaaacatcggaaacgaaacgccatagtttaactcgcaaaattgttcaatatcatttgaacttcctggctcttgaccaccgaactggttgcaaggaaaacctagaaccgttaggccgttttctttttcttcttcgtacagcgcctgcaaatctttatattgaggggtgaagccgcatttgctagctgtattcacaatcaacagcacgtcaccttgatagttagatagcgatacgtcttcgtctttaattgtttttgccgagtattcatacacgctcatcaaaacgcctccttttccctattgtaattcactttatttcggaagtacaactgaaacgctcttatgatttgtcgtaaagaacctttagctgatcagtcgtttgcagcatgtaatcaatcatctcgattaaatctcctacttggtcttcgtaaataaatcggttaaaggttacctcaatattgttttcatattcgcttcctccgacttcatgagtaatacgctgcttaacaactcttgttgttccccagatcctctcacacatttcctgtatgttttgaaactcagcttcttcaaacggtttttgtttttttagctgaaaatgaatataaactgtacaacctggtttttctacacgggaaggcgttaattcggcatgaatgttgtctaagtcggttgataaagttagcgacgcggtacagcaaaaatgctgttgaaaagaaatgcggtacgttcgagtaaactgagctaagtctacaaaatcttcgcgattcgtaacagatacttgcccagataagtcaagatcatagatctctccttctacaacaacttttaaattatcaaatacaatcggatcaaacatttcaactacttccttttttataaaatacgaacagtcagctcttcttctttcttgccaaattaattcataacatacctgttattttattttatattgcaagaaagagattgagacacaactaagtccacccaatctacatctagaagccactacacccatgaaacttatttttaccataactatgaaaaatccgaacgagtttgattcttcatcaagaatcaaactcgttcggattttccttcaactaaaatactcttaccctagcctcttctcttaaaaaatccctagtgcatgtccattctcgtcaatatccatattgagcgcagcaggtttttttggaagtccaggcattgtcataattgaacctgttagcgccacgagaaacccagctccaagtgaaggacggaattcccttaccgtaatcttaaaatcagttggtcgcccaagcttcgtctgatcatcacttaacgaatactgcgttttggccatacagatcggcagatgatcccaaccgtttgcttcaaatttctgtatttgctttaacgcttttggagcaaaatctacgccttgtgctccgtatacggttttagcaatagcttctactttttctggaatcgaagctgacacatcgtaaagaggagaaaactgactttctgtctcgttcatgacttcaagaattttttcagcaagcatgacgccgccttctccacctttttcccatacttctgttaaagcaacgggaacattctttgaagcacaccaattcataagcgcttctacttcaccttttgagtccgtcacaaaacggttcacggctacaacgtaaggaacgccgaatgcctgaatggtttcaatatgcttttccagattttcaattcccgcttctaaagcctcaatgttttcttcatttaaacgctctttaggaacgcccccatgcattttcaaagcgcgaattgtcgcaacgattaccaccgtttctggtttaatatctgccatacgagctttaatattcaggaatttttctgcacccaaatctgccccgaatcccgcttctgttactacatagtcacctagttttgcagccatttttgtggcaatgacgctattgcagccgtgggcaatattagcaaaaggacctccgtgaatgagggctggagtatgttccaacgtctgtacaaggtttggtttaatcgcatcttttaaaagaagagtaagcgctccttgtgcacctaagtctgcaaccgttacaggctcattgtccatgttataagctaccacaatagacgctaagcgacgcttcaagtcttgtaaatctgacgctaagcagaaaatagccataatttctgatgccaccgtaatatcaaatccatcttctcgaggaacaccctgcatcggaccacctaatccaatgacgacctgacgcaacgcgcggtcgtttaaatctaccactcgtttccacgtgattttacgtgtatcaatacgcaattcattgccttgatgtatatggttatctaaaatagctgccagcgcgttgttagctgttgtgatggcatgcaggtctccagtaaagtgtaagttaatatcctccattggaagcacttgagcataaccgcctccagcggcacctcctttaatccccattaccggaccaagagatggttcacgcatagcgacaatcgcttttttacctaatctatgtaatgcctgagctaagccaaccgtcactgtcgacttcccttctcctgctggagttggattaatagctgtaactaaaatcactttcccatcttgttttgtgtgtaaacgttccataacggacaaagaaagcttggctttataatgtccgtacggctctagctcgtcctctaaaatatccagctgttcggcaatctctttaatcggtttaatcgttgcctcttgtgcaatttgcaaatcactttttatttgcttcttagttgtcatataaaaaccccttttctgctgagaattctttttaaacacttcatcaaaaaaggataaaatccattttctgggggagatatgaagtttaataaatacaggaacgactgcgctataaattttactaagttgcagtcaagctaaaaaagcatagcaacgctccagtttaaccttattgtaccatttcattttagccattacgcatattaatgctcttttttttcaaaattcaattgcttaatattctgtatattcctataatagtatattgtacataaatgttgaacctcatcttcacgtgagaaagaacatttatacgcgtcattacttcgaaatcgaataggaggaatttttattgcctattaatattccacgtgatcttccggcaaaagaaattttagaaaaagagagaattttcatcatggacgacgtgcgcgcggtgaaccaggaaattcgcccgcttaatattgttatcctaaacttaatgccggaaaaagaaaaagctgaaactcaattattacgtttactcggaaattcaccgctgcaagtgcatattacacttctttacacggcaagccataaagcaaagacgacgagtagaaatcacctagatcagttttataaaacgtttgaacaaattaaagagcgaaaatatgacggaatgattattacaggagcacctgtagaacatataccatttgaagaagtaaactactggaaagaacttcaagaaattatgaattggtgtaaaacaaatgtgacttctacccttcatatctgttggggagctcaagccggactttatcatcactttggcattgacaagcgacctctttctgataaatgcacgggtgtatttacacatgttgtatcgagtgaagaaccgattaagctgctgcgaggatttgatgatgtcttttattctcctcattcccgtcacactgatgtcgacatgaatgaagtaaaaaatcatcctgaccttgagcttctttcctactctgaagaagctggtgtttatatggctatgtctaaagacgaaaagtttattttcattacagggcacccagagtacgacgttcaaacactgcaagaagaatttcttcgagatacagaaaaagggctagagccgaagcttccggaacactatttcccaaacaatgatcccgacaagaaccccttaaaaacatggcgctctcatgccaacctgctgtttatgaattggttgaactattatgtttaccaagagactccatatctgtgggaatgaaagaaccgagcggccgtatttcaaacataaaaaacgacaagtccttatatggatttgtcgtttttgcatttattgtatttcttttttctaaagtctccctttcttttttaattattatttagaacatagttttatcaaataaataaaacacaatcttctaaaagattgtgttttacagttctttaatatattcaatgaccgaatctggaaattcgtttcgaattccgcaattcccacaataaaatccgctatattcgtctgtcgcaacgtactgtcttaaaagaaacaatgttaacctgtttgggagaccgcattctgtgcaaaacgccaggtatttgctgcgctgtctgtttgctgacatacgtttcatcctttcgattaactatagaaagcgttttcttatttatatggagctttcttattagtttatgacagcaattacggtctacctccaattattgtcgcgacgagaagggcggaataaacgcagaattaaattaattataagcacaatagctaaaatgttaattaacaacccaaaaatcccgcccagtgcgcccatatgaccaagcaaaccgccaaataacatccctgccaggccgccataaagcagtccacgggcgaatcctcctcgttttgaacgggtaacgcctcgatttacagttccatttctgcggtttgaaaaattagacctcggctcattttgtctaacgcttggctgtctattaaaggaccgtttccccgaacgatacgaccttgcacttacgttatagtcatcatgataggaaatatattcagctaagggagataaacttagcgaaaaaatcaatgctacggcaatcattatttttttcatctgctttttcctttcttcacctaatagtaactgtttattatagtacgctgtttcatgcatatcatacgttttgacacaaaagggaaattcagtttcatacaaaatttttaatcgggtatcataacgttatactttgccctagaaaggagcgtgcatgtatatgatacgaagaattagcatactgctttttacactgtgcttcttatttaatggagcccttcctgcactatgtaaagcggaacaagtaaaaaatgtagaagtgcgtgaccgtttgctttatcaaggtaataaccaactaaagcaaaccgccctaacatttgatgatggaccggatccgcgctttactccacatgtattggatcaattgaaaaagcatggtattaaagcaaccttttttcttattggggcaaaagctcacgaacatcctgagctggtgaaaagaatggtagctgaaggtcatgctgttgggattcatacctattggcaccccaatttactaaaggaatctactgaaaagtttcactgggaaattgccaaaactcaggctattattaaaaacattaccggttttgaaacacagctgtttcgtcctccatatggaaatttaacgcaagaaatgatcaacgagctgccaaatgaaaatgtctatgcgattaactggtcttctgattcattggactggaagcaaatcccagaaacagaaatcaccaaaaatgtatttaagaacatgcacgccggaacaattgttttgatgcacgacggcggccattggaccatggacctttctaacaccgcaaagtcgctggataccatcattcctagacttaagcaagaaggatatgattttgtgaccgtcccagaacttttgcacatcccttatccaaaaaattaagctccaaagagtttctgatttagaaactctttggagctttacgatttcccttgatagaaagtaaatatgcctctcctacaaaaagagcgtgtcaaaagatctaattcaaatccatctttaaactcaaaaatatgccttatttcttcaaaacgttatcatactaaagatacaaaaagaggcattctttttttgttccatcgctctacaatagagggaatttacggataacctctaaaataggttttaagttgcatgattaggagtaaatattactataactactctcatatttttagacaagctgcatatagataaaatgagagagtcgaacacattccacatatccctaaatttcttcttctcacaaaaaaattgacgaactttttttgtcaacaggtgcgtatagatatgatagaattcctatataatgacctggattcatttctaaacaaggagttttgactatgattaatgaacaagagacgttgttatttattaaagaacttggccgcttgttgaaagactatcaaaactgttcaaacgcctctgtaaaaagtgaaatatataaagatatcgtgttgttgagcaatgttatccagttagatcacgtgaacgtttcttacgcttagaaaatcctttttatttctttataaatttcagtttttctactataactacagaaaaggaagaagggagacgatttccatccatctcttttcttccttttctccttatcggttttttatggttatttagaacatagttttattaaaattattgtagagtttttcgagtgtcttcggtccaactattccatctacctgcagataaagtgcttgttgaaaagcttttaccgctttgaaagtggaagacccgaatataccgtctgcgcctccaaaaagagaataacctaagtgaataagcatacgctgaattaactgtacgtgatttcctcgatctccgtatttaattaacatgcttgaagcctttggcgtctattttttaggtacttttccacttcgaagctccgacaaagataaaccgaatgtatattgaaaatgaaggtaatcttttaagcttgtccaatctcctccccattccaacccaatcctttttcctatctctcccgctttgttccatctttgatcaatggtccagtcaacttttccgtcgttatcaagcagcgcaatgtcaaaagctagtccataattatgataagaatagccgcctttggcattagtcacaatacttcctggtgttgttcggccttgtgaatatagtttgtgctgatgctctatcgatctaaatccttcagtgatactaacaaatatgctttctttatatgcttgcccaatgagctcgtacgctttttcttgcactatttcatgtacatcttgtaacttattttctgctttttgtaacagcttgtctaatgataaatcactcatactccccactccttaactagatggcttctccttatatatacgtataagacgaactctaagggaggcatccagtatcagtttatacgggaagtagttaagttgtgcaacatgtagagctgctgttatttcagcacccagtggctgatagccttcgctactccgttattgacatttgtatctgtcacccagtccgctgcttcttttacagcttcctgagcatttcccatggcgattccacaccctgccgcttcaatcatagccatatcatttaagctgtctcccatagcaatgacttcatccattgaaatgcccaaacgttcacatacagtcatgatcccttttgctttgttaataccaagtgcattaatttctagattcgttaaactagagttgctaatttcaaaatctgaaatgcctgctatttgtttcagcacttcttctcgtaaagcatcatctggaatatcgtagccaaacttcagccattcctctgaggcaatatcttctggaaattcgtctctccatactttatccgtagtcacagcccaaaagttaagcttatgctcttgcgttaaattccacatcttctcgatgtaagaagcatcaattaactttcgttctacaagctctccagattcatcccaaatttcacttccgtttactgtaataaggtaagaagatagctgaagagactgcgcatattcacggcatgttaaaagagatcgccccgtgcttagcaccacatgaacaccctgttcttgggctttagcaatggcctcacgattttctttagaaatttcttgctgattgttcagcagcgttccatccatatctagtgcgatcagtttaaattctttcttttcatttgtttgcatctttctctctccttctcttcaatagtaggtatgacattacgctgagcatttgacttacactatgtaactcttattataactgtagcacaggagcatttcgctctgcatcagataagcgttaaaatgggcaattattctacggggaataattgaaggaaaacaaaatagctttgccgtaatttacatataacgcttttcatttttagttatttcaactagaattttggtaaaaggatgtgaatgctatgaatactattatttcaccagatgacttacatactgcattacagcaacccccacactccattgtgttgcttgactgccgatttacccttgggaattctgaggcaggcgcaaacgcttatcaaaatgagcacctcccggatgctcattatttggatttagaaaaagatctgtcttctgtggctactttgcacggaggaagacacccgctgcctgacgttcaaaagctagctcaaaagctcggcagcttaggaattactgctgattcaaaagtcgtcgtttatgatgaacagaacggaatgatggcttcaagagcatggtggctactgcgatatataggaattgaagacgtacaaattttaaatggaggttttaataactggaagcaatcgggatatgaaacaacgaagaacgtaccagaaggttctcctcaaacgtttgtacctttcgttcaacaagattggggacttgcaggagttgaatacgtaaaaaagaaccttcataaccctaatgttgttcttatcgactctcgtgaaaaaaggagatatctcggcttagaagaacccattgattttgtagcaggacatatcccaggggccattcattctttctggcaagatgtgttaacttcagaaggtttatggaaaacagataaagagtggaaggaaatgttttcagctattgattctcacgctgaaatcattgtatactgcggatcgggtgtatctgcttgcccgaacgttttagctttaaaatcagcaggttttccaaatgtaaaattatatgccggcagctggagcgattggattagctatcgtgacaatccaatcgagaaaaacagatagacaaagaaggctcagtctcaccaaaagtatagaggctgaaccttctctttttgtattcttcttattagccgcatgttatttactgagccttaacataaaatcatgaagccgctctaaggtaagcagattttgattacatgcttcgctatcttgacaaatataatttcctcgttgtgtaaatgtcccttgaacagttcctttgatttcagcagtgaacataccgacttcctcgtagctgtggcaaagcgtgcatattcctttctgattgataggtttaaacgttccttgaataccttttaacatctgggtatacggctcctgcgctacgataaactttctgtttgagcctttatcgatccagctaacataggaaatgctcgttagatcaatgctatcagcagaagggacttttaactttttcacttttggaaacaactttttcacgccagcttctgtaaaagatttaaatggaatcacgtaaggctttatcatttctaaaaacacctctgcttgctccttatttctaacttcagcaactgacagcagtaattcttcctgttcctcgctaagaacatcaaacacatttaatactttttcttttgcaagagcttttaaagcctgcagcacatcagaattgtttactgttccatgcccattgataaggatttgcgtttggcttttgataaagttatattgatcatttcttataaacgcttccacgttcttcactccttcttcatttaatcagctactttttactttaccgtacggattccttttatgaaatgtaaaaaataaatcagaaataaactatacctaaaaaagcgcgggcattcagttgccagcgcttgatttctatcgttgctttttatatacaatttttttgatggtttcggttgataaaaagtattcacgggctagttcctcaattgaagttccttttttaaacaaattcttaatccgttcgtttcgctcgtcaatcaactttcttccaccagagcaagttccccattttctttttgccttctgcggctttggaatataaatggtttctccttgaatgtatttttgaatttcactaatcagctcttcaggtaaaatatttgttgcttttacatacgtcatttctgccagctccttatgtggttttgcttatacaataaggggcaaagccgtatatattagaaatgagatatgcgcggttaggcgatgtctattactaaaccgtccatcccatgcaaagtatcgcctttctaatatcaggctttgcatgagacgctgcagtatccggtaaacatcttttatttaccatttattacacctccactttacatcgactgtaaaccaaacttgtataaaattacaattattggctcagattttattataagctatctataatcttgcacacaacaccttcttacttataaagatgacaccataaataaaacgaacgtgcagggagctcgctgttcctcctgcacgttcgttttatttttgttatgaacgcttctgctttttgttagctgaactgctttgaacaccttgttcagaagtggtcgtcccttgtccttctacatttggtgaacctagctctgattttgagcggtcttttttaattttactcatgtcactcacctccagtttgtagtgtaccctttgtacagctacatataaggagaggtgtgctgtttttattgtttcttgagcataaatagccatagaaacgttaaggcttgctttaattcatttgggagctgtccaatcagcttatctgtaacatttcgcttatatacaccttcgccatcgattacttcccatccattttcttttgcaagctgttcaaactcccaaggcatcatcgtattgcaaataacgtcttcaccatatagtctttgaaaactattggtacgaggctgagcagttggcccaagaatacctacacatgcatatcctcctgtttttacaactcggtgcaattccttcagagctaatcgcgggtgctccgtccattctagggcgttgattaccataaccccttctactgattcagaagacagcgggagcttcataatatcagcttgagcgaacgacacattttcacttttatgcagttcagatgctttttgaaccatttcttctgataaatcaagaccgattgctttatatccagaagcggctagaagagacgttccaaacccatcaccacagccgacgtctgctagcaaagcgccttttttaagatgtttttgaataaatggaataactgttttccgacttccgtttttccacatttcttcacttcggctattccaaaatgatactttttggttccactcgtcttgagcttgatcatgccaattaaatgttgtcattttttatcccctttgcactcttttctttaccttatcactttttgcaatgaataaaaacgactatttcagcaaccatatagatgtaaaggaaggtgtttatttgtatgaaagaacgtttcgttgcggtacgtaaaaatgcagacggtgacctgctagaatttcaaactgcttcaggagctgttttaacctatgaagaagcgttaaagaaagtagaagcgggagacgttgagcatgtgagtacctttgtagggaaagacggcggtacgtatattcgcagtattcctgaccatgacaaaacaaataacttggatgcattgccatcattttaaaggagaatgaatatgacaaaaaagaataataaaggaagcgctaatcaaagtaacccaaaaacgcagcaccatcttgttgaaatgggtgaagagatttcaagcggggataattcaaagggaaacaaacgcaacaaagatcagtcaagtaaaacacaataaaaaaagccgtgctaagaagcacggctttttttattaatgttggcttggaagacctaatgttgaaaaatctcctgttgctacgcttgttccaactgaagcaacacctgctactaatgtaaacgctaatgccataccgactaatacttttttcataattatttcctcctctttctttgatttgactctagtgtatcacaggataaaagtagatgaattcctttctatcagcatttatccccttaaaaccacggatttcctccattttgatagaaatttctcaaaaattataatgataggaatattttaaacaaatagagcttcaagttctttttctactagcttgacgaatcgctcatttcgttgcagggtgaaaatggtcatagacttttccatatattctttaccttgttcaattttacctaatttgattaagctctctcctgcttggtaatgaagttctccaaataaatacattgattcattactaatgcacaaatcgattcctcggttgctatatattaatgattcatcatagttactcatatctccaagcgttttggcaagtgcatttaaaattctaatttttatattttcgtcttttgtttggggcagctcatttaagcttttgagtgctgtttgatatgtatctagagcctgttcatactctttctcttcataaagaataattccaatgctatttaaaatttcaatttctctttctttataaaacgttgccgattgcttagtaagctcgatcgcttggtacattttagacagcgcatcttctttattatgatgaatgtaatacacgcaaataccttcgtgccacattaaaaattgcttgttcagcgggttttgaaacagaggactttctttttcttttacaatgatattatgaatagcatcataatctctctgacgaatatattgacgaattaacgattgaaccgcatctacgtaatcaagtcgaggtgattctacactatcaaaaaagtagttaacatctacgccaaggcgcttagaaattttatagagggtaatgcttgatggatattcttcaccgttttcaattttgctgatttgcgcttgtgtacaaatgtctcttgataattcttgttgtgtcaaccctgccattttgcgaaggtctctcataacactcccaattctatactctctcatctcttttctcacccttactttcacataatatattctctctataaacatatagtgattttatttagatagtcaactgtaaacacgttaaaaatttatacaatgtttcgaaattgaccattccctataatagcaaattaatctataagagtaaaatagtgtatgatttctcttctctaaaaaatcccaccaaaaaatgagattgagacataacgaaatcaatccaatctacagacgaacaaataggatgaataagctaatatagatcactttgttacaccgctaaaaacacctgcatacatgaaacctatgttcaccataacagcaaaaaatccgaactataaatcgttcggatcttccttcaactaacatatttttgttccatcctcattcacatttttatttataaacaggatatccaacaaatttaaagtctttgccgattgacgtcacagaaagacgctccacgtccactgcgtcccacattttctctacgccttttccttctaggaaagtaggagcttcttttcctcctgaaagctttggagccatatacagcaccaatttatcaattaaacgattttccaggaatgcggcattcacttcgccccctccttcaattaaaagagacgacacaaatttctcacctagtatagaaagcatatcttcaagatttactttgtcctcaccgcttgtaacaaatacttcaacgccttgcttttcgagctgttcttttttttcttttgaatagccctgacttgtaaatacccacgttggagctaaagaatccgttgctagcttagattcaagcggcatgcgcagctttgaatccatcacaatacgaattgggctgcggccgccttcaatgcgagttgtcagctcggggttgtccttaatgaccgtgttcacccctactaagatacccgctgtttcgttacgcagctgatgtacatccaaacgagcttcctcagaagtaatccacttgctgtgagaagaagcagttgctattttaccgtctaacgtaatcgctgactttaatgaaacaaacggcttcttcgttacaatatacttattgaagacctcattcatttgacgtgactcttcttcacatacacctgttatgacctcaatgcctgcggtttctaaaattttaactccattacctgctactaaaggattggggtctaaagttgctatgaccactttttttacaccggattcaactagcgcttcagcacaaggacctgtacgtccgtggtgtgaacaaggctctagcgttacgtaagcagtccctccttttgcttgttcgccagccattcgcagcgcgtgaatttcagcgtgcggttcgccagcttttaaatgcgtaccaattccaacgattcgattatcgtttacaataaccgatcctacaagcggatttggctctgtttgtccttttgttgcttttgcgttttgtaaagctatattcatataaaattcgtgattgatcaaagaagaacctcctcttttaaatgtcctgaacgtttaactttagtatccaaatacttttcattaaactgcgatacatctccccaaagtggaacgcgccctgataaaagtgcgccgtttttctcaagcgcgattagctttttgggattattggtaatcagcgtaaccggtttttggcgcagcacttttaacacgctgatggcatcactatagctgcgagtatcatcttcaaatcctaacccttcattcgcttctaccgtatcaaatccgttttcttgaagaacatatgccattgctttgctgaataggccaatgccgcgtccttcatgatttgctaaataaaatagcgctccgctcccattttcgacgatcattttcattgattgttttaattgaaaaccgcagtcgcagcgtttgcttccgaatatatctcccgtatggcagatactgtgcatacgaatgagtgcctcatgcgattcttgaaaatctccgtacacaagaacactagattgctgcatgtcagctaaattagctccttgcattttttcaataagctcttccgtacttaaagatccttcttttacattatcagaacgcaaccatgaataccaactaaatacttgtgtctcaccatccagattcacaggaagcgtaataggtcctactatataaataaaatggtcttcattttttactacgttaattttatcttttaaaattgaaacaactttttggttaatcacagtcatttcctcctcttacgtatcttctcacttatctaccattttcaagttttgctcaatttctcacatgagcaactgttttttagcacttcacaacatttatttttttaaattggtttatcagcttactaaaagtaagtaggtt

SEQ ID NO: 49 - DNA, 32140 bp, Priestia aryabhattai
  source 1..32140: mol_type = genomic DNA
ttactaaactttgaagaagtaagacgtcgaagtataaaagtatggatgtcaatacctcaagataagctagactggcgccctgatccagaagcaatgtcatgtagggagatgatacatcatgttcttgaaggagaatacctttatcatcaaatgttagaaaaaccccttaacctttctctaacagaggagcataatccttataagccaataacatttagttctgttgaagaagcattaaagtttgctcaaccatacagggaaaaatttatagattttttaggactcattgatgaaaagcagctcacagaggtaaaaatagatcgttcggaaatgggatatgttcgagagttgggggacatgttgttaagagttgcttatcatgaatcggtacatacaggacaacttttagattatttaagaactgctaaagttccacgtcctttaatatgggattaattttctgattaatctcccgttgtttcatttttatctgctataaagaaagttcatacaaagccacaaagttgtttacttaaagggggaggaaccatcgtgaataatgaaaagcagttacttaaattcctaacgtttcaacaacttcacaaaagaccctatacttttgttttgcctaatgcttgggatgttattagtgctaaaatttttgagaaaaatgggtttccagctattgctacaactagtgctggcatagcaatgtctttaggatataaagacggagaaaaaattccttttgatgaaatgctagaagttgttaagagaattattaattcggtcgatgttcctgttagtgtggacctagagtctggctatggagtgtctactaacgaaatagtaaataatgctaagcaaatcattctcgcaggagggattggtataaatttggaggatggaacaggggatttagatagtcctgttttggatatgtcattgcaagtggaaaggatatctgaaattagattactatccaaatcgctaaaagccccattatttattaatgcacgcactgatttatattggttaaatataggtgaactagatttaagacttcaagaagccattattagaggaaaagcatatcaaaaggctggagctgattgtatttttattcctgggctatatgacatagaatccattaaaaaagttcgacaagaaatctcttgtcccattaatcttttgtctgagccaaacttaccttctattaatacattgtcacaagttggtattgaaagaataagtactggatccgccccttttagagcaactgctacattattgcaaagaattactgaagacatcctttatgataataattttcaacgattaatgaatgataatatgagttataatgcaataacggaactaattgagacccctaaataaaatttatcaattttatttagcttgcctttataaaactgataggactactgaaatatacagtagttcttttgctgtttgaactatatttaaacagttaccataaaacacattatcggaaaccacataaaaagaatcacttccttttatgcagctttttatacatccttgatataaggggatttccttggataagtgggtaggatttgatgtataaagcgagcacgttttatgcatatggctaatcaaaaaaatatagtatttatagaaaaatgtgttattatttatttactaatatttttctacctcatgacaaatattagctgtaaaaagcaacctcgcttgccaattgtcgaggttgctttttattttgttaacgataataaatactttgacctcttataatagatttaaataccttgtctgttaaaggataagtttttagttactgtaatggattttctaggaatccaaaaaactaaacaataaaaaatcaaatgaaagtcaaaaaagactgcctgatttggcagtcctttttcttttccttatgaaaagtgacgattaatagtatcttccactcttgttaacatacctttataagcttcttcctcaaggtatccaatgcttccaaatagtaaatgttctaccgtttcgattccagtaaaatcaaatattccaacatcagatgttactttcaatcctgcagtcatgccaatttcatcgtagacatcagtaggggtaccatgggtattaataattaaaccttttttacctttcaagagtttaacaatcccttctgcaccaggcatataagcgaaaccataggcaaatactcgatctacatatcctttaagaatagccggaagtcccgtccaccaaataggataaataaatgttatcgcatctgcttcagaaataaattcttgttctgttttgatgtcattaggtgtctttcctgccttcatagcttccgtatcttctggttttaaaacaggttgaaaattaagttcatataaatcacgcacgataacttcgtgtccgtttttctttaacgtattaacggttgtatctaaaattgaatgatttaaactctctggattaggatgagcgtaaacaatcagatgtttcatagttaataacctccgtgtatttaatttttatttgattactaaagataatttaatattgagtgaatttctttggaaactgcttcacaactcccgtagagattgtatctgccattaagatgatatgtgagagtccttcatcaatcgcaccaattcttgcctcccaatcctttgctaagctcgcagataaatcatttgtcaccaattttagatgcatatacagtaattttttcagatcctcattttttaaataagggttagcttggctcaggaacgctgctatatcatcagcatttcgataccattctttgtttagctgattcaccaaggctttatttccggctttctctccgtatactggcttcacagcattcccaatatcctcttggtttttaagcaatcttgccaatacctgcttttgatcttctgatcctgctgttgttgcacttgtaatataattgcttgtccacagtacatggtccatccaaagtcttctgaattcattttcaaactttacctcagattggctaatacgatgttcttgagcttcagcaacagtactaatgggtccagccaacatgttcagtggaaataacaaaataaatcctaccattaatattctcttcataaaaactactccttccaaattaagtgattatcgcccttattatttgtataggagattttttacattctttaaaatgttactttccaacattaattctttatagagtaccgccccatgcttaatcagctaacacttatgaaaggttacagaggatatctttctttaagattatagtagaaaaattcaaatcctaggcccttgtatttatctattcataaatggtattgcttgtctcatatgcttatataaaattctagaagagaaaagaggtgaaaaatgtgaagcatatgctgatggtatgtaatcaacatgtgaaggatggacttgtacgccttgaaattccccatgtaaaaaagattcactactctaaacacacctgttctttttgtaataaaaaggcagaaataaaaatttattattccatcgctcaaaaatatagtaaaaccaattctatagtatgaagagcctataatccggcctttttttagcaaaaataacgctgcaatactggttctacatttggtgatcttttactaatgtttagggttgaaaatcaaagaggactaattaatatattttctttttagacagaatttcccttcatctaaataatatattggatagaaaaatacgttaaaaaagctcaagtctgaaaagatttgagcttttttatgtgagcctaagcatgtccagacataaagcagaataacttagaatgaaactattttacaattgtaggaggagtaataatgactaatgcatttgttgcacaatccttagatgaaattcgtttttggtcaagaattatgaaggaacactcattgtttcttcgattaggtttcaggtgtgaggatacacaattaattaatgaagcgaatcaattttatcatttgtttgaagatattgaacaacggtctcattcctttactcatcaaacagacccggagcaaatgaaaagattcaattcagaagtccaacaagcagccacaggtatatttgcttttaagagaaaagttttaggcttaatcctgacctgtaaactaccgggttcaaataactttcctcttttggttgatcatactagtagagaagccaactattttagaaaacgattaattgaattaaacgaagggaaattgaagccactcgctgattccattatcaaggaaaatgtcttctttttaagaattatggctgatcatgcccagtttataggtcatcttcttgatccatccgaaagaaaacttgttgatatggccagaaacttcagtcatgattttgatcaattaatttttcaagccagagatttagaatctatgaaaccacaatctcaaacggttcctcttttagatcaatttcttgatcagaatcgtgtttctgtagcttcccttcgggactttaaaaaaacagccagagatttaattgaggaatgtaaaattaaaagcattatccatcctcttctggctgatcatgtttttcgagaagctgaaaggttccttcatattatcgatatgtttgaacagagtcttcaagcacataaataatacattgatgttaaatttaaactttcttctttatgaatcttaatgatttaacttcaaagggcttcggattttaatgaagccttttgttgttatctttcgaagtgtcttataaccatagaattacttttaaatatacaggaaattaaagggaggaccagcaagtgacgtctacttttataggaatagactctaatcaacaaaataattatcttaatgcgatcgacgctgccttagaaaaaggaatggctgccaaagaggtagcctgttcaattacaactggtttccgaagagttccttccatgcgggttgccccaggactgaatacgtatcatgcttctgtagctgatatcggctatgggtttgatgcagtacaaggaacgattagtcgtatccgtcaaggagaatctattgaacttgcaaaggaaatgcttgtgtttgatcttgacacactgcgtattagtgaaaagcaattaaggcctaattttgaacttgctgtaaaaagagccaagcctgatgctttttacttaattgaacaaagccggtatctgcatggtcaaatctttgaagcaattaaagagtcaattaggcttgggcgaactctgctgggtcccgagtgggaaactatacgagcgaatatagaagaaattcaggcaataccacgtctttagaggagaggaagatagaaaaatgtttcctaacgcagagcttttaaatatgagtgtagatcaacagcgatacttattggactggtggaacacaacagagtcagccaaatcgattgtgagacgtttagtttcattggtaagtgaactaaggttacaccctgaatcaagccacgcagatggaatgattcttttctatagggctgtttcagaagtttcatacggatatgcaggtacacgaggatgtatacgtagggcgtttaacgatgaatacggtgaatctctgagaaggaatatgaccatgtgccacgggtttgcccgtaagttttccgtagatacaaaagttcttcttgaacgagtagctaagcagattactggaccgaatgccctagaactaatacaacgtattcgagaggtattgaaagaaaatgatgtgatgttacacgagatggagataaaagctcatgctttctacgaaaaggcaagtcactaaagaatgtaggtttaggtgagtgcatttcttaggttctattggggaattttggattttccacgcagaaataaattagttttttagatacattcaaaggatcgccagtataggtggtcttttttgttactgtctttaggtttatgggcgtatgagacacctcatactatacagcatttgagtaagggccatgataagtatttttataagtttataacccttgtaataaaatctatatatcttcttttccatcaccatataaaatgtaacaaattgttattgacgttacagttaaaaagaacttataatcttatagaaattatatttgataacgattttcattttcagttcgtgtaattaattgttaatttatttctttgggggagagggaaaataatgcaacatagggctagcctatacataattatttttacaattgcaatgatagcatttccatttcgtagttttgccgcaagtgctgaaagtgatttacaagatgcaaataaaaatattattgaagcgcttcaatctgcacaaagtggcaatgttgaaggagccaaaaaacaatacgaaacattttcatctacatggatgtcgattgaaagtggtataaaagaacagtctcaggatgcctatcgtgaaatagaagacgggatgggacagatacaatttgctttggctcagcaacctgtcaaaaaagagaatttagaaaattctctcaaaaatttaaagcaaaccaatgaaaagtttattgcaggaaaataccctcgtactacagcaaaaactgaagatgagggaacaaagcaggggaatgtagccgatttgattgtgttattaaatcagtcactttctaaattagatcataacgatgtgaatggtgcaaaagcagatattgagcagttccgcacctcctggttggatatagaaagcgtagtgttaacacagtcttctaaaatctatacaaacgctgagagagacatggtaacgtcgtatgcaatgctttcttctaagaaccctgatgtaaagggagctaaaaaaacaattgaaggaatgcgagattatctttctccacttgcatctaaaacaagttataacatgttagatgctacaacaatccttttacgtgaaggtttagaaggtttacttgttgtagtagcacttttaggttttttgaaaaaatctggtcatgcagataagagtaggtggatttggatcggtgttggctcaggcctgggagcaagtattatattaggtgttattgtaaatatgttgttttctgccggagcatttgggagtaataactttttaatcgctgggtggacgggagtcttcgcggcaatgatgcttctgtatatgagttattggcttcatagtaaatcaagtacggcagaatggcaacgatatattcagactcaaagtacgaaggctattgataaaggaagtctatggtcattagctattctttctttccttgctgttttccgggaaggaacagaaaccgtgttattctttattgggatggcttcatctattaaactgcctacgcttttaacgggaatagctattggaatagtattattggtggttctttcttacttaattttaaaagttggattgaagattccaatgcgtccatttttcttagtatccagtgttctaatgttttacttatgcttcaaatttgccggtatgggtattcacgggctacaacttgctggattattaccagctacacaagctccaatccctactatagatttctttgcgatttattcaacatgggagagtgtaattccacaaatcattttacttatagttgcagttgtcgcaatggtatggaataaaaaaaaggataaaaaagcaaaattacaacagacaaatcagggggaatcaaaacatgcgctctaaaaaacttatcgtaccaatcatcttagcaacgtcattaacattagcagcttgcggagcaaaagaagaaacaaagaaagaagctccaaaaacaacagaggaatcatcaaattcaaaagcagtttcgattgctgacggtgcaaaagacatgaaaaaagtacttgctgatatgaaaacacaacttacagcaaaagaagctacgaaagtaaaagagagtggagagaaattagaggagaaatgggaagtatttgaggattcagtaaaagataaaaatcccgatctatatgaaaaggtagaaacaccacttcatataattgaagcaggagcaaaggttgaacccctcgatacaaaaacgttagacaaagcagcaatagatttagacagtgtattaacagaagtacaaaatttaaaataaaacaatgaaaagagtgctttatctatggttaacatagaatagagggctctttttttaatttattaattgataaaagacaggataattagctcaccttgcattaaaaagatacaggaatatgttgaaaatcgtttttctcttctattgtttactctatgaaactttatttgcacaggattaattttatagaaaacctcaaaaaggttgctatagacccacatgaacttgctttgttaggataataaagaagtaaacgtggaggaaaaaacatggaacaaagatacaaagatttaaagatgggtgaaagaggagcaatcttaagtatttgtgtgtacatatgcttatctgctttaaaattatttattggatatacgaccaattcagaagccttaaaggctgatggtttgaataataccactgatatcattgcttcaatcgctgtactaattggccttagaatttcgcaaaaaccggctgatgaggatcacccctatggtcattggaaagccgagacagtttcctctttggtggcttcgtttattatggccattgtggggcttcaggttctttatgaagctgttatttctatacttgaacaaaaaacagaggctccagacttgattgcagcctggacaggtattttttgtgcagttgtcatgtattttgtttatcgctataatcgcaacttggctacaaagattaatagtcaatctgtaatggcggcagctaaagataatttgtcggatgcgtgggtaagtattggaacagccattggaattataggagcacaatttcatcttccttggttagattctgtaacggccgttattgtaggattccttatttgtaaaacagcgtgggacatttttagagaagcttctcatcatttaacagatggtttcgatgaacaacagttagaagagtacaaagaaaccattttaaatactccaggtgtcaaaggtgtaaaagatataaaagcaaggaattatggaagcagtcctgtagtagatgtttccattctcgtgaattctaccttaggagtaggcgctgctcatgatataacaactaaagtggagagtgcattagcagaagagcacaatgtagaggatgctaacgtacatgtggaaccaagctaaaaaataagcaaacatggcaattaaaacgagcatttaggggaaaggaattagtcatatggaattgggatataagaaaaatatacagcttgaagataaaaactcaaagtataaaagaagagataatgaggaagcaattgaattaattattttcattgtacttttaggtgtaacttttattctcaatgaatttttaaaatctttatagccctttttttatatgtgatcgttcgaaagaatatagtctgtatgacgaaaatatgttactatatgtctgcacatgcattttatagtaaaaagccacctgtcctgcaaatactgggtggctttttattttgttaacgataataattactttaacctcttaaaatagacttcaatatatcgtccgtaaaggtatacttttgcgaacttttgttttgaacagaaaacctatcattttttgcattcgtttaaatttgaaaatgaattacgaacgtcttatgaaatgcataaaatttcacgcacgtttttaatgtaataagaggaagagaaccataaaaggagtataaaatagaaaacagaagatttggatacatacgtgtgagcagtcgggattaaaatgaaggtcgtcaacttcaatcaatgcaagaagttggtatttctccccgtgatattttttagaaagagactcgttaataaaaagtatttggttaataaaaaaaggcttcctaaatagagaagtagttcacaggtgtaactacttccttatggttttatactagtcttttataatgatactactgtatgttattcattcttgattggttgaagatactcagttttgggtagtgaaagttgatgagatacgggagaagcaataatcaaagatgtattgactttaccataaaggcttaaacggtttgtaaaggcttctaactgttttatggatgaaaatgcagttttcataaaataactgtttattccggttatccggtgacattctaaaatatctttttcttctttgataatttcttcaaattgttgagtttttatttttaaatttgctatttgaataattgcttttacactttttccaattgcgtcaggcgagagaattaccgtaaaaccttgtattgtaccgtttttttctaaacgttgtagtctttttcttatgcttaatggacttagaagtaattttttagacaattcaatgacagtaattctactatcttcttgtataaattgcagtaagctacgatcaatcaaatccactttcatcaccccatcttcaaataaaattgttcttatattcctttatcaaaacactattagcatgaatctaaaaaggatacttgactatagatggttattatattaataaatcaatcattaaatccatttttaatcttaatggttagaaataaaccgaatttaagataataagttaaaaaattaaatagatgacttgtaatatcttaacagaaaatacttcaacgcaggacgatactatactataagtccaacatcatatacctaacatgtatcaaaggttcaacgaagcacttgtttcttattgtaactacaactcccacaacctccacaattcgcctgtagatttgttttactgcaatttatctttgtgccttcgagatgctgtaaaatatctgcaagaagatcattgacactatcactgacaatgtttttaccgttgactaatgcaaatggctgtattaaacattggccgcaataaagcaaacatttttcttctataatttccacatttgaaatttgttgcaatttctcttttacatcatagagctcttcttcaaaattacaagggcaaaattttacattatattccattttgttctctcctttagactaataatttgttgataggatttagaatgattttacaaatattttaaaaaaagatgcaagaatatacagcgacgtattcgtgctttagcacgttaaggaggaaacctttcacagaataaacgcttcaatgtaagcgcttgcttaacgagaaaactagttataatatttagattgttggaaatattatccccttatttgggaataaaactattcatctattaaaaaataggaggttgtttcaatgtctaaaaaagtattagaaacgaaaaaaacaaaaaaagaagaaatctttccggtgcaaagcatccaccatttagaactatatgtagggaatgcgaagcaagctgcttattattattcaaatgcctttggtttcacagttaaggcttaccgtggattagagacaggttgtcgggatcgtgtttcttatgtgcttgaacaaggagcaattcgtctagtggttacaggaagtcttgaggagactacagatattgctgcatttgtaaaactacatggtgagggaacaaaagacattgcattaaaagtttctgatattgaaaagacatataagggagcaattgagcgaggagcgattgccattcgagagccatggtctgaagaagatgagaatggaattgttaagaaagcgattattggtacgtatggggacactgttcatacattagtcgaaacagtaaattacaaaggaagttttttaccagggtatcaatcttatgaattagagactggtacatcttctacgggaattgttggcattgaccatatcgtaggaaacgtagaggtcatggatgagtggacaacttattacgaaaaagtatttggtttcaatgtacttaaacactttgatgatgaaaacatctcaacagagtattcagctcttatgtctaaagtaatgatgaatggaacagggcgtattaagtttccgattaatgagccggcggaaggaaaaagaaaatcacaaattcaagaatacctagacttttacaaaggcccaggtgttcagcatctagcactactaacaaacgatattattaaaacagttaaagcgttgaaagacaatggtgtagagtttcttgacacaccagctacttattatgaagaactaagtgaacgggtaggaaaaattgatgaagatctacaaaagcttcaagaacttagtattttagttgatcgtgatgatgaaggatatttacttcaaattttcacaaaacctattgtagatcgtccgactttgtttattgaaattattcaacgtaaaggtgctctaggatttggagatggaaattttaaagcattatttgaatccattgaacgtgaacaagaacgtcgagggaatatttaagctatagttaaagccaaatcaagatttggtgtttggtaaatatgaaaaagaaaggaggaatgcgacatgaatataaacagtatagctagaagtggtgttgagatgagcgagagctcaaaattgcaaactagtatccatgcttttttatcaaatctaattgattatgccgggttgtttccaccagctaatttatctctggaaacctcaataaaaaattacaagggatttcaaatttgtaaagattcatggatgctcggacggtttatcattcctatctcacaactaaatcaacttattccgtatgtatcaatgttttcaaaagaacgtccattaatcatctcagctttaggctccaggagtaataataagattgaatgcctaaatagcttacatgcggaccttgaaatagttaggtcttttcgtaatgaatataagaggaatatcaaaattgacatatgcgagattcctctcccgcctcatatacctgatcgtgctttattacaaactattacaaaagcgacagacaagagtaggctacaaaccttttgtgaagcgacaatacctttagatagggactgggaatctaagatacttgaaactctggatattattgctgcgcataataatgaaagcgatctcttactagggtttaaattacgcactggtggagttacagcaaaagcatttccaacttctcagcaaatagcaaccgtacttgtcggatgtcgtgatcgagatattcccgtgaagttcacagccggacttcatcatccaattcgtatgtatcgtgaagaagtgaatacacgaatgcatggtttcctcaatgtttttacagctgggatgctagctcatatcaaaaaactagatatagtatcaacagtgaagattcttgatgatgagaaatcaaagaatttcaagttcactgataaaggattacaatggcacgatttaaccgtcccagcttctgaaattataagattacgagaaaaattactttgttcatatggaagctgtagtttcgatgagccctgtgaagacttacgtacattaggaatttatagtatagaggaggagtggagatgatgaagtcatttatagaggtagatcctaaatctcatttccccattcaaaaccttccttacggtgtatttcgccccctcatgatgggggttccccgtattggagttgcgattggtgattatgtattagatctttccgtgctagacgatgagggatattttgatggtacggatgtagagggaaaaggagtttttgaacaagcttctcttaatgaatttatggctcttggaactaaagcatggcggaatgtaagaggacgtattcaacaattactacatgaagatgagtcaattttacgggataactatgcccttcgtaatattgcattaatccctcaaaaaaatgtcaaaatgcttttgcctgcacaaattggggattatacagatttttatgcttcaaaagagcatgcaactaatgtagggattatgtttaggggaaaggaaaatgccctaatgccgaattggactcacttgccagttgggtatcatggacgagctagttcagtagttcttagtgggactgatgtaaggcgtccacaaggacaaacgaaaccagcgaattcaaatgcacctttatttggtccgagttgtcaacttgattttgaattagagatgggatggtttattggtccaggtaatgaaagagggaaaaacattgccttagaaaatgctgaggaacaaatcttcggtcttgtactagtcaatgactggagcgctcgagatatccaatcatgggaatatcaaccacttggcccgttcttagctaagagctttgctacttcaatttctccttgggtggtgccacttgaagctctcgagccttttagagtagctggaccagagcaggagccagagccgttaccttatttacgtacaaataaacctggttcatttgatattcatttagaggtgaagcttaagggggaaggaatgaaaaattccaaaactgtctccacaagtaactttcgttatctttactggtccatggctcaacagattgctcaccatacagtagggggatgtaatttacgtcctggtgatttgcttgcttcaggaacaattagtgggcctgaaaaagagatgagaggaagtttattggaactaacatggcgtggaactgagccgatagaaatggaaaatggagaacaaagggtttggttagaagacggagatcagctaacgattacagggtggtgtcaaggagagggatatagaattggatttggggaagtgacaggacgagttctgccagctcttaaacaatcttatactttatctcacatttaactcgtaaagctcattcagtatgctccaagacagatgtgtgtgggaatgggattagagtcaactgatgggctttacaactaagtagaacttatgggtgaaagtggagaaaaaaggttggagaaatcactgtatcaatctgtagcaaaattacatagaacaggataggtgaaagcatggaagtacttgaacataaaatcatctcacggagagaattagaaggtcttgatgtttatagaccaggcaagcctattgaagaagtgaagcgagaattaggtcttaatcgcattattaaacttgcttcgaatgaaaatccattaggttattcaccaatggcaaaagaggccatgataaaagaaatggaaaagttaatgttttacccggaaggaatggctcctgttctggtaaaaaaaatagcgaaacaattaaaagttaaggaagagcaagtcataacagggaatgggtcggatgaaattcttcgtttgctcacacgcagctatatccgttctggagacgaggctatcatggcagacgtcacattccctcgttatgaaacgaatgtcatcatcgaaggggggagagcaattaaagtaccacttgtgaacggggtgcacgatcttggaggtatgctcgctgctattacggacaaaacgcgcatgatttttgtgtgtaacccaaacaatcctactggaacgattgttggaaagagggaactgacatcatttattgatcaagttcctaaccatatactgcttgttgttgatgaagcttattttgaatatgtgacagcagaagaccacttggatacggtgccacttattcattctcattcaaacttgattgtcttacgtactttttcaaaaatttatggattggctgctctacgtattggttatggagtaatgcattcaaattttgtaaaggaaattattaaggtaaaggaaccctttaacactaatcgtatggcacaaattgcagccactacctctttggcagatttagagtttgttagcaagtgtaaaaaagagaatgagaaaggaaggttatatatttcagcagaggtcgaaaaaatgggtctcagctattttccatcccaaggtaattttataatgataaggctaaattcatctggtgataatgtgtttcaatcgttactgcataaaggaattatcgttcgttctggaggggtattgggactcccagacacaattcgtgtatcaatcggaacaaaagaagaaaatgaagcatttatccaagcacttcgcgaagtaatacaataagagaggagcagtttttatgccgcattatgtaaagatggggaaggttcctgctaaacgccatacacaattccggaaagaagacgggagcttacactatgagcaagttatgggaacgaaaggtttttcgggtattcaatcactcatttatcatatcaaccccccaacacaagtaagagaggctaaaaaaatcacagaaatccattatgagattgaagaaaaagaggcacttaaacatcgccactttcacacttgggaaaccgaagcaagaggagatttccttgaagcaagaaaaatctttatggttaatgatgatgtagccattggagttgcccggccaacacaacaaatgtcatatttttatcgtaatggggaaggagatgaaatgctgtatgtgcatgagggaaaaggaaaaatagagagtatctttggtgaattgtcttttcttccaggtgattacctagttattcctatcggtactacatatagagtagttctagaaacagaacaggcacgttttctcattgtggaatcaaactcagcaatcatgcctccaaaacgctatcgtaatgagcatggtcaacttctagagcactctccctattgtgagcgtgatttaagaacaccagaaagactagagccaaaagatgaacgaggagaattcgaggttcgtgtgcgagctcaaggtatgttgacttcttatttatttgattttcatccattagacgctgtaggttgggatggatatttgtttccttatgcttttagtattcatgatttcgaaccaattacaggtagaattcatcagccaccgccagttcaccaaacatttgaagctcataactatgtaatttgttcatttgtgccacgattatatgattatcatccagaggctgttccggctccttatgtgcacagcaatgtagaaagtgatgaagtactatactatgtggatggagagtttatgagtaggcgtggaattgaagagggatctattactcttcatccaagtgggctgccacatggtccacacccagggaaaatggaagaaagcatcgggaaaaaagaaacacgagaactagctgttatgattgatacattccgaccgcttcatgtcgttaagcaagcgcatcgttacgaagattcttcttacatgcagagctggtataaatagaaaaatatacttggttaagttttatgggggatatcatagcttttatgctttttgtaccgggcgttatttaaacgcccagctcccttttatttaatcactattaaagataaattgaagcatgctattaaaatttttaaagatgagtattcatgaaaacagaaaagtggtatgggaataatctgatagatagaataataaaatttttcttttttaaattattaaggtcattaatatgcttattctagaagaagtgcaaatcataaaacaaatattccatttttgaggggagaacctacatggatttatttcgaaaaaagtcaatttctcatatgttggccagtgttcaagcaacggataaatctctgaacaaagtacttggagctaaagatctaacaatgatggggattggctgcattattggcacaggaatttttgttttgacaggagtagccgccgcagaacacgcaggacccgctcttgtgctttcgtttatcttttcaggacttgcctgtatatttgctgcgctatgttattcagagtttgcttcttctatccctatttctggtagcgcttacacttacagttatgttacttttggtgaaatgatggcttggattcttggctgggcattactgttggaatatggacttgcagcttcagcagttgctagtggctggtcaggttattttcaaggcttattaagtgggttggagttgaaattaccacttgctataacaagtgcttacgatcctggaaaaggaacctttattgatgttccagctattactgctgttttagttattacctttctgctctctcgtggtttacgtgaatctacacgtgcaaataatatcatggttgtgattaagattgctgttgttcttttattcatcgtcatcggaatatggtatgtaaaaccaggaaactggacaccatttatgccatttggcttctctggggtaacagcaggtgctgcatctgtcttttttgcttaccttggctttgattctatagcttctgcagccgaagaagtaaaaaatcctcaacgcaatatgcctatcgggattatttcttcccttactatatgtacgattttatatattattgtttcctttattctaacaggcattgttccctttactgaattaaatgtgaaaaacccggtagcttttgctttaagctatattcaccaagactgggtagcaggctttatttcggtaggagctttgacgggaatgactacagtgttacttgtacttttatacgcacaaacacgtttgttttttgctatgagtcgggatggcttattgcctaaaacaatgtctaaagtcgattcagttaagaaagcacctattataaatacgtggattacaggagtcttagttgcaatttttgttggattcattcctttacatagattagctgaactagttaatatcggaacactctttgcgtacttggttgtttcggtaggcgtattggttttgcgtaaaacacaacctgaactaccacgcgctttcaaggtcccatttgttccgtttatccctattatttctatgttattttgtggctaccttatgtttaatttaccgatgaccacttggattggattcggaatctggttggtgattggtcttattgtttactttacatttggttacagaaatagtgaattaggaaagagggaaaaaaatttaaaagctgatatagaaatagataagagagagattctataagccttctacatgcacttatgtaatgaatatattcaagttaattaaaaaagtctaccttaatacatgtaatcctctattcattaaatgtcttaggacaaacaattttgtgtgatagaatctgtttaatcaaacattttattataactaaggctaaaagggatgcctattggcatctttttttagatggaaatttttttattcaaagaacctgtaatccatttcttccttttctattgtctcttaatgtaaagatccccatttgatacattttgttacttctccttaaataataaataggatttttgaatttaatttctcaaataaccaataataccaacaaagattcctattgcaagcgagatgggaacagtggctattcccccataagcaactgcaaatcctaattcgtctgcaactgatggatcagttatgtgatttaggaggtcataaagcatagtacaaacgaggaagatatcatgcgtcacgatagaggaatgaaaaaatggagagcgttcgcaagcatgccagagcaatatataggattacaggaagtcataaacaaacaactagaagtacctaaacctgatctaacagaagagcaaatggaacaaatcaatttcaccttgattgaatccttgcatacaaataaacaagtataccgcacatatatgtaacaaaaacgagatgcaaacgattatgcatcccgtcatgtgaagaagaaaaaagtagcttttaatgcagcatatgatctttaaggaacacctcatttacgtaattccattgcttaatgaaacaataacttgaaaaagtatattctctttaacaaaaacctcatttaagcattgaactaaaaaaatatacaatgtgaacgaaaccgttcttgctctgggacaaacacctcatttgtatagttataaatgaatattattgtctacccattatatatattcttactacgttcatgactaccatccccttatgaatcaaacatacatcgatttacaataaggttttctgaaatatgcctgctgtagacacctcatcccaaatgtaagaagctttgtaattaataacttgtttccttcttccctatatagaatatcccaatagctcatttataattcagtaaagctaacaggggttttttggattacatatacccttcatttataaggtaagttaaacgatgaagtcttattatgaataactataataaacggagatatgtatgtatctattcattttatttgatgtgctcgagcatcgaaaagctacgccactcatgccgtatcataagtttttgatggggaaagatgaataggtgaaatttgttaaagttattgttttccttatttgctaccaatcctattatatgttacattacagataacttatttttgttcggtatattgataaaagaaaaaacccttattagaagtttttatcttgaaatagtatgtttgggcaagattagtaatacatttgtggagtattccacagcaggaggcaacactatgacacaaggtacagtaaaatggtttaatgcagacaaaggtttcggtttcatcgaaatcgaaggcggagacgatgtattcgttcatttcagtgctattcaaggtgaaggtttcaaatcattagaagaaggtcaaaaagttacttttgatatcgagcaaggtcaacgcggagcacaagctgctaacgttcacaaagcataatcaaaagtaatcaaaaaaagactcctttccaggagtctttttttagttttataattagaacaccgtattgtttcgattttcaatcatttgttttacgatggcttcatgagactctaagatctctcgtgttgttaattgatgaagttttgcatggcgagagaaatttgcttcactataccattgatggtatattagctcctcttataggagcttttgtgattgaagtgtgttctttctgtgtaggtggatgtaaggattctatagttggagcaatttcttgggtatacgcgttgtatataccatcaccatcactaatttcttctttatttatgcaccttgcgcattaatcttttcgcttgatggattctagatttaactgtggatagaggaatatgtaatcgagtcgctatttcattgtatgataaatcatcaaaataaaaatacataattactttactatatttaagaggtaaagagtgtatccattgatatatgtcttctctatcccatacacctaactcatcttcttcatagtagcgtatagagtctcgttgtacgtgtgccagtatctctatcttatccatacacgttacatttcgattgtagtatcttctgagaaaatcaagactttgattaacagtcacacgatataaccaagcataggtagactgttcactgtttgctcctctttccatcaatcgaacgtaatactttatccatacttgctgaacaatatcttctgctgcgtaaatatcttttacataggataaggcaattttaataagttgccaatcatattttagtattacattattcagtaattcttcatgttcaaaatctttcattgccaatcatccaaccttattaaagtaaccattagttgttaattatctatttaagctgtcagctaaataaagctatggtatatatcatataaattttacatattcgtagtaataaaaacctagtactattatagtttaaaaatggtaattcgtcttcttatcagcttatgtataaaagctaccacgtcagatataacgcatatgtaactagatctgtatgtctatggataattggcataaaaatgctgtttttttccgtaataggtatctatctatacattttcttttacaatttacactactaacccttattatggaattaaactcaaaataaggtgggagatgcttgtatgagagctaagattgagaaagcgaaccatgtagtgatgtttgaaacagctggtgagttttatgcacatgaagtgactcaaggtcctaaagtgggtttctttgcttgcccctcttgtggagtgaaagtttatcataaacaagatcatttcttttcacgtgaacatgcgcgtacgtgtacttacgtacaagagcaatctaagaaaaagttctaatccttgtctccaaaagcatagtttataagattttaattggttaatttatacatttatagtataatatcgaagttgagcttgtgaacatataaaaggagaggtaggatgaagggactaagtacattaagaaagatagatgccttgggacgtatagtgcttcccattgacctaagaaaaggaatggagataggtaaagacgattcagtagaaatcttattggaagatgatcatatagaaataaaaaaatacgaagaatataacaaatgtgtgattacaggtgagataacgcctcaaaaccgtaaatatgcaaataacatagttttaagtccgttaggtgcaaaaattttatttaatgaaataaaagataagaaaaaaacctttgaatcgtaaattcaaaggttttttaggtcgaactattttttatgctgtatactttctaaccagttttgtacagaagaccctaagctagttgctcctactgttaattcatccataatataagaaattaaattgtgtagactgtactcttctttataagggttatttttattgataaattttaacacctcttttaattcctttattctcccttgatccaattcttcttctaaatggcgagtcatgtattcatcaacaaaatcagaattcctgatgcttgcttcaattaagaaagatgctgctaatgcgggggaacaatctaaagcataagctaaacgtttcagaacatcgtacgtttctccatgtccatcttttaaacgagtagaaacacgttctttttctatgtttttatataagtgtctaattggctctttggacatatcgcccatatacacagtgctgccaaaactaaatcctcttctaaaataatttgataaatagtccatcacttttgaagaagcaagacctgatatacaaattgactcaactacactttttacaggtgtattcgtaatgtaagacaatcgataaatacattctttaagatcaattggaagtgacggttttacatctcgttttttgtcacttcgaatttttcttttcttctcttctactctcacataatcactcctaaaatctaaaattatctctaggacaatgactttttgtacatacctaaaacatgtatatggcaggggagggaggagcatgtatattttttaagatattggaaaaaacttataatactagatcatgagaggagtcttttgtatgaaaatgacgaaagaagaagcacaagaaattgcaaaaaaaataaaagaaaactccaataagtacggattgccagtgaaaaaaaaaaacgctagtgcaacttaaaagaggatatataagaaaaagtcttcaccttaataaaaaatagaaggcttatatttttctactatagtacgcaataacatttattacacagggtaatggagatacaataaatgtagggtaaatcttataaaaagaaataaatgacctctttgatattacaaacgccataacttcaaattagatgtgctgataggaagaaagtaaaaaagggacttcctgataaaattaatttatcaggaagtcccttttttaactatggttattggcgacgtaatttatcaatttcttctagtgtaaggtttgtaaattcagcgattgtttggttatctaaacctttttggatcatacttaaagctacttttatgatccctttcttttcgcctatttcttcacctatctgttttcccttttcttccccaagtttttcagctctttttaacgctgacttttcatctaataatgcttttcttcttgcttcatatgctaatatcacttctggatcttggctaacacgttcccattcatccatcgctttctttaatacttgatcttcttgcatcgcaatctcctccaatacctgagtgatttcttcatcttcggatgcttcaagtaataataaccatcgcacaagttgatcttctcctggatctacctctcggttacgccatttaattaataacttgggtagttccataaaatgaatttctagcatatccgttaagagtaatttctgctctcgctcatataactgaaaggtggagtgataatcatgaatatgagataaataacggaagttaacaatgttaatggtaatcgttttacaaagctctccgtagtccatgccttccttcatttgactactgtacattttagaccagtaattgagtgttcgtttttccatatcatgtttgttattaagctaaatttcaatattgacacggcttccatcctctaactgtgcatgtacatctaaaatagagcgtttatcttcttggttttctttattaaaatgcagatctagtaactgcaccgtctgaatttttttatcatctggaaaatggagtgccgcgttcaaaaaagcagctaaaatagattcatttccatgtgtgccaaatagtgatttaaatgcaaagtcgacacgcaaatctaatcattttgtcataatctcctccatcatttccatgtttgttattagtataccatgactttaccgattccttctatctaactctttaggagcaaattgagtatcaataagatattttattaatgttcctgagacaaagaagtatgaagtggtatttaaacaaatagaaatactcgtgctgattgctattaccgataaataaactgctcatgacattattcttttagtttgagcacgttctttatacatataggaatacattaaaagccaataaactactgaaagcaaaaaagctactagtatgcctagtagcttttcgattaaaaatcgctatattcctctaaatcatcatcatctagagagccagatacctgctctaaatctgcaattttaccttctttgaaggtttgacttcccaaaggtttctcttctatatcctcttgttttcccacgaacccgttggactgggctaattgctttatctccagtagttgggaattgatatgctcgagaagatcttctgttttatgccctaattctacttggtcggtagatgaagggtgaatatctcgaacaattagagatgaaatatagtctcctaattttcgagactttgcgtattttgcaagtacgtcgtagacttcatcactcaactggttagttttaatcgtaaaggcgttttgacgctctgacatggttatcacctacgctgttaggatttaacggctttcttctctgcttgttttttttgaaggtacccgatgcttcggatttctaagccaaataagttcaagtgacggctatcttccggtactttatgatatcgctccgtacgttcttcgccaatcttttcactcatgctagtcataatagctacttctagtgtcggagcaacgccaccactatatatgtatttccggattttatttgccggtggtggggccacatcatttaacttcgctagtaaaatctccacgtactctttcaaagaagatgtaatttgagctgttaaatcaatggatgcgcctgtgttttcattttttaactcgaatttttgtttactgtagttatctaaaataaattgatcaaaagcacgtaaatccgtaaacagttcagggaacttctctttgcgcaacttatcaatatgagctaaatagggaatgccttcaatactttggaatgattcacggctgttcgcagcttttaatccttctggtaaaataacgacatcgattgatcctccaccgatatcaaccattacggtttcacattccacatattcattggcatcttcacggtcttgaagtgttaggtctttcttcaacgcaaagcgagcgatttcaccttcttttaggcaagcactttcatccacaactacctttaattctttttcaaaccctggagtatgaatacggaaattatggtcacctaggaagcgattggccatggctttttgcgcttcaccaaaggtactttctttctttagtaaccagattggtaacatcgtagagaaatagtcaatttcaatattattatctttttgatcttttgcatgtaatgcatgatagtatgcaatggcagctaaaaatgtcacataaggaatgtggcttgtaattttgttatgtaaacgattaatgtgattgttcgcaagttgttggcttgctgcgatgtcaccgactaagaaataacgttctttctcttcatcaccgattgtcgtagatagtaagatgcgcttcttaaattcttccggtgctgttaccgcatctgtaaagaatgaatcagcagcttctttttgaagttctacaacgttggttggaaaatcaaacaggtacccatcgataatattcatatcaactgagttcccacagtctttattaaaacgtgaaattttcatatttatacacctcatttttaagttgaacctctgttgaactaattatacaagaaaaagattggattttcaatcatttagttcaacttatctatcaacaaaaaaatacatttatcaacaattatatttgtttagttgaacttattttgagattaaaagctgaagatttgcgtaggtgtttttatagaataaaaagagagcttttaatcctccaaaaggaaaataggagagcacacataatctaattttatctagagaactgatatttgctgcaatagagctacctacgtaaaaagggtattctttattttgcatttgcagatgagatatagcatgaacacgacagggagtatgcgaaagttagacgagttaggtcgtgctgtcacttcaatggagttacgaaagattcttagtatcagagaaaaaggtcctatagaagtattttttgacagaagttatattattcttcagaaatataaagctcacaatgaatgtggaattacaggagaactgactttgaaagatggagaatatgaaaaacaagaaaagccctcataatttgaggacttttcttgcctatgaataagaaatggaatttttattcgcatctacaagacgtattgtaacatatataaagtacaaaaaatgagctattcaggtcttgaaaaaggtattctaaaacttcagctgatttttacaggggaaaggtgttgtcatagtgtaggattctagttattgttaaatgaaaatataacaacttagagaaataggtgattgggttatgcaaacatatagatataatagtgctttaaaaagagctttaattgtagatatagaggcagggagagagcttatggtggtaaataaactgaatggaagaaagacaaccattgatttagaataaagataaaaaacgcttagtatgattgcttaagcgttttttatctttattctaaatcagttaatagtcggtattgttcagaggtaattaaatcacgctccatgagaacataaggatgtgtttccatcaaaatagttttgagatactctggcatcctctctcctttgtatgcacaaattaatgggaatgagagtttattcactgcactatccactattttttcaaaatcttcgattagatgtaaaggatcttccatcgtgctccattctacatgtgcccatgatctgaaaggaattctattttctaagtagggctgaacgctcttattaaaataattaagaatggcaggagggtgataactaccacttgaataatagaaatcgaagttgtttatacgatgtatcattttcatttgatctgtggtcaatagtgttttcaaatggtcatgaataaaaggataaaaacggtcattttaataagaagaatgcaatctccagcaaaaatcccctcttggatataacttacaacttgttgtatataattttcttgctggtcgtaggaataaagtatatgaacactcttttgttctgcaaacaactgattcattttacttttcaacacataatcccttctttcttctccctctctcattatactgggattatgtaaacaaaatatagttttaatttattgaaatttcaaaaaagtgaaaaccgcgtacagaaggtgcgttttttatacacttctctaacctccgtcttaaagagaaaccttgttaaatcaacgatgtataaaaagatgcacaaaggaagtaatcatccgttcttaaaccccttgtgccgcagtttagctataaggggttctttttttgatgtataccagaaaaaacattatggtaactaaggctggatgtcagattcatcttaaaaagcaaaaaacctacctcttcccactcagaaaagataggttttttctgctctattgctaaaggattttcgtagatgcctcacggcttcatgagtagttagtttgttccggatgtgaaaatttattcgttgttggctaatttacattttaattttataaatagacatactaattgtatccaatttatttagtaatcgaaggtggaagtctaataatgatgtatgtctttgtgtgctttttagtttttaatttcctagcatttttcgcacctaaaagattagtccctattgaaatatatgctacatgtatttttgcctacgcttatggggtaacaacagatttagtgttagacctgcattacaatttgtatggttatcttcaaaaagggtttcagtggttatcgcttttagcagttatgatgtattttccctctatcagttttttatttttaaatttttacccatttaacaaagctttaggaagaaaagtactttatattttaagttggacacttttttctgttgtattcgaatggttcgtagttaacacggactttttttattataatggctggaaattactatattcggctctagtatacccaattatttttcttattcttgtaagtaacttgaaattggtgagaaaaataatttctagtaaacgataattatccttctgaaaactcgaaaaaaattcaaaaaaaattacctgttaagttattttattaggttcttttttgttgggttcccttaatcgacattatagtaactaaaaatatatatgatatacattaaaaaaagcagcagcagcagctacctcttcatgagatagttacttctgattctgaatagcagttaattcatcttatttcttacattaagaaaatacatccacacatgtatgacagttgtcatactagttacttgacgtttgtatgttttattaccagctactatgtgctactataaattaataaagaagagctgaatttaaacacggtaaagatttaaggaggacaacatgagcaaacaaaaaacgactgaactaagaaaaaatgtagcaccttttgaaaaacccaatacgaaatcgagtataaagcaattaataaacacattccttccgtttttattactttggtttctagcttatcaaagtttgtccgtttcttattggataacatttccattagctattgttacagccgggttcgtcgtccgaatctttattattttccatgattgttgtcatcaatcatttttcaaaagccgaaaagtgaataatatccttggtacaattagtggggttatcaccatgtttccgtatgaacagtggaaacgaagccactcgattcatcatgccacgagcagcaacttagataaacgaggaactggtgatgtgtgggtcatgacagttgatgagtatgttgcagcatcctactggggccggttagcttaccgagtttaccgcaatccaattgttatgtttggattaggtcccatctatcttttcttagtttctaaccgattgaatcgaaaagacgcgaaacgaaaggaacgtttgaacacatatttaaccaatttctcaattgttgcagtgtatgcacttttatgttggggtattggttggcaagcttttctgctcgttcaagctcccatcctttttgtagcaggatcacttggaatttggctattttacgtacagcatcaatttgaggattcctactttgaaaacgaaaaggagtgggattacgtgaaggctgcggttgatggtagctcctattacaggcttcctaaagttttacaatgggtaacaggtaatatcggtttccatcatgtacatcatttggctccaagagttccaaactataatttagaaaaggcacatgagtctacgccaccattacagaaagcaacaacaattacactaagcacaagcttgaaatcccttcgttttcgacttttagatcaacaaaataaaaattttgtaagcttcaaagaaattaagcatctactagacaataaaaaatctcgtatgaatttgaataacaaaaggcgaaatctagataaaaattgaatattcatacgataaaactattcatttcctaataaaaaatacctggacgagttgaactataatccgaataaggggcactacataaaaagtgtcccttattcgctatttgtctacattgtgtgtaaatcttaaaaccttttatttaatacaccttcccttaaacttaaactatcctcttgacgacagttaacaactcattcgtgaaaatctatcttttctaacgcttaaaactaaatttataagtacttaaaaaacatcagattagaaaaaactgatgtttttttagcactttaaactcagaaactcatactaatttaacttttcctaatgcatcttgttccttaatttcacaagtaccattgttatgtaaccacacagcagtataattttttctttaaatatgacattacaatcaaccttcactgattatccttaaccctccttaatacttgctaattttcgacataaaaagagggaatcctttagaataactcccagagagtattgcacatgaatatctcctatcgaatgattgataactaattatctctttacattgaataatatttttatttacccaggatattttacgctcttaaaatctacgtatatttcaaaaagtccataaaaaataatataatcactttttataattacagatataaatatttgtaatgtaagcgttttctattataatgaaatcaggtggatagcatgcgtggctatcgttgtatttggcgcaggtggagcccatacaaaagaaagaatgacctttttttaactctgtgttgtgttacatacaacttcatacatacaagttaatacaatcaataagtacattattaatttgtatgtataagagattactagatagataatgatagaagtaagaaacataaataaaggaggaaaagatgttgaaagaatataaacaggtgttttctaattttattgatgaagaccgattcgaactacattcataccttacttatttattcaatcaatctcaggacaaagatgtaattcagttagaagatgaacatataacatgataaatgtacacatattgtaaagtggaagggtaaatatatgaataaaaaataggataagcgaccttactgttcgaattaggatagataagtcgctttttattgttctcatgtaaaggcttcctgttagggggttaattctattacagagggtattctatgagatacttcgaagctgtttagttaatcgtaagagggtttctttatctttattctttgaagcttgttccatttgcaccaaaatttctgttttttgaacgtcacgtagatttttcattgataaaagttgattaaatgtagaattcatgtcttttatctctcctatctttgtgcaaccgtttttctttgtattccacacccatcattctttttcctttaaaagctttccatatataataaacagaaactcagtcaaaaaagactgagtttctgcttattatatgctatttacaccactttctaccatagcatgttcccagctagggaaaaaataaagtgcatttttcattagttttggatgtgtttgctttacttttttcttttttagagattgtccatttgttcctaagtactggatttgggctttgacttcttcgaccgtcatatcggcttgcataagatcactccctttatcaag

SEQ ID NO: 50 - DNA, 31899 bp, Priestia aryabhattai
  source 1..31899: mol_type = genomic DNA
ctaggattatcagcactaacaaataaaggacactttcttttaaaagaaaatgtcctttatacgagtttttagctctaattttattatactatatcttcaactggacacatattatatatttttttgagcaaactactctagacgccgtgaggcacctggtgcttttcttattcgagttttgcacaaaaaacttccttaacgcattggggaagtttttctgtttttaagctatatcttctatatacctttagtcaacataatacagctttccggaagacatacaaaaagagaacccttgtgggagtagggttcttaagcagaaaaatatatgggttatgcagctttttatacatccttgatttcacaaggtttctctagtagacggagataagagacatgtataaaaagcgcatgttttatacatatgcgtgcctgtctagatatattgaattcaccaataatcgcatataatttaaattagaatgcaggaaagaagcaaattatcccttttaagttgtttctcgattattaatacgtgtttgagtgtttaattccataggtttcttaataagacgataacctattttaatttatgtaattcaactagcagatcgtccacgaattgactaattcttaaagtttttggattagtaaacccttcttctaaacctactttaattaaagactttctcgctttttcaatctccaaagataaagctctttttaaaatacctttatgagtttccatacttataatcacccaattatttttaataaacacaaaaaaggttaaccatttaatgattacccttctttttagcatagagagttcttattagtgtttatattttaaaacaattataaagaaatatacagttggatttaagtttgcccctaaagaagcagttatggacgatgttatagggtgagctagcttcaaaacttcgttactttttcttattctactaaagagttctgagtagttaggaaaataatggttttaactttcggttaaaaattctttactgaacgttcttaaattgatatactcagtacaagttagatctaacagttcattatcaaaataagaatgattattcttaaattacctaaagagtttattgagggggaatgaatagtataaaattgttgcactctaagtgtataaatgattctaaatcctttctcagacatacgagataatacgttctaaggtgtgagtacatggctagaaacaaagaatttgatgaaaaagaagcattaaggagagcaatggagcttttctggcgacaggggtatgaaaaaacatccatgcaagatttggtgaactatatgggcgttcatcgtagaagtatctatgatacgttcggtgataaacatactttatttattcgagccctaagtcactatgtagaagtaatggatgtaagatttaaaagtaacataacaccagaattaacggttaagcaggcaatacgaaaagtatttgaaatggttatttatccaaccgataaacagccaaaagggtgtttaacagtaaacacagcagttgaattatcgttacttgatcaagaagtagctgaaaaaattacagagacgtttataaagaccgaaaccttattatttgatttactgaaacatggtcaagaacaaggagagatccctgagcactatgatatcaaagggctctctaaattcattcataattcccttgtaggaatacgagtattagcaaaaacaacaaatgataaaaaagaattagaaaccattattgatatgaatttgtcagcactgggatgaattatatcttgttgtttaaataaatgaataaacaccaatctaaatatatttttaaggagagaaagaatatgaagtacacagttattacaggagcaagttcaggtataggatatgaaacagcattagaatttgctgctcgtggcaaaaacttaattattgtagctagaagattagagaaattagaagggcttaaatcagtcattcataatataaatcctgatgtagatgttgttgttcatacaagtgatctatcggtaacagatcaggcttacactctgtataacagtttaaaacagtatcaaattgagacgtggattaataatgccggtcttggtgaatcttcttctgtgacagatcagaatttagaaaaagtagaatccatgctacgtcttaacatagagtcattggcaatcctttctacactatttgtgcgagattattcttatgtagagggaactcaattaattaatgtatcctccgcacttggatatgcaacttatattggtggtatcacctattctgcatctaaatattttgttagtgcatttacagaagggcttgcaaaagaactagagcttaaaagtgcaaaaatgaaggcgaaagttttagcaccagcagtgacagaaacagaatttgagaaaactgcacaggatgtagaagaatttgattacaaaaactttatgcctatgtatcacacagctaaacaaatggctggttttatgatggaactttatgataacgataaagtcgtaggtatcgtagatgaaagctacaatttcaatttaagagatcaaatctatccaatactaggtgtttgatgcatcaacaaagtcgttttaaaaaatttaatcatttaagaatgaacgttctaaaaaacattagtatcaaatagacaaaaaggtaattttgtaagtatttaaggtttaggtggtggattgatcctaaaataaggtcccctccacctaaacaattggaataatataagagctttataaaaaaattatactaaagatagaaaatgaaatggacagtgaaaataataaaaacaaggtaaagaaacttaataaaagcaactcaatggaagggtgctaatgaaaagaatgaaaacacttatgaaagcagctcaaataacaaaatattcaaaagatatccatatccaagtcaatgacattccaatcccagaaatcgatgacaaccaagtcttagtaaaagttaaagctgccgcggtcaatccactcgaaatgttgatcatcacaggtagcgtaaaactgattcaggattatgaattcccactaacgcttggtaatgaactgacaggaattatagaaaaggttggaaaaagcgtgacagaatttcaagtaggagaggacatctacacacgtctcccattaaaaagaattggtgcttttgcagaatatgccgcaattgatgctaccgccattgcacctatgccaaaaaacttatcctatgtggaagctgctgctgcaccactggctggactcactgcttatcaaggtctgcacgaagaacttgaggcacagcctggtaaatctgtttttattccaggtggatcgggtagctttggtcaaatggctgtcccactcgcaaaggaaatgggtctaaatgtcattgttagtggcaactcagaagcacgcgaacgcacattggaaatgggggcagaccaatatttaatttacaaaacagaaaactatgttgacgtgttgtcggatgtggattatgtaattgatacgctgggtcctaaagaatttgacaacgaattgagtatcatcaaacctggcggaagattgctctctctacgtacaggtccaaataagcttttcggaaaaaaagggaatttcccattttggaaacaaaagctgttttccattgctggtgcaaagtatgaccacaaagccaagaaacacaatgtggaatatcattttatgtttgttcgttctgacggcgcacaactcaaaaaggttaccaaaatcattgaagagaataacattgttccaccaattcatcccgcactatttagcatagacaatataaatgaagcgctagaacttgtggcaaatggaagaccaagagggaaagtaattattaatttttaggactatacaggaagggaaaacaacgatatgaaattggagaatcgaactattttagtaacaggtgggacatctggtataggcttggctttcgcaaaaacgtttgttgaaatggggaacacagtgattgtcactagtagatccaaacaaaacattgaccaagcaatcaaagaaaaccctaatttaattggcattgctgcggatgtcagtcaagtaaagtcggttgaccagttggtgcatcaaatcaaacaacagtattcaaaactagatgtcctatttaactcagctggtatcatgcgctactatgatctattcgctgaagaagtcacaggtggacaactaaccacagaaattgatacgaacctgaacggcacgatctatgtgacaaaagcattccttcctcttcttgctaaacaagaagaagccatgattgtgaatgtcagctccgtactagcaaatatttcggtggcaagtagtccaatttattcggcaacaaaagctggaatacacatgtacacagatgcgctacgtgaacaaattcgagccgaaaatgagaggattcatgtcatggagctctgtccgccactcatttctgaaacgaatttagaggataaaatgtcacgtgacaagtcaacgaaattcattgatttgccattggacaagcttgttgatgctggtataaaaggtatggaaaaaaataaaattcgtttgaatccaggtttcagcaaaattatgcgtttcatgagcaagattgcaccagattttgtgacgcatcaatggggaaaaacaatgatgaaaaggttgaataacgagacttagtgtggataacaattgcaccaagcgatctggataaaaactgctgactccaattgctctaatcttaccttctcggtacaactactccatagcacgccaagagccatatacatcaccaaatggctgatgaattaaatataaatcaatataatctacttttagtcgctccagcgactttacaaatgctttttttgcatcctcataacctgcatcctgaattcaaagttttgttgtaataaatatttcttttcttggaataccacttcgtttaattgcttttccgactgcttcttcattcatgtaagcagcagctgtatcaattaggcgataaccagcgataagggcatcgtagacagcctgttcgcattgctttgcatcttcaatttgataaacccaaatcccaatattggcatctctacactattgtttaacattactttttgcatatacaattcctccctatacttgcttccagttactcctcttaagttgagatttatacattaaacactcttgtgctatagataggctatcaccttcgagtaacacgaatgtgataggttttaattattttttaaacagggttcaccacatttaaagtaaaagaaatgactagtctactcaatatcatcaaatatttgtaaaagtatatataaagaaaaaaacacaaatccgtttagtaacaacgagtttgtgcttttttctttatagtaaaatatctaataaattaaacaggatgccagttagtaaattaaggtataagtaagtcacgtatttttctcttttaattaggttcttctaacctgtcctaaacaacgatatttttggtcacagcactcattaacttaagggcgctttatcctgtatttcattttttgaccagttccctggattcatgttatctgggactaccttattcataatatcacggtagtgatccactttatttaccataaattctgctctttgtttcgcttcttctaactgagccagagttttgtctctctgttctaaaagtatctcataacgttgtggaatagtagattcaccttccagacataaatctacataagttttgatggcctcgacagacataccactctgcttcaaatgttttgcacctctaagccaattaatagattgctgatcaaaaaggcgattattatttttatcacgctgcaaacttggaactaatcctttatctgtatagtaacgaaccgtgtgttcagtcagatcaaggagtttcgccacttcttttaccgtatacattagtaagtcccccttaaaaaatatgttaaagttgcttaaaaaaccttgacttcgtgttgctcgaaggtagtaggcttatcgtagcataaaggtggtgaagttgtcattccaatacaagggatatagaagatttcggcccatttggtgaccgctttagtaatatcttacaaaaaggcagaggtgatttatgtaataaaaagcgtaagctattcacagtaaaaagaaagattctaggatagttcaaagtaaatcacaaagtgtacatcaatataattattaattaatgaaagtaggggatagatttttatgtctaaacgaaataatttacttatctttatattaacaatcggagtgttcggcatcctaacaactgaaatgggtgttgttgggatattacctttaattgctgatcactatcatattagtgtatctcaagcagggcttctagtaagcctctttgcccttgcagttgcaatttctggtcctatactgccattattgttttcaggcataaatcgcaagaaggtcatgttgcttgtccttgctatttttatcttgggtaacattgtctctatgtttgcatcaaattttaccctattactaattgctcgtgtagttccagcatttttccaccctatttattgttcattggctttgacagtagctgctacctcagttagcagagaagaggctccaaaggctgtttctaaagtgattttgggcgtaactgcaggtatgatacttggtgtacccattacgaattatattgctagtgaaacttccctagaaagcgccatgttattttttgctatcgtcaatgcaatagcgttcatagctacattggtatttattccatccatgccggttaaagaaagactttcttacggatctcaagtgagtgtattaaagagacctcttacttggttagctatcgccacggtcatctttataggttccgcaacttcgagtgttaatacttttattacagaatatcttgaaaccgttacgaatatatcagggaacatcttaacattggcgttatttatattagggttagccagtctaattggaaatcttgtaggtggtaggttacttacaaaaaatgccatgaaaacagccgtaacttttcccattatattagggatcattcatctattgtccttacttaccggaacatccactggatttatgatgcttacgattttggtatggggattcttatttgctataggaaataacgttagtcaatattggattacttctgcggcccccgaagctccggatttcgcaaatggattatttttgtcggttagtaatttagggataaccattggtacagcagtgggtggcttatttatatcaggaatggggacacaatacattgtattaggagcattgctattcctgatattgagtctagtatctattttaataagaaaatatatgtttgattccaaaaagcacctttcaacagaagggatgaagtaaacaataatttatgaaggataaaatcatttaatacctctaaacgacgtgttgattcaaatgtaaatgacatattagggaagacagactagataaaattagtctgtctttttgtttaaaaaattcatttcatgtttatattaaccgcaattaaaagtattgacttcgtgttgctcgaaggtgatagacttgtatccaatcgagttactcaatttgtcaatataaaaagtaaaacgcataaatgggacaaataggaatgacttgatctgtaactataaagtataggaggagcttataaacaaagaaccgtattaaattaaaaatttgtttaggaattaagctaagaggactgaaaaacaattattacatgagatatgaagggctatttgctagataagaatcaataaaaagatgctgatgggaaaggaatgagttatcaatggaatatgtgaagcttggaaatactggattagatgtatctcgtctttgtcttgggtgcatgggttttggggatgctgttaattgggtacacccatgggtacttgatgaagaaaagagtcgtcctattattaaaaaagctcttgatcttggtattaacttcttcgatacagcaaatgtgtattcgcatggagtaagtgaagaaatactggggtctgccctaaaggattatgctaatcgtgatgaagttgtgattgcaactaaggtacaccaacccatgcataaaggacctaatggctctggtctttctcgaaaatccatcatgagtgaagtcgataagagtctgaaacgtcttggaacagattatatagatctttatattattcatcgttgggattacaatacacccattgaagagacaatggaagcattacatgacattgtaaaggctggaaaagcaagatacattggtgcttctgccatgtacgcatggcagttccaaaaagcattgcatgtagcagagaaaaacaagtggactaaatttgtatccatgcagaaccacttaaatcttctatatcgtgaagaagaaagagagatgttacccctttgcaaagaagaaaaaattggagtaactccatatagcccacttgcatccggaagattgacacgtgattgggcagaagcaacctatcgttctaaaacagatgaagttcaaaagtctaaatatgatggaactatagaagcagatcgattagtagtagggagagtcgcatcaatcgcagaaaaacataatattccccgtgttcatgttgcacttgcatggttgttgcaaaaagaccaagtaacagctcctattattggtgcaacaaaaatatcccatttagaaaatgctgtagatgctctatctgttaagttaacgcctgaagaagttgcatttttggaagaaccttatattcctcaccaagtagtgggtcataactaatcaataacgcaccgagtccgttgtgacccgatgtattatttttatcgtccattaaataaagagttaaatcttaataattttgctgggacactagttcacataaaatgttttatgtgaactaagggtgtgtatcatatacatctaaaaaagaaaaacccacctgatttgtcagaggtgggcttttctttcagctaaatattaagggtgtaattgcttgttacttacatatcatttaatatttttgtagatatttattataacctatcaaatcattttgagaaagtgaaaaatgaaaacggttaccttatattaaaactaaaaggtgtcttttctatttcataccgataaaatccattatgagaacttaacatgtataaaatataaggacacagacagtaagataatacagaatgaaacacatgtataaagtcaggaagtgtctattgtttccattaacattgataagtattcttttaaaaagttatagaaaaaaaacgccccttatttggggcatactctattataattataaaacataacctaaaaacagtctacaatttcatttttttttatattatagtttgattactgaattcagtaaggcccatgggtacatttaaaattgaaaggaaaatttctatgatacacaaacatgttccagttttaatagtaggtggaggtcttagtggacttacctctgctctctttttggcacgtcataacgttgattatttactcattgaaaaacacactggtacagctagccatccaaaagccggagggattacatttcgtacgatggaaatatttcgacaacttggattggaggcagctattcgtactgctagcaaaccattagataatattcgtggaaggattgctgtagagacaataaaaagcatagaccctgagaaattagaaacggtggagaactcccaaaaggctcttgagaaagagagaatagaaaattttgaaaaggtgagcccttcaaagccagcatcttgttatcaaatggaactagaacctatccttcttcaagctgctaaagagggaaaagggcatatacgctataatactgaacttatagagtatcaacaagacgatttaggagtaacagccactataataaatcgagagacaggaacgaaagaaaagattcgaagtgattatttagttgcggcagacggcgctaaaagcacaattcgtcaacatacaaaaatcccaagtacaggaagaggagtcatcggcggacattatattaacatctattttcaggctgatctaagtcgctttctaaaagctagccagtttggctggattcaaatcctaaatccagaagtatttggtgcgctcatcaccgttaacaattgtgatgaatggatttaccacgtggcctataatccctcaaatggagaaagtccagaagatttttctgaagagcgatgctgtgagattctaaaaaaagctataggagtttcaaatcttgatattgtcatcttcagtattttaccttgggcagctgtagaacagacagttactcgttttcaagataatcgagtctttctaattggagacgcagcgcatcttatgccgcctgccggaggatttggttcgaatacaggtattcaagatgctcataatttagcttggaagttggctgcagtgatacacaaacaagctcatccacgattgctccaaacttatcatgatgaaagacactatgctgcagaagtaacaacggaatatgcaagtaatttattattcagtgttattaagaaaggtgtaagcaccctcaataatatggatcatcttgcagttactgtagggtataaatataactcatcagccattagtgaggaaaactccgatacaacacatagaatggatcaattagagctaaacggaagaccaggtacacgtgctccacatatgtggttgaagtaccaaggtaagcgtatatctaccttagatttaataggcgaaaatttcgtcttatttacgggagaagataatagactgtggcgtactgctgcccgaaatatatcttcccacttaggtgtctctattgaagtttatgatatcagttcacaaggggatgggattgagtacgaggatagctgggaagcattgtacgctgttacctctcaaggagctgtattgataagaccagacggttttgtagcatggcgtacaaaagagggggaatcaaatccttatctaattctgaagcaggtcatgactagcatactatggtaaataaataaaaaatatataatcatttaatgttaatatgtttttgataagataaatttaatcaaaaatacaataaaaacttattttatatgaaagagtaaatatataaactttattcttaaaaatatagttttaccatttactctagatgacgacaaatagacgttttctcattagtttttcttgcatccaaaaagagtgtacccttttgaactatctatatcagacaatatcaatcttaaattaaaacacgttggagatattcaaaatcacgataaacgcaaggaacaagagttggaaagatcaaaaagaacaaagacttcttaatttataagaagtctttgttccgtttttattattattttttagtaagtattagttagagaaaaacaattccaagtataaataaacatagagtaataacgtttataacattcttagctttgtcatcttcttttattgaagttacaagttcaaagattatgacaagagtaagtatagacaaagctatctgtagaggtaagttaaatgcatatacaaatattaaaattagagcatatataatacctaaaattatattttttttattcttagttttttcgtgattacgcatttgaaaagctccttaatcgactgaaaatatttagatctcttactctttttaagtgaagttttttgtaaatagaagcataataaagaagaggatagcgaatgaaaaactcattgtaatataccttatgtctttgttagtggtctttttttgcataaatagttttgttgacaaaggaaaaagaatacctccaataattgctgtaactatcgttttcaataacatcaaatactcctttctaagaattgtagcaaaaataaaaagctcccccagcattggcaagtgagatagctttttatcaggattcacaattataaagtaccaaaatataaccgcatgtaaacaatatcatatttttcctaaaaatactatttttagagaggagagaatatgtataaaaggtgttttgatccctgtctcacaaacagggtgcagtcccgtaacacttcttgggactttatttattcctgtaaaattgttttatgtaaaccagaaaaactatttaacattaaatttataaataaaagcttacttttaatttggtttttattacagatcgaaatcgtaaacgatatgtaatacattgcaacattgtattacataaaaaaaattgttaatataaagatacgattatgagaggactgatgaatggacaatgattaactaatctatattttcatttgaaatgaataacttcaaactacaaaatatagggttagtctatccatttttattaatcagtttatacttcatttgtcattattccgatggcaaataagcacttatttaacataagtgaaagactaatccttccaattacaaattgggaggattttttatgctctcataggtaagcttaatattttttaattctgcaacttaacctaatgaataaaggagagagagaaatgagtaattcagacactattgttacgcatgtaatactctgtataagtcgttaatatccatcaaacttatacagagtaatttggaatagatggatgtgccgactttgtataaaaagtaaaaggtgttgatatacaaaggaggatttattatgtcaatgatacaagttcaaaatttaactttttcttatccaagtagttttgacaatatttttgaagatgtaaactttcaaatagatacggattggaaacttggatttatcggtagaaatggaagaggtaaaacaacattctttaatctattattagagaattatgagtatagtgggaaaatcatttcctcggtagaatttaattattttccttatccagtttcagataaaaacaagtatactcatgaaatcttagaagaaatctgcccgcaagtagaagattgggaatttcttcgtgaaatatcctatttaaatgttgatgcggaggtcatgtaccggccatttaaaacattatcaaatggggaacaaacaaaggtgttgcttgctggcctttttttgaatgagggtcaatttctattgattgatgaaccaaccaatcacctagacactgatgcacgaaagatagtctctgattatctaagaaagaaaaaagggtttattttaatctcacatgacagaatgtttttagacggatgcgtggatcatatcttatctatcaatagagcaaacattgaagttcaaaatgggaactattcttcgtggaaattaaactttgatagacagcaggagcacgaagaggcaaaaaatcaacgtctacaaaaagacattggaagattaaaacagtcttcaaagcgtacaacaggttggtctaatcaagtagaatcttccaaaaatgggacaacaaattctggttctaagttggataaaggttttgtaggacataaagcagcaaagatgatgaagagagcaaagaaccttgaattaaggcaacaaaaagctattgaagaaaagtcaaagctgttgaaaaatgtggaaataacagagtcattaaaattagaaccattagaatgtcaatcaaatgaattgattaatttgactgatgtatctgttaagtataatgaccaaatagtaaacaagccaattagctttaaagttgaacaaggtgaccgtattgtacttgatggaaagaatgggagtggaaaaagtagtattctaaaactaattctaggcaaaccaatacagtatacaggctcaatgaatttaagttcaggcctcattatttcttatgtccaacaagatacctctcatttgaaaggaagattatcggactttattaaagaatatgaggttaatgaaacgttatttaaatccatcctacgtaagatggatttcgaccgaattcaatttgagaaagacatatctcactattctggcggacaaaagaaaaagctgctcatagccaaaagtttatgtgaaaaagctcatttatatatttgggatgaaccattaaattttattgatatttattcgcgtgtgcagattgaagagctcattcaaagctttagtcccaccatggttatcgttgagcatgatcaagcatttcaacaaacagttgcaacaaaaattattcctatgtaggcaaatatgaagaattaaagctttaattgtagattagattgttaaactatagggggcagattggcgcttcttcttagtgcctagaatcgtgattacgtaaatctaaaatcatattatgcgtaatcccttgtaacattttttagtaaaatggagagagtgttattttaaggaagaaaccaagtgacagagttcattcgttttttaatatgttatgtaggtcgctttgttagtttttttctaataactgcttttcttttatacgaagctattacttattttccaaacagtctaatgatcatttattggatagctttatttttattagttttgctactgatttacagtgtgtatcttttaagaaacagtacacgatgaaataaactttatgtaaactaaaacaagcaggtccttgattattaaggatctgcttgtttaactgtgaatttaaagtttgtaccgagaaactccattatggtaactagatttttatatcatatgcagttgaaaaacagaaaaaactcccacagacaatcagcagttttttcctcataaaatagatttcatcaataatagctatttaggtaaaagtactatctatccattattttctttcatttttatgtttaattcgtatgcttttccccattcatacatttgaagaatgataggttttaatgtgtaaccgaactcggttagagagtattctacctttggtggaacgataggatacacttctcgatgaacgacaccatcactttcaagttcacgaagctgtagtgtgagcattctttgggttaggctagggattaaacgacgtaattcattaaatcgttttgtttcttgtaataaatgatataaaataactcctttccacttaccaccaataatatctaatgttgtttcgactgggcaacctgttggacaatcaccatatcccgtcttacgatttctcataaaaaacctccatagtatatagaatgttactataccacttaaatgtgcgtactattatctattcctctttctcattataatgaattacacatcatatatgtgaaatgatgattaaattttattaggaggatgtttagtatgaaagcagtaggactataccgttacttacctatcgaaaatgaagagagcctgcttgatctttcggtggaaaagccaattcctaaagggcaggatttattagttaaaataaaagctatttcagtgaatcctgtagataccaaagtacgtcagcccaaagatcatatagaggatcatcccaaaatcttagggtgggacgccagtggcgtagtagaagctgttggagagagttgtacactgtttaaaccaggagatgaagtattttatgcaggtgatattacaaggcccggttcctatagtgaatatcaacttgtagatgaacgtattgtaggtaaaaagccttcaaatctttcattttcagaggccgcagctatgccactgactactattacagcatgggaagggttatttgagcgtttaggtatttcaaaagaaagagatcagggaaaaacgattcttattatcggtggtgccggtggggtaggatctattgctatccaattagctaaatggttgggtctaacggttatcgctacagcttccagagaagaaacggtagactggtgcaagcaattaggagctgattatatcattaatcatcgacaagaatttgtacctcaacttcaagaaatcggcttcaacggagttcattatattttctgcttaaatgatacagatggtcattggaacagcatggcagaatctattttaccgcaagggaaaatttgttcaattgttgaaaatagtgaaaacctagacttaaacctcttaaagagtaagagtgtcacttttgtatgggagtttatgtatactcgttctatgtatcaaacagaagatatgattaaacaacatgaattattaaatctaacaagtaaactctttgaccaaggaattctccgctctactttaacagaaactatttttcctattaatgctaataacttgagacaggttcatgctaaagtagagtcaggcaaaatgattgggaaggttgtcttggagggtttttaattaacatatatctttgctaaataaccatataaaatctatgaagtttattgctaatagaaaaattgtcgatttgaagagatcttaatttataaggtctcctttttctatacggtaattgttatactgacctgatgctttcaggtatcttaagtagtttttttccaatgcgtaaaatacatgtgtaatcagtcgtttttttataacaaacgtgtagattgtacatagaaaaagtttacatagaacttaaaaacaaaagaaactacctttttggagagggaggtagttttttttgctcatagaatagggattctaggtagatgcctctcggcgtcttaagtagtttgctcatagcaaagtatcccattcaaaaaatacgctgattcataatatagatatgcatgtatgcgtgctttttacttctcaacaggaataggattgtatccattaaagtgagcaaaatccgtgtaaatggaaaatagtaagaggctaatacaaataactccaacaatcaagaaaaccagatatttgagtggttttttcactttttatgtattcctttcaaccaaaaaagcaccttctctctaaggtgcctttcttcttacatgactttatccgatgataccctttgacaccctagttagtttgttcaaagaatattgctttattcatacttaaatgcataaaatatcctcttttcaaaaagaataaaaaaaagttttttgaaagaggtgttgtttttatggcaggaacttgggcgtgcctaattccatttatccttgtaattccaatttcgatattgactaaacaagtacagtctggcctattcgttggtctattagttgggagctaccttctgtatccgaacatactcggtggagctgagcacatgattaaatacttaatcagcaatatcgttgtcaaaaataatattcgaattattgtttttctatacgcattcgctggcctagtaggaattataaaattaaccggaggaattaaaggatttgttcatttaataagtaaaaaggtaaaaacaaaaaaaagcgcaatggcccttgcatgggtctccacacttggtacgtttagcgagcctgactttcgcatcgtaacaattgctccaattatgaaagcattaagcaaacgtcttggcatgtctaaaaagagaatcgcctatgcaattgaatttacggcaaacccagttattgctttaattccaattgcaacggcttttgttgggtacatggtctccattattggccaatccctcaagacgtctggaattcatcaatcagcttacatggtttatgtaaaaagcataccttttaattttttctccattgtcattatcttagtcggaatatattacagtttctttaaaaaagagaacgagagtgagcacctagaaaacgtccatacagatcatcaaatgaaatcttttaaccaaaataagaagggggaacacatcccaccacacacaacggatttagatggggcaggtaccaatttaaaaggttcatttaatatggaaacaggaacaattattagtgaaccggatattcatggcgaaaggacgggaatgtttgatagaaatagactgaatggaaacactccgaatcatgcggatcagcaagaggatttagatgcggctcaccgtgcttatattaaggagacgccaatccgtccatggaatttaatcgtccctatatctttatttttattgttaaccctgttcctcagctggtgggatggtcattctaaagcaaatagcttttttaatgcttttataaagagcgatatgcttggagtcatgttaacttcattattaatagcagttatcatagcatttgctatttttatctttcagcgatttccagtcagtacccttgttacccattttgtgaagggtggaaacgaattggttaatgttatcattatgttagcacttatttgggctgtaacagctgtttcagaagatctagggttttccaaatacattacttctcatctaacatcatggattcctcacatgtttattgcgccatctcttttcatcctaggagcagttatctcctattttattggttcatcgtggggaacctgggggcttttaatgccccttggcgtaacattagcaactcaatcacatacgagcatcttaatggcaattggtgctgtctttgctagtggaacatttggagcatttgcttctcctcttagcgataacaccgtgacgacctgtacggttttggggatagatgtagttaaatatgctcgttcaaaacttgtcccagcactgatagctgcaggtatttctgttgtgttatacgttggtttttcgttctttggatagcatttggataaatgactattgtaaataaaaaacactagtcgtaagccagtgtttttttatctatgccgtaacctacgttatattaagtagatgaataaaatcttttattaaaagtagaattttatcacttactcatagtcaagacaaatacgtgattttttatcgtatgcaaagtattttctccagacattcctgtattttatgctaatatcattaggatggagttaagaaaaagaaggtaaagagaatgactattttattatttatagggctagtagttattgtaggtggatgtttttattctaagaaggttcacaagaaagtattcgatgatgggaaccttcccggttcagataaattcccaggaatcatcttactttttatgttaacagtcttaaattttttaccctgatacctaacgaaaagtgtaattgttttaactgggtttctaattattttttgaacgttaaaatgccacgtagcttaaaagagctgctgttgaaatcaacagcagctcttttagattcattctgatcatttacattatggtaactcttttcataatttgagcgaggttttctcttaaaaatttttcatctgaattatagaattagttattgactcttaccttagagtagcctttagactgacagacgaggtggataagtgtgctatatacagtaaaacaaatctcagaattgacaaatgtgacgataaaaaccctatatcattaccataaaattggtcttttattgccttgcaaaataagtgaggcaggttatcgtctctatggaacaaaagagctggagcgtttacaacaaatcttattttatcgagagttggactttcccctcaaaaaaatacatcaactattggatggtgagccagaacgattatctatattgtctgatcaaagaaaattacttcttgcacgaatggaaagaataaagcgtttagttcagacactagatgaatcgattcacttcaccatgaaaggagaaattatggataaatcagaaatgttcaaaggatttgagagcgaaaaagagtgggtggaagcaatgaaggatcaaaataaatatctaaaagagaattatgactatgatttacttaaagaaaatcaaattgatgttcagtcaatgaatgagcaggctttagaggcaaaacactttatggatagtatagctaattcgcttaaggaaggattaaagtttaatgatgaaaaggtacaagatttaatcaaacagcatattgatttcttaaataatcagggacataataccagagcagaagattttgcattacaagcacgcttctttttaaatgatgattttcatagaaatatgcttgagtctcaacaaactggactttcttattatctttgcattgcagccgagacatttgacaccggataatcgtaaaattacttcagccggctctataggtacaatacgcattaagaagaaggtaagtaatgatacacctaaaaaaataattgatagagatgctaaccgttttaaacaaaataaccataaagtttttttcatatatgtacacctcgatttagactaaaagaaaccgatgaaacagatttcatcggtctttttacaatttatttcttgaagtccataatagtatatggaatatcatattcagaagcgcgtggtacgaatttctgcaatgacttctgataaattacattgttagtttcatatgaaatcggatagaataacgcctcatcatgcatagttgttaaaatctctttatataattgtgaacgtttttcttcgtctgtactaacaagtacttgctggattttttcatctaaatcttttgcctctgctaatcctagttttgcttcataaactccacttgcgtttggagttgctgattcattgataaaattatgtggatcagttggtggtccgtttgtttgccaaaagttaatgtcggtttcatcattcattaacagatgtaaacccaccattacatctgttcctttaatatttaatttgatgcctacttttgctagttcaccttggatcatttcagtcattggcttttgaatggcatcccaaaacaaagtatctgctactttttctgtaccatgtgtcacggtacttattaatgattgcttattaattgcataatgaatggcttgacgtacctttaattgctgtaatggtcctgattgagtattaaatagtaacgcttttgtggacaacggttctgaaatagctgtctcgtaattaccactatcttttaaatacgtgtaattatctaaactaacaatgccgcgaccatagattaaatctaactcttgattttcaaacgctagagcaattgattctgaatcaggaataatttttatttttacttcatcaacttttggtttttcaccccaatatttatcgttgcgtttgaaaatagcgtatttatcttttttgtactcttttagaacccatggacctgttccaacagctgtcttaataccttttgaggttgcatcattctcagggaatcctgcatcccctaggaatcgaaatggcctaacaaatgctagttcattcagaacaggataatagggttcatccagttttaaagcaactgtataatcatctatttttttgacatattcaatatgtttaaccattcccatccataaatgagcttttcggttttctaaaatggcattaaagttgcgaatgacattgtctgcattaaaggtggagccatcagagtactttacaccttcacgtaagtagaaagtatacgttgtttggtcatctgaaaccttccatttttcagcgagtttaggtgaaatggtaccgttatcattatattcaacaagtgactcataaaccattgcctgagtagtcatctggttaggcaaataggtatgtggatttagtgggcctatatcaagtggccatccaattgatattatcttttttccagattaatcagcacctgtttttgtatcttctgagcaggctgtcaataaagaaactatgagacaaacaagtaacaaacatgattttttaagcattatttcactcctgaaattgtcttttttaatgcgatagatttaaagatgtatacctcttctgtaggcgctgctttattgtattgaaccagatctatctcatacagagaaatagttttcctcaatcattgatactatcttttttaaacaactagtattctctttaaatacaggtagtttaaaagtagtaagcttaacatacttttttactttaaattcacgtctaagtcttttgttaacatataatattcagtcgggcttgttacccaattttgtacgtatttcttataagctactacattcttaggatgaacaattgatgaagttaacatttcattattaatctttgcagttgcttccttagctagtttattccttgtaccttcatccactgtcgcatttaatttttgaatcaaattagtcaactgcttgtcattgattctactcgcatttaacgctccgtctggtaaataaaccgtactcaagtaatagctagcgtctcctcgtggcgctgtaattaggctataagcagctaaatcccaatcatccttttccatcaaataatgatcgctattgtctgtgagcttaatgttaatagtaattccgacttctttggctttcgattgaataacttgagcaattaacggtaattcaggtaaagaatcgtatgtcacaagtgaaagagatagagcctttccgttcttaagagcttttccatcttttatttcatatcctgcttgttctaagtatttccttgcagccgttatacccttttctgctttagaaggtgctggagaaaaagggaatttagataaaaagggaccctctgcaatagtcgcctggttattcataacatctttaacgatctcctcttggtcaatcaaagcattaatcgcttttcttatgttttcatcctttagagatttgttagtccaattataaaggagtaagtgtgtacgtacacttggcacaccatcaatgacaatggaatcatcgttttttaatgtacttatactctcgaaaggtggacggtaaataatgtctgcactccctgattgtaaagccgacactcgggcatttgcatcttcattaaatgcaaacgttgcacggcttaattttgcttttccgtcccaataatccttatagcgcattaattctagtttgcttcctggatcgaatgatgtaatcacaaatgggcctgttccaataggctttttacttatattaggctcatctacgtcaacaatgactgtactaggatgaactaattccgaaggaaactttggaagaggctcttcagttttaatggttaatgtttgtccagacgcttccattgttttaatttttaatgtatttcgcatggcagggctttctttaatggttctgttaagagaatctttcactgaactagcatctagcttttttccattttggaatgttatattttctttaatggtaaatatccacgtctgtccattatctgttgtgttccatttcttggccagccacgggtgcatttttaagtcatcgccaattttaacgagtgtttctcctactccagcccgtatagccgtataattctcatcgacatttggatctagcgtgttagaagcgaagttgaataaaaatgttagattcttatgtgttttagattgtttttcattctcgttacttgtactacttttattagagacgcaggcagtaagggtgaaaaataaaagaactacagtgaaaagtaattttaatttctttgtaaacattatttcctccaattactagatacattgtaagcacattaaaaaagcacttctaaaaaagaagtgcttgactcaacaataacaatgcattcagattttttcataaattcatctcatttacatagctgtttcgctcaaacacctccccatccgcgtaggttaaatagtgttaaactttaaggcaggtctcctggcttcagatcatcatcttattctgttccttcccatcctattaggacagtggagtagataaaagaataagactacttgttacagtggcgggaccgcgttggaattacaccaacttcccttttaagatagctatcttatttaaaataggtatcaccataaagtcacatatttaattttataattcccaaaatagtttaacacagtgttattcataaaggtacgttaaatgaaattaaaataaatataaaagtagatcggagaaaatttctaaaatttttgaggattaatgctaatttgtctaactaacataatgaattttctaggaacagaatagcctatacgactctaagtattaccttgtcttattccaataagataggtatctaaaaatatttgtcgaactaattaatattcccattaaaaaagagacaaagtgaaaaatacagtaaacggaggaattagtttgcaaactatgtttcattataactggttggttagagaagagtggtatcaatggtgtgagaatattccactagaggaattgcttcggaaacgaacagggggagtaggaggaatattacacactctctttcacattgttgatgtagagtggagttgggttcgcattcttcagggaaaggatgattttcaggagagttttgaggaatatcaaagcttagaaaaagttcgccagttagatacaaactttcagtttgaagtaagagagtttgttaggtcttggaatgcagaaaaagaaaggaacattctttatgacccacaaccagacggaagcatagtaactgatacttggggggaagttatgcgtcatatgattgctcatgaaatacaccatattggacaattatcggtatgggccagggaaataggaaggaagccagtttcagcgaatcttattggtaaagaacttagtcatacattgccaaagatttaagttaatgaactttattgctggatctcatggcttataattaagagaatatgggcttttaagttttggcagcttccattatacgcaatactctttactagttacggtaggagggtactcttaagaatacccttccacctaacttaactaactatatgatgtacaccttgcttatgcaattaaaggacacttgaagaaggattcctctaaatttcaaggaactagttatcaatgaacataacttcaataagatatttggaatggtgaaatgaatggagaaacagattcataattatatagacaagaaaacagaggaaattataataaagaagcttagaactgccggttgtgtttttgcagacgatgaggctcggttacttatttcagaggctcagacattagacaaactcaccgacatggtggaacagcgagtaactggtcttcccctcgaacatattattggttgggcagatttctgcggtattcgaataaaagtggaacagggagtctttataccacgcccgcgcaccgagtttcttgttaaacaggcagcttctcttgctactccaggatccatcgtagttgacttgtgttgtggtacgggtgcagttggagccgcgctggccaaagtcataggccacattgagctgtatgcaaccgacatcgacctaacttcagtaaagtgtgcacgtcaaaatactactttctttggggggaatgtgtataaaggtgacctctaccatccccttccatccgcattacataaccgtgtcgatatcttggttgcaaacgccccctacgtgcctacagattcaatcgagttgttacctcaggaggcacgtgaatatgagaaaagggtagcactcgatggagggatggaaggtctagatgtccagaaacgggtagcttctgaagcaccaatatggctggcgcccggtggttatttacttgtcgagactagccagaaacaggctttgcaaacggctgagatacttgctcaaaatggactaattcccaaagtaacacattgtgtcgaactagatgctacagttgtaattggaactcagatcagtagagtaaatacagcttgtaaataacataaattacattaattctgttaactaatttggcttctatcagtgtatatataaaataaagacacatatgaaattttatgtaatctctctctcttctttctatctaaatattctttttactctttgctttttcgacattttttataccttctcttttttataatataaagtgcatagaaagcataagacaagaggaggaacgcaaatgaacatattagccaacgtaaaatcaagagaagaaaagacaattttaagtgatgaagagagtgttcaagcgtttcaactgggcgacgaggttgctttcaacttattagtaaagaaatatgagtatttagtctgttcgaaagtaaaagtatacttcctattaggaggagatcgagaggatctcttacaggaggcaaagttaggattatataaagctgcgcgagattttagaatagaagggaagagttcatttaaaggctttgcggagctatgcattacacgtcaacttattacagctataaaggcagggaatcgtcaaaaacactcgcctttaaataatgctctttctttaaacgtatctagaaattcaaaacgagcagaagatgacataacccttatggagatacttcctcatccacacacagtatgtccggaaaaggcggctgtagaaagtgagaataaaagagagagagaacaaatcttgcaagaaatgttatcagccatcgaacaaaacgtgtttgccctatacataaatggacaaacatatatgcaaatctctaaaaaactagatctttcccacaaaacagtagataatgcactttgccgaattaagaaaaagatgaagaatcgaatgaaatacctttatttacaggaatcatcctgacaaacacggaataaaagaataaagttactgtaagcaatgatgtttaaaggtggaaaacatctagtacgtaagtgtttcttttttttatgggttcttttgatttatcataaagatgatattgattaatctaacagaggatgatggcaatggaagagcaaccaattgttaaacaggttttagggacagtggcttttccttttttgaatagagaacaaagtattctagataaaataaagaatatattaagtgaaaactctgtagagataccagtttctataacagtaagttgaggagagctaaaagttcattatattcaatcacttataactctaactaaagtgttgagttatcaaaagggaacatggtgcataaacgataactgcgtaaaggtgagtgagctcttgaagataagagctcgtttttgctagggttctgcaaactatataagtcaaaaacaagatatagatattttttaaatacttaacatcaaattcaacttgttatatatttaaagatgttgcttaaaaaaacaagtgaggagaagtatggagaaattaaatgatcaaacattgttagcatcgtactttaaagcaattgaattaaagctagataaagatttcattcttattctggaagaagaattgaaaagaagggggctacccttcgttcctaaaacagataggagtaattaattcagattacgcttctatctgtttttccttttttacaacccacattagaaattctctttcttgattagttagctttctatttaaggattgttcaaactttaaaactaattctataaaacgttgcatggtatccatttatgttataactccttgagtttattattaagtatagaatagggttaaggtttttattttgtcaaattttgtttggttttaatactgagatttttaaaaagcataaaaaataaatgaagactaataattttatagaaaagaaaagccccaaagcagttttgagaactgacaataggacttttcttagaaaaaggttaagatgtatattcttatgtgttatgcaacgttggacttttgcataaatctattttaacacaaaaaaattaggttagtaaatgtttcagttagtgaatgtctttaatttagaagtagaataaataagttagaccttgtataagaaggccaattttgtgcaaagagatgaaatctacataccttgaaagcacatgtaaatcggcaatataaaaaaaactgtacaatagaggggagtgaaaaacacataaaactaaacattaattgagggttgctatgcaactctttcgttttaaatatcttgttaatatcataaacaaaaggagaaatggttaatgattattgttacaacagaaaatgtgccaaactataaaacagtagaagtaaagggccctgtatttggattaactgtacgagcaagagggattggaaatgatattcttgctgggttaaagggactcattggtggcgaaattagtcaatatacagaaatgcttgaggacgcaaggaagcatgcgttagaccgtatggtgaaaaacgcccaagtgatgggtgccaatgcagtaattatgatgcgctttgattctggcgaaattggaaacaacatgagtgagattgtggcatacgggaccgcagttattgtagaagagatgtaataatggtgaatataatcattatttattatgtagtgatgagtgttggtatcttggttttagccctactatcatggcttatttgggataaacgctttcgaaaccgatatggccaggatataccgaatggatttatccgtacagatgaagttatggttgacccgacaacaaataaaaaactgcgcgtgtattacagtcatcatacgggagaacgtttttataaggaagaaaaatgaactctatttctactttacataacaactctttccggaaaacacaacgaagagaaacccttgagccacgagagggttgttgagttctctctttatcaattatgcagctttttatacattcttgatatgatagcttttcctcttgaggtaattgaagctacgatgtataaaaagtgcatcttttatatgttcttacagaaaaatatagtccataaggtaaaaaatgtgttattatatgtctccacatgcattttatagtaaaaagccacctgtcctgcaaatactgagtggctttttatttatattgacaatatgtagttgtaataaaccctaatttattcggatagggatttagtcaatggtactataagttatccgaagttgaaggtgtaataagagagattaaggcctgctcagaatgaatgaataccctttataaataataatttatgtttctttttcaatgaaaaatcactttaattaagtaatgaaagaggctgaatctctctatttaatacagagggatttagctgtttttgatgggaatttcttaacgttataaacctagatttccttatgttattccagtaacagagagaaataaagctcttttgaagttagcgagtattgtcatacatcatgtcacccacttatggagtctcttgaaaaattatttttacatactcttggcatctttaaacccttttcttaccgttaggtacaaaaaatggtactaaggcaattaaaattgccctcttcataaataagaggaatgattttattattatctttgcaaatagtcctaattcaaatcgataatcatgaaaaaattagatgcgaatttaatatttaggaaagaaagggagaatgttaatatgaataatacaattgaattactttctaatcatacctctgttcgttcttttacagatcaacctttgacagaggaacaacgagatgcaatctttaaggctgctaatcaaacttcatcttttagtcttctacaggccgtttctatcattagggtgtcaaatccagatcttcgaaaacaagtgatgaaactctctgtcaatcaaccatatattgaagaagcagcagaattttggattttttgtgcagatttcaaccgaaatcatcaaatagcttccacagtagacctagactatattgaataccttttaataggttcatttgatgctgggcttatggctcaaaataccttaacggcagctgaatcaatgggactcggtggtgtctatatcggtggagtaagagctaatattgcagaattaaccgaggtattaaatttgccaaagtatgtggttcctctagtaggtctatgcataggccatcctgcaggagagaaacctggactaaaaccacgtttgcctcaatcaatggtcatgtttgacaatcagtatcaatcactggatgaagaaaaattagaaatgtatgaccaacagatgcgtgagtattatcaggatcgccctgttaaagctcctttcacagtaaagaaagtcaagggatggaaagatcatattgaggatcatcttgaaagaagcaaacttccctttatgcttgagtatttaaataaacaaggatttgctaaaaaataaactttcgcaatttatgtaaaacaaattaggtttcgaagtgttaattccttttcaatagtatctgaattagaactggctcacattaaagtaatggattcttacacaaatagaagtagtgttccttaaaacaatatttaagcaaaagcaaagagcgtaagccctatgaatgacaaagggtttgcgctctttgttttaacacttttttatataagttagaactcctgcttattattttactcaggtttctccccgaattttttgccgaagttctccatcatatcaagtattgggataaattcacgccctttagttgttaaggaatattcaacacgtggaggcacctctggaaaaacttctcgcttaattagtccatctgtttctaattctcttaactgttttgtaagagaaccttgcgaaatatcccataaaaaagctttaatttcactataacgacgttctttggtttttaaaaaccaaaggataatatacttccaacgtcctgaaagtatattttgggtataggcaataccatatacttctctttggtctcttatacactctttgtcgaatccatccttgcatattcttgacaccttttcacctgctttctactgttaggtacaaaaaaatgtactacggcaatttttattgcctactttaaaaaagtgagaaatgattttattctagtatatgtaacagagatactcaatacatttttaatttctaatgaatatatgcttatggtttgataaacatatgattgtgcaaccttaagcagaataattcttttatatacaaattcttaaggaggaatcataatgagatttggaattataggtgcgggatcaattggatcaattatttctaaaaaattagttaagaatggccatgatgtcaaaattgcagatgcaaggggaatggaacatttagaaggaaaagaacttgctggaataccggtgcgtatagaggatgtaattaaaaatattgaaattcttataatatctcttcctacaaaagcaataccaagcattcggaacattatcaatcaagtcggtgaggaagtaatcattgtagatacttcaaattattatcctttcagagacgacaaacttgaagaaatcgagaatggaatggttgaaagtgtttgggtttcaaatcaattaggtagacctgtcattaaagcttttaacaacttattagcctatactttagaaaatgaaggcacatccgaagattctagtggacgaattgcgatggcagttgctggtgatgaccctgcacaaaaacaaatagttagggacgtagtaaacgagctaggcttcgacgcagtagatagtggttctttaaatgattcttggagacaacagccaggaacccctgcttactgcacagagctaacaaaagacgaactcacaaaagcattgaaaaaggcaaacaaagaaaaagcaccattacttcgcgacaaagtgatagaaaaatttgcggaagaaaagaaagttgaattctcacataaggatgttgtgagtctaaacagagaaatatataatttgtaaaacaaaaggtgcgctcagttagagcgcacctttttgactgtattcctttaatattttgaaacataatcaaatgcctcgtccgtaaaagtatacctttacggacttttctgttatatagaaaatctgtcatttccatcgttcgtttaagttaaaaaatgaatta

SEQ ID NO: 51 - DNA, 31730 bp, Priestia aryabhattai
  source 1..31730: mol_type = genomic DNA
tagttaaagaagcgatgaattccagcattactcatgaggaatttaaggagtttttgaatagaaaatctcaagaattaaatgaccataaacaacattaattataattaatgttgtttatggttaaagtatctatttgctttctaagaacttcttaatttcctcaatggttaatcccaattctctagcttcctttataagtttgacccattcttgatttagttcttgtgctactaattgtcctttactgtccataaaaattacctccagatattcagggggctcagctgccatagccacttgaccttagacctgtagctttgcgtcctagcctttcaactagtttgcctttatctcaatatgtaaatttataaatatcttactatataatgggtgtcgaattatgtcaaaataagtattgtcatttattttttaaaaccctttataacctattactaattaatataaacagcattataatatccagctaatcactaccttgcttcgcatacatctttctcaataaaaattttgctcgatgaagcctcgccttaactgttcccacactaatatttaagatcgtagcaatctctccatatggtaagtctttaaaataaaaataaacaataacctgttgatacttatccggtaaatgctttatttttttacaaagctcctcattttccgacctatctattataaattgttccaagataattgtattgctgctctgtacatactgggccatctctatataattagaagttgttactggtttgttcttcactcttctaaaaaaatcaatactctgattaacagtaacacgatataaccatgcatacgctgaatttttactgtcttttccttctacttgtagaagttgataatacttaatccacacttgctgcacaatatcttctgccatatggatgtcttttatatatgttgaggctatatgtaaaagctgtgtttggtattgctctactaagttatttagtattatttcatattcaaaatcgtccattaccaatcatccaaactaattaaattctcttttaagataacatatattcatccttataataatcctacagttagttctataatagggatttatacaaaaaagctattcatttattgaaacgggcagtaaagggtttattatttagaatataagctgaaaaagggcgtgctagatgaaaaagtaaaaatggtcaaatgattaaaaaataattgcaaaaagaaaaccactagaataagttctagtggttttgcttttaaaaatcgttatattcttctaagtcgtcatcgtctaatgagccagatatattttctaaatctgcaacctttccttcttttagttgtggaacctttggagaaggctcttcttctttgacggaatcgtttcctacaaaacctgttgtttttgctaatgtttttaaatcagctaactcattctttatatgttcaagcatttcgtaggtttttttgtcttctattgctttttttccagtagatgaatcatttagatcacgtaaaattaaagatgaaatatagtcccctaacctacgcgatttagcatgtttagctagtttattatacacttcatcactcaatcgatttgtcttaatcgtaaaggcattttgacgctctgacatccctatcacctacgttgttaggatttaacggctttcttttctgctgcttgcttcttttgaacgtaaccaatactacgaatctctaagccaaataaatttaagtggcggctatcttggggaaccttatgatacttctccgtacgttcttctccaattttttcacgcatactattcatgatagcaacttctaaagtaggagctactccaccgcagtatacatacttacgtagtttattcgctggtggtggtgcaacatcatttaatttagctaataaaatctccacatattctcgtaatgaagatttaattgtacttgttaaatcaatggattcacctgtattctcgttttttaatacaaacttttgcttgctgtagttatcgagaataaattgatcgaaggcacgtaagtctgtgaataactctaaaaatttctctttacgcaatttatcaatatgtgctaaataaggaatgccttcgatgctttggaacgattcacgactattggcagctttcaacccttcgggtagaataacgacatcaatggaaccaccgcctatgtctaccataactgtttcacattctacatattcatttgcatcttcacgatcttcaagggttaagtctttttttaacgcaaaacgtgcactttctccctcttttaagcatgcactttcatccactactacctttaacatattttcaaaaccaggcgtatgcacggtaaacgtatggtcgcctaagaagcgatcggccatagctttttgagctgtcccaaatgtgctctctttcttaagtaaccagattggtaacatggtagaaaaatagtcaatttcaatggtattgtcttttttatttttcgcatgtaacgcatggtaatacgcaatcgcagctaaaaaagtgatgtacggaatatgacttgtaattttattatgtaatttattaatgtgattattcgcaagtaattgactagctgcaatgtcacctactaagaaataacgctctttctcttcccccttaatggttgtagaaagtaaaatgcgcttcttaaattcttctggtgctgtaacagcatctgtgaaaaaggagtcggctgcttctttttgaagttcaactacattcgttggaaaatcaaatagatatccatccataatgttcatatcaacagagttaccgcaatctttattaaaacgtgaaattttcatttctaaacacctcattttttaagttgaacttatattcaacttattgtacttgatataggataaatattcaatatataagagcaacttagttatctacaaaaccttacatctatcaacaattatttaaattaagtagaacgtgtatctacaaacaatattcagattcaataccttatgtaccttactttatagcttcaacataaaaagagcctgcatcaaaaacgatgcaggctcccctcttttactaaaaataattctcatgttcatttgcccttgtgaggccctttcgttacgtataacggttcataacgagagtaccattcgttaaatcacaatacctacttgtcaattggggtaatacatttgctgaagtcgctgttacgtctttcaaaaccgaaccagtcccttcattaagctaagtatttaacctttcacagtattcaattctacatgatattgatactgtactatatgtgtaccacatcttttagaattaaaacataacgtattttattctatttcctttgattgtacttttacaacgaaaatgctttgtttttcattataggtatttagatacgcattcataattagttttttactctcctaattctataccttcctgctttgtctcctcttttagattatatagaggtaatataaaaagcaaacctataataaacaagactgctgctgcctcaaatatggcaaccaatgaaaactgctcttttaaaactccagctatactcatcgttaataccatggatcccgtaaagagaggacttaaaatcccattgaccctgccaataaaagcagcctccgttctctgtaagatcatcgtattgataccaatctgaatacacggtaacatgagaccatttagaaactgagctcccagcgtcagccataggtttactgataatcccattatggcaaaccctattgcattaccaaccatcccaaatgccagcagcctttgcggtgctactgttttggcaaagatcattactactgctccgcctaagatcatgccaattccattagctgtaagtaaccactggagattttcttttgctaaacccaactgctctgttacaaggaaaatggagagaggctgaataaaccctattcctagtccagctgctaaaaagcatagacctaacaggctcaactctttcttccccaaaacatacttaacaccacttttcatttcacttagcagtgatgtagtttcattctctttttccatctttcgatcagaaggtagaaaagtgagtgctgctgctgaaagtaaaaaggctgtacctgtgatcgcaatggagagatttataccaaaggcttgaaaggaaaatgttcctagtattggtcctagaaccatgaatatcgcaaagaccgtttgatagactgacatccctacctgcatttgctcctccggtaaatgcattttaaacagtttcatccctgaaggctgagagaattgggaaaggattgcagagattaaagttgcgaaaaatactacgtgccaagatccaagtataagcgtgataagcacagcaaatacagatattgcacttaaaatatcacaccacaccatagtacgttttggacgccaacgatctgcaaatgttccgccaataaaggagaaaataaaaattggtgcaaattctgctacagatattaaagatactgcaaatgggtctccgtgtgtcttctccattatgaaaagaagtacagcaaaattcctaacccatatccctatttgcaagaataacccagagataataatagcttgaaaaacacggtttccaaacaacttggttgaatggtttacgggtaatttctcttccaaaacaaaaaacctcctgcgtattttctgaacagggggaagtacagtacaacaatattggcatgacattccgaaagaaaggaatacaatgatcaatttgatttgtatgtaaaagtacagtctaatcctattcagaaaaaaacaatcgtattatttaacgaattttttcttagaaaataggattaattaatcattgtttcacgtccacccttcctttttttactagtattaggataatttattatttgtaataaatcaacgcttttcgaacccgaaatttctacaaaatattagttccactcatcatcaatccattaaaactcaataattattttgggggcaggtgtcttctatcaggtattaaagatagcttatagtaaataaagttgtatatcctaactcgtctcagaagtggggcttaggaagaaatctctcctttttaagcacttatctaactataagcttgcgtttatctattctcttatctgctcccagatttgctgcgcaattcctatacactcttcttttgttaacgtactattaaatgactgatttaatatatctgttatctcaaccgccagactctcaacgtttggtactttgtataccataggaagaatccacgtagcttcatactcatattcttcagaagcatgcaaagagagggggttccatgtatagagaattgattggatcgtctcttttacatcattaaaccttgtactccattgttgtcctttcatttccatcaccttctattagcttactcatcgttatctttattataaacaagagaacatataaaagaataaagcagtatctatgcagtaggcgttgtacgaatttagaacgaatagcttatagaaaattatctacgtctgtcaggatgattgctgtaaatacagatactgcatttgatgcttcatttttttcttaattcggtaaagtgcattatctactgttttttgagaaagatgtaggttttgagagatttgtatatacgtttgtcccttcatatatagagcgaatacatctttttcaataggtgacagtatttcttgtaatatctgttccctttctcttttattttctttttccacggtagcttgttcggggtttacagcacgtggatgaggaagcatctccataagaatcaaatcgtcttccaatcgctttgaattcttaggtatgtttaaagagatggcattgtttaagggggaatgtttttgacgagcacttgcctttatagctgtaatgagttgacgtgtaatgcatagatcagcaaatcccctaaatgaactcatcccttctattttaaaatcgcgaacagctttatataatcctagccttgcttcttgtaagagatcttctcgatctcctcctaataggaagtatctttttacctttgaacagaccaaatactcatatttttttatgagcagattgaaaacatcctcgtcgcctttttgaaacgcttgaacaatctcttcatcatttagtggcatcttttcttctcttatttctacacctgctatcatgttcatctgcgttcctcctcgtgtcttatgctttctatgtactttacattataaaaaagaaaaggcataaaaaatgtcgaaaaaacaaagagtagaaagaatatttagggagaaagaagtgagacattacatcaaaccttatatcatgtatatggcccgtatattaatcacgatttttaaccttatttacgactttaaagaagttaacaggtgttttctcccacgttttacccgttgctactggatcaatgatttcaatatagccactgtgaaaataagcaagtttgttgtagtacttattgataataatcaaattttaattacctggtttgcttgctgcttcttccctccttccaccttcctagtatgaaaaaagaagacgcctcaaccttcattccgtattcaaacttttgcttttttaacgttccatttcttgtgttgcatttcttttatttgtagaatatgctccattattccgtgcaaaaaatttcatgcatccattttgtgctttctcttttctccctttgtcataatcctttttctctctcggcacctcccacctttttaagctcacttttaaaattctttggaagaaatattcttttctttcgtcatttcatctattttttcaacagcaatcagaatgatattttgtaaaaacatatccatgacattcgttcctttcctgtaaattgtgcttccccactacaaaagagagaagagcataaggggtttttgctatcacagggtgtgataggctaggcaaagcctagcaaaaccgtgatatcacggaaaccctctaagtggcgactctttggcgactcaaaaacggtatccggcgactctctggcgacacattggcgagtcagtggcgacacctcttttttcattttatggctaaatcttatttcatcgcattcaaattttggaatttctcttataaactttttcgttcatctccatagagctgaatgctcccatcattggattgaatcgcatctttttttctctcaatttttaattctgtattagcttttttatagtttttcattttctttttcacaaaatctttttctaactcatatgaacataaaaaagataaatgttgatagcctgtgaacctgcattttttagaacactcatcgtttatagaataaaaatcgattcataaatgataaaaaagcacgcggaaatcactcgtattataagcaaaaataaatagcctttttgatcatgaacgtgagaacaaaactaaaaaaaaatcgcttgcttctgccgtattttttaaaaaaacacctcaaaatgaagtgacccttgaggggacatttatcaattatgaagggtcggtgaaggggtttctggcacaaatgttggaatcactgaaggtgcggtgaagggactgctccttaatttgagggtgcgctgagggggttcttgcaaacatttccttgtacccaaggttttgttaggctctgcctaaccccacacagcctgtgggggcaaaaacctcttatgctcttctctctattttttaagtagcaccactattttaaagaattgacacgaaatatagaaattaaaattaaaatgtagatcctatttctgtttgaaaaattaattggataacatggagatgatgaatgaaacatgccaaatgatttcactcaatggaggcacctatcaattcatttaaaattacgtgattgaacaaaaaaaagagacctcttggcgaagcaactgccgacatttggaacaaatccaggtccaagaaaagaaagaataggatttaacaaccattacagaataggacaatttccaccctcagaattcaacaaaaaagcagcttctacatgaagtagaaactgctcctatcatatttttaacatgctgcatagggtgattttttctcaccctctttccaaaaaaggactacaaaaaatcaccctacccagaagaaccatttgcgattatcattgaaagtgtaagaaccaataaatcttcaaagttattaaaaatgcagcattataacatacttttaaacatctggggaggggtaaaaaaatacccctccccagatttcacaaattcagctatgatgaagtcgactcctaaagaaataacaaacagatcgtagctaaaaatacttgttttgatatattttgctaatttttattgaattatgagactagttaacgctataataaaactaacaaaaacgtacggatagaaaaaagacttcaactgtttaagtagtgtgcaaccactcttaaaccgttccccctagttacggtagggaaaacacttgtcgaagtctcttgttaatagagttagttttgtttaatttaaaacttatggttttattttatatgaaattgacatctatttcaagggcttagttcatcaaaatcacggcattgttttcctttcttcagggaaacagtgtcttttttgtgttcccaaaaggagaagatgaacaaatgacaaagctctttacttgctatttacaagatgtaaataccttcaatggacgattcacatggttatggaaagaaaaaccgacccttcgcaaaaagaaagaagcatttttagaaacacttcgtacttactttaaacaacaacaagtagccctacataaagtattccctaaaaaacggatggaaatgttagattacgtgatttataaccttgttgctacaggcattcaagcgattcactccaaaacactcatgaaaaaatttgatgtatcccaaagtaccgtttctcgctttgtaaaatcgttaaaggaaacaccgtttatgatcgtagcacgttatatcaaagaagatacaacaggtgctcatcctgatagctatgtatttatccttaaaagccatacgaattttaatcaaatttgtgaggaaatcttttttgaccatgacacagcaggtgtccaaacacttcaacaagaagaaatgacaactcctgtgacaactcctgtgacaagtccagagagtgctgaaaacgttgatacaccaagcttagagggcgaaaaagtgtcgtccccctttattaaccttgatttacctaaaaagcatttaaataatcatttaatatctgcttcacagtcatttgcttatatcaaaggtgtgcctaagaaagtaaataacgtgtacgcagggaaatatggtcatcaactaaaagacttctatgctcgtattcaaaatgcggctaaagcagtaaaacgagatacagagattgagattgtgaaagaacaagtacatgaaattgcttatacagccattgttggtttagataaatatgtccatgaagcgaatcacaagggtactaccctatcactggatgaaatgtgccgtcttgtttatcaaattgcattcaatcaatttacaaatctactaaaagggaatatagaacaacaaacatctgagtcagacatacatactgaagctaagacagctttatttacgcctaaacatatcatccgcaaggaattggttcctgcttggttaaaagctgaacaggagcaaaaagagtctacaaaagaaacagctatctctctggatcaacagcttgaaatgattcaattaaagcaagatttagggcaagaactaacgccagaagaagaaaacgtactcaaagagcatagttctacgtacagttcgttagaaatggcgcagctaaaacaggatctaggacaagccttaacaccagaggaacaagctttattgcaccaccaggaccagttaaaaggctcagtttcctaattcaaaagtgaagaaatcccttggaagctgatgtttaataagagtattattatttagaacatacttctaaataaccaatatatgaccctacgtaggaggagatcacgatgccacataaaatgacaataacaggatctgcgacaggacctttacgagaatacgatcgctacgttgcctttgatatgcgtgaaaaaggttcacctgctgctcctaaaggactgaaaaagagcacctttatttcgtataccgtgtttgttgccaagaaagcctttaataaaaccggactaacaaaaaagagtattatgcatgagaaaatcttaattcaaggggaaccaacgctagatattcccattgatgaatgccctggcgaaataggtgttatctgcttccagattaccgttctcccgaataaaaacgataaagaagccaatgagtcaaacgataaaaaagaagcgaaacaagaggtttctaaggcacagcaagaggttgcagctaccaagcaggaagaaaaacaagagtctgtagcaaaagaagccaaaaccgtacagccagaagtgaacgaaacacctgttcaagagaaaaaggcttcgccacaaaagaagcagcaacctattcagcccaaagggacaaaggatgtcgtgagttttgaggacattatcgttcctgaagccttcttaaagacacgtccaaaccctgtgaaaacagaggaagtcattgaatttgtgaagcgcacaggacaccttgacaagccgttaacgattgagaaagaaacgaaggttttaaaggatggctatcgtcgttatattgtggccaaaaccatgaaaatggacaacgttccggttgtctatgactatcaaaaataacgtactatctaaggaggcagctatgaatactaaatatatgtcagactatgggctgcaaacatgggcttatcatctaagcatgagttacccttttgatttagattatttatcgccagatgatcgaagatataatatttacgtggccactttaatcccgaagttaaatatagatgaagattctgtccaattctttgaagattatatacgttttgacgtaatcgttgggacaggagaacatacttccagagagacgctggacatttctattatttcagatgatatgccagaatttgatcacagaaagtttgaatttgactatgagaagccacgtaaagcgatggtattcacaggttgggagaaaggccctattgaattaaatcttcttcatgtctatcttgaggagtcaaagtattacctagatacagagattgtttatattgggcaagcatttggagaaaatggagagcgccttcctgctgaagagttaatgtctgatcctacgttacagaaggtagaaacagatcttctacatgaatatccagaaaaagatctagctcttctattattggagttcaaatcacaattattagaggaaatagacagtgaggacgaagatctactcaaactacaagagatcacaaagaatccccctctggaattgaataatcaaatcatagatgcaacagaagcagctctaatcaatcagttcaaacctgagtacaatgagaagttcaacaatggtttttctcgcgtagaagatcacgggttacattatcattccatcactgtgcaggttcatcctaatattatgggattaaagctattctcaaaggaaaagacatacctatcaaatgagcgtattgtctcttctcctttactctcaaagaattaaaaaagagtcattcccttcaaataggttatgaaaagactataaaaaaagtaatacaaagtaaaagaccctcttctgcgaagcaagagggtcttttactttgtattacttcttatttaatttctaatgacggataaaccatatattaattaacactttcatcactttgaacatattgaagaactttcttatctatatatgattcaataaaatcttgtctttctcctaatttttcggttttctgcagacctagaaaaccacttcgtataaacctttcactttctggtttttgattccacaattcaacagcttcttcccgtgcttgaatccttattttcgtttcaacctctctcaatctttgctggtcttgttcagactttttaatgtctggtaaggttcgcattaattgctgaagagatagtatttcttgagtagtattttcagatatttgttttatttgcttttcagtatgtttaacaaacccatcaaacaactcagccattgattttattttatctgtattaccttctacttgttcttgcagttcctctactgattcttctaaaaatgacttaagagattcatttttctcaatcatttcatcggtcaattccttgttaaaatgcgcttgaatcatttttaaagagtagtcattctcttcttttaaacgttttgcttctagcagatcatttagatcctgctgactaaagcgccgatgacctccctcggttcgactaccctgcaaattcatatatttcatatattttcgcacattggattgagaccatcctagaatctctgcaacatcttttatttgataagataattcttcttgtgtttgcgacataaatcaatcactccttaccttgttctgcgccaagattgctatactggttaacattatatcaaatctactactaaactttctcgaaattcttcataaagtactatccaatttcaaacaaacatagttttgaatatataattctacacaaaagaagatataaccttttgtaatttataattaattttgtacaatcttgagtgtaaattcaacttaagttaaactaaaaggataatattatatttaattttgcacgttcttgagtgcaagtttaacttcagtttaactataaggataatattgcgtttaaacttatacattatcaagtataagtttaacttaagttgaataaattacacatgaatttgtataggtgaagtgcaggttagcgaatggtagtctcctttatagcgaaattacacttatttttgtattttaaaagtacaaaaaaaccttaatacatggcgtcctgagcgaagttatacaaaatctttatcaaaccaagtgtagaatcgctcagttttagtggataaggagctagagtgactgtttaagacagattctatagctagtaagttaaatagtgactgaaataaaaaaagagcctagattctaagaatagaatctaggctcttttctatttagatatgaatattcacaacaaagaccgcccattatgtatcagtgtataaggcggtcttaactgtattcatgctatatgtctattacaaaaatatcgacattattctatttctaattaaatattgaaatctgggcctctgtattactttctagagtatatgattagtcccttgactattatgcgccaaagtgagtcaaagtgagtatattttttaataatgtggagactatattattaaaaggagatgttaatcatgttctggtggaagaatccaaagcgctctaaattcggaaagtggctagataatgagggtattacacaagttgaattttcagaaaaaagtgaagtgtcaagaagaacccttacaaggctttgtaatgaaaaagagtacatacctagtccacagattttgagaaaaattatgaacgttgtaaagaaagtagacagtagtaaacacccaaaagatttttttgatatttgatatataggaagtgcaattactgtctctttatctattatccagctcaatcatacacaataaccctctattttttaaaaatagaaggtcagtaattagtgcctgcctgtcactagtcaaccctcagaagattacatctctattcttaaccaaaataaacaaaccttaaactatccatatgaagatttatcttcatttctagttaacataaagtctctttccagtacacatcacaaaaagaaccccatgtggcaaaatggtttcgcctcgagttctttttacgagtatacaacttttcatacattcttgatttaacaagacttttgttgaagacggggggggagagaaatgtataaaaaaagaaccttatgcacataattgatttttgaaaatttaataaattaccactatattctacccacataatccacatataataagaaagcgagaagaaagaagggattgtgtgttgaagagtaaaatgaatcagttgtttgcagaacaaaagagtgttcatatactgtattcttatgaccagcaagaaacgtatatacaacaagctgtaagttatattcaagagggtattcttgctggagattgcattcttcttattgaaaatgaccgtttttatccctttattcataaccatttaaaagcactcttgaccacagatcaaatgaaaaagatccatcgtataaacaactttgatttctattattcaagtggtagttatcatcctcctgctattcttgcttactttgataagagtgtacagccctatctagaaaataaacttccttttagatcatgggcacatgtagaatggagtacgatgaaagatccgttacatctaatcgaagattttgaaagaatcgtggatcatgcggtgaataaactctcttttccgttaatttgtgcatacaaaggagagaggatgccggagtatctccaaactattttaatggaaacacacccttatgttctcatggaaggtgatttaattacctctgagcaatatcggcccctaactgatgtagaataaaaataaaaacgcttacgtagctatacgaagcgtttttttatcgttaaggaaatgactagttctctttcttccattcaatttattgcccttcataaaatttccctttgtttccttatatctcttctgtttaactgtcatagcctaaatgttgattctaactagccttattcattttaaaaattttctttttaaaggataaaaattacttttttacgttaaaaacataataaaatggactcaatggttccactataaaaccattacttattcgtagcgaagaagagccctttcagtccttaactaattaagggcttttcttatttttcgcgtgtaactgccttatgttaaattgattttaattccaccagaagaagctggcggccttacgcttgcttcttttgtttgtttcggagaacttttatacttctccattaattcataaatgcttgctacttggataatgcgaatatgatctgaggacagggcataacgaacaggtgtaattaaaatgacagaggggaagataggtgatcggttctctggttgccagtgcaacgctttccactcatctgaaaagaaaaactcctcgtataaattaatcttaccctgcattttctgttctgaatactgatttcgttgaatttcaatccaaaaaggagatcctttaaaaatacaaaatagatccggttcaatgcctccttttcgtccagtgggcttatcttccacaatgacactcttgggaatactatacgaacacatctgcttatagacatccatgatagaaaggaaatgtaatattttttgagagttctttttgatctttgcatctacaggtaagtagaccgtcggagaatactgctgtgtgcgttcaattagccctaatcgatataaacgtaccatcacactattacatgcatttacgggggatttaagttgtttaaagaataggtcaactaatgagtctcgatccacagctctaaattgattaataaacgctatgatgtctttatcacgttgagataaacggaaactcatcgctgctcctccttgtctaataacccaaagatagactgtgataccacttctagttctggttcagggtctttcacgagcgttttataaggtgaaagtatttccttacaagctccttcatctaagaaataggcttgaaactctttcacctcatcaattttaattttcatgcgccctctagctgcagcatcgatttcttctgcgccgatcactccggctacttttgcatttatcgcatcggcctgccttccagagatccgaacccgtaagtttgctttgagtgctgaattcaacaaatcggcatctggacgctgcatggcaataatcgtatgaacacctaacgcacgaccttgactggcaaactgttggatcatctctacaagctccatttctctcttcactatggacatttcatcaattaccacaacgatacgaggtagcttaaagggaagcctgcttatatgtgtcaccccatgctctaacaataaatcgcctcttcgatacatttcagctcgtaataaagcaaaaggttttctcatatcctttgcctcaaaacaaagcgcatccacatgctcaatcccatgaaacagccctaaatcagctcgtttgagatcaactaatactaatcgcagatcattaggtgatgtatgtttcacccatgttgtgaggataacccgcatgagactgctttttcctgccccaatttcaccagaaatcagtaacgtttctaaatccgcaaaatcccaagagacagggcttccatagatatcttgaccaatacatacgggaagctccattttctcaatatgagaatgaatggcttcatacctataatggagcatctttggtaggcttttgtgatgaacggtaatactaaagttctttaggctgccgtttatttcaatgttgctgcctaatacttgtcgtaaggcccatctttttttatttaaaagttcaggatcaataccgttcagtaaggaaaaagcataccgagtgtaggtgttctgatgatcgatccgatggattttcggaaattgatacgaggtacgatccccacgctttatgacccgataaatttctgctgtacgaaacgctttaataagctttccacgcaattttagcttctcaaacatctagaaccctccttaaaacataaatgtcgcaaagaagtaaaataaggctccataaaaggtgacaggtaagataaaccgcatcacttttccaaactgatcagcaagatcgatgacaccccatcgttctaatattcgttcgatgacggcaattcctaagacaatgcttcctatcgttagaatagtggggtcaagcagggctagtggactaaaaggaacaaaggaataagtcttgaagggacgaggtctcgtgagagatagtttgggagagggaggaaagatttttcgaaaggtaaatccttttgtttttctcatgctggtaccttctttcactttttgaatttttttgctttttacatacctgtttttccagctcagcgcatccggtcgcccccttcgcctcttcggctcagctcccttacagattccacgaagggcctcgctaggcgtatacagcttgtataaccgaggtaacgatactgaactagatattaattagggaatggagttacaattctttagatactatgtagctacttcagtatgcttgcctgtccagtcgaaaaattaaaaaaacccttactacagcaggtaaggggtagctgattatgtaagaagtaatgggtttttatatgctggagattggtctagtgacttctctttttatgaaatggacgagaagtcgaaagatgtcacaccgtctaaagtagaacataatgagcagcagtggtagcgtgaaggattgtatatttcagattttaaaaataagtaaataaaattacataaaaaagagaaggtctttaatcttctcttttcctacaacatcaatgattaagctttgctaaaaaggcattatactggatctagatacaaggctttttctaatgtcattcattatagtttattaatttcaatttataatttatatataattatcgattcttaagcatcttatcgttataaccaaacagccatgtcagaataaatgatacagcaaaggcaatcaaattaacgaaaatatagataaaaatctgattattcaagtacaataataatcctggaatagctgtaacagacattcctgttgcttttagatgaaaaattgaggctaagaatccccctactgctcctcctataaggcccattataaagggtttaaagaaccttaggtttactccaaatatagccggttctgtaattcctaaaaaggctgaaaatgctgatgggaatgctaatgctttcacttttttatttttagatttcaatccaactgctagcgttgcagccccttgagctacgattgcgctagtgattaatggattgaatggattaaattttgtatcagctaataattgaatttcaagtaaattaaatatatgatgaacgccagtaattacaacaacttgttgtaggccaccaataataataccagctaaaccaaacggtaaatctaaaattgcttttgtgcctgttagaattatgttttctaatgaatgaaaaactggtccgatagcgaagagacctaatgtaatcatgatcaataatgttagaaatggcgtgagtattaaatcaatggaatcaggcacttttttacgaatccaacgctctaattttgcccctaaaagacctacaaagaaagctggtaaaacagaaccctgataccctacaactggaataaatccaaagaagtgaataggatgtgcgtctcctgaacctactgcatatgcgtttggaagtgctggatttactaacattaatcccaagacaattcctagaacagggcttccaccaaatactttaaaggccgaccatgcaattaatgctggtaagaatgcaaaagctgtatctgtgacaacttgtgtaaacattataaagttttcagggatatcattgggtgtataacccaaccaatttaacactgcttcttgcgttagtaccccacgtaaacccataaataatccggttgcaacaagaactggaataattggaacgaaaacgtcaccaaaggttcggatagctcgttgaaaagcgttgccttgtttcttagcttctgcttttacttcggatgtagacgtgcctttaatacccaactcattcactgcttcatatactttattaacagttcctgtaccaaagataatttggtattgtcctgaattataaaatgcaccttttactttctctatattttcgactgcttcttgatttacttttgtttgatcatgtaccataatacgcaatcttgttgcacagtgagcaaatgatgaaatattttctcttccacctattgcttcgactactttgctagctatgcctttgtaacccttttccacttgatgataacactcctttggtgataatagtataatgaaactgtaataagaaaaaaactaatattcctgattcgatcgtgcctatatttcttgctatctataaaagatatagtacaaacaaataggaaccggttccaaaaaaactaaaaaaacagcatatagataattaaatttttcctttcataggagccaatttaattaaataaaaagtcgacttggaaccggtttctttcgcttattatagtttatgaaataagaaaatgtcaacgctttcttttgttagtcagggattctaaattccagatctttaaaacaaacatagctatataaaaaagaaggtacttgaagggcgtcattacgcatgtagagcttgtattaacgcggtagcgatactgaactagatactaattagataacaaagttaagattctttagatactatgtagctactgcaggaagcttgcctgtctattcgaaaaatataaaagaacccttactgcagtaggtaaggggtagctgattatgtaagaagtaatggttttttatatgctgtaggttgtcccagttggttacctttttcatgaaatggaatagagattggaagacgtcctaaaggacaaaggaagcaagtatagataccatatgattttatgtatacgaaaagccgaggcttatcctctcggcttattctactacctattacttacctgtttcagcaaaacgatgaatacgctttgagttacatcaagaacgtcatgaaaatcaacaacacctgctaaaagagttaaaacggttcctccacaagctgaccaaccaattgataaattcttaggttgccaaattacacaagtacattgtgtgtgattggtagtccctatttttgggttgcgacaaagcccaatcagattagacgaaataaactatgggtatcatataattcatatgtataagaaatcaaaaggacatggcttttttatactgagaaggaggatttaacatgatttacgattgtgcaatcattggcgggggcccggccggactcaatgcagcattagttctaggcagggcaaggagaaacgtagctttgttcgatcataacaagccacgaaatgccgttacgcatgcttcacatggttttcttacacgcgatggtgttacaccagcagaatttcggcgtgtcgcatacgaggaggtgctgaagtatccgtcagtagagcatcatcccgttgaagttacggatattcgcaagcttaatgcaggatttttaatatctacacacgagggggaacaaattcaggctcgcaagctattgttcgcttcaggcctgcaagaaacattgccagatatcccaggtgtcaggaatttatatggaaaaagcctcttttactgttcatattgtgacggctgggaactcagggacaaatcgttatttgtgttgttcgatcatccccgcgtgttccaccttgcaaagttgctctataattggagtcgcgatcttatcgtctgtaccaatggccctggcattctgactaatgaacaaaagcaaatattagcttcccgtgacatcgttgtctctgaacaatctgtatcagcttttcatggcagtgatggcaagttgcggctagtggagttcacggacggatctagaatagagagaacaggcggattcattgcacctaagtgggtcccacgggctggttttcaacaagaacttggttatgcggtaaacgatctaggtggaatcctaaccgatgaaatgggaaaaagcacggtacctggtttatttgcagctggggaagtgaccactggattcccctcacaactcatcgtggctgctgcggctggcagtattgctgccgccagcattaatctggaattgacagaagaagcctttagttcctaaaggccggtttctagtccgtaccgtcggcaggcggagtagatcatttgatacatcttgtaacttctccttaaataataaatagaatttctaaattcaatttctcaaataaccaataataccaccaaaaattcctatcgcaagcgaaatgggaacagcagctattccgccataagcaacggcaaatcctaatccatctgcagctgatggatcagtcatgtgagttttttgtatagtaacccacacttgttgattaaccaaaatcatccagaaacttcctcttatagttttcgatagaattcaagtgtttcatggatgactattcgccattctaaaggcaggatagcacaaagaaacagacgtgtgaaacctgcaaatgataagggttttcgtgtgttttttcttgctaccttgtatatgtaaaaattttagtaaaacgtaggcgatgagtgcagtgaacaattgattgaacacggcgtttagtgttgtaccgaataaaatcggacgcgtttatttaggaacgcgtcttttcgtgtattggtccattttgttgaacaagggcctgtgtagagtacctccagtaaccacataaaaactacgctaaaacttaataccagtgaagttgtcaccaacagtaagcagggctactactactttgcggtctatgacaagaaccctgtatggccagatcaatatggaaggcatccggtggcttatatttgcgattacatttgtgcttacttcaacccagctgcgataaaaggccccctcgttgtcaattcagataactgctttgccatatatttagccgagtattgcatatcattttctaaccaataggagatcaacccaagatctacaaatgaaatataatgaataaaaatctcctttggaatcatcattttttcaggatgcggatgcaattgatctagcttttcgttcatacacttacggattatgcttagcaagcggtgttgaaaaaaaggaaccccattttctcccatcatcacttgaaagaagaaggagtattccgagataaattcaaacattctcaaaaaagttggaataatctcgtcgttttttgtaaattcttccgcgtcctttggtgctacatgtgtcgcaaaagataaaagtatttcatcaatagtttgatccagtaaatcatatttgtcacggtaatgctggtaaaacgtagcgcgattgatttcagcaccttcggttaaatcactaaccgtaatggcatcaaatcctttttctttgatgagaacgagtaaagcttctcttaataaacgccgtgttcttttcacgcgcggatccattgttttcttcatggaaacaaaatccctccttttgtcgtttttcaccctttttcctatacacataaggtctatttgttgtatagacaacatttcctcaatattaatcggttgtgagagataaacctaccctatacaattataacaaaacaatacgttgcttaagcaacatattgttggaaaaggagggaaaagaaaacttatgaatgtattaatgataaactttccagctgagggtcatattaatcccactcttggtatcgtaaaagcattaattaatcgtggagattctgttcattacgtaacaactaaggaatttaaagagagaattgaaggcttgggtgcgaatgtgtatcttcatcccaatcatcttgaaggaattacacctcaaaaaatggctagtattcacgaatttatgcagttccatttaaagatttcctatgatattttgactgttgtccaaaaattatctaattccataccatttgattatgtgtatcatgatacatttggtgcaggattattagtcaaagactatttaaacctgccttctatctcttcatcttctcttttcgctatacctcaagagcaatttttgaagatgttaagaaaccgttatggcccatctttagatccatcaccagagtttgaaaaggaaaacggtgttttaatagaacggattgaggaatgttttggtgtgaaagtaaagaacccttttcaatttatgatgaatactgctaatttgaatgttgtctatacaagcagggaatttcagccaggtggagaagacatggataattcatacgtattcattgggccctctattacgaaacgagtgcaaacgcatgattttccattagaagagttaaaaggtaaaaaagtgctctatatttcaatgggtactgtcttacaaggggttgagtctttcttccagacctgcatagaggcttttagagacttcaaggggaaagtcgttgtttcggtggggaggactactgatttagctagactacagccttttccagaaaactttattgtgcgtagatatgtaccacagctggaagttttagagcatacagacgtctttattactcatggaggaatgaatagcacaagtgaggctctctattatgaagtacctcttgtcgtaatacctcatacttcagatcagcctatggttgctgctcgagtagaggaactgaaagccgggtttagaattgatccacttgaagtaagcatagaaaagctacaagaatccgttcaacaggtattgtccaatcctgtttatcgggaaaatgcaaagaagttgagcaatagctttataaaagcaggtggagcaaaagaagctctaacggctatagatgagtatttaaaaaaggtaagttcgggtagcttctaaggcataaggggtacagtcagaaaaatggtcgattgacatctgtatcactcctataagagctttatcgaagtaacagctcaattgaatcatcaaaagggcagtatagtttcctacttaggagattaaagaaactcatgtcttaattaaacgggaggcaagggtttacctagcctctcatttattacacattcttaatttgtgggggaattttgcttgtttaattttctgatatacaaattgtttccgattaaactagtaattgttattaaagctcctacaagttcaaatacagttaagtgatacccttgaataaatgatcaattgattattaattcaggaagcattggtcagcctttctacatatggggcaagttacgttctgatctacgtgctcaatatgcaattcttgaaattgatgagacaggagttgctgaagtgagatttaaaaaaatcccctatgacgttaaagaggaagtaggcaatgctattagtaataatcttccttttgttgacctatatcgggaaacgctcgagacaggaaaaacttattctcatgaaattgaactactacaaaagttcattaatagatttaattataaagatgaagtaattaactcttttgaaaagaaatattggtgattaagggagagaaaaaagtctttttcagccaatgataggctaattggcaagtgcctatgatgtttgataattagacagtgtatataataaaaggggaaatacatatttgacatatctaatatgtatttccctttttgttataggattttataatttaagtcttgataataccttatctggatattcagcgtagtcatatactttatcaagatctatttcttgctcttttatttcttccaggttgatcactctttttatttggtttttattagactaacaaaattaggcctatataaaaggtgtatgttagaattactcaggtttttcaactagttgcatctgaaaaatttgcgtttcaggaataccggctctgtggagttcctctttaaatgattctctttgaaccgtcacgtaacgtatatactctaaaattgtgcatgaatgtccctccaccaaaataaatgcttcctgtacacgatttcttcaggagctaagctaaacgaacatcgatgatctcgcttaacctcattttattctttaactcaaatacgtcatcgatgaaaaatgttccttttaaaaaataaagttaaaaccttttagttgtttatgtattttgaatttatatattttatatggcataattttctagggagaaaggagtgaagagatgcagaaaatattaattattgaggatgatcccaaaatcgcggagcaccttcagtcgtatatagggaaatatggctttagtgccaccgtcgtggagaattttgataatgtgatggaagagtttcatagacagaagccagaccttgtattattggatattaaccttcctagctttgatggctattactggtgcaggcaaatacggaaggagtctatctgtcccgttatatttatatctgcacgagtaggagagatggaccaggtgatggcacttgaaaatggcggcgatgattttatcacaaagccgtttcatcccgaaattgtaatggcgaaaattcgcagtcagcttcgccgtgcttatggtgaatatgcatcacaggtacaagaacgaattttagagatacagggattaaagctgttcccggaaagattggaattgtcatttcataataaaacaattctgctgtcaagaaaagaaacggatataattgaaagtttactagaacgatatcctcgtgttgcaggtcgtgaagacttgctagaaaagctatgggatgaacaagcctatgtggatgaaaatacgttaaatgtaaatattgcaagggtaagaaaaaaatttgaggaagttggactttcaggtttagtggaaacagttagaggtgctggctatcgtctaatcgttacctggtgaagggttggaataaaatgaaattattctttagagagcatgcttttctaattgcagtacaaatcgtacaatttttcgtagttctttccatctattggcttgatggttatcgccacctccttccagccttctatgcaatctttcttggactattttttctcacaggttatcttgtttaccactatttaagcaggcggaagttttataagagaataacaaacgaactttcttctttggatgattccttccaaacaacagaagcttctccaatttcacaggcgcttgatcatttgctaaaggatcagtacaagcattatcaaacaaagataaaagtgctggagtcaaaacaagaggaacacttaaagtttatggatcaatgggttcatcaaatgaaaacacccctttccgttattgagcttatcgcccagaatttagacgaacctgactcttcgagtattcgtgaagagacggaccgaatgaaaacaggtttaaacaccatcctttacatggcaagacttcggaccatcgagcaggattttcatatcaaacctgtaaacttgtctaaaatgatcaaggatgtaaatggtgaaaataaacgattttatattcggaaccaggtatatccgaatgtcttacagcagaatcaagaaatggtcgtagagacggatgaaaaatggctgtttttcattctttcacaactgattaataatgcagtgaagtattctaaagggaagagcaatagaattgatattaccatttttgaaaaagaaggagaggctattttagaggtgaaagactttggcgttgggattcctgaaacggataagcgccgtgtgtttgaccccttttatacaggtgaaaatggaaggaagtttagagaatctacaggtatgggtctatatttagcgaaggaagcagtcaatcatcttggtcatcgacttgaatttgaatcccaagtgggtcaagggtcagcctttcaaattatttttggcaaaacacaaaaccttacaagagtgtaagataagtgaaaggaaaatcgattttttgaagatgccataaaagatatacttatcacaagtcaagtgtatggagaggagagcttgtgatgctaaaagtaaaacaagtgagtaagatttatgaaggaaaaattgcctatcgtgcgttaacggatataaatttgactattgacgatggggaatttgtagggattatgggtccatcaggaagtggaaaaacaacgcttctaaacatgattgctactattgatgaaccaacgacaggagaaatcctaatcaatgaaaagaaccctcatatattaaaaaaagacgcgttagcaaaatttcgccgccgtgaattgggtttcgtctttcaagactttaatttacttcataccctaacggttgaagaaaatattgtcttaccattaacattggacggaaaaaaagtgagcgaaatgaaggaaaaggcatatgaaatcgctggaaagttagggattacgggcattatgaaaaaaagaatctatgagatatctggtggacaagcacaaagagcagctgtggcgagagcaatgatgcatactcctaagcttctacttgcagatgagccaacaggaaaccttgattctaaatcttcaaaagatgtgatggaaatgcttgagtttatcaataaaaacgagaagacaacaatgatgcttgttacacatgaggcgcaggcagcgagctattgcgatcgtgtcatctttattcgtgatggtaagttctattcagagatacatcgtggtgataatcgtcaggcctttttccaaaagattatagatacactttctttattgggaggggatgcacatgacctttcgacagttcgcgtttaacaacgttatacgtaataaaaggttatatgcagcctactttcttagcagtttattcacggtcatggtcttttttactttctctatttttgctaatcatcctgtattaagtgaagatgatatgagctcaagtgtaaccacaggaatgaatgcagcagcaggaattatttatgtgttttccttcttttttgtcttatattctatgagctcatttttgcaatcccgaaaaaaagaatttggtttgttaatgatgcaaggtatgtcaatgaaacaagttcgtttgatggtgtttttagaaaatatgctcattgggttgttagcaacaataggaggtatacttcttggccttgtttttgcaaaggctatcttattactagctgaaaatgttttaattattgaccatgcgctatctttttattttccagtcaaagcaatcatcgttacgtttatttcttttatcattttatttttcttcatttccatttttgttacatatgttctacgtagtaagaagctgattgaattgataaaaggtaataaaatttcaaagggtgagccaaaagcgaatctttttttaacgttgttagctgttcttttattaggggtaggatatggtggtgccttattagcaaaaggagtaacggttgtagttgcaatggtgccagttatcatcgttgtttgctttggaacttatctgttgtttacacaactaagcgtatttattattggaagactaaaaaagaatgaacgtgttttttggtttaaaactaacatgttgctgttttcggacttagcctttcgtatgaaggacaatgcgcgaacttttttcatggtagctatggtttcaaccgtcgcattttgtgcaattggttctttatttgggttccaaaccgttctgacttcaagcgtaaaatctacttatgcagctacattttcttataagccatctaaagataatgaaaaagataatgttgcgtttataaataagactttaaaggaagaaaacattaaggcagattcagagcacacaatgttagattattataaaattggcagagataaaacccttattactaatcagtccgattttaacagatttgccttacttactggggaaactcccgttaacttaaaacatgggcaggctatggttgttgattttaacggtacaaaccttggaccgaaaagagatttactaaatgaatcaattaaattaacgtcaggttctactctaagggcaaaggaaatgattcaatcgaaagccctccctgtatctagttcatactatattgtctcggatgaagactacagtcatcttcctaagccagaggatgagcaaatctattatgcttggcaagcactagatgggaaagacaaggtgatggcagcctctgaaaaactatacgagaaactaccaaggcctgagattacagcagtagattatgaaatataccaaatgatgaaaggctacggtcccatcttatttgttgggctatttattgggattgtcttttttgtatcagctggtagttttctatacttccgactttatatggacctggacgaggataaacaaaaatttaagtctatatcaaaaatgggattaactgataaagagttgaaaaaggtattaaacaggcaaacaatgatgctgtttttcgtcccgataatcgtagcgcttatccatggtgctgtagctcttacggccttatcacacttgttctactttaatctatttaaggaatccgttattgttctaagtgttttcctatctattcagattgcctatttctttattgtacgctttttctatacaaagcagattaaggcgtcgatttaaagtcaatatgaatataaaagagaaaaagccagacaataactcttaaattcctaaacagtatgaaaagaagcgtgtatctaagagaagatacacgcttcttttttttgaatttaaataagtttgattataggaagtagacttttcaatctattagtttgctaaaagcgttcgtaaaactacatgcattttaaagaacgttcgtaaattgtttttaaatttaaacgaacgtcgagaatgataaattttttatacaaacacacagtccgtaaaagtatacttttacggacttttcttgtttcttgtatgcaaataaaaaaggatctcgggaagatcctttttcgttagataataatagtagttcccactgttacaaaggaaaggtcaattaatacgtttaaacctttgattagaggactttttattttaataaaatgttataaataattaagaatttaattgtttcaaaatagcacttttattagtactaaataatatgtaatcttgctttgtagttctaataaggattcgatcagtcgtagcataaggtgttcctattctaattgcttcagccttttttccaccatatgtttcatcctctgtaacttcaatgatttcatctaaaggaatctctatagtagataactgccattttataattaacttcccattatctttcttcactttaatccccaacatattaacaaaccccttcttatatagtgtgtgaatttaataaatgtcctttgtttgatctgatatttattatattaaatttaaaaccttccaaaacacgaaaacatttaagcgtttccaatttgattataagccttaaaaggtttttatttttatgtttaattataacattaaatccagaataatgtaaactatatgtaattatatggtagtaaaaatgtatcatttattacaaccttacaaaatactaatttatgtaaaaacgagccataatatatactaaagaactacttttattgaattttatggttataaaccgttttcatatattcatttttttcaaaaaaaggatttaatttaaactttagaaccactttcaataatatgggatattagttataataacccacgggtaccttatttaaggaaaaaaagggggaaattagaaatggaaaaattattaaaagaattaaatttagaagagttggaacaacatgtaggaaatggtttaggagctgctcaatgctcggccttatgggtccagtgtttaagtggtggcactttcggatgtggtggccaatccggagaagcttgcaaaacttataaacagttttgtagctaagtttgcttgaaaaagaattaaaaaaagaaatttcattgagttattccaatgaaatttctttttttagtctatatataagaaaagaggcaaattaatgaaaaataattttgtgcatactagacaacagactggtaacgattgtggtttagcttgtgtatcctcaatcttaaaatattatggactcaactatggtattgattatctaagagacttaattgttgataagaagggttataatgtaaaagatttaatgtctttattcaaaaatttcgatgaagtagaagtaaaacctttcaaagtaaacataaataagattgaagattctttagaacaattaaattatccttgtattgcactaattaacaataacaatgaagggcattatgtgattttatatgaaagaactaaaactaatttactaattagtgatcctttaaacgataagcttaaaaagatatctatacaaaattttaagaacagattttcaggaatagtattacaaatagaaagtgagcgtgtaccttctttttgtaaaagacagagtcttaaggaattttcattttttaaggatattcttctgcaaaataagtctataatattagcagcattttttttatcggtaatagcagtcattgcaactatatgtctttcaacctttgtaaagctggtagtagatttaattattcctaataaaataatagatggtcttgggactgtagttttaatattttttggtgtagttatgcttaaagtggtttttgaatatttaagaaatctgttcattataaagttctcttacattttggacaaaagaatggcaacccagtacttttctaaaattgta

SEQ ID NO: 52 - DNA, 29510 bp, Priestia aryabhattai
  source 1..29510: mol_type = genomic DNA
gtaaatagaaagtattcttttttttattactgatatagtataacactaatacgttcacatacacatttgtgtaagtgcatttttgataggagagagcagccagtatatgatggttgctcttttcgtttttaaggagatatgattccatgaaagatggtttagagtattcactctaagagatgggttcaaagagagaaattagaattgattacgacaaatatgagctttttctacaagttatgtaaataaaaaactattataacgaaagtattttactatttacttaactctatagagtttccatatatttttctctttataatctatatacttactccaacgttccccttggttaatataatcctcaaacttattatttttaactacaatacagccaccacactcatctgcggtctgttttgcaatggattgtgtatcaaagggaaatgcaaccaattcattgtctgtaaattcgtaactggatatctctttcctttttacgtttctacatgattcatttacataatataacttacctaactttataaaatagtatggatattctttgttaggcaatttacttccctccttttctacacccttcaattgctttataagtgagtattaacctattatttggacttaaaaacctaaaacccttctaaaaaagccactcttttagagtagcttcaattgggcaaatattaatttgttatgctaccgaaatagataccaaatagataatggagtcggaattctttagatactatgtagctactagagtaaggttgcctgtccatttaaaaaataaaaaagagcctttactgcagtaggggaggaataggtaatgatgtaagatgtgcttggtttttatatgctaggaattctcctaacggtttattctttttatgaaatggacgagacattagaaagtgtccaaaagaataaaaatagagggcaagcagggctatatgatcttatgatataaagagaaaaaatcaacaggattaatgggttttagccgggggtaaagtcaactaactattttataaggagagaatgatttatgggaattatatggatgctaattgtaggtggaattatcggctggctcgctggtttacttacagggcgtgacgttcctggaggtattattggtaatattatcgctgggtttatcggttcttggttaggtggtcttatcttgggaagttggggaccagtcgttggtggttttgccatcatcccagccataattggatctatcattttagtactaattgtaagttttattttacgaaaaatgggacaaaaaaagaatcatggtcatcacgcaaaataaattgaaaaacataaattggagggactaaagatgagagaagaaagcaagtctgtgttagatggttttgttgaagataatcaattcgaattagattcttaccttacttatttgttcgatcaatttaatcatgagagcgaaattccttcagaagcttaatgaaaacccaaatattttattataaagaaaaagagaaaaaaataataaatcagagtgtagcataagcgaccttagtaacttggtttacgatacatagggtcgtttattgttatggagaacgtttaagaataaagtgaagatgttcttctttattggccatgctcaaagattattgatcattttcactactgctttgttaaaaaacgattggctctcccctttgattggagctttttcagagtgccaaacggatgattgtacatacgattaaagaagatacatccactgcttgcaaaagtctttccactatcaaaaagaatttatctaccttaataagctagccatttagtaaatcatttcataataaaggagatggaagtgtgtttggattcagtgatatgcctaaatttttgttctctttcttacttgtactaccacttgtatcccttgttcaccaattagatcattctatcatggcaatttttttcggaggaagagtggattttaccattggaaaaggaaaaacgatttttaaatggaggaaaattaaaataaaatctgtttactttttagcttctttttgtgtatatgaaaaactaaaatacgataaccgattcacccatgcttgtgtctatgctggaggtgccattgctaatttagcttttattttccttataaatggattagttataactgacctcctttcagcaagcctcttttcttaccagtttgtctatttttctgtttattacattgttttttcgctattgcctattaaatttacagaaacgacttccagcgatggacgtgctatttatgatgcattgagatatgggaaaataacatgtaaccctgattaataaagctggaataatgatgtgaaacgatgggtttgcaagctacataggattcctttttacttaataaattagatgataaaaataaaattactttaaataatagggttaattgagccattagtgttgatattgataaataattgataccaaaaaaccttctactcgtgtcaggtagaaggtcatttgtgtgattgaaatgtcattgtataccctgcgagaaaggtaacacatttattcattaccaataaaatcatactttaaacagtttacatagggaaaccttctatcctatagatagaaggcaagatagaaacatactataagcaaagatagatgacttagataactttacatttatttttatacccagaaggaaagaacttaaacaaataaaaagcccttctactcatagagagtagaagggcacatggatgacatactgttaaaaaaaagttagttgattatagattttaaccgaaaaaataaaattcaaacatcttacataaaaaaatatcaatatgtaaaatacattgtatttcttctgatgctagatgttgtgctattggcctttatttttcatgagatagtcgaaaaatcaaagaatattccaccaactgaatatattaagttagagttactattgaaagacgtttgtataaggcattggttatgaatggctattctatacgaatacaagtaaaatgtgattcatattaaattagctttgtcatagataggcttgcgattgaattcgatggaaaagagtatcattctttaagagcgcaaaaagcacatgattgaaagaaaggtgcttatttgaggaaacgaggatataaagtaatgcgcatcagtggtagcagcattgtaaattgtataccttaagttctaaagagagttaaaaaaacattaaataaaaaaagagaaggtgagaatatgtgtggaagattttctttagcaacagatatatatataggcttcaagagcagtttaactttgaatttaacgatgaagtaacaattaacccaaggtttaatgtggctccctcccaacaaattctgacaataggatccaatggtggaaaaagaattggaataacgatgagatggggactagtaccttcgtggtctaaagatagtaaaattggatataagatgataaatgcacgagctgaaggtattgatcaaaagccaagttttaagacaccttttaaacgcaagagatgtttaattgtatgcgatgggttttatgaatggaaaaaagaagggaaaaacaagcaaccttttcgttttgttatgcaagatggccggtcattcgcatttgctggactttgggatgaatgggataaaaatggtgagcccctttattcgtgtacaattataaccaccaccccaaatgaaattacagaagaagttcataatagaatgcctgtaattcttgaagaagatgcatatgatttatggatggactctaaaatgaatgatacagagtatcttaaatcactgctcattccttttcctgcgaaaaagatgaaatcatatcctgtatctacaattgttaattcaccgaaaaatgatgttgcggattgtttagctccgattaacagtttatagagtaacaaagcccaattttctatgttttgtacaatgttgttgatatataatttctgtactcctaaggattggacgattatataaagccatgcgaatcgttggcaacggtattgtaaattgtatatctcaagtttaaaaatacacctttgcaataattataatctctcagtctgtgctagttgcaaaggtggcgctcattcatttgtaaaattcactaatataaaactttaatttttgaggagagagagaatgggaacattatttaatcaaacatctcgaaaagattattttgataatgatgctgttaaatttcttgatacagtaaaaactcttgcaagagatcatggtttgacagttgaagagacttgccgtattttggaactatctatgaaaatggatgattataatcgcaaagatgagcaattagcaggattgggacgattaataaaagatttaattgatgaaatttctatggtaagagaaaagttataacatgataaattagaaaaaatacctagagagtaagatgtttttctaattaaagatggttaaaacacagttaaactaaaaaaagagagggtttttaaccttctctttttctatatcatctatgtttagatactcttcttcatcccgcattctcgacattcacgtaagaatacgccactctttaccgaacttttgaagtaagatgaattgcagttgtcgcctctaccactgaccttattaaatggactaaactaataagaggttattatggttaatatgtatatattataaaggaacataagtttgttacaaatggaggttgtagcctatagcaggaggcgtagtaaagtcttcagaccgaacgttaatttgatttaggaggtgaggggtaggaattttctaattttgtaataatgggtattaagcaatcaggccagtttatggaggaccggaaacattacctttagtaaaataagaacatcaagaaaattggagggttcgtatatgacagttgaaggtaaggaagatattgaagggcttaaggagatcggcaagatcgttgctttaacaataagtgaaatgaaaaaacagacacgtgctggaatgacgaccaaagaattggatgaaatcgggggacgatttttaagaagatatggcgcaacttctgcaccaaagataacttataatttccctgggaacacatgtattagtattaaccatgaagttgcccacggtgtaccggggaatcggaagattaaagaaggtgacctaataaatattgatgtctccgcggagttaaatggttactttgccgattcaggtcattcctttcagatgcctttatataacccttctataacgcgtctctgtcaatacacacacgctaccatgatgagagttatttcttcacttaaacatggggcgagattgaatgaaattggaagaattattcaaaatgaagcccaaaaaggtggttacaaggtaattacaaatctgtgcagtcatggaattggaagatctttgcatgaggcacctagaaatattttacctatttatgacaagcatgataaacgggtgttgaaaaaaggtatggttattaccgttgagccttttttatcaactggagcagagtatacagttggaagtccggacggttggactttatgtgtccccgataatagtctttgtgcacaacatgagcacacaataattattacaagggatcaaccgataattacaacgatagcttagatattgttttcatatgttaagcccatagatgttgaaggaagttcatcaaacgggcgcgtttattgagcgaaaattaaaaggtagatacatattagtcatgtgcaatatgtatctacctttattttctatggctttcttcgatttagatcttgataaaactttagccgaaaattcagcatagttgtaaaatttatcaagatcaatttcttgctcctttgtttcttccatgttaatcactatttgtgaattaatcccatattcttttaaaagctgataacaaatatcacaaataaaatgatttaaccatgtagtatgtgaaagcgatggtcataatctaatcttattaaaaggaatgtaatcaaatgttaatgaaagagaacctacttaataggttctcttttatcttttggacattaacctgcttttgttgcaattactagtacacgtccttgatctaattccctttcatattgctgagcttctacatctgataaccctaaagaatggattttagaacgtaattcatctccacgggatcggaaaacattggccattaaatcaaatgctccttgttctgaaacaccgatatcgttcgtctctaatgcttccgttaagtctttagaacgatttttatcatgagctaataaatatacttcgtctcttgtgtatcctcgatttagaaattgttcaattacttcttttgcttgaactccattttctactactcttacatttttcataaaacaacctccttttatagttacataatatgtacccatttctaagaaataaaaatcatttttatactcaataataaatttaaaagatcttgctgcaagttcttccattctatgtttcaggtcatctattaagttaattccttctccttaaaatctaaagctgtaggaattaaaactcaggattacgttttggaagatgatgtacgggaatgaaatgaaataagacagctattaaataaaggaggaattgttatgaatataacagaagtaatgacctcaaatgttgagagctgtaaccttaaaagttcttgtggtgaggtagctactatgatgaagaatctagatgtagggattattccaatttgtgaagacgataagctaatagggttaataacggatcgtgatttagttgtcaatggattagccaataactttaatgccaatacacacatatctgaaatgatcactacggatgtcatttctggtacaaaacacatgtctgtagatcaagccgcagaaatcatgtctcagtaccaaatacgcaggcttcccattgtagaagatgggaaactcattggaatggtttccttgggtgatttagcagtaagtaatgattcaaatcaaaaagcaggaaaagttcttgaggacatctcagttcctgctgagcctaataaataaaagtcaggagactttatataagtagtttctttccgaattaaaagcacacacttataaggaaggagaagatactatgcccttattagatataagtattatacctgttggaacagattcagcaagctttagttcagaagtaattaatgctgtacgtaaggttaagggaaagaacttacattatgatgtaacacccacctctactgtaatagaaggagaccttgaacagttatggcaagtagcaaaagatatacatcaagaggcaatttcaagtgggcctaatcgaattatcacaaacatacgtattgatcatcgaaaagataagaaaacagatatgaatcatcaaatagacactgtagaaaatgcattagactagtttttaacacttatttaaaattcataaatctaattaaatgaacgttgctatatatacgaaaaaaagatagaaattagtatttactgattgaggaataatcctttcactgcccttttatcttattcgaagatgtgattctttatttaggaggagataaaaatggaacgaactgcaaagagagttgtaggagtatataagtcagagcaagaagccattgcagccgtagaggacctgaaaacacagggatacgctacacgtgacatctccatcatggggagagatagtagagaggtagatacagtaacggaagaaacagataccgaagttgttgacggaattacaacaggtgcactaactggtggagctcttggagggctaacaggtttattagcaggagctggtgcacttgctatcccaggaataggaccaattgttgctgcaggaccaattgcagctgtgttaactggcgctgtaacgggtgcaggagtaggaggtttaacaggagctcttgttggaataggtattcctaaagaggaagctgaatactatagtaactcagtcaaagaaggaaaaattctagtacttgttgatgaaaaggagaaatttggccgaaatagagagcaaaagccacctctgtcaggaagaattctttaaacctgaataaaaataaaaagatggttcactgtttatataaaggatgaatgtgtagatgagtatctgttaaaggttgtatacaatatgggggatgatgaggtttgaaagacttagtagtaagttaacctaaaacgttgcctgtaatgaaggtatatttacctgcttagtaaaagaaatttataaggacactcattacgtgaaatttcatgtaaaaaaggtctgtatctattttgatacagaccttttttacaatgtttatggaaatcttccttaagggaatttaataaataagcttttatttttataattcatgagataataaaatatactattgaggtgacaattggtatgtataacaagattctagtagcatttgatgattctaaaccttctattcacgctctccaacacgcagctaaattagctaaaatagcaggtactaaaaagatagtcattctacatgttaatgatgaacctatagacttacagcaacctgtttataacgtagagatagatcagttaattgaggaagagaatcataaaattctatctacagctaatggacttcttcttgaggcagggattccttatgaaactcatacattagaaggggatccctctaaacaaatcacatcgtatgtaaaagaaaatccatatgatttaattgtgatgggaagtatgggaaagggattaataaaaggaatgttcttaggaagtgtgagtcacacagtagcacattctgttgattgcccagttcttattgtaaaataaatttttcgatggttatttatatttaatgacgctaattaaacagttcagcaaaaagctctacgtgagaatacgtagagctttttatagaaaaagtaagggtgaacgttcctcaataacttctttaaattccttcttaggtttaaacgtggcaacccttgaagccgatagtattgtttatttacttgcttgaggtttacaacccggacattttgcacgtttatgaaccacaacgtaatagatccgataaattgaatttttctgcttttaaaaatgtattagaactcggttcaagcttcttgtaatgaatttatattgtaatgacaactaaattattttagtgtgaacatttgcaaacatattgggctatctataaaataagggtaagaaataagaaagataggaagacgaatccatgtccacaaaattagtaaatttacgaattgatttcgcttttaaacagttattcggcaccaaggggagtgaggatatcttaacgggttttctaaacgccgttttagaaaaatctttagaagcacccattacatctcttcaattggaagacccacacctccacaaggcttacgaagatgacaagttatctatcttagatttactagccaccctgaataacggaacacaagtaaatattgaaatacaacttcgtaatacgcatgatatggttaaacgctctttatattattggagcaaactatatacttcacaaatgcaagaggggatgccttatcgagccttacgaaaaaccatcaccatcaatttattggatttcattttattttcttcagatgaagaatttcagacgacaggtcagctatgggatacaaccaagcaacgtgttttaagtgatgatattgaaattcattttgtggaaattccaaagcttgtgaaacagtggagggaagaaaaagtcaacccgtgggaaaatgcatttgttcgttggatattattactaccggctcatgaagatgaacatttaacacaaacattggaggagattgccatgaatcaagatccaattttacaaaaagcgatggataaatgggaaaatatgagtcacgattcttctttcagaagcgcttatgaagcgcgtgaaaaactattgcttgatgagcaagctaaattagcccatgctcgtgaagaaggactagaagaaggtatggaaaagggattggaaaaaggcttagaagaagggaaaatccaattgattcgtagcatgtatgagaatggtatgcctttagatgatattgcaaaatttaccggattaagtatagaagaagtagaaagagtaatgcgataataaattaaacagatagataagttatgttataatagcgttgggaatgatacgtgaatgatttaatgtattcaacgtagcaaagagccacttgttttatacaagtggctttttatattggctatgtttttaataaagcctactcatcatttaacccttttccgttgagaatgttttccgtgtacttctcaatccttgactctcgagtcttagattgtttagctttagaaaaataaagaatatatgctctttgtcgtcctggagtcaatgcttcaaaagccgtctttaaagcaggtgtatcatcgaatttacgttgaagttcttcagggataaccaattcttcaggctttttagcttccactttcaaaccgtttttttcaacttcaatggcttcataaatataagctttcaagatgtcttccttttcaactatttcttgcacattggtaaaccgaatctgacgagctccttgtacattctcggtttgttggattagtaagccatgagaatcctgtaacaaagcacctttcggaaacagaagcgcacaatattctttaaaaccatgtattaaaacaatattctttttctcgaacgtgtaacaaggattcatccatttaaattcctctgtcaactcacagtcaagaacaatctttctcaacgtcttatattcttccatccactttttagctttatctaaaaattcatcaaccttgggattcagtttattatttgtcatcaaggagcacccctttttaattttccttctacttttcttttaatttcttttaatttttgaatgacttttaatacttctttcttacgtgctctctaattaaatattaaattgatttttaaatttaaaaatctcatctacagcctgacggtatccccctgatttttgaaaagattctcttatatctgtaagagctttctgaaaggaggaatgtcctaatacatgattcacggtttcacatagttgatttacagttaaattttgcatttgcaacttcattccagctccaagatgctcaacttgttgagcaattactggctgatctgcgctttgtgggattacaataagtggaaccccataatagaggccttcattggtactattcattccaccatgtgtgataaataatttcgtatactttagcacgtcagtttgtggaacgtaatttttcacaataaagttttcaggcatttcccctagatcagatagttgagttttcccaccaatagacataacgacggtatagtcagtgttctcaaaagctttaaagcaaagtttataaaaatcaatctcttgattaaaaacagtacctaatgaaatgtaaataacgttttttccttttaatacagaaaaatcgaagcttccttgtggttccattgtagcaatagatggtcctacgaatttatatgttggatcaaacatttctccagaaggctgaaattccctcgttgtatatacaatagtaagtggtgcaggattacaaaaaacttcgtaaggagaagtgatttcaaccccatatttctctttaatctttcttgttaagctttggaattcaccatttattctgttagcatgttctgatgggatattttgagatagatattcaaacatttttttaaacgatgtttctgtttgagtaaaagatgtgcatgagttaatggccgggagatttagaatttgagaaagtaaacgcccgcatccaaacatagagtcgtgaatgatgtaatcaaaatgttctccctgtatctgttcaagaacgctaggtataacgatatctgctgtatgtaaaagaccgttaattctttcgagcaaataattccttccacctgaaatgaaagcttttaaaaatttttggccgtcaaatgttctcacatcagctcccgtcttttcaatacgttctcgaaactcttctattgaaaagtatacgacctcttctccacgcgaaataagctcctgcacaactccaatggttggattgacatgtccttctgacccaccattaataaataaaacacgtgccaatataactcctccttaagttaaatattgtgtggactctactgaaaactcttacttaacttaaaatactaaaactaaatttaattttaaacgaatcgaacatcaattagttcacttaacctcattttgttctttaactcaaacacttcatcgataaaaacaaacaaattccccagggaatcaacaaattggatgaatcctttttctgtaatagattgtccctttttataatatgtaagataaacttgtttatttgtatgtagagcttcaattagggtgaaatttatctgttccatttgctcttctgttaaaacaggtttaggtaattctagttgtttgtttatgacttcctgtaatcctatgtattgatctggcacggtagcaaaagggcgccattttttcattcctctatattccatatcttttttctccttaggatttatggccacctataaggccgtttcgataacgagctgttgaataaggaaggtgactagacgcacgtagtacactattctttccataacgaatccgaatctcatcaatcgttttggcaagagcatagtctttttcacgctgatcaatatcctcgaataagctcatttggtcctcttcttgaatactggtgttcgataatgaaatccctatggagcgaatcggcattccactatcaaacgtatgtagaatggttaaacaatatggaaagatatcttggcttaagtttgaagctctccccatttccttttgtctggagaagcctccacctgtttgtttgctgtagccaatggataaatggatagtttgcgccaccacttggtgcatgcgtaaacgaaaacacacatcatccaagagttctaacagtaatgactccacttctttttggtttgtataatcgcgaaagagaatctgactcttcccaaaggaacgagatctaggaatgtacacatcagaaatgcggctaaaatcaataccattcgcatgttggtgcaactcttcgcccaggatgccaaattctttttgtaacatctctatcgaagaaagagcgaatgcttttatagagtgaatgcctaaatgatttaatctcctttccgtagcagacgagatcccccagaaatccttcatcggatgaatggaccacaacttaaagggaatatcctcatatcgccaatacgccacccctgttgggctattcttggcctcatgatctaagctaaccttagccagtaagagattaggaccaattcctgcggtagctgtgagtcttgtttttgataaatctcatgaatgattttatgggctaattcttcgggtgttccagcaaataaatgcaaagaagctgtggcatcaataaacaactcatcaatgctatacgcatgaaaatcctcgggagccacatactgtaataccaaactcgaaatatagttcgaagtcttgatatatctctccatggatggattcacgacatggatatctttccttttaggaatatcgaaaaggcgactttctgttttgatcccttctttctttaataaaggtgtggcagctactacaaccgaccccgaccgtttaatatcacctacaaccgcaagccttgtctttatcggatctaagccccgtatgaccgaagaaactgaagataacgataggtagcctactaagtgtaaaatctggtatgattccattctcttttgggctttcccccgttccacaccgtgcgtgagactttcacctcacacggcgctccagcaattcctaagtttgatttctactaagtcataaacatttcattggtttaatgcattagaacaaagttagttgttcatagtaagttttgttagtacagattgaattgtttcccacaagaaatcgcagtttatttaatttctcgatttgtttatctgtcacttttagtttgtccactagcttttttgccagaggttcattagttagatgtatcagcttatgaatttctgattttacgagaataagatttgcgtagttgtcgtcctgtgtttcgctccataatcgtttgtgatgacaatgcatgtctgtcagttcaagtttttcattcataaccccacaccttccgttttgtgcaacgaatagggagattcgattgtcattgaactcaattgttgctctgtcattaattactggatgttcccttagccaccttaattctgcttcggtcacgttttccagtcctttatggattagtttgcgtccttctgatgtgtacttattaatagctatacgtttactcataggattcttatgcagaacatacgcaaaaggaagaattggtcttttcatgtaaaaccttatggtttttgatccgagatagggaataattcctttatctttaccaacatacttacctacccttgagaaaccgaaggtgtctgctttgctacctctcggaagacgattgtacattttcctagttaagtttcgtcctggccaatggaaatctcgacttacatgggtggcaatacaatagtagttgtgcgctccaatcaccatactgttgtactttccaatattcctaattatctcttgatggcttgctgatttttgtaacttcttgatctggtctgttaatttagctacttgaattttgatagcttttggtgatacatgcgtctctgccacgtatttggtttttcccgtggaaaggcgcttgcctttcttggtcgcctttaaggtaaagccaagaaattcgcttctttccctctttagattcgtcacttttgacttttcttcagagataggaagtttcaatctttccttgagccatcctttacacgctttgtaaattttttcggcgttgcttcttgtattcgtaaatattttgaagtcatctgcatatctcactatgtacattggttttagtctggtttttttaagttcgacattctcgtgtgatcggttttgggccccttgctttgttagcttgggcgtcacctcttttaccacgaacgtttcccattgtcggcttatccaccaatcaaattcattcagattgatattggcgagcaacggacttaaaattccaccttgcggtgttccttttgtaggatatatagttgaaccatcagtcattataatgggtgctttgagtacctttcgtataattactaacagttgtttatctcgtattcctaatgtccataattgtcgcattagctttacatggtttacttcatcgaagaagcctttaatatccacgtctacaacgaaagttaaatcttgccgattaatctttctaactgaatctgcaatagcttgttcggcagaccggttaggtctgaatccatagcttctagggcaaaagtgtgcttcacatattggttccagaacttgcaagatacattgttgaataagtctatcccagaacgagggtatgccaagaggtctggtttttccgttcagttttggaatttcctttcgcctaactttacctggcgtgtaatttctaaatcgcattttaacagacttaacaaaactttcttaggacattttttcgacagttttaatggtaattttatcgactgatggtgttctacttcctttattccccttaatatttcgataggctagtagaatgtttttctcagaaacgattattttcattagttgtcggaaattttccttgttctttgccctctgatacaaattatcgaaggtctctgtcataccgtagtattctgagttccgaatatgcttgtctttgaggttttcccccactgagtgtttattcatggtttgtcaccgtcctttaaaattcagtgacctttttagtcctaccagaatccatgctaggatttagtgaaatcaggttttaaccttagttattgccttgtggctgttcctccagttctattacataaccttcatcggtcgtgccactactttcatctaccattaaagagagttatatccttacggaattttcccctctaactcgacatgcctgcctagttttatttcatactatacgttggtagcttccgacgttccttttcagttatcattaattatacttaggtgctcactctactccgtggtttgctccactgcctataacagtgtaagaattagggcatcttcgattacctttgtttccctaaaccaagtcatcttttcagacccgactcatttctaagccgtaaagctatcgaagcgtacattcgcgagttcgtcagtaatttatcacattctcaccgtatataatccacggcatacattactcgtccagttccaacgggtttattactccctttggctttcggttacctcataagaggtacttcgggttactttcatgcatacgttacccagctatggttgcccaagccgttgccgcgacttgaggttagggcgtattaccgcagaagtttcaaggcgttacccaatcattccttctgtcactgaaaaagttgtatctctagtaatctaaattcagattccattgagatcaatccctccccgttaggttattagcctaacttttgagattaacgtctcgcaccgaaaaagcttttcatgtctatacagataatgactctgtttggtagctgcccatagtccattgaaagtactccttaaataaaagaacatttgttccttatattatatacgaactaatgttctttattcaacaaaaactctaaaatcttcccgattattgctattgcctctacttcatctttctacattttataatttaaatgttatttacatagccacacatatcacgttttaaatagaaatccactgggtacatgttatacacaatgaggatggaattaaatgtaaaaaaagttttcgtttaattaaaatttaaggagatgggaaaatggaaacgagaaaacgagttgcaggaactttttattcggaagaagaagcgatacatgtaattaaggggttaaaacgtcaaggatatcgtgaaacagatatattggtagtcgcaaaggatagaagtaacacactaccgttaggagccgaaacaaatgtaatgatagaagctggaacgccagctgtaagttcattggcaggcgtgatgatggatagctttcttaccatgatgacaggtggaatggctactactacacaacctgatggtctaacttcaaaacttgttagaatgggtattcaaagttttactgcaaaacagtgtgaaagagatgtaaaggaagggaaaatcattgtcctaattgatggggatgaatctcaaacagttccttcatatactacggttagggagtcgccatacgagacagaggggtataagtcagtgcaacttcatgaagagcaactcgatgtaaaaaaagaacgtgtacaaactggggaagtacaacttcgtaaggaaattgtagaagaactacgaactatccaggttccagttatgcgtgaggaagtctacgtagaacgtcgcccggttatagaaggtcagtatgatggtagcccattgacagagaacgagatcattcgtattcctattatggaggagcgaattgaagtagccaagaagcctgtagttgtggaagaagtcatcattggtaagcgtaaaattcaagagattaaagagatgaaggatactgtccgaaaggaagaagtacaaattgaacagtcagaacttcccgcggatcctgaacttgctgactctgaaatctatcaaaacatggataatcacgtagatcaaagttatcaagcagttgctgctgcaattgcctctgatgctccaaaagaggaaaaagttaaactttcacccaacaagaaacaagaagctcaacttaaagtgacaacttctcctgttgttaaagagattgaagaggttacagcctcagtaaacaatcagaaaccagaaagtcaaattagtgacacggatattacgacttctgaaaaagagaaaaataatgagaaatcaacaaacaagcaaaagaaataagtatatctcctctatagtttataatagagggaataattgtgaaaatttaaggaagggctgcctagctctattggcagctttttttatttctctttaaattaacataagtaatgttcctaaaatcaaaaaagaaccaaaataactcattaaaatgagcataaacaggcaataaaataaaagaaatgactttcattactaggggtcatttcttttattcctaaaagtcctggagattatatcaaattccaacaggtattctcactaaattctagaaatattacttatcaaaataccttataaatatttccaattatgataaaagcaggtgattaaatggaacgaaagaagtttattgagcacattgataagttaatagagcaatctgatgcgtggagaaaggatgcggagaaaagagaagactggaacagtgcatgtttttaccaaggcgaggtcaaagcttatgagagagtaaagagattggttaatcagcagttacatgcataaataaaaattacaaccctaactcagaaatgagtagggttgtaatttttatttttctagtttccataagtttgattataggaaccctctcttcttaactagtttttttgaattataatatgcaaatgaactcttccttcctccacggtaagaataaaaaataaatcatatatttctatcaaacaatttaacatatgcttaattaccttttatattttatacaaacaaaagagtatcttaagaaatcctattttagcttgctgcatagagctaggaattttataatataaagtattaaaataattaaaagctgtaaaaaaagtttacagcaggtggatttttatgtgaatttgtcaatttacttttcgccacccatctctactaggagatgggtggctttatttcgttttatggaggatttaattatgaaaatttggagctatgcgttacttgtctttttaggtggctgttcatatggagtagtatcaacgtttgttaaaataggatatagtcaaggatttagtttaagtgaaataacaggatgtcaatattttatgggctctattatgttgtggggcatttcaatttttattccaaaggtacgcttaaagtataaacagtggctaagtttaatgataagtgggatacctatgggcttaacaggtattttctataatcaaactcttatttatgttgatgcttcattttccattattcttctactgcaatttacatggataagtataattttacaatatatctttaacaagaaagtacctaaccgtaagaacttaattgcaacaggaatcatccttttcggttctatccttgcttctgactttttgaaaacagagataactttttctcttactggtatcagttttgggatgcttgctgctttatcgtttgctttttttattttcctaagtggacgtagaggtataactattcacccaatttacaaaagtgccattatgacaacgggagcttcattaataatattcatttttttacctccggtgtttcttataaacgatgagcttaccaatggtctatggatatacggtcttctcactgggttttttggttcacttattccccctattttatttaatattggtatgcccaaaatcggtggaagcttaggcaccattctaagtgcctcagaactaccaatggctgtaaccatgtctacctgtattctgcatgaagctgtgtccttaattcaatggatcggcgtagtcattattctattggggattgcttatccaaatattcaaatgcttcaaattcgcttatctgaaaatggatattgattggttgaggcaaactatcataaaaaagatgtatcttaagatacacaaataaaaagtcttcttttccataagtaaatgttccactatacttagtgaaattatatcgctaccttcactttactattatcacatacttttcactgcacaatttacatttttgcgtataaagtactcctataataacattacataagagtcaggcctatcctatggggtttaaagagctgaataaaagtaaaaagatgccgagagtcatctgaaaaggtaagcaacatattggattaacatgcaacctttgcatgttaatccttaaggtttatacttataggttaaggttatttcgaaattttttaactttattcatgaactctttcactcttgtaacatccacatggttctcaaattttccatcatatttaaatgttgttccaacaacggcaccgtcagcaatagataattgttcttcaagattgcttaatcttacacccgtgtttgctaatacaattgtttttggaactatatcttttacacggcttaatatctctgtatctgtttgtgatccagccgttaatcctgatacacataaagcatctggtctattattaaacacggtagacttagcaatgctttcgatatctcgatctgctaaatatttagctgcttctggtacaatgttaaataacaattttacatcttctgctccaatcctgtattgatgcctaatagtatcgcccacatttgtattccatgttccaaaatcacttgcgtatacaccggtaaagatttctctaacaaactttgcacctgtggcagcagctaagtccaatgacttttttgcatcccataatacatttacaccaaatggcactttaatatctaccattagttcaccaataatacgagccattgcagcaacagtttctgtcttcacttctgttagataaggcaaactaaattcatttgaaaacataactgcatccacgcccccatcttgaagagcttttagatcttttcttgccatctccaccacgtagtccatacctttttctttattgaaataaggatcacctggtaatggaaggagatgacacattgcaataattgctttttcagtaccaatgatatcttttaaccacgtcatattattcctcctgataatttacagtatatgattcgataaaaatttttaattttatactttattaaacgctaatttcacatttttcaacttttatgaccattttttttgaaaaccaactaattcttcggagtctttagtgatattttttgctatgcgtgaatagatgagtttcaattcattatagcaagccacttcttctttatttggttgatgataatagttatttccaatcattgtggaaacagctgagagactatttacttcattgaaactatacaaagcaagtaccatagcacctagacatgaactttcataattctcaggaatatatacatccttatcaaagatatctgccatcatttgacgccaaaacgaagaacgtgaaaaaccaccagtcgcatagattgcacttgttttcccagtaagttcctccactatttctacaattgagtatagatttaataaaatcccctcaaatgttgcacgtataatatgttcacgcttatgctgaatacttaatccaacatacgaacctcttgcatctgcattccatagtggagcgcgttcacccgtgacatacggaaagaacagaatcccttttgaacccgaatttgccttagcagctgtctcagcgaataaattgaatgcatcggcactattttgtttacttttctcctcttcttgtccaaattgatcaagagcccattgaagaaccataccaccattatttgaagcaccacctataacccaatgcttctctgttaaagcgtaacaaaatattcttccctttggatccacaatcgggcgatccaccactgtacgaattgccccacttgtaccaatagtcgcagcaattactcctggttcaatggctcctactccaaggttagataacatgccatcgcttgctccaattacaaaaggggtagaaggtaagagtcctacattacttgcaatttcttcatttagtccttttacttgatatgttgtaggtactggcctggaaagttgttctgcagatatcccagcaatacggagtgcttcctcatcccatgttaaatcatttagatgaaacatgcccgttcctgatgcaatagaataatctactatatattttccaaaaaggcggtgaaatatatattctttaattgatataaacatagtacttcttgcaaaaatatcagagtgttcataccttaaccatacaagttttgagagaggagccatcggatgaataggtgtgcctgtccgcagatatatttcatgaccattccaatctttttttattttttctgtccattttgcacttctactatctgcccatgtaatacattttgtaatcgcttggccttcatcatctatagcaatcacactatgcattgctgaactaaatgaaacagtaagaatatcttttgacgctactttacttttctttataacgttttgaatggtctcgataacagcattgtagatttcttctggatcttgttctgccgcgccaacagtcgatgtttctaacggataatctactccatggctttccattaactgaccattttttttatataatactgcttttgtacttgtggtaccaatatcaacaccaataatataagtatctcccacattaatttcctcctcattactccctattggatgtcttctatttttttagtaacgccccgccttacaatcctttgattgattataaaaataaactccctctacgaatatgtagaaggagttttgtttttaaacaaacatatcaaataataaagctcccccgaaagcgataaatgaaagtaatgtctctaatatagtccacgtcttaaaggtttcttttactgttaatcctagatattcttttactaaccagaaacctgcatcatttacatgtgaaaacataagggaccctgcacctgtggcaataactaataattctaagtttacacccgacatatgctcaataattggtgagacaatgccagctgctgttgttaacgctactgtagctgaccctgttgcaactcggattaatccggctaccataaatgccaagacaattggcgataaagacaagttttcagacatttgagcaatcgacgtacccacaccactatcaataagaatttgtttaaatccaccaccagcaccaatgattaaaataatcgatccaactggaagtaagcattcttctgttaactttttaataatatttttatccatcccttgacgaattccaagaagataaaatgctgcaaaacaggaaaccagaagtgcaattaccggactaccgataaagacaaagaatttcgtcaagccactaggtagtgacatatatggtacaacaactgataataccattaagataactggtagtaagataataaagaacgaaattcctgttcctggtaactgttttgatgctgtggtaacacgaattaattctggctctccttcaggaattacacgcttatgaacccattttgcgaacaaagggcctgcaataatagctgctggtaatgcaatgattagtgagtagagaagcacttttcctagattggcattataaattccgatcgcagtcattgcacctggatgcggtggtacaatgccatgtacgatggataatccagcgattacgggtaacgcaattaataaaatattttgctgagttgttttacgaatcgaaatgactaaaggtaataaaattacaattcccacttcaaaaaatacgggaataccaataataaaccctgaaaacaacatagcccatggtaatttcttgaccccaaagaatctaacaaagaaatctgctacttgcataccagcaccagaatctgacatcatctttcctaaaatggtacctaacgctaagataccgactaaatggcctaaaacgcttcctactccagtttcataagcaccaacgattttatccattgataacccagacataatagctaaaaataaacttgctacagttaagctaataaatgcatgccatttccaccatgatactccgagaataacaattacaattgctaataatgtaattattaacaaatacatatctgtacccataaaaaatcccaccttctcccaaatgtgcaaacgcttacaatatattcctaagaaaaagattataaacctttttcttactgagttttatatatcataattgaccacataatcttgtatttccgtgttatagtatcctttactatattcaagcaaatttcccatttcatcataagaataacgtgatctttttaataaatttgtgcccttttttacacctagtttttcttctaaaagataagaagcagtagtaacagcaaattgatctcgaaacttttctaaagaaataccttgcgcttctaccaaatcgtataaggattgaacatttaaatctgatagttcaatattctccatgagctgtattgttaaataatgttcgtaataaatatacggcatatcatttagatgatacagacgttcgattcgaaaacactgctctccgaataattgatattcttctgtgccttcttggttaaagattacttctgcccctaataattgtttatgaattttatgacctttttccaccaatacttctgtaaaacgttttcctttagagagttttgaaatggatttatttcgaattactttcgttcctttaccactctttgtttcaagatagccatctttaacaagctctttgatagcatttcgaacggtaattttactcacatgaaattcatcttccaattggggctctgaaggtatattttctcccagagggtacacaccgtgtaaaattctatccttcaagatattctttatctgtaaatataaggggcctttttttcgagatacattcactttcactattctatttcctacctttctacatcgttcactgcttctgtcatggcccgcattacatcatctttcgaggacattggagtatctcctacagttgtatgggcaagcattcctgctgtagcagcaaataagacagttttttctgacgaaaagccttctagctcaccatatataataccacttgtataagcatctcctgcacctattcggtcataaacagagaaagtaagcgttttagaaaaagtaaattcttgatttttaaagatatatgcgcgtaatgaatgcgtattgttatcattaatagaacggtgtgtacctgctactacagagatgttatatttttttgcaacagttggaatcaaatccataagctgttctgtccgatcttccttgtcggttttcatacttaagacaaacatagcatctttttcgttcatcataacaatatcagctaaatgcagcatttcttcataatgtggttttgctttttcatatccatctgctccccaaagggacggacgatagttgcaatcaaaaacaattgttcctccattttcctttacggctttcgcaaataatttcatatggttacgaacagaatcgttcatagccagtgtaattccgcaaaaatgaacaacatctaattgctttgcaatttctttaaaattatatgttccttcagaagctgtattaaagctactttctaagcgattggaataggtgacgcgactagatcgcgccccaaatccattttctaaaaagtacatgccaacgtaatctccacctcgattaataaacgagtgtgtaatacctaattttcgaaggtatgacactgcagcatctcccactgcattagatggcaatgtagagacaagataacctgtatgcccatatcgagctagtgctgaggccacatttactcctgtaccagaaaacgaatagcttaatgtgttagcttgagaaagcagttcataccctggcacttgcaagcgcatcattacctctccaaatgcagcaaaattcttagccatgctgatcaactaacttcttcattgtttcaagtaactcacgtacatcatctacatttgttttccctgtttccttgtcaatgattgatgagtagacatgaggaataacttgtgggacgttggcttccaaagcaatacgtaagatttcttcaaagttctctttatcaataccaccagtcggttctaatgcaaagccttcttcaccacatgcttgtgcaacagcacgaaactcatcttctctacttaatcctttcattgggaagtattttaatgcgtttcctcccatgtcacgtaccaatgcaattgccgttttgataggcacaatagcatgctcatcttgtgctgcactaactggaccggttgagatattcacatatccaacttttccggttggggatactaaactattaatccagctttccttttcaccaagattagcacgtgttgctccaacggcaggaaacacttgattaatgtggctaccaggataatactttgcaatttctgctactacggctgcctgacggttatctccagcgcctaaaccgattgatactgcttcatcaatttcctttccgtattctttcattgcttttactgcctcttcgacagtagaataatccttagataatacacctactagcacgtaaccctctgcagcttcaaatacttctttggcattttcaatactatttgctagcacatttagtgccactcgctctttgtaaaatcgttttgtaatgtttgacatgttattttcctcctactatttctcgtattctagactcaattacatgtatatcgtcaccttttaaaggtcttggatcgatatcaaaatatccttgtcttatcccataatcacgtgtataaacagcaatctcaccttcacgtaactcttttacaacctctttcgcggttgtattggactgatctggactgatttgaattcgtgcacggaatatagctcgacctgcttcatcttgtacaattgtcacatttacgccttctatatcttttaatgacatcaaagcttgtaaactttctttttcttgttcacttttatcttctttctcgcgatactcatcaagagcttgaagtaatccaaacgtagtttccttaccaactttcatacttcttccaatgcaatgtaattgaactttcaaccattcaatatagttacgtttaccaccaacaattccagacgttggaccttcaattgcctttgaaccactataaatcgcaaggtctgagtattttacatacttttgaaggtcttcttctgccgcagcatccacaatcaatggaatattattcttctgtgcaacttcccacgcttcttccacagaaatcatatttttttgaacagtgtgatgagacttaacataaaggatagcagctgtattttcggaaatcgcttcttcaacatgagttgctctaccctcattagcatagccaacttcaataagctttcctccacctaaataaaccatggtttcaattggggccccgtactgtacgttatgacctttcagcataataatttcattttttgagatgacttcttgatgaaggcgctcgcttttacgacggtttccttgtgtaacaagagcagcaatagagagagcaattccacttgaagccgaattaacaactacagctgcttctgaccctaaaatgtcagcaatatggtcacctgctttatcaactaaatcagcaatttcaacataattttgtccgccttgtttcatcgcatccatcacggtatctgttggtgctgatacacctaaaatgctcatccttccactagcattaattactcgtttcagcccgtatttagcattcaatgaatgttccattcacaaccactccttttgcttctattcttctattccctacacgcttgtccccttcagaatcaatcaatgtaaccggctcattttgaacagaaaataatgttaagttagcaatatctccaacttgtattcgaccgagttctggtttttttagccagttcgctgcattagttgtgactgcttcgatcacttccttaagcgaatatcctaagtataagaatttagatagtacgtttgccatattgtatacagggccatccaatcgatttttgcgataaatgtcagtgcttattgtatttaaaccaatctggtattgttttgctgactcggcgactttaaatgagaaacttgcattgccatgaccaacatctaaatgtataccacgttcaatcgcatcactcagcacttgaagaggctttccttcattatcaaaaaggttattttcttttccattaagataatgagtgattacatctcctttttctaaaagtggaatgacttcttcaatgcttggaggggctgaacctatgtgtaccattaatggtaacgacgtttcttcagatagtccccgtgcaatacgtaatggttcaataccactatcaagaacaacacttttactcatccgcacctttaatccaactataaaatctcgatactcattcaccgcctgttttaccttctctttatttatccattctatgttagagagttcatcgactctttttaaaccaattcttgaaacgtttaaaaatgcaaataaatttgtttttgcctgctctctactcttaactaaatcagcaattcgatcggccccacaactgccggcatccactatggttgtcacaccatgttttatacctatttcatcaatttcatctccataaggactaaattcaggaaatgcatgaacatgtaagtcaatccatccactggatacatacatacctgaataatcgaatattagcctaccgtgtccacttccagcctttgttatctcagcaatcttaccggcttcaacaacgatatcaatttgctcttcattcacatgctttacattacgtaatacgaatcgttctttcacttatatcacccttttctgttactttatctaaataaaatcaaaatgaattacatccattagatcttttacatatagtacagtttagaaaattatcaatgttttataacgttataatgttatgttagcacacgatactcgcaaagtaaatataacattataatgtttatagttttaaaaaaactctcaaatatctattctttcttataaatacatctataatgtaaaaaatttatttaaatcacaacattctttatcgttttggcacttgtaaggtttaaaagaaacagcttctctacctttctaaggagtgcctctttgagaggaactctaacctatctgacataactaaaagttctgagaagattcatatcgatcaaatttccaatgtaaaataacaaaaaaaccctatctccaattttatactcattttgtgttttttcttctattgtttcaataaaaacgttcgtaaaagtgtttgattttc

SEQ ID NO: 53 - DNA, 28134 bp, Priestia aryabhattai
  source 1..28134: mol_type = genomic DNA
tgttctgagtcttctgcatacttcaattccatttaatccaggcatcattaaatccagtaatataatatcgtacttctgcttggttgctttatctaaaccagtacgaccatcgtaagctacgtcaactaaatatccttcatattttagttctaattctaaaaattctactaatccttcttcatcctctataatcagtaccttttgcatataaagtactctcctttgtctaaaaataaaaaacgtaaaaacttcttctacaaatgaatactaatactatagctatacccctcaactctgaaagacaataaaaagaaatatgaaataagttttctatgattttcttacttataagcttttcttcaatttatcaaataaaaattagatttgaataaaaaagagattaagaataaatgaatttatttcttaatcatctttaatgaatcatataaagttgctcacgagctctccttaagatcattagcataaaacgtctgaactgcgtgtgtatattttcaccaataaaattcaacattcagaaatgaaatctagtacttgttcctttaaatttctttaatggtgtatcctatacctcgaactgtctcaatgagtgaggtactaaatccttcttcaactttctttctcaaataacttatataaacatcaagtatatttgtatctcctttgtattcatatccccatacatttagtaagataccttcacgtgtaactgtcttatttttatggaggactaagtaaattaataaattgtactctttaggggttaagcaaattttttgcccagctctagttacctctcttgattcagtattgataaccatatctttaattaataataaagagtctttttctaccttatccctaataataagatgtttataacgtagtaaagaacgtatccgagccagcaattcttcagttttaaatggcttagttatataatcgtttgcgccatgatctaaccccattattttgtctagagttgaattacgggctgttaaaaggataataggcacgtaactttctctctttcttaacttacgcaagacctctataccgctcatttccggtagcataatgtcaagtaaaattaaatcaaacatatgtgataaggccacttcgagaccatcttttccattgtttttaattttgacttggtaaccttcatgttcaagttccatttttaatatgttgcctatttctacttcatcttccacaattaaaatactttctttcatataacccctctttgcaatctctatatttttgttttgcatatcgttctttccataataaagagaagtgtatagctatcacaaaccaacatctcattggaaaataggaaattttaagtactcaacataaaaatatacgataaaagacgtctgatatgatatcaaattccctacccattgttctttgctttaataacaattacttcactaatatcattaaagttggatgagggttttacaacggccaattgcgttagtccatattcatcaggttttactttaattacttttcctaaggctaatttcccttgaaagattgaactgatgggagaggtttgaactttatctcctacattaacctcagccccactagggatatttctaataattaaattaccttttttatcatcatagccttctaatgttccattcacgcttttcctatcctttaacattaccgccatgcgatttgtcctaaagtttgagctaattaattctactatagatgttgacgaaaaaactttggataccttcccaataactccatttgtgcccagcacattcatgtctattttcatcccctgcttctttcccttgtcaattgttatttcattgttccaattattcgttgatcgaccaattacggtagctgttacagggttataggctttcacctcatcttctgcttttaaaacttcttttaatactttattttcatattccaacttataaacatttgcctcctcctgattttcagtggctagcttattctttaaggtagagttttctctgtaagtggaaaataattgactcacttgttgaggttcactccaagaaagcttttctaaagaaggtaagctttctttgtacaaggttccaataaaaataattcctcctacagtaagaattcctcctattaacctatatctatgtcttttcttctttctttgaaaacgtatcaaactggcaccttcctaccaatagccatgctatttataatatcagctgtttcttaaaaacttcttaagtatcatcatctttgacctcttaacaactgttcaacgttctccttcttttaatgaattatacttattttctagcttcagaagctaaaggaataacgttatgttttaaaatttggctcacataatttaaatttaatactgtgtaatgaaatttaaatgaaatttaaatgagaattcaataaaaaataaatattttatttttataaaaacatcatggtccaaaagagttgataaaacatttaatcaaaaacattaataaaaagttttttatagaaatctcattaaatttttatttacttttcattttgattttagaaaaagactgtacagtttgaattgcagtgatgaagcttttaaagaaattttttaagaaaaacgatagacaagtgtgccgtttatttaagagaataaacagttagcacaagaaggagagaaaaattaaaaatgcaagcattttcgccaatgaataaaattgcacaaattacacttgttttttggattatgaagatttctgctacgacactgggtgaaaccgcaggggacttattagcacaaacattaggagttggatatgcagtcagtacgctgatcttttttagcatatttttaattacacttgtagctcaactaagctctaaaaggtatattccggccctctattggaccgttattctgtcaactagcgtagctggcacaactatgtctgattttatggatcgtacactggcattaggttacgcaaaaggctctatgatattaattactatattgttgtcgatatttgcatattggtattttagcgagcgttcattaaatatcaattatattagaaaccgcaaggctgaagtactttattggattgccatccttttctcaaacacattaggtacagctttaggagattttttgtcagatacgtctggccttggatatataggtggagctattctaatcggcagcttactagcattcatcgctatatgtaccttctatacaaagatttctcgtgtatttttattttgggtagcattcgttttgactcgacctttcggagcaacatttggagaccttttgacaaagccacatgaaaaaggtggtttagacttaggtacgacaggctcttctctagtcctagcctccattcttcttgcctttatgatttatacgacatttagacaaaataacgtaagctcagaacaagcgctgtaggttttcttttttatttaatacattataaaattcataaaaagaaaaaatctaatgaagtgactgattgcatgaatcctcttgtatgatttgaatcattggaatacatggaaggcatttataaccgtctacccaattggattgttcgtcaaagttattagtgattttatctactctaaccaacacaagtagcatattccttaatgactgttactggacatgattaaatgaatagcagaaagatatactataaacaagtaggttactctcctaaaacacacgactaatatgactgttagtcgtgtgttttatttcctgtatgtacaatattctatggagcatattaattgcagacacaaaaaaagctcaccttaaaaggtcagcctaaataggggagttctatagaaaatgttgtattgcattactgaaatttatactagcatctaatagtgaaaaactggtgaaatatacgccatacttatctttttaaaaatttcttctttgaaaaatgaagtctatgttttaagctctcactataaaagcgtgaactcgttatagtccacgcttttatacactatacacctttattccattaagatctatgaaagttaaccggtttctaatcatcttctgttcgttcaagccggctctttttcggtacttctttttttcttcaatcgctacccacattaaatatgcagctatgcaaattttttattattagttattcatgaatcttccatccatttaaggctttagccgtatcagcgataaaatgatcaataatttcacttttcccactgtccatagcggcaatttctgccatgtctttatcacttaaagtgaaatcccagacgttaaagttttcagcgatgcgttctttatgaacagattttggaatggtaacgacaccacgttgaatatgccagcgcaaaataacttgtgccactgtttttccatatttcgctccaataccggaaagtaattcattttggaagatattattttgaccttctgcaaatggtccccatgcttgtatttgcacaccgtattctttcatcactttctttgcggctttctgttgaaagaacggatggttttccacttggtttacagccggcacaacttcattatttagaattaaatcaactagacgatccggatagaagttggatacaccgatagcacgaattttcccttcctcataaatctcctccattgcgcgccaagaaccataataatcattaaacggctggtggattaaatacaaatcaagataatcaagccccagcttttccaaagaaacgttaaaggcttttttggcactttcataaccttgatcctgaacccaaagctttgttgtgataaaaagctcttctcttggaatgccactttttttgatggctgcaccaactgcctcctcattcatataagccgccgctgtatcaattagacgatatcctgcttcaagtgcgtcggatactgcttgttcacattgagctgagtcaggaacttgaaatacaccgaagcctaagaaaggcatttcaacaccattgtttaaagtaatgttttgcatataaaattcctcctgttttaaagtttcgttaaccttgcacaagtattatcctaatgccttcgtgttacacgaggtcaagacttttaaataaattaagttgaactattcaatctggaattaaagcgtataaggtgaagaaaatggttaaactatatcttcaaatttaaaaacgtgaatgataaaaaccctactgccttcgtgttacacgaatgtgataggattttaaacagtactgaagaaaaaatgtttatgggagtggccaaaatgtatacggtgaaagatgtggctaagctgcttgacataacggaacataccgttcgtttctacacggataaaggattagttccaagcgtacagcgtgataaaaacaatattcgtctttttgatcaagagtccattaattggctgacaggtgttaaatatttaaaacaatgtgggatgacagtggaagacattaaacctacgtagatttgtgtttagaaggtggaactaccattcatgagcgctatcaaatcattttaaaacaaaaagagatcgctaaagctcaattagaggaagctaaaagaactgtaaaatatatggacgaaaaagcaaatcattatcttgatattattaacggtttattgccagatgacactaaccctagcgaatgggaattaatacgtgctaataaaacatccaaaggatcttaacatcaactctatatcaccagtacaaagacttatctatcatacagtatagataagtctttgtactgccttcggttatcaactttaactctctttaaaatagcctgggcgattacagccgttttactccatttgtttgagctagaccgatcccctgtcagtttagagtgtgtgcaaattcttcctgcagttcttttaaaaacgcatttgccgcagctgaaagaacatgatgctttttccacacaatatttaaacctgattcaagtcttggctgtaagggtctgaaacaaagattactagcagtagacgtattgactattttatcaagtgttattgcatatccaacgccttcttcaaccataatggccgcattatatgcaagattgtatgtagtgacgatgtttaatttatgaaattcttcgccaaaccaatccgcaaattcattttttgaaaacgtctgtttcatggcctgtcgtgaacaaatcagtggaacgtttaataaatctgcagcttgaatgctttctttgagggcaagagagctgtcttttctcatcacaacgccccaaacatctttggcaggcatattaagataattgtattttgaaatatcggctggctgaattaaaataccgaaatcaagcaatcccttgtcaagccgttccgttatatcttcttcgtttccgctgtagaggtgatatcttatattgggataacgtacctgtacatcttttgctactcgtgcaatgtgtttcattgcttcagtttccccgccgcctatatagacatcaccacctattgtttcttccatcgaactaaattccgcctctaatttatccaccatattaacaatttcttctgccctgtttcgcagaagcattccttcatctgtcagaatgacactgtgactgctgcgaataaatagttttttacctaactcttgttcaaggtcttttaattgtctagacagagttggctgtgtcacatgcaaaacatcagcggccttcgtgatgtttccttctcttgcaaccgcaagaaaataccgcaaaactcgaatttccatatccccctcctcctttcataagctttagtatatacactctagaaatgcttatcaaacatatcatgatataagatataagtattttttatattcaaaagaagccggtagaataaataacaaagaagttcacctttaattattaaaagtggaaaggagcttaaaatgcaaaagctgttgtgtctgtcttctatcttagtaacaagccttgccctcgctgcttgtagcaacaataattcatctgcagcggacgcagatcataatgcaagtaagcatttaaatcgtgcaacagaacaactaaaagaggattctatttcagatgcaaaaataaaattaacgtttaacgacaaagaagtagtagtaaggatgtatgataacccaataagtaaggaatttctagttcgattacctttaacagtaacttttgaagattatataggtaaagaaaaaattagtattttacaaaagagattatcagcagatgatgtacaagctggagatctatcaaaaaaaggcaactttgcttattacgctccttggggcaatgtagctattttttataaaggttttgaggatgccacaaatgaccttatcatactaggtcagattgagtctggaaaagaaaacgttgaaaatattaatggtgattttacagttaccattgaaaaagtgactaagtaaaaacatgacaattgctctttaaacagcccgctttgaagcagctagaacataacgctttttagaaagaaggaaattgattttatgtctaaacaaaataagctacttatatttgtcttaaccttaggagctttcgggattataaataccgaaatgggggttatagggatactgccctacattgcggatcactttcatatcagtgtatcaaaggccggatggctggtgagtctctttgcgcttactgtatcaatatctggtccaacgatgcctttactcttttcaggagtcaaccgtaagaaagcaatgttacttgtacttggtattttcgttttaggtaacattatttctatctttacttctaactttgctattgccataattgcacgtgtgattccagctatctttcatccaatttatttttcagcagcttttacaatggcagcaaactccgttagcaaggaagacgctccaaaagctgtctcaaaagtctttattggcgtatctgcaggtatggtgcttggtgtaccaatcgcaagctttcttgcaagcacagtttcgtttcaaatagcaatgacatttttcgctgtcattaacgctatagtatttattgctacgtgggcattcttcccttctatgcctgttaaagaaagactttcatacggagcacagctaagcgttttaaaaaaacctattacttggctttccattattgctgttcttttactgaattcagcagtatttggggtatacagctatcttgctgagtatcttaaaagcgttacgaacatctctggaaaattaattagtttcatgttgattctattcggtggggcaaatattgtcggaaacattatcgcagggaagttacttacgaaaaacgccattaaaactgtagtcgttttccctttcgcattgggagtcgtttacatcattttattcttcgtcggacagtttacttggcctatggctatcctgactttagtttggggaatatttgctggtataggaacgaatattaatcaatattggatttcctccgctgctccagaagcacctgattttgcgaatggattatttttatcatccgttaacttaggaacaacgattggcacagctgtgggtggactatttatatcaggaatgggtacacaatatgttgtactagtggggatcttgtcattagtattgagtgtactatttattttaccaagaagctacatgcagcgtccgataagtcaactttcaaaataagacatcagcgcaactttctttcgggatccctagtaggatccctttgttttcttttattacatctatgaaaagcagcaatccgttcctttatacccctcatggaacagcaatcctacggaagaattattaatgtttcctcagaatatggagccatgagtgaaatgtcatctccaggagtaggcgcttataagttatctaagcttattctaaatggcttaacgcaattaatagctgcagaaagcgccaaagatatcaaaattaacgcagtcgatccgggatgggtaagctcagatgtgggtggaccatcagctccaagaactccagagcaagctgctcgttctatcctttggttagcaacgattggaactgaaggaccttccggaggcttttttaaggatgataaacaaatcgattggtgaatgtttagagctttaagtacctcccctatgatattttgaatttataataaaaaacctacggattattaccaataatccgtaggtttttttgtttctagcatatatgcaatctattattttatgttgttatattgctcatccgttactggttctaaccattccggcgtaccagcagtgatggcaatgtgttcaaaccagctgtcttttgcagcaccatgccaatgttttacaccatcatgtgtaacaacaacatctccagcttttaagaattgtgcaggttttccttcttcttggtaccagccttcgccacctgttactaataaaagctgaaatccatcacgatgaatatgccagttattgcggcatccaggttcaaaggtcacatttccaactccgacattcactttgggatccgcgattaatgtttgaagatagctttgtccaacaaaaaattgtgcatacgcttcgtttttttctcctactgggaaaataacgccattttttacttcttcatgttttgccattttgattcctccaataatatcattcatagttgtatttcttggctcattcattgctattgcatgtttacttcaacttcccaccaaataccgggaagtagctatgctcaccataatcctgaataggttcgacatttttcaaaatttccatatctgcatcactaatcacaaaatcaagctctgtattgattctcatatgatctgggtttgcggtcttaggaattactgcaagaccaagctgaatatcatagcgtaggcaaagctgcgcgacagataccccgtatttatcagctattaccttaacttctttattatcaagaactgcaccgtgtgcaattggcgaatatgcttctaccaagatgtcattcttctgacaaaactcaattaaatctaaaggcgtgttgctcacatgtgctaatatctgattgaccataggcttgatttcacagcttgaaagaatattctctatatcatcctgaaggaaattagaaagaccgattgcctttacctttcctgctttataagcgtcctccattgctttccatgcctttttgttttcttcgaaatagcgattttcttctctaaactccgtccaaggctgtggactgtggataatgagaagatcaatgtaatccagccccatctttgttaaagactcatcaatggactccgtaacttcctcataagtctttgcttctgctgcaacctttgttgtaatgaaaagttcttctctttcaacaccgctaaaacggattccttcgcctataccagcttcattcatataagcttgagccgtatcaatgtgacggtacccattagagaccgcatcacgcactgcctgcgctgcctgttcatcatcaagcagccaagtaccaaggcctaatagcggaatttctacaccgtttgataatttatacgtttcgttaaacatgttttttatctcctttgaattgttctattttttatagtaacttgtcctatatactttggtttgccatttctcatcagggaaatcttcacataaaacagagattctttactttcttctcttagttttcagggctaatttcattaatacaagctaatgtatttagtgttcttggaaagcccatatatggaagacaatgagtgattgcatcaatcaattgttccttggcatttcctacattcagattcccttgtacatgtgccttcacttgaccttcagcaccacctaacgcacttacaatacagagagttaatagctctcttgtttgcaaatcaagtccgctgcgggtgtagaaatctccgaaacaaaaagccgaaagatattcctgtatatgcgtttgattcgatggagcattcttctgcatttttttaataacatccccgaaaatctctacttgagtagccagccctttttgagagcgattctgttcatttaccgtcttttgactctctatcggtaaaacaatttcctttgctttgaaaacctcgttaactttatcgatggcatttaacgtttttggaaatccaatgtatggtgcacactggtaaacagcttctttaatttctacaggtgttagaccaacactcagcgctgcgctaacatgtgctgttagttgaggcaacgtctggttagtagcaagaactaccaatgtaattagctcgcgctccttgtcatctagttcaccttgataaaaaacttctccaaaaataaaatggctcagaatgtcctgaaaattcggatcggtaacatgtgtagctggaacaccatcgccaaacagctgcttgtatttttctatactcctgtcaatgcggttcacaaacattcctcctattgaagttcatttttctatagttttaaaagtatctacctgtctgctaaaaatcaatattgattgattaatcaacatctgtctataattataaaagcaaataagatcctttcaatcgctaattaaaggcgattcgttgattactcaacaaatgaagagatattgttgaatatctttaaaaaaagtgaggttttaaagtggctaaagtcgatagaagaatactcaaaagccaagaggctataaaaaaagcagttactgagttaatgacccaaaaacgatttgatgacattaccattcaggacattgctgacaaagcaaacgttaaccgaggcacaatttatcttcactacatggataaatacgatttactagataagatgattgaagagcatatgaacaatctcgaggaactatgccattcggctgctgatatgacgtttcaagaaggaaattatatttggtttgaatactttgagcgccaccacctgttcttttccaccatgttagaaagtaaaggcgcacattattttcgcagtcgttttctcgagttagtcatccaagagtatagtcctgaagttgatataactaaaggtgaaaacgaagggttaagtaaagaagttgttgttcaattctttgcctcagctgttgtaggaacagtagaatggtggtttaaaaatggcatgcacgttccaaccgatgtcatagctgagcaaactggcatattgttagatcggaatttagaataatttattgcgtttttaaaagcaattaaataacctggactctatagaggatccaggttatttataaaaggttctcaatatcaggataccctttattatttccccatttatagacagcttgtctagatacattcattgccccagctacttcttccctggacatctttttctcttctcttaacttctgcagctgttcccctaattcaccttcatcacctctaaggcctagctcacgataagtatgtaaaaaattccacaaacgcttagtaacaagctgtaaaccattggttaacacagcaggtattagtactaatcactatacatgtccctattaaacaaataaaaaaagctagcataaagctaacttttttaagttagagataaaggcaggctaataattagcaaccgccaaatcctccccaacaagcacagccaataatgattaataagataaacagcacgataattaaagcaaaaccactgccaccgccgtaaccgcagccgccgccataaccatagccacaacctccgccataaccgccaaagaacataaacttcacctccttctcgttcatacatttagcatatgatgaaaaacgaaatttgctccacgaagtggatagactacgttttatatcactataaataaaaaataataaccttttagtttcttttacatacaatgaagcatcctcagatcccatatatgagttttactccctctgcaatagattgtttgaattccgcccaatcagttctattgcgtataaaagcactcactccctgcacagcctagaataaaaaagtctttctcaaatttgagaaagacttttttattgttattaatagccaaatccgcggccgtaacagctgcatccaataatgacaagaagaataaacaggacaactaataaagcaaaaccagacccagctcccccataactagacatataaacacctcttttcgtggtatttaactaaaggaaaaaactttaaatatacatgggttaaggtattatatgtagacatagctcatatcgattggattttggtctaaaataggctactttgtttaacggtagctaaataacatcctaaatttcacatagtaaaaacccttcattgttaaaatgaaggggcttttttggctatcagcaccaaggacgagttctaggaggacagcttggagcacaaaaatgttgatgcgtttcctgacatacaacggattctgtatgcgggaatgagtgcatatatttatattttttttgataaacatttgtggtatgactaggatgcaccactggcacaaacacatcttgaccagcaaaagatgtattttgtttaacaaggtgaattatgaaccttttaaacatgctttgtaatagtaagaatgaggtttttttagttcattctgatagcagtagaagtttttttaatgtccattattcctcaagattaacatccaccgctgcattatcaatattatttaaaatggttttgtttttatcgtctaattcattacgtaaaagtgaattacgggtcgcttcgtataaatcgtagcttctttcatcaactggagaattatgatcttcacatatcatcttttctgattctttgaattgatctgccataccagtcacctcctctgtatagtatgtgagttgattagaaaaaacataagaactttatctggctactgttgggtaaggtttaatcaacggttagctgtttctgtatattatgtttacatatgaccttaggtggacacaaccgtttcttgagcatgcttttggatgatttttggaacttccagcaatgaattaacggttatcaatttaccttttggcgcaatatcaattttaacttgattgtagctccactccagttcagaaggtacgtgaatcgcatgtattccaacttctactgccggtcttatatcggtttttaatgaattgccaatcatccaagtcttttttggatcgtacttaatttggtttagtatttcttttaatgcaggtgtatccttttgttcagaaataaacactcttttttcaaagtatttagctagctctagctgaacaatttttctaccttgattttcctcgtctccacctgtgtgtaagtagagattatgtccttgttctttaagcttatctaatacttcatacatatttggcaaaggctctatcggtacttcaaatacactttgaccaatttttttgactctttcgactctatcttcatggatatcttgatgattttgtttactaaaaaataaataagtagctactaatgattctggaaaacgggaagagtgaaggccatactttttgatactttttaaatctatctctaactgcttttgttttatttcttccttagtcagattctcaaaccattcctgcaattgagccacaaaagcatttatggtgtctctaaaatatttattacagtgaacaagcgtatcgtctaaattaaaaattaaggtttgcttctgcatttcgttaaatcctttctacaatggatgtacagacagtataatgaaaaaacactaaccacttttattacctatccacacctaaaaccaaggtgaatttcccaataggttagggacaagcaattgattactatactgaaatgagtatatttagtggaaagatccttctagcatataaaatagaaggatctttttataagataaaaagctgcaggatattcctgctaataaatataacgttcaaaatgttttctattcatgtttgttttgaacgtagaggtactcagtcctgaacgatttattagcggttggctgccttcgccttctttaggtatattcatttcaagaccttgtatagtgaaaggatcatacatatacgttgttcgttcagtttctgtgtgcgacattaacttcacctctattaataaccctcattttttcaaatcatgttaactcgtttacagcaggttctttaatgaaaatatctacgtttcgtaggtcttttcgctaaaaaagatccgccgttttctactttttttattaagttgtaatttcttgtggctcttcaccttcaaggtcagtaaaaaaattttctaaggtttcactcgggtcaagagcacgcccatcttcttcgacaatacggttaagcgtaggatcattgttgctatctttatttttatagttgttataatcaactctttctgcaattcctgaattatcaacgcctttaaagtctttctttggcataaaaacacctcctagccctattgtttgaaaatttgaagataaaataagtggaaggttaagttatatttttatttcccgagaattaatcagatacttgttgcaaagagacatgtacaacatgcttaattgttttacgaaccggggaaactaaaacgtcaaaacttaatttactgaggaggaatataagtggaaggaaattcaagcacaagacagtttcaggatgatttaaagcagtatcaaatgccagattcagtaaagcaacaaaaatctggaacttatcgagtcggatttgaatcaaacactggaattgaaaaagtacagaatcagcaagaaggaagagaaaataaataagcttgatcactttatacttttacatgacgaggagggcatcccatggatcaacaaaaaatgttagcaaatgaattaagtaacatgcttacagaaaataagctgccgattacaattgaagaagatatccatgaaatctgcagaggtttacaatcaggtgaaatcagagtgaatgatttgaaagaaaaagacccttttgttgtaaatgcagttcaagaagcaatgggtagaataactaaacacaattcttaaaatagctataaaaagcaatcatttttattaagccaaagactaactctttatagagttagtcctttgtcattcaaataatatacccatgaacatgaaaaaagaatgacaaacgagttgtcattctctctcctacacatggcaagcgtttagtttttagtcacaaggaaaagaaacatctaatcccactttttacagtgtcggttgtttctaaaaattagtatgtcatcctaacaatgaaatatacatccattatttaccacgaatacatttcttccacaataggaaacttaagaaaaacaaggaggtgacacaacatggcaaacaacaacagcagcaacaacaatgaattattagtatacggtgctgaacaagcaatcgatcaaatgaaatatgaaatcgctagcgaatttggtgtaaaccttggtgctgatacaactgcacgtgcaaacggatcagtaggtggcgaaatcacaaaacgtcttgtacaaatggctgagcaacaacttggcggcggacgtttctaagacaactttataattgatggctgaaggaagaatgggtccccattcttcctttttgtacgaataaaaaaggaaggagagagtatatgcagcaacatcaatcagctaaagaaaaggcgggttttactgagaaaccagcagcttctgcaacaaatgcacaaaaagtaaaacaagaaatccaaagagacgtaagtgaaggacaaggtgcaatgacttctcgagaagcaggcgcaatgcgcgattaaaaattaatttgagcggttttaatcctcgattctttgtacaaaaacctaaaaaagtacctcgattaactgaggtacttttagcagtatactctatttcgacgcgggagctgctttgacttcggttgtgtttcatcgggtacatgctattgaaaaacaaaggcaaacagtgtaatccctaatatataaaagtcgagcctgtccaactgaaaaataattagtttgtattttgtcccccgccattcaacccttcttttatgtacgcgttaacctgactatttgaaagcaatccaatatgtccaatgccataaagttgaatattccttgctccttgcagcctagagagactattaacaacaatttgatcatttatgctgtagatcgacgtataaagaattttttgattgagatctgtacctgggagggctgtcgaagaaactaaaccattcgcccctcctaacgtcacgacattttcaatcttattccctccccctagatatttaatatagtacagcgtgtttgctccccccatactatgagcaacaatatctaccttcttggctcccgtctctttcaacacttgatcaatgtatcgagcaagctgaggtccattattcaaattgttgcctgtcttatctataaaatcaatagcataaagatcattgcgatcccacccttgagcgattaaatagtttttgatagcaataaagttataggacgcaccgctgattccatgaacaagaacaaccggattgtggtttgcttcggccttagcattcgaaggctgaattcccaatgcagatacaaccagagataaagcaaaaattaatgcggcaaacgttttcttcatttcttttctcctcctcaaaatatgtaagtaacaacctctatagattatatataaaaatcctaatatggtaaacttatactcattagggatttaaagttatattcatttgttatctatgagtatttttataatttttatgacaaaaatcatcacctaagcttttctgtaaaaaataaggaggcgaagaaagttgtattggatttatctatgtttagctattctttttgaagttgccggaactacgaccatgaaattatcagacggttttactaaaattatgccaagtgtattgcttatacttttttatatttgtagtttatactttttgacattaacgttaaaaagtttagaagtttcaatcgcttacgctatttggtcaggtatggggatgataattattacgctaattggatttatgtactttaatgaaagtgtaagtctgctaaagatcgttgctatagctctcattattatcggtgtagtgacattaaatatgaccggggaaaaagaagctactactagtaaacccactttggaagaaaacactagataaaaagatgaaatatttataacctttcgctcagggctacaagctattgcatattgagcacttatgaaagatttcaatttaacatggtgggcttttaatttgcacttgatgatttaccctctattctttataaaactatttataaaagataacagtaatcaaaaaaagcacctttccaggtaataaagatattaatgtatatataaaaagaacagatctccttaaggtgatctgttcttcaagttaatctagttgcataaattattgtaatccctttcttatacgttgcttggctactatctttatccaattcctattcacctttaaaaaatcagtggggaaacgcccttgcttaagttccatttatttaaggtaatcaattcaatttcttgatctgcaaagaaacaaataccttttgcattgtctccaggatagattctgctcgtcatcactttctcgccttcattaataaaaacttcgatggacgatttatcaacaaacagatgaagatgtaagtgactgtcatttaattgaacaggtgcttttcttattcccccattaccttcacctgagttatcacgattaaagataaacaaattctctagcctatcataagttaagagcgtttcttgttgagtgtcattatctgttctcaattttattccgaattgtgaagcagcttttgcgttaaatttcacttcaagttcgtaacaatcacctgaaatacctgcaagttcttgttctccgttaaccgtgatatttttatactgcacgtgatgttgacgaagctgcttaagctctggaattggtttactaattatattcccttgtttagtagaaagctcacgcggaatagtcattgcgcctgcccaattgtgtttttgttcaggcatgctgctttcccacatagccatccacgctatcataatgcgtctgccatgttcatcttccgttgtttgaggagcataaaagtcaaatccgtagtccaaaagctgaaagtcttcatgttgaagcagccccgtttgatagtctaatttcccttttacatatccagcttgatgcaagttatgatagagatctctttctggttttaccccttgaggcgacatgacaaatatgtcctgtccatcgagactaaaaagatctggacactcccacataaaaccaagattcccttgacttttagccattacatttataaactcccaattcatcagatctcttgaacggtacaaaagaacttggccctcatgatccttcgtgcgtgatccaagaacacaataataatagtcgtccttcttccatacttttggatctctaaaatgatgaggatgaatatccccttcagacactgaatcaataactggattttgaggcactttattaaaatgaacgccgtcttcgcttacagcaagacactgaacctgtcttaagtccgtatcatagttatcccctgtccacgcattccctgtgtacattgcataaagctttccgtctttttcaattgcacttcctgaaaaacatccatcctggtcgtattcttcactcggagcaagagcgataggaaggtgttcccagtaagtaagatccttactttttatatgtccccaatacatcggcccccactcgggagagtaaggatgatgttgataaaataaatgatactcacctttataaaagctgaatccgtttgggtcattcatccagtatgctggtgtagacacatgatattgtagtcgccaatgattctgatcaacagactcctgctcgtttagcacagacttcattgcctttaagattttttcttgatgttgatttcttaatgttttcaaaagatttcaccctgcctttctatacgtgaatgagttaattgtgataaaaagagattaaaatgataaatcgacttcacaaacaatggactcgtaaggtcgtaattttatctgatttaggtgtaattctaaatgatcatagttggataaaataacatttttcatattaaaatctaagtttagagtcaactctttattatcaaagttagcaatcaccgctatttttttatcgttcaactctcttgtgtaggccatgatttgtaggctatctttaaacatgtcttcgtatttaccaaaagcaataacatctgaatatggactgctttttcttaaactaattaaatttttatagaaataaaataaagaattacgatcttttaaagcattctcgacgttaacagaagagtaattaggatttatctctagccacggtgtgccctggctaaaccctgcatattcagaataattccactgcataggtgttcgagaattatcacgactgcgtctccaaatcgctgctaatgcttcctcttttgagaatccttctttcagcgcagagtaatattgatcgattgaagccaagtcattgtaatgctcaattgatggatactctacatttgtcattccaatttcttgcccttgatagataaatggcgtcccttttaataagaaatagacggtagctaacattttagctggaataggtcctgtatcttctggtttaataaatttgtttaaagaacgaggctggtcatggttttctaaataaagcgctccccaccctgtgttgttatagaacgtttgactgtcagaaatggcttttttgaaatcaagtagattccaattatacggttcataccatttcccttcttttcccacatctagatcgacatgatcgaactcaaaaagcatactaaaatgcccgtcttctcccgcataaataggcagttctttgtgtgataccccaggtgcttctgccacggttaagatatcatgtgaagtaaaagcttctttacttagttcacttaaaaattcatgaatgccttgttgatttgtttcaattacattcattccatcatatgaatcagcaaatatatccttaaagtcctgtcgtttttttataaatgtaatggcgtctactctaaagccgctaattcctttatctaaccaccatgtgaccattttataaacggcatttcgaagattagggttttcccaattaagatcaggctgttttttagaaaatgcatgaagataatactgtccggtttgctcatcatactcccagcacgaaccgccaaaaatagatttccaattgttaggcggagccccgtcttctcttccgtttctccaaatataccaatctcttttaggatgatttacatcactttttgattctatgaaccattcatgttcatccgaagtatggttaactactaagtccataataatctttatatttctttttttagcttcatggattaatagatccatatcttccatagagccaaattcctctgcaattgcttgataatcagagatgtcatatccgttatcgtccattggtgattgataaactgggcttaaccaaataacgtcgatacctaactcttttaagtaatctaatttttgaataactccttttaagtcaccaattccgtcaccattagaatcataaaaacttttcggataaatttgatatacaactgcttccttccaccattgtctattctttattgtagcgctttcttcattctttctttcacttaattgaaccatttcttatcagctcccgtatttttatattaaaattatgtacctatccttcatttatatggtatcgataccatatatgattaaaaaaattacgctattaaaaagtccgatataacccttttcctttaagataaatttattgtattacatcatgggaacggtttcaataacttttctgaaaatttttcaaaaaaggtgagaacgaataaattcagctctcaccttcatgtgtgatttcctattatgttgaacttcgaacaaccagctcgattggaagttcaaaagtttccacttttacttcagaatcattcaacatatcaataagggtttccattgctttaatccccatctgatcaataggttgtcgtatagtcgttagctttggatctaacatttgtgcaagaggttgatcatcaaacccaataatcgccaaatcattaggtatttttagaccacactctttggcttcaatcatcattcccccggcaatttcatcacttcctgtaaatatagccgttggacgatcctccatcgacaggatttttttaattacttgctttccgtcttcaatactgtgttgattaacaaaaacccattttggatctggctgaattcctgcctcttgcagtgctttttgataaccttgattacggtccttgtccttgccttcctcagcaaataatccaccggtgcagtatccaattttccggtggcctttttcaagtaaatgctttacgcctatatacgcacccttatattgatctaatcgaacgattgggacacttgcgttgttcacatattcattgcataacaaaataggaccagattcagtaaacggttctatgatactccagtcattttcaatagaggtcataataattccgtcaacttgcttggtttttagtaaatttagaaaggccaattctttctctttatcttcattactttgaaaaattaatacatgatagccgtttttataagcaacttgttcaattgaatcgactaaataagagaaaaatggatttacgattcttggtacaataacaccaattgtagtcgttacttgccctcttaactttcttgccgaagggtttggggtatagttaagctctttcattgcttttagcaccagattttttttctcttctgaaacatacgaatgattgtttataacacgggaaacggttgtttttgataaccccgataattttgctacgtcatatatggtaggcatttatttatcactccatcactaactgaaatcagtttcatacttattttacgttaaaaaagagccaaaatgcaatgaatgaattcgtttgcatctttatatcatctgttcgataataataccagcaaatccctgtggctctttaaaatagaacctttttatataaaatgtttcatgattaataaaccagcatacttaaaagtgtttatttcataagcaagaaaccagtaccagacttaaaaaacacattatacttaaataaaccttttttaaagggtatttttgttagtttttttcttattgacatatgaaatcggtaccatatataatacaatcaaatcgaaaacgctttctaaacaaaatttagatacataaacagcaaaggggatttaaatatgcaaaacaataatctttactggaagctaagcagtttctttttcttgttcttcttatctattgcctctattttcactttttttgctatctggttgggacaaagccttgacctttccggagcacaaacaggtattgttttttctgtaaacgctgtctttactatgcttttccaaccgctttatggatatatctccgataaattgggcttacgaaagaatttattatacttcatttcaattttagttattttatctggaccatttctcatttttatctatcaacctcttttaaattggaatttttggataggagccttgacaggcgggacttatcttgccatcacttttttggctggtatctcagctatcgagtcatatatcgaaaaagttggtagaaagtatgagtttgaattcggtcgtgcaagactttggggatcaataggagctgccgttgcagctgccatcgggggacgaatgcttaatattaaccctgatattaacttttggattgtatcgggatcaggcgttatcttattacttgttattttccttacaaaagtagaagtatccactatcgaagaaaagaaggcaaagtccctttctattcaagatttgggcagtttatttaaacgaaaagatttctggatttttatgatttttatgctcgggacgggctgtatttataatgttttcgaccaacaattccctgtatattatgcttctctgttcccaacagaacaattaggaaaccaaatatttggttacttaaatgcaggtcaggtctttttagaatccggtatgttattagttgctccattcattgttcgtaaagtaggtcctaaaggaggtttaattttagcgggaatcattatgattttacgcgtgataggttcagggctagtatcagatccatacagcatttcatttattaagcttcttaacgcaccagagtttgcaattatcatagtttctgtgtttaaatatctggctacacattttgatacaaaattctcttcaattttatatttggttggataccaattcgcgatgcagctaggagctgttatactctcccctatcgtaggaaatctatacgattcaattggttttcgtcaaacatacctaatcatgggggttattgtcactatctttactctatttggtgcatttcttttaagaaacaagaatcaagcatctaaagatagtaacgattcaaaacttactgcttgaaaataattgttccagggaccttggcaaatcgcaagttcttggccaactagatgagcaattagaagaagagattaaacaggaaatattactgacagtaaaaaaagcgcaaaagcaaaaaagtgatatcttcaattttggtgaaatggttaatatggcagataagcatgtatggaaaaatattgagacgtcatgggaaaaagatatttttcctgaaacagaagtccacgtgaatgtagaagctattattcgtcgcacaggtatgacaacctaatcctatataaacaaataacaaatctagtcataaggggcaaagaaaggggggggatcaatggaaaaagcgaaaataagtgtcattcaactgtttgcccttatgtttatctttgagttgggaacagcgctagtcattagttatgggacatccgctggaaaggacgcttggctgtctattcttttggcaatatgtggtggtgttattctatcttttgtctattttattttatttcgtcaatattcaaatttactcttaactggatatatgagagagatattcggcaaatatattggatggattattggtttgttatattgcctcacctttttgtacatttgcgggagaaatgtacgtgagtttggagatctattggtttcatccaccttatcagaaactccattattggtaatcaatattacccttgtgcttgtgatgtgctatgtcattcatctcggagtggaggtattagggagaacagcagaagtattttttgttattttgctcttacttggagcaaccgggaatttttttgtcctgatatcaggagatgttgattttcaccagatacgtccctttcttgaacacggatggaaacctatcttcatcacagcttttccccacctactcattttcccatttggcgaaatgattgcttttacgatgctattaccgtatttaaatcgccctcaattagcaaagaggggatggctggcagctttgatttcaagtggactgattttaagctggaccatattgttaaatatatccattcttggtctagatgtaatgaaacgttcgacgtttcctatgttaacggcagttgggaaagttaatctgtttgattttatcgaaagactagatgccattgtagtatttactttattgattacagtctttttcaaagcatccatctatttatatgccgcggttataggaatagctgatttattcaaattaaaaacgtaccatcaaattcttttctcaataggaacaattgtcatttttttatccctgaccatggcttctagtttcacagaacatgaagaagaagggctccttgatcggtaccttttggttgtccagcttgttattattcccttgctcatgctggttgtttcgattattcgtaatcgtttaaaaagaaactgagctagtaatgggtttagactgattctattattgaacattgagaaagttattagctaatatgaaagaaaaaagacgactttaaaaaccgtaaagaaaggaggtaacctacaaagatggagaaggcgaaaataagtgtgattcaactctttgccctgatgtttattttcgatttagggactgcattaatcgtaagttatggaatacccgcaaggaaagatgcttggcttgctatccttttaggaatgggtggaggtatactcttattttttgtttactacatgctatttcgtcaatatccgaacctcacacttacggggtacgttagaaaaatatttggtaaatatcttggttggataattggtctgttatattgtttattcttcttgtatattgcagctagaaatgtacgtgatttcggagacttactggcttcgtctactttgccagaaaccccgttacttgcaattaatctctcacttgttcttgttatatgttacattatctacctaggaatcgaagtattagggagaacagcagaggtattcattgtcattttacttttatttggggtagcagcaaacttcttcgtacttgtttcaggagatatcgaatttaatcaaatccggccatttcttgagcatgggtggaggcccatcttaacaacagctttcccatctgttgtttcttttccatttggtgaaatgttcgtattcaccatgctattaccgtatttaaatcgacctaatctaataaagaaagtatggttatctgctttaatttcaagtggcctaatcttaagctggacagctgctttaaatatggcggtactagggttggatgtaatgcagagatctacattccctacattggcaacaataggaaaggtaaacctgtttgattttattgagaggctggatgccattgtagtgtttacgttattaatgacagtgctcttcaaggtatccatctttctatatggggctgttctaggaatagctgagttgtttaaattaaaaagtcatcaaaggctcattttaccacttggagtcattctcgttttttcatccatgacaattgcctctagtttttccgaacatattgaagaaggtttaggtgaaacaataaaatatcttcatgttccttttcttatcgttattccattgtttatgctaatcatctccatcattcagaattatgttaagaaaaagactcactaggaattgtttcgtttctcctctttcttttttatagttagaaaaatttgctggccaataacaattaaaaaaagccctgctaacattatatattctgcactactcataacccaaaaagggtttagaaggtgcagaaatgaatcataaaaactaaaacctaatagaaaatccattagcaagaggtttaaagtagataataaaaagacaataattattgctaggaaaatcttcatgtccttccctcctttaatttaaagtaaatatattatttgtcaataataaggtttttaataataaaccttattattgttttaaattaagggaaagacgtaagatagtataaaatatcttgtgtaaatgaataagtaccaaaaggaaggacttttcttagaaaattaagtacccctcaatcctcctaaagaaagaaggtcttcctctgaatgagtttataacagttgttgttcaagctttatccctaacgaagagtaactgcacccttccttgcttctgtatagtcagcgctttgcgacaagatctcatattgactttaattaagctcgcacagaactaaaaatgatgttcaaaacaaactaatgaataatttctataagaaaagaaaattcatttttacataaaattattgattacctcttaattttcggccctcaatttttacgttagaaccacaaataaatcagcagaaagattcataatatatacatctttaaaggtatatatattatgaatcttttaaggtaaaagactattttatttgcaatgattttagtaaagca

SEQ ID NO: 54 - DNA, 25873 bp, Priestia aryabhattai
  source 1..25873: mol_type = genomic DNA
cccacccaaaagacaaatccacgtaccaaatactaatagaagaaatcgaacagacacgaacgttaatgattcaaacggctgtccgtgaaggaatgacaagtcctaacacacttcaagttagtcaatcattagatgctttattaaataaacttcaaattttcttctaccaataaaagcccatgagtatgtaaccatatcatgggcttttattttgtattaatccgcttgattaacgtattccactgcttggtgaaggctactgaaagtcgtaatgtcagccaaatctaaccctaagttcaccatcgtctgagcaatttcagcacgaatcccgcttaaaaccacttgaattcctaataattttaaagcaccgattactttaaaaatttggtccgctaccatcgtatcaataattggaaccgcgtataaatcaataatcaaccaatttagcttgtagtcgctgccgtgctgaagcgcattttccattaaaatctgagcgcgatttgtatctaaatcacctacgagaggaattacgccaatttctttcgtaatgcgtaccacaggaatcgatagttcatcaattgcatagcgagcggattggattttgtttgcaaagtcggtcatatatgatttactaacccagtgtacggccttatctactactacattgaaacgagaaataacttgatagaaggcatcaaacgtaaacgtctcagcttttgcttcttctttaataatttccccgataatatttcggtaatagctgatttcttctaatgctacatccaacggcagctgaagagcaacgagtaaattcgctacttctcttccccactcctcaagcacttcaaagttttttgtatcatttgttgagacagaatcagcatatatttgaattaaatgaacgcgccacggttctaactgttgttgaatatctttttcttcatattgtttttgttttgagaactcttcttttttttctagaattaaattcgtaatgtgtttaagctttttatctaataataatgactccatattgttctcccgttaagaatttgtttacttaaaatgatatcacaaataccgttaaaaaaagtaaaattaggggaaaaagctttaaaaagtgaaccggatgtctccttttgcgaatagaatgaactaaattgaatctaaaccgtacataagctgaacttctctcctttattttatcgttactttcacagtgaattctcatacataactcttcaatttaatgttgggttatcttggcatatatgataaatagatgaaaaaatgtaaaagggtttgcagcaagcatttcgcatgacaagatgtgttttaggaaagactgaaaaggaattccctataaaaaggaggttaggtatatgtcatttatttggacgcttattgttggaggacttatcggctggcttgctggtgtattaacaggacgaaatgttccaggtggaattatcggaaatatcatcgctggtttcattggagcatggttaggctctctaatttttggagatttcggtccggagatcggcggattcgcaattgttcctgctattattggtgctgttattttagtcttaattgtgagttttgttttacgcaaaatgcgcggaaataataatcatcgacatgcctgaataaaaaagagaaatcagcgttttgatttctctttttcccttactttttatagcaaaaggttttatcaatggacctacctgtaagtgtaattctttattgctacatttaaaaattgctgcttgtcacctctcacatttaatactttcacaccctcatatcaagcgcgttagtaatgagcagctctggaccttcaagatcatcaagcatatccgtgaagatagcttcaatatgaacaagtgcagttttagctttcattggacattgttttatagccgctttctatttcggttctactaattcaataaatgatcttgcttgtttgccctttaactgtgcgtagtgtgtatctgtagctaattcaacggtttcgtttcctaagttgacccacatccgataagattgtacctttatatccttttttgtttccaccggttcaaagtgaagaatgtagttaggttttcgaatcatttcagctttttcttctctccatgatacatcttttaaccactgctgcactttctgcacttgattttggtctttcattttaaccgcatggccatattgattatcggctatgtatttttcgattacgagcttttgttcaacagtaccgcttgaagcactactttgctgacatcctgttatcacccaacaaatagcaatgagaacaactaatccagaccatacttttttcatttacatctacctttctttgtgtaattgaaatgagatgttcttgctgaatgatgctaccagctgctcgtttttaaatctctttttgcattctcctttcttcatctaaatccctgcttcatttgctcaaaaaaactgaatccccgaaaggatccagtttttcgttacgattcgacatcttctatgacatgaacagcgcgaatagcagcgtttacttttgtatgttgaatgcgctcttttgcttcttgtatagtcattgcttctacttcttgataaaaaatcacgttcgcccattcatattctactgaataacgatttattttttccacacggtatcctccttattgatgaactaaaatttgatcaatcatgccatattcttttgcttcatccgctgtaaagaatgtatctcgatcagtgtcttttttaattgttgaaagcgattgtcctgttcgttcagacagcagttcatttagatggtcttttaaccgcaaaatacgcttcgctcgaatctcaatttcagctgcttgtccttttgctcctcctagcggctgatgaatcatcacttcgctattaggaagagcaaaacgtttccctttttgaccgcccgctagtaaaaatgaacccatagatgccgctagccctatacacaatgtgcttacatctgcacgtataagctgcatcgtatcaaagatagccatgcctgctgtaatagatcctcccggtgaattaatataaatgctgatatctttttctgggttttctgcatctaaaaataaaagctgagcgataatgctagtagccacctcatccgtaacttcacctgtgagcataatcactcggtcgagcaacagccttgaacaaatatcataggcacgctctcccttgcttgtttgttctactacatatggagttaagttcatgtgaccgcctctttccactgcattagtacgagcaaattttttcacttttgcactgatttcatcatttaaaaatgaatcccccaccaactcttcatccgtaaatttaatcattagagaatgcctttcttgctgtatatgcaagctttcatctcggtaagtcacagcaactgtaatctctgcctgtggatataaaacagtctcttccgtgtagagctctattaatagaggttcatcgtcgatatgttttacttcaatttgcccctgtttgttttctcggtatccatttaagtttgtcgttttaaacagaccttcgggcagctgaatatcaatcgtgatgttttttacttttacttgcgaacgttcaaatgcaatacaaaggtggttcattccttcttctttttccatcactgattttgccacagctaatttaatcatgcgatgaatgatcctttaaaatttgagtaacggactcaattactttttgccgtacgtccgctgataaatttcgattcatagctacaaacacatcttcattgacttgatgcatttcttgattttgaatttgtttgctttggtaaagaggaagctgcgcaccgatgttttttacttcttcatcactcattgaacgcagcgtttcctgaatggaagctagtgactcacctgcttttgataatgttaaaacggctcgaaagtagtgaaggtgctgatctgtatagacacgcttattccctactagctctagcggaggaacaatttctatttgcgtgtaataccgtactgtacgcaagttcaagtccgcaccttcattatttaataactccgtaatttgctttcctgtatacgtattcaaacaacccctccttattagttacagttaactgttacactatcattatactgtaaattccttgtttttacaattaaaaccatggtaaattttagataaatcagctaaacctataaaagaacaaaacaaagagcccaggtcatatatccgggctctctttactaaccgaaaaaacaactgtgtatacttaaaaaaggagagaacgtatgatggggaatcgaagtgtagattgcttagggtgtcgattagcaaataaccaagagaaatcgcatgtgatatttgaagattcgtttgtgacgtgcctattagatcacaagccatttaacgaaggacacgtcttaattcttcctaaaacacatatagtggaaatcgacgaatttgatactgaacacatactggccgtgatgaatgcagcgaagcgaatgacaaaagcagtggagacgctctttgttccagacggagttactctctctcaaaacgggggaatgtttaacgagttaactcattttcacatgcacgtcgttccgagatataaagaggagtgtttcggggatttttatacgcaaattccccagtttgctgaaaaaaatgacgctttggctgcaacagctcagaaaatgcgccgcgtcattcagcaaatgtctttataaaaaaacggcttccttatggaagccgttttttttactgacgatcaaacaatgaacttcctgcaataccagggttcgtcatttcaaatggatttaaaatgagatctaattcctcttctgttaacacatcgtattgaaggcaaagctcacgaattggttttcctgttaaaatcgcttcacgcgcaatacgcgatacgacttcatagcctaagtgagggttaacagctgtaataattcctacgcttttttctacatattctttcatgcgcgtttcatttgcttcaattcctgctaaacagtgatctgtaaagcttctgaaaccgttattcataatgctgattgattgaagcaagttaaatacaagcacaggttccatgacattaagctccatctgacctgcttctgaagcaagagagatcgtttggtcatttcccattacttgaaacgcaatttgattgattaattcagccataaccgggtttacttttcctggcatgattgaagagccgggctgacgagcaggaaggctgatttctcctagacctgcacgaggtccagatgccattaaacgcaggtcatttgcgattttagacatattcgtcatacagattttaagcgctgcagatacttctgtataagcatctgtattttgagtagcgtccactaaatgctctgcatgcacaagcggcagaccgctgatatcggctaagtgtttgactacattttcaatatagcgaggatctgcatttaagcctgttccaacagctgtcgcccccatatttacttcatgcaagtggtcacgcgttgcgctgatacgcttaatgtcgcgcgctaacacgcggctgtatgcttcaaactcttgaccaagacgaacgggtacagcatcttgaaggtgcgtacggcccattttaattacatgatcaaattcttgcgcttttcgtttaaacacatcatgcatatcattcattgtaacaagaagtttatttaataagttcagcgttgaaatatggatagccgttggaaatacatcatttgttgactgagacatattcacatggctgttaggacttaatttaccatactcccctttattatttcccataatttcaagagcacggtttgcaataacttcattagcattcatattcattgatgttcccgctccgccttgaatagggtcaacaataaagtattcatgccactgacctgctaagatttcatcagctgcttgcacaatcgcatttccaataccctcatacaagcgctttgtatccatatttgcaagcgctgccgctttttttacaatagcaagcgctttaatcatttcttcatgtactttataacccgtaatcgggaaattttctacggcacgtgcggtttgtacaccgtagtatacgtctgctgggatttgtttttctcctagaaaatcagcttctgtacgatatcctgctgtttcttgtttcatagctgtacctgctttcttttttaattaatatcttctgcaatcgacgtttccattatctttttaacttggtgagggtctttggtttgtccgagcacccacattaatttaggaacaatggcttctgtgttcatgttttttgagcgcacgacgctgtcatgattaatcattcggcctacttcataaatgcccatgtcttctccttcttcaagacactgagtcgtaatgacaacggatacaccgtggtttgttaactcaacaagcttggctaaaatgttgcgaacttgaaatggaatacctccacttccatagctttcaacaacaacgccttgatatacatcttttaatccatcgaaaaattcgggtttaatgccgggaaacagtttaacaaccgctacatccgtacaaagagatgtattaaccgtcaactcttctttactagggcgaacgggttttgtatattccaccgtattatcatggatagacgccacgtatggataattaatgctttcaaatgcatcatagctttttgtacgaagcttgattgctcttgtaccttgaatcacacgaccgtcaaagactacatagactccgcctgtttcttcacatgcaaagcgaatcgcatctgcaatattgcgcttcgcgtccgttttactaaatgaaataggaatttgagatccggtaatcgcaattggttttttagaatgctgaagcatgtaagaaagagctgccgatgtgtaggccattgtatcagttccatgggtaataacaaaaccatcgtattcattataatgctcttcaatcgcttttgccatctctatccaacattctggctgcatatttgtactatcaagattcataagagatttgctgtcaatttgacagtgttcatttaaatcaggtatgtagcttagtaattgatctggctccattccaggaacaagtccattttcaccttcaagtgaagcgaccgttccaccagttgataacaataatagttttttcaaaaccgacatcccctttgcttaatttttgtaaaaaaacctgacaatctatcaaataaattatattcatttcgcgtacttcacctgtaattatagtaaccaaaaatcaataaatcaagagaaaaattattcgtttcgcgtacacttttttctgcagcaatgatataatgaataaaaatgtaaattagctcaaggtttgattacaaagatctgcgcgcgagctgaatgcctcggtttttacatactacacctacaaaggagcgtcatgaatgttaagcagattagctcaactcaggaaagaaaaaaaatggtctcttcaatatacagctgaccagcttgaaattgctaaaagcacctacgcaggatacgaatctggctatcgtcgtccttctcttgaagcactcgttacaatcgcagaactatttgatacatcaacagactacttgctaggcaaggaaaaggaacctcattctctttcagatgcacccatcgaattaacatcgcctcaaactcatacgattacagtcgacggtgcggaactatctcaagaagaaattcagcagctgacggcttttattcgtgctaaaagacaaattgaaaaagaaactgcaccttcttcaatttaaagaagattagaagcagggtgcttctaatcttctagctgcatttctaaatagcctactacttcttttgttatttcctcttctgtttcttccaccagctctccggttatcttgctgcctgggagcttcctcgaagaacgaatgccccaaaatgtgcgtacacagtgccagataggaataaaaagaccgtctaaaaactcatctttttccgaaatacccacttgaatagtggcgtggtaaccgggctgaaaaggattttccccttcacggatcacatctacagaaagctgcatcccttttttttcaaaagcttctttatattgtgcatatattgatttgagaagttcttgcatagatctttcaactgtatgtatatgttgttctaactgcggcgtaaattgttttgcgatgtattccatctatctccctcttctttcggttccctatcccttattttagcgactttcattttattgtatcataagaaaagcgtttgtctgtctagcagaaaaccccgcttttttatagaaaagcggggttcatacatacctttactaacaatagcttacattgctttgtcttgcttagaagatgattttaattttttatttttagttggatctggctcattagaagacatgataatgtttccttcgccgttgcacactttgcactttataaatccaaatttcttaccggctccttggcattgtggacaaacatatcgaattggcataaactgtaccttccttctttctaatttatacctgcgccttgaaagcgcctgtggctagtttatagttttattataagttgtacaatccaccctatcaagacgtgccaaattgcacatctttaatggcaagaaatccttcctttctaaaattcacctgaaaaatgagtcgatagacaggagaatttcttttcttgtcaaaaggcaatacgtcagaggaagtttcttattggatataattagcgaatgtttgcgctgaaaattttgcgctttttcgcgaaattcaaggttaaacaaccgttttatttcgaatttcttttgaaatggttatgtctttccaaagctgttcgtatttataacccgttaaactttcacaaaccgctttcgcttcaggagtaacgtctttcgctcggcctcccttttttcttctttgaatttcagttaataagattttgtgattttccggacttattttaaaccatatggttgcgataattccagcgagaatcaaaatagcaggtacaatcatgaacagcttttgcaagccggctagcgtagacgctgactgctcggcgtttggtacatagccaatattctttaaggcaacaccaacaagaaaaattgcaagcgcctgagaagattttcgaataaacgacatcagccctgcatacacgccttctcttctttttgtcgtaatcatttcatctacatctgatacaaacggcagtacgttccatggaatcataatcgctccagaatgaccgcttcctaagaaaaatgctgctaaataaataagaactaaagagctatctgttgttaggaaactgaataaaataatgcccgttccccagatgatcatgctgaagttataggttaatttatttcctaacttaatggctatgtacgtagcaagaggaataaatagcacctgtgtaatttggacaaagcttagggtgtctgcataaatagcttcacgcagcatgtaataggcaataaaataaaagaaaagagcattaaatacatccattgcaatgtaagatgctaaatacatggcaagatacacgttaaacgacttatttttaaatgcacttccaaaactgataaaaagctgcttaaattctaaccaaaatccgttttgcttttttcgtttcactacttctccgctatcccatgttcccttatagacaaaaatccatggaagagcaaaaagaagaccaaagataatgcccatgattaaatacccttgtccacctggaaacgcatcaatgattcgttttgggaagaaagcgcctaaaaatgaagcgccttgtgaaaagaccatgcgtattcccgtcattttcgaacgaatactataatctgtcgtcatctctgctgctagcgtattgtaaggaaccatcaccatacctaaagccgtgttaaataaaagataggctaagataaaataggtgtatttaaacatatgcgatccttcaataggaatccacagcatactgaacgtgatggcaactggaatgattccaaaaagaaaaaagactcttcttcgtcctttttttgtctgaaggtgatcagatatgtacccaatggttggatctaacaaagcatcccacacttttccaagagctacaatcgttcctgcttctacaggagaaagcccgactgcatccgttaaaaaaaccataaataatgtgccgataataaaaaaggatcctccgccaaataaatccccaaatccatatgctaccatattacgaaagcgcacttgttttgttttcccttgcatatgcagccttccccctgagtaaatagactagtttcttttgttattcacttttttctattttactaaactatcccttgaaaaataaggaatatgtcaccttttctactcaaaagaataagatattttttgattatataaatagaaaaatgactgggtaaatcgttcttctttatcctctattataagttgactttttttcacagctgttataattcaacccattgcttgttattcaactataaaatgcaaacttgaacatttgacatctgagctgttacgaataaaataataagtatgaaacctattgatatctttaaagcattatctaatgaaactcgattaaatatattggagtggttaaaagaacctgaaaagcattttaaagacaaacaagcacatttgcctaaggaggtcagcagcagaggcggtgtttgcgtgggagatattcaggaaaaagctcagctgtctcagtccacagtgtccagttatctttccatgatgcaaaaagcaggtttgttagagtcaattcggcacggtcaatggacatactatcgccgaaatgaagaaacgcttcaagagctttcttcattcttacgaaaaaaactttaacgagtttttttcacttattatatctatttttctagatatataaatataaagaaatattggagtgataaacgtgaagtttttggtttatttggttgcggttctaggcggcgctgccttaagtatggaaggcgccattgccggagaacttggaaaaacagtgggaaaacttgaaagcagttattatatttttatcatgggaacgctcattttaggtctgaccactttatttgctggaaaaggagatttaccttacgtcttaaaagcacctaagtggaatttaaccggcggtttattaggtacggtttatttaacaattctagtgattagtatcccctttatcggaattggcgtttcaatggttgctgttattgtgggtcaaatgattacaagcatgatcattgagcattttggttggcttggcagcagcaaaattaaaattaacaaagaacgcgtaatggctattgtatgcatgggaattgcgcttgtacttattttctaggagggttttacgatgagtttattaatggtgatacttaccttaataggaggtttaacgctaagcgctcagtcttctataaacggcacactaagtaaaaaaacaggtacgtttgaaacagcttttttaacctttgcgacaggtgccatgattttaacgattgtcgttgtattttttggtcaaggaaacattctctctgtttttaatgtccctaaatggcagcttacctgcgcgttattcggagcatcttatttatttctaaccgttttagctgttcctaaaattggggtaacagcagctaatatctcaactgttatcggtcagttatttgcaagtatgattatcgaccattttggctggtttggaagcaaggaagtaccctttgatctatcccgctggattggtgtagcatttatgttattagctctttattttatttttaaaggcaataagaaaataccagcataaaatgttcatgaaaatagccaagtgtccctatgtaaaggcgcacttggctattttttgtacgtaaaccacatttgaatttttaatcaattatttagaacatattttatttaaactaaattgattttattaagataaattacacgaaaaattgtgcataccttcctgcctttgttcaaaagataaagaggcagatctagaaaatcggctacataaacgaacaggtaaggtgggttttttcgtgggaaaatttttatttttagcagcatttgtctttttttgttttacgctttccatttccgcagaagaaaatataccagaagaaaatatagaatcacacgtaagtcagcctgttgtaaaagattttatttatcaatctcttgaaccttgggtacatcaagatattacttctcattatgagaaggtttacggtaaacagcataaaaaagtaaaagttcgcccgattaaaaaagatgatatcgggatacaaatgggtgaaatacagcccggtaaaggcggtaagttcactcatattgtgcgggtaaaaatcttaaacttaaaagtaaaacctgagggagaagatgaattttttgcaacggatacgcttatttataaagtgaatatcaacgaactttctgctgaaaatgatgtagaaaacgtcgtaaaactactcgagtataaacatcaagaaagataaaagtccaattctcccccccttttgaaggtatttattcctctattcaaaaggggctttattatgaagtgtgttttctcttcacatatttagggaatacaactaccacttatcccctaattttttcatattgctagtgcataaggtatgaacttgataactttttgtcggtttttatctatttctgtagggtttcctgtaggatgaaaaagaaagtaaagcgctttaattaccgtgacagaaaggttgaggatagctgtcctgcataacgggaaatcaacaggcattaagaactgcatgcaacgacaaaagttgacaaccaaagatttcagaataataataataaagcaacaatgtttaaatgaaagacttattttacatgaaaggtgttagtcagatgaacaatttacatcgaagaatgggaacattcgcattaaccatgacgggacttggatcaattattggttccggctggttatttggagcatggcgagcagctcaaattgcagggccggctgctattttatcatgggtcattggaatggtcgttattttatttattgcactttcttacagtgaattaggagccatgtttcccgaagccggcgggatggtcaagtatacgcagtactcacacggttcgtttattggttttatcgctgcttgggcaaactggattgcgattgtatccgttattccagtcgaagcagtagcttctgtacagtatatgagttcgtggccttggaagtgggcacagtggacaagccacctcgtagaaaaaggaacgttaactggcgaaggattagctatcgctactgtgctattgattatttactttttactgaattattggacagttggactattttccaaggcaaactcgttaattactatttttaaaattgttataccgggacttacaattggagcacttctatttgtcggctttcacggcgagaacttcacttctggaagcagcatcgcaccaaacggctgggctagtgtgctaacagctgttgctacgtctgggattgtattcgcttttaacggttttcaaagccccattaatatggccggagaagcaaagaatcctggaagatctattccaattgcggttgtaggctcaattttagtggctacagtcatttatttgcttctacaaattgcctttatcggggcagtaaatccttctgatattgcgaagggatggagtcatttaaattttaactctccatttgcagatttagcgattgcgcttaacattaactggcttgtaattgtcctgtatgcagatgcctttgtttcaccatctggaacgggtattacgtatacagctactactgctcgaatgatttatggtatggaacaaaataaatatttgccaagtgttctaggacgccttcatcctatttatggtgttccgcgtcaagccatgttttttaacttagctgttgctcttgtctttttgtttttatttcggggctggggcgtgcttgctgaaattatttcagtcgctacgcttatttcttacattacaggccctgttaccgttatgacgctaagacgaactggcagcgatttatatcgccctcttcgtttaaaaggattaagcattattgcgccgctaggttttatttttgcttctttaacgttatattgggcgcgctggccgctgactggacaagttttgtttattattttaatcggccttcctatttatttttattatcaagcaaaggctaaatggaaaggttttcgacagaacttcaaaggcggcgtatggatggttgtatacttactgtgtatgatgactatttcatggcttggaagcgaaaagtttgggggccttaatgtcattaaatatggatgggatatgggaattattgttgttgtttctcttctcttctacacatgggctttaaaaagcggcttcaaaacggagtatttagagaatggaagaaaagtaaatgacggcttaaaagcagcagcggctgaaacagccgcttccaaagagtcataacaaaagcaccttgctcatgcaaggtgctttttagtgagcagttctaacttttttcagcacgtcttcgatcgtaatttgatccaaatgcctgattacgctttgctcactctctgtaaaaatgtcgtccatcactgtttgaatatttgatttcacaatacagtcagcgtcagggtcgccgctgcaccagtgaggcttcagcgttcctgtcgatatagctcggtaaatcagcccaagacttatgtcagcagggctgcagcctaaagtataaccgccgcctagcccttcttttgtccgaaccaagttgttttttctgagtgtactcattattttccgaacccgtgcaggattggtacagatgttataagcaatcgattcactgcttgctcggtgatctggtaaatttgctaggaacactaagctgtgcacggcaatggtaaattcactgttcatcttccataaaccaccttttttctttctctactgtaacgttaagttacacagttcgaaaagtcaagagagcaaggagggaaagaagaactgtagctttatttattcacggtcttctttttctatactttctacttcattagctgagttgatttcaaggtataccgtcttttcttttaaactgcctttttcttctttttcaaagtctgtgcttttttgatacgtttttttgccgtttggaacttttaccgttatatgtttgttactttcttctataaaaacacctacaattttacgttcgtctccatcttgttcatacacgccatttttatctgcttttgcttttggagttaattcaatactagttgcttcttgtttagctgcgtcaatttcagcttctacttctttattaatcatatcttttagctgtgagccttccgcttccatcccagagctttttggtactttaacgagttgatcatcgatattcagcgtcatttctttttcagcgtctttttttaacgtaccgatcaagtcaaaatcttcatctttcccctttttaatgtccgggtcgcttgaatactgctgtagctttgtcaattcttgacggtcttcaattggtttttcctctgctttatgattatcaaattttgtcttgttagctggttcacctgaacaagctgccgcacttccaatcatacacatagcgattaaagacaggattccttttgttagctgtttttgcatatgtattctcctttttcttttttatttccacctttatacatatgtaaaacaaaaaaagtgagacataactacatacaggaaacctacgttcaccctacccatgaaaaaatccgaacagattgaattctctaacaagaatcaaacccgttcggattttcttttaactaaaacacttttgtcctagcctcttttttaaagctgctgttgcttcagtatatgatttgcttcttctaagtaagtcacatacgcctgtacttgtttatcaccgtaattatctaattcaaacagcgcttcttgtataaaattaaaattatcaataatatgctgtgttttcatgcctctacttgtgagtaaattgtttaaccataaggcatagtccgtaaaaattttcaggttgtctaacttatatgttgtctcaagatacttcatatgataatgattatcttcatggcatctttctttaccgcgctctccgaatttttcgagcaaagaaggttctaactcctagattttctccgttactctttcgacgatcttattaacgggaagtgaacaatacggtgtacatctttgttcctccctttatgatacaaaacctgggtttttttctctttattgtacatcatatgggagatgaaatggtgttacgcttagatttcacagcggttacagcaggtctttaaaacaaaaagccctttgaaacagcgtttcaaagggcttttttatccgttattagttttcgatttttgttaattgttctgtatgtgtttttacacgtgctggatcaattgtaatgcgggcaacgcctgaatccattgccgcttttgctacagactctgctacagctggcgctacgcgaggatcaaatggtccagggataacgtaatctgcgtttagctcttcttctgtaataagggctgcaattgcttcaacagcagcttttttcatttcttcgttgatatgagtagcgcgaacgtctaacgcaccgcggaaaattccagggaatgcaagaacgttatttacttggttagggaagtctgaacgacctgttccaataacagccgctcccgcttcttttgcagcgtctggcttgatttctggattaggatttgccatcgcaaagataattgcatcttcattcattgatttaaccatctcttgagataatgcatctgctgcagatacaccgataaatacatctgcgcctttaattacatcgcttagcgtaccgctttctttgtttacgtttgtataagaagccacttcagctttcactttgttcataccttgagagcgtccttcataaatagcacctcttgtatcacacataatcatgtcacgtacaccgtaagaataaagaagctttgtaatggcaatgccggccgctcctgctccgtttaagacgatttttaagtctttcattgatttattgacaatttttagtgcatttacaagtcctgctactgttacgatcgctgtgccgtgctgatcatcatggaacacaggaatatctacttcttttttcaggcgctcttcaatttcaaagcactgcggagctgcgatatcttctaagttaatgcctccgaatgtatgagccattaattttacagtttccacaattttatctgtatctgttgtatcaagtgtaattgggaatgcatctacgcctgcaaagcttttaaataaaattgcttttccttccataacgggaagtgaagccgcaggtccgatgtttccaagaccaagaacagcggtaccatttgtcacaacgccgaccatgtttcctttcattgtgtaatcatacaccgtttctggatgttcatgaatttctttacaaggttctgctactcctggagagtaagctaagcttaaatcttgagcattttgaacttcaacttttgatttaacttctaacttaccttgtttttcttgatgcatatgtagtgcttgatcacgtagtgacataattgtattctctcctttttttctatacatttgaattttttaatgaatttatttaacacttgctttttatctccataattgtaagacaacctgaccgaataaattcactgacaagtgccattatgaaacaaggaatataaaaagtaaactatcttgcttaaaccacttctgcgctttgttaatataaagtctagacgcggcggcaactcatgtttgtctcgctttaagttgtctgatatacagacaacttagaaagcatacaaccgctcactatagcgctttcatatacgtttcagcaaaatcgacggctttaggcattgaaaagaagtatgcacatgttgaaccgatgttttcagcttttattccttttgcttcaataaacgcttcacctatcttttcaaacagctcttctcgaaactctaattccttatacgtcttccatactcgctttcctgcatccataactggagatcctttttgaatcacgtttcgatatggaatacgatattctgctagatgaaaagaagtattgttcccaaacccgacacctaataataaaacaaaggcatgttttttgtaaagcctttcaagaggagaattttcgcctaaactgaattcaaggggatgatttcttaagatgtcttcgctgtcctttccccaagcggcgaatgaatacattggatggctgcttcttcttacgccagagtatgttcgaaaagtttctacgatttgtcccataccgcttgttggtgtatgagctggatcatatgcaggcatcgtttcccgaatagtttcccaccactcttttggcacagccggattgccccattctgatggatccgaaagatcgaccgactgtgacggcataacgatcgttccttcctctgtcactgtctccattaaagcttgaataacggctactgaacctccgtttacccaccctaatgaagatagcgaagaatgaaccatgatagtcatcccttgtgttatgcctaacctgcgtaattcttcttttaatgtatctttcgttctaggatgatctgttgcttggacaacgtgcttcatcgtaagctccttacttatagtgctgctagaatgtgttgccgaactctagcaatatatgtaaaacttatgtttccataatagtaagaataacatcaattgtcaaattatttaaagtaatagaaaaacttagttttattcatatcagttatcatacaactgacttgttggtaaggtttatttctttcaactatcttactataataaccactactgaagcttttcaataaattgaaaagaagaatattcctataaataaaagaaatactaatgatgctatacatatttacctatcactattttcaggaggaatgtgtacaatgagcacatcaaaacttccgccgctcacgtcctcggagcttgctaacttatggatgacttatcaggaaaaaacgatgattttgaggtttttagaatattttctggaagataaacaagattacaaagaactttttgagctgtattatagccgatctttaaaaagcgtagcgcgaattaaagaaatatttgagaacgaaggcgctgttatcccaattggttttacaaaagatgacgtgaatgtaggagttcctaaactatatgaccacatgttcgaagtcatgtatatacgcttaatgtctcaaattgaaacaggactgtttgctttgcattcgactatgtcttaccgagaagatgtccggaatttcttcgtagaagcaacagcagaagcacaggacatatacaatcaatccacacaagtattgttagaaacgggtgtcattgcaaaacccccatacgtttctatgcctaaggaagtccattttgtccatgcacaaaattatataggcggattgagctggtttagcgaaaaaagatcgctgaataccattgaagtgtcacttattcaacatgctgttgatacaaatcttataggaatgcagctgatgattggttttgctcaagtggccaacaacaaagaggcacagcagcattttgtcaggggtatgaagctttcgaagaaaattgaaacagaattaggtgatattttacgccatagctacatagaacccccggctactcatgccggaaaagcgacgaattcaaccgttcctcctttttcagataagctgatgatgtacaatacgagtcttttgagtacgttcggtctggggagtaatgctttaggaggagcctttagtttaagaagtgatttgccattaaagatgctccagcttgcaaaagacatttacagtttggcgaaagaaggcggcaaaattatgattcaaaacgggtggcttgaagagcctcctcaaattgaagatcgtaatcagttaactaaaaaataagttctctcctacaggaaagctagctgctctacgtgcagctagctctatttgtttttttagtatactgtttttagtgctagtacgtaacaactgtttgcgttatttagaagtttttcctgtctttttctcagtcgtttagctcatatctctacttaatttataacagaaaaataaaataaaaggaattttctctgagctgccgaaatctttctatataaaatagaaaggagaaaagtatgtttcctattcttcttacacctcgcactacactgcgtgaaataacagaagtcgatgcagatactatctttgactgcttctctcagaaagaagttatcaaatattacgggcaagaaaaattcaaaactatccaagaagcattagtgctgattgatatttttgctgaaaattacagaaatcaaaaaggcatgcgctggggaatcgaacggctcgatacgggtgaattaattgggacagttggatttaatcattggaaccaaaagcataagcgtgcggaaattggctatgagctacaccctcagcactggggtcacggctatgcttcggctgttatggcttatggctttgatacccttcagctagtgcggattggagctgttgtgtttcttgaaaacaaagcatcacagcatgtgcttgaaaagctcgggtttcaaaaagaaggcgtgttaaaaaactatatgtatcaaaacggaaaagctcacgatacgcttgtttatagttcactgcctactacataataaaaaaggattcttttcttaaaaagaatcctttttcgttttatttaaatgccgcatacccatcatcagccatgatgacgctgccgtttacagctcccgcttcttctaaggaaagcaaataaaccatatctgcaatttgttttggtgtagtgagctctctgctcatcgttttcgctttcattccttcaatcataccgttgtctttatagccttgaataatgggcgtatcaacaaatcctggcgcaatggcgacgacacgaataccgtatttagcgagatctagcgcagctgatttcgtcatcatcacaacagctcctttcgttgcgtgataggcataggtaccaggtgaggctaagaagctaaaaatagatgccgtattgataatgacgcctttaatacctaactctctcattttcctgcccgctaccataatcccatatgtaacgccgtgctgattcacattaataatacggtgatattcttctaagtcttgatctaaaatagatgtagggcgtccaatacctgcattgttaaacatcacatcaattcgcccaaagcggttcacagtttcttcaatcagtgcttccacttcttcaaactttgtgacgtccgtttgcacaaataaagcgctccctccagcttcttcaattttttgaagagtctcttttcctttccctttatcataatcagcaatgaccaccgtgtctcctttttgcgcaaactttaaggcagtttctttgccaattccgcttgctccccctgtaataaccgctactcgtttttgctgcatgtttctccctccttaatgaaaattcctttcttttacattatagcattctttttttctaccagccgtttctattaatcacctcattgctatgaaattggttaagttaggcatagttgaacgccttttttataaaaatcagcgtgtgtacaagcagtctgtcattttttgcatttactataggtaaggagttgatggctatgcatgaacacacaggtgatgtatctatcccgcggcctccggatgtgatgacaattctgtgggagcgaaatcctttggatagacaagctcctcgtactgtcgtagaagcaacagtaatcagcagcgcaaatcgttgcggacgcttgttagctcaaggtcagctctaccgaagtgcagcacattgtttacttgatcacggctttgaacagattaccgctgaaaggttaggggtatttggagtagctgtatttgttagagaatattaaaatagaaaaaagggacctttctgtaagtttagaaaggtcccttcatacgtattatgcgtggaaattcgtgccgtctgttacagcttcgattacaccagcgcggatgacaaagtcaccaaagtgctcgccttcttctctctcttttgcatagcgaggaagtaagacgcgcagttcgtttaaaatttcttcttcactgatattttcacggtacattttgcttaagcggctgccatcaaatgctgctccaagatacatattgtatttacccggtgctttaccgataaaagcaatttcacctaaagcaggacgtgcacagccgttaggacagcccgtcatacgaatggtgatttctttatcgcgaaggccgttttcatctacaattgcttcaattttctcaagaagaactgggagataacgctcagcttccgccatagcaagcccgcaagttggaagcgatacacaagctaatgagctgcggcgaagagccgaataatgcttgccgtcagttagtccatattgttcgatgaggtcactaatttgttttttcttttcagttgatacgttcgcgataattaaattttgattggccgttaaacggaaatcaccgctatgaatctttgcaatttcacgaagacccgtcataagcttatagtcttcaaagtcagcaatacgtccaccttgaacaaaaagagtaaagtgccattttccttttacacctttttcccagccgtagcggtcgccgttatgatcaaagtgataagattttgcttcgtctaagctccagcccagacgattttcaagctcttcttttaccgtttctaatccaagacgatcaaccgtgtatttaaaacgagcgtttttacgtacagagcggtttccataatcacgttgaatcgtaatgattttttcagctacttctagaatttgatcaggtcgacagaacccaatcacttttgcaagctgagggtaagttgctttatctccgtgcgtcatacccataccgccgccgattgctacgttaaacccaacaagtttctcgtcttctaaaatggcaataaagccaaggtcttgtgaatacacgtcaatatcgttagacggtggaacagctacgccaattttgaactttcttggcaaatagagcggaccatacattggttccacttcttcttccacttccggtgtgctgatcactttctcttcatctagccaaagttcgtggtacgctcttgtacgaggcaataagtaatcacttaatttttttgaccattcaaatacttcagcgtgtacttctgactgatacggattcggattgcacattacgttacggtttacatctccgcaagctgcaattgtatctaataaagaagcatgaatttcttgaatcgttttcttcatgttccactttaaaatgccgtgcatttggaatgcttgacgagttgtcagctttaacgttccatttccgtatttttgtgctaaatcatccatcactagccactgttctggtgttgaaacaccgcctggtgtacggacgcgaagcatgaattggtaagctggctctagcttttgtttttgacgttcattacgaagatctcggtcatcttgcaagtagcttccgtggaacttcatcaaacgattatcgtcttcagaaatacctgagctgatgcggtcgagcattgtttctcctaatgtaccgcgcaaataattactttcatcttttatgcgctcaacgtcacttggaggaccttcgggcgcttttaaaattttgtttaccatgttgaaaatctcctttcaatcctcagtatacatcacgctgataacgtttttgtttcttcatttcagcaaggtaaccttccgcctgttcacggctcatcttgccttctgtttcgataatttcaactagcgtgttgtgcacgtcgcgtgccatatttgttttatctccgcacacataaaaagatgcgccttcttctaaccattggaataattctttactatgttcgagcatacggttttgtacgtatactttttcttctgtatcgcgtgaaaacgccacgtccatttttgtcagtacgccatcttttaaccacttttgccattctgtttggtaaaggaagtccgttacgaagtgctgatctccaaagaacatccatgacttgccttttgcccctgtttcttcacgctcttgcataaatgagcggaacggagccacacctgtaccaggtcctaccataataattggcgtttcttgatcttgaggaagcttaaagtttttattgctttgaaggtatacaggaatcgtatcgcctggctgcaaacgttctgaacacaggactgaacaaacacctttacgctcgcgtccatgcgcttcgtagcgtaccgctccgattgttagatgaacttcatcagggtttgctgataagctgcttgcaatcgagtaaaggcgcgctggcattttacgtaaaatggctacaaactcttgtgccgatacgctccatgggccgaagtcacgaactaagtcaatcacatcacggccttgtgtgtatgcttttaattcctcgcgattttctacaagcgcttttaacttatcgtttccagtaagctcagctgcttgctttaaaagcggctttgttaaaacggtaatttcaaaattagagattagcgcttctctaagaggacgcgtttctccttctttattaaccgttacactttcacttgcatcccacttgaattcgttaagaagaagatcaacaagctccgggtcattttcaggataaatacctaaactgtctcctggttcatacgtcaaacctgaaccttctagagatagttctaagtgtcgcgtttctttatttgatccgcggccgtttaagtttaagttctcaagcacttctgctttaaaaggatttgttcttgaatatggtgaagttcctgcaggcgcttccgctggaacagctgccgaagcgctgtgtcctttcgcttcgcttaatccgtcaataacacctttaagccatttatttgcaggctcttcaaaatctaaatcacagtcaacgcgcggatacagtctttcaccgccaagttctgctaagcgcacatcaaattcttttcctgtttgacagaaaaattcgtatgagctgtctccaagcgataagacagagaaacggaagttctcaagttttggcgctcgacggccgtgaagaaattcatggaaagatagtgcattatcaggcggctctccttctccatgtgtacttacgacaattaataaattttcaagtttctttaaattatttggtttgaaatcattcatagaagatacagttacattaaaaccttttgcttcaagcgttttgcctgtattttcagcaagtccttgagcatttcctgtttgtgatccgtaaagaatcgttacgtcttttgaaactgtctgcttcgtttgatcaggcgctgctgtagaaacgtctagcgttccttcggcagacgtagattgagatgctgttaaataaccgctcaaccacattttttgtgcttctgttaatgtcggcagaaggcgattaagcaaatctgcttgttcttgattaaaagggctgtttactaccttaagttgcaacactgtccacctcacaaaaatatataatttaaatatgtatgtttttacgaatcatcttcaacaac

SEQ ID NO: 55 - DNA, 25462 bp, Priestia aryabhattai
  source 1..25462: mol_type = genomic DNA
acgaaaaaaatttatgacttcctactttttcagggaaaataggagttttaagctcccttgattatatttattttgagggagatatcgaggagatgcactactctttttgttctatgtgttgagaaaataaaataagggtataaaataaatataggaaaatgaagataaaagtagaatatatatcctaaagggagggatttattgtgattgttactttaggttttctggcatcaattattgctttgtttatgctttttactaaccggacgtccaatatcccggaagaaataatccatgaaacaacaaatgtcaataaggaagagcagtatatgtattatatataaagcgtcttaacagacgcttttttgttgctctttttacaaactctatagcggttagaaaggccctcacctatcatttatctttatttgtcagtgcctgatagccataaatagttaagaagaaactaataaaagaaaaaaagatatgttttggcttaaagttaactaacgtaaataagtccaatttttgatacaagtaacttagcggaaaagcaaatagtgaatccatacgtaaattgacgaaaataaatctcttaaagctgccaaacgtaaaatgaaagatccacagtgtccctaccaaaaagggtccaaaaataaaactgctatcgtttaaaatttttcctttccaccctccttttaccctccaccacttgtaaggaatagctaatgagcacattccaattactaaagatgaggcaaaaagagaagcgggaaaataggttctaattgattttttcggcataaaaacaagggaaatctacggaagaaacaattgaagaattctgatgacattgggcatattagtaaattctcctttcttatgttaacatgcttaaatgtaattggattatgcctatatcaaaaaaacaggataagctctgttgctctgtgagttatttacaaccggtggaacaatcataattaagacagagcacagcttccaacaaaacgtttaagagctaattctttttaaatgaaaatatctgaattcaaaatacgacagacttcgacactatctatttgttactatattttttaggttctatttttagattggaaccattttcacataaataattcaacaatttaagcctttaaaatgacgtggcaagtggaggaaacttaatgtgtttcaaatgtagactactgctgataaagatagaatttatacgaaaaatgatgatgatgactgccctagaagaagggtttacaagtagtaatacgattaaaatcagtcaggatctagatgtattattaaatcggtttgaagctacttgttaaaaaatggtggtggataacagaaaaaggatctttcgataagatccttttttgctgttggtagacaattatttgtttcaaaaaaaatgaaggctgatgttatttagtagtacatcttgattgctcgttcatactctattcaatcattctgtgcttcaaaaaagtcccacatcatttttgaagcattaggaccttttgaatcagtatctgatccattgtcatttcctcctgaccatgcatgccccatatcctctaccataatttttttcatccagattttattttctgcatctatgtagtcagccattatgtagctataatgatttccgttttcttgtgacgtataaaaagcagcattttcatgtaggtttataccgaaattcttatatgtataaatccactgctgaattaatgtagacgcattaattggattgactgttgtatctgattggccatgaaacgtaatgataggaacaggccgtgcataaggtcccatttttttataagcttcatcaccgtcaagttcaggatttaaagagccatatagcatgacttctccagctgtgatgaggtctacagcatacgcattactgcctgctgaatgaatgcctaccgctttgaatacatcaggataagcaatagccatcacatttgccataaagcctccagctgacataccagcaaggtatatactagcaggatcaacagcatatttagcggttatgtgatcaatcatatcttttattatgtctggctctccattaccgcgaaactggttatactcataaaaccaattccagcacccgttggaattagcaaaataattcatttgaggatagagaacaataaagcctttttcttccgctagcttattcatctccgtacctgcagcaaaatcatctgcatcttgttgacatccatgaagcataacgattaatggtactttacttaacccagtatatgtacttggaacatacaccttgtaggtaaaataatcatcataattatactctttccaaataggttgaaagaacacgctctgtaattctagtagaaacgtagaagcagttaaaactggatttgtaaaaaaggaacataaagtattcacggagtttaccttctctctatttctgatgtatatactctttatttcgttataccacaaaataatccttttattatgacgctgatctttttatatgcctttaattatttctcctttcatgctttagtcgtacaaattcatacagtaagttacgctttgtgttggataaaaactttaggtaattttattaaacttagtagaacgaatacaagcaaaaaattttaaaagggattattcaaaatggcgaaagtaaagcctgattttaaacattactggaatgaaatcattcaagcccttattaccaccaaataatagacaaaaatcctactacagaaaaaagttgtgcagcacggatagcttagtaaggctagccatttacgatagcgataaaacagttggtcttatcgaagaaggcacgcgtgaatttagcttgaaagatcctatctttccatattctgaaccgactacaaaacaaatattttttaagaatataaaaaaggactgactataaaaagccagtccttttttatgttatcaaacgattatttctttaactaaaattaaagactgatgttattagggggtactttgtcatctgtcttgagctcagattctatgtatgaatctttagaggactctcccatacgccaataaacaagaaagctgatggcaatacatcctgctacatagaaaaagaaaagtgattcatggccgatactttttaaccatagggcaataaattctgcagtacctccaaatatggcaactgtaagtccgtatggtaaccctacaccaagagctcgaatctctgttggaaaaagctcagcttttacaatagcgttaatagatgtataacctgttacaatgataagtccaactgtcattaataaaaaggccatgactgggttatgtgcttgtttcataaaaagaaacaggggtacagtcagcaatgttcccaaaataccaaagctcattaacaaaggtctgcgtccaattttatccgatagcatacctgctattggctgaatgacaacaaatacaagaagcgcacagaagttaatccagcttacgactcctttatctagccctacactgtttaccatgaatttttgcaaatacgtcgtatacgtataaaaagcgaccgttcctcctaatgttaagccaataacggtcaacactgctttaggatgcttcataagtgctttaatagttccggcattttcacgactttcagagtccattttagaaaattgctctgactcatccattgtacggcgcagccataaaacgcttagcgctccgatggctccaatgacaaagggaatacgccagccccatgaaatcatatctgcttcactaagaacgttttgcagaataatttgaacacctaatgccaccagctgaccagcaacaagcgtcacatactgaaagcttgaataaaatcctcttcgcccgctgcttgccatttcagaaaggtaagttgcagacgttccgtattctcctcctaaggagattccttgcagcaaacgcgctagtactagaataataggagataataatcctatggtcccatagctaggagtacaagcgataataaaagaaccgctcgccataattgtaatagacaaggtaagtgcagcccggcgaccatatcgatccgcgtagcgtcccattaataaactaccgattggacgcatcaagaaaccgacggcaaagattgcagctgtgttaagcagctgacttgttgaatcaccttccgggaagaattgcgatgaaaaatagacggcaaaagcagagtaaacgtaccaatcgtaccattcaattaaattcccaacagatcctttgaaaatattacttgtaatacgcctgttgtttgcagcttcactggtatgagccatgattgatccctcttttctttgagtgtttaatgttggttctcctgtaacatgaagtagtaaataattcaccagcaaatctttttaaacagctagattgtattgctttctataaaacctgttcaaccaattacttatataatgagagcgcttaaaaaaggttggataattcatttcaatatcatctatagataacaaaataagcggttttaaaagcggctgctgtctattacatatgtagtgttaatcctcccttctatttatatattgtactatcgatttattagaaaatataatattttctaattatttatacaaaaattttacaaagttcggctttctaatttatatgacaaacagaaaaaaagccatgttctttaagtgagaacatggttaagaaaatactcttttcaacttgtgagtgtaagctgcttacatttacataatatgtagaataaacataacttgtactaagctctaacctaaatttaagataattatcgaattttaattttatcccctattatatatacagccatagatgctctataattttgttgtatcggcgaccttaatttgactcatttgattttaaattcacacaaaaagcgttctatcccgagatatttttcacctaagcttgttgtttggaaaccaaactatataaaataatgaataagaagaaataccccgagaactggagcggcagctaacataaggtttatagaatttgtaattctccacttcttgtctgtttttgattccgtggctagattagctctcattcgatcaccgcttacagctgctccagatataataatagctagccctactagtataatgaacgctacaaaaaatactgtttctgaatttacgttagctattgtacatgccaataaaagaacaaaagataaaatgaacccgccaataattgatttaatcatttttgtcttcctcctagcctttttataaagtttccacatattaactatataatatcatttttctatatttttacttttggtttttgttattctaacaggtaaaaagacagcaattaagacagctaaaaaagcgaaacgctcatgtctgagtgcgtttcgctcaagggaactgcatttcaactaccttttgtgatgtctgccgaacctatgcgaattacttttgataagtcacttaatgttaactgtatctggtgacctacacgtccacctgaaaagtaaatcgtttcacagttttctgctgtagagtcaatgaaggtttcgaactgctttttcattccgataggagaacacccgccgtgaacatatcctgtaagaggtaacagttctttttgaggaatcatttccaaagacttttcaccagctgcttttgccgctttctttaaatcaagctccttttcaaccggtaccatgaagacataatgttcttttgatttcccgacggtcaccagtgtcttaaagactttagaaaggtcctctccgagcgaagtagctacctgtaccccactcagctttttagtgtcataagaataatagttgtactcaatttttttctgatctaaaattcgcatgacattcgttttatctgcttttttacccataattatcaccgataccatcataacacgttttgttttcgtatctccatatattaggataggtaggttagtaaggattattcatatcttttattgtgatacaatcattggcgataaggctataaacttttttaaatatcgtccttccctgtgtcgcaaaaatttctgttctaaaagaaaggctttatccaaggaatagcttgtggaataaatgccataattacataaatacaaaaaataagccaagaagcaagctacacttcttggcttatttatcatttagtatgcatcattaagtaaatcaataatttcacctgttttaggattcactgagtaccatccatatgtggcttcgtgcgcttcgctgtaaggtgtattagggtcatcttttacatcttcaagatcgtggataacataattcccatcctcatcatcgtggtcataaacaacaatgtgtaccggatcattaatagaataaccttgttgttttctaactaactcttccgcttgttcgtgagtcagtaatgtttgcgtatcctgggctggtgcttcttcagtagccgattcttcgctaccttgcggattttcttgtgacccctctgttgatgtagtatcatctgttctttttgcttttatctgaggtgtttccgatatacttcctttttgatattttccatcatagtaaacgcctattcctccaccagaactggtacagcttggctgataatcaacttttatataacttgtatagttagtcatcgtaatcatacaaccaccgtctatatcatccgttatttgagtagcgacatttcctttaatctttgcagttccttccacatcccctgcgctcacaattcccgtactaacatcttctgggttgtcaaaatgatttgcgtttaatttgaacttaaacgtgtcgccttttaaattagtaatatctattccagcggggtctgtatcaatatttctgctccacgtgctaccccagtcaacttgactaggtgctgattcagttttatctgctgcttccgtagaatcttctttctgtttattccctggttttgaggagtctttctctttttctgtgactttatttggttctgtatccgactcttctgtagcattgtcttttggctcttttttcttgattgcttcgttactttcttcttttgcttctacgtttttctttgttgcgttctccttggtttcttgactgcttgtagcggcttccttttcacctaaaaaaccacacccggttaagctacctacacataacagtattgaaattcccaaaacaaaagattccttttttatctaaaaacccctttttatgtatatttatagaactatattatcattaaaatattcgttttttatataaaaatgaatttaatatgctaaataataacttttcaccatccttagaccccgctgttttcacagaaaaaaagccactagaggcactagtgacttttttatttctatttattcaattgtgctggtgcatccatacgtttgttttctatatcgctacagcttttcatcttaactataaagatgacattttactttatgcttactgtcaatcactgtatcttcaggtgtttctttcatgcagcggtcgaatgcgaacgggcatcttttatgaaacgcacagcctgaaggtggattaagaggagaaggaatttcacctttaacctcaattttttcgcgtttttcatgttcgtgaattgccgggacagaagataaaagaagttttgtataaggatgacgaggatttgaaaaaatctcatctgttggcccttcttctactaatcttcctaaatacatcacgccaacgcgatctgcaatatgtcttacgacgcttaaatcgtgggagataaagagatacgaaagcttcatttctctttgcaaactgcgcagcaagtttaagatttgtgcttgaatagatacgtccagcgctgaaaccggctcatcacaaatgataagctttggatttaaaattagtgaacgcgcaatccctatacgctggcgctgaccgcctgaaaattcgtgcggatagcggttgtaatcttcttcgttaaacccaagcttttttaacaactcaatgacaagctgctttcgttcactttttgcccctacattatgaatcgttaatgtttcttgaatggaagcaccaatttttttccttggattaagagaagtatgcggatcttggaaaatcatttgcaaatctttacgaattgttcgcaagcgtgaggctttagattcgaaaatactttctccattaaaccgtgcttctccgcccgttggttctactaattttaaaagcgtgcgccccgctgtacttttcccgcagccagattcacctactaatccatacgtttcaccttcataaatatcaaaggataaatcttgaactgctttgatttggccttttgctttccctaaagcagaacgaaccggataatatttttgcaggttgcgaacttcaagcaagggcttggcgctttgatgctttgcttcactagacatacgcaacctctccttcttgaattttttcatagtgccagcatcgaatgcgatgcgtatcatcggcatgctctaaaacaggtacttctttatggcatttttccgttgcaaatgggcatcttggagcaaaacgacagccgtctggcacgtttgaaagcggcggaaccgttcctggaatggatgaaagctcttttgttctatctccatctaagtgaggaaccgacttaattaagcccattgtataaggatgaagtggttttgaaaacagcgttttaacgtccgtttcttccatcacttgacccaaatacatcacggctacttttgtacaaatattagccacaactcctaaatcatgggtgatgaaaagcacgcccatattgagcttgtcttttaagtccatcataagatcaaggatttgcgcttgaatggttacgtctaaagccgttgttggctcatcggcaatgagaagctttggctcacaggctaaagccatcgcaatcataatgcgctgcctcattccgccggaaatttcatgcggatactcttttgctcgctgttctggagacggaatgccggttagtctcaaaagctctacgactttcttttgtgcttcttttttggagactttctgatgcagacgaatcacttcagcaatttgttttccaattggcataacgggatttaatgacgacattggatcttggaaaatcattgagatttcgtttcctcttagcttttgaatttgctttgaagtcatgtctaataagttttttccttcaaacaaaatcttgccgtcgtagcttgttaagtcttcatccaatagctgaagaatagattcggacgttacgctttttcctgatccagattcaccgacaatgcctaatacttctcctttatttaattgaagagatacattgtcaacagctgttacttctccgctatacgttgtaaaagttacttgtaagtcttctaattttaaaagggcgttactcaacgttttttcctccttttcttcagcattacgtttttcggatttagccagtcgcgcagaccgtcaccaaataaattaaggccaagtacaattaaaatgatgaatacacccggaaacacggtcatccaccacgcgttgtaaatcgcaagctttccgtcatacagcatatttcctaagctcggtgtcggcgcaggaatcccggctcctaaaaagcttaacgaagcctctgttaaaatcgtcacggcaaacacgtatgttacttgaacgattaaaggcgataagacgtttggcgccatatgaaaacaaatgattcgaagtgagcttgctccttgagcttttagcgcttcaataaacgttttttcttttacaacaagcgcagctgaacgaacaattctcgcaatcgaaggaataaatacaaggctcagtgcgataataacgttgcttgttttaggtcctaaagcagacataatggcaattgctagtaaaatagatggaaaagcaaacaagccgtcacaaattctcattaaaatataatcaagaatcttataataagaagataaaagtccaacgattaaaccaagtacagtagcaacaatcgttactgcggctccaatcattaatgatattctgacgccgtacattgtccggctaaatacatctcgtccaaagttatccgttccaaaccagtgcgtgctagacggcggtgctaatcgatttgcagggtcgatttgtaagctgccaaaaggagaaatgagcggagcaaaaacagcaatcaaaatagataataaaataagtatcgctcctcttactagcaaacgatttgagaaaaagcgcgctgctgctgggtttctttttttctttgcagttactgaaatggtctctgtattttgttgtgcgttcacattcatcaccctcctttaatcatgataagaattgcgtacacgcggatcgatcacggcatacagcaaatcaacaactaaattgatgaccacataagcaaccgtaattaaaagtacggctccttgaataagcgcgtaatctcggcgttcaattgatgaaacaatcagctgacctaaccccgggatgttaaataatgattctgttaccgccgctccggtcacaagccccgcaaatgattctccgataactgttaaaatcggtaaaaaactcacgcgcagcgtatgcttaagcataattgtgcgttcatttaatccttttgcttttgccgttttaacaaagttctcagaaatggtatcgagcaaagatgaacgggtcatacgcgtaattaatgcagcttgaatcgctccaagcgtaatcgttggtaaaactaagtactttaaatactcaaataatccagcatttaacggaacgtatcctgaaacaggaaaaattctaagctgtaccgcaaaaagcaaaataaggaatgaaccgagaagaaagctaggaatggaaatacctaaaaggctggctcccataatactttcatcacgaatcgttcctttatgtttagctgcatatataccaaatagtaaagcaaacgccacgccaaaaatttgcgcgagtatagctagagaaaccgtaggacctacattatcccaaattgccccgagcacaggtttatttaaaaagtaggaatagccaaaatctccgtgaaaaatgttagatagccagataaagtattgattgaccacaggctcatccaatcccatttctttgctcagcgctgcaatttgttccggacttgcgccttgtcctaaaatgattgctgcgggactcccaggcgttaagcgcgtaattaagaacacaacaatagatacaatgaataaaacaggaattagtgcaaaaagtctcttaagtgtataagctcccatcgtaaactcctttctaaaacagagagcataagccctctgtttattagaataataagatattattttgttaaactcatattgtagaaaattggacctaaattatactcatagccttttgcattgttagaaacggcattgatgttcactttatgaccaataagcgtaaacggaagctcgtcccatacgtattgctgaattgcatcaatgtcaccgcgggcttctttaacagaaggagcagctttaattttgtttaagtagtccattgatttttcaactgatgtaccttttgtagtccagaatccttggaagatggtagaacgagcattccagtcaacaggatagatgtcccattggcttgtatcactcattttatcgctgaatgtcgcccagtcgtatacttctaattttacattcataccaatgtcttttaactcttgttgaaccacaacagctgtattgtattgatcttggtaatcacgagacgccattaagcgaatttcttctccgttataaccagatttcttcaaatattcttttgcttttttcttatcatgctggttatattcttcttttccagctgtactgtagtaatttggatactctttgttcacaatggatgaagaaagcttgtaataatccgagcttccgtaagaactgtctaagatatcttttgagttaagagctgcgttaactgcttttcgtgcattgatgtctttaaagacgcctttatctgcgttgtagaaaagtcccataaatccgcctggtgatgttgctacttttgcattttgactgccttcaacttgtttggcattatcacttgatacagatagcgcaacgtcaaattgtccggttgtaataccagaaatcctagttgactcatcgcttacgaaactaatcttaatttcatcgacgtgaggagttttcttaacttcgcggcctttcgaagaataatctttaaatttctctaataaaagatattgatttttcttccattcttttactttatatggacctgttcctatgtagtctttgatcccttcatcagatgcagtgtcaaccacttcttttggtaaaatagctgctgcggggattggatcagctaataaagatagcgtgttaacgtttggtgatggtaaatgaagctccaccgtatcatcattggtttttgtcatttcagcaccagagaagtttgttttcccaagggatgatagcttaatccagcggttaatagaagcgacaacgtcatctgcagtcatttctttaccgttatgaaatttaaccccttttcttaaatggaacgtgtatgtttttttatcaccgctaatatctactttagacgctaaatcaggcttaggatttcctttgtcgtctaaaatcatcaacccttcatagatactgcgcgttgcgtctttcacgtcggagtccccagtgatttgagcatccagcgttgctggctcactttgagacgcgacgtttagcgttccgccttctttttcacttgaagtatttttacttgcgttaccactgcaccctgctaccatgaggacaatggttaaaagagaaatgaaaagtaaataagtccttttcactaaaatcactcctatttccttgtataaaattttaatccgactataataagaagaatagtaggaatgtgaacaattgtagcactaccttctacctttggcaattagtatttttaacatacagaggctattataccatgttctattaaataaatatggtatatatgtataatagttgaataaaagaaccatttatttcctataaaacaagcgattgaacacactttatcaacgcagtaaaaagaaaaaacatctcaagaaatggtaatttaacaaaaaggagaaaacaacagtgggatttttaattggcatatcaggaagcattattgtggatcaaggaggacgctttccaggctataagcgagcgtatgtgaataacgactatatcgaatcaacagcgctcagcggcggagttccttttatcttgccagtgctaaaaaacgaagaaatgattaaagcacaggcagaaagtatagacgggttgattttatcaggtggacaagacgttaatccccttttatacggagaagaaccgacaaccaaaacaggttcaccttttttagcacgagatcagtctgaacagctattgttaaagcatgtgatcgatcaaggaaagccggtgttagcgatttgccgcggcttacaaattttaaacgttgcttacggcggcactctttatcaagacatgtcagacattaaagagtcatttatcaaacatgatcaatacaacaatacaagcgacccttctcattccatcatgattaaagacggaacacgcctgcatgacctttacggtaatcaagctcttattaattcatttcaccaccaagctattaaagacgtagcgccaggttttgaagtttctgcatgggcaaaagatggagtcattgaagccattgaaaaacaaggagaacaatttgtagtcggcgtccagtggcatccagaaatgatggcaaaagaacatacttcaatgctaaacttgttcaaactgtttatggagcatgtgcagcagtcggctgtaaaaaaagtcagcatttgacgttttaatctactgcgtcaccaatacaaaaaggcaggccgttataatggcctgcctttttgtattacctgaagatacgcataggaatttaaacaaattttcatctattaattaggtaaaaagaagaaaaacagcgcaagcatctttagcttttacaatatttcaatatacccttctgttccatgtacgcgaattcgctgtccgtcttttatcagccgagtagcattctctactccgacaaccgctggcaatccgtattcacgtgcaatgactgctccatgagtcatcagtccgccaacttccgtaacaagcccctttatccctacaaataacggggtccagctagggtcagtaaaggaagtgactaatatatctccctctgatagattagcattttccatgtttaaaatgacgcgcgctcgcccttcaatcactcctgaagaaaccggtaaacctacaattgcttgagacggaagattttctcgtttgtacgcacctgtaacaatttcgccatgagacgtgattacacgcggaggtgttagctttgtgtataatcggtattcttcttttcgcttggtgatgatttgatcattcactttatgtgtgcgcacgacttcttgaagttcgtcaaacgtcagatagtatatatcttctgtttcagaaataacaccggcttttaccagctgagcggcttctttcagcagagcctgtttataaacaaaatagcgattaatcatgccgtatttgggatattcacgataaccgataaaattccggatgagattaatcttttcttttgtttcttttgctttttgttcaccatccggcaattgcttcaggcggtttaatagctcttgctcttttttcaaggcttcctgcaggcctttttcaaatttttgcttgctagcgttagcctcaaagtttttaatattaccaagaatcacagggataagtgcagccggtttttcgctccagcgagttttcgtaatatcgatttcgccggggcatcgcattccgtatttgctgagataatcatagatagcgtcttgagttttctctccgccttcaaacttaaccagtttctccaaaaagttatcatcttttccatgttttaaataatgaattacttctggataaggacgaatcacatctgcgacatccaatagcgccagacccatttctgatgtaatattgtttggtacagattgagaaagcacgtctgctgcgtttttttcacctagccacgtctccattttttcattgatccatgatgaagcatccatagcggccataaacacagctgtactttgtgggtcaaataaaatcttctttaatgtcccgatatcttctgaaataaaatcgactaattccgacccagatttcgtttggatggtttgctttagctcttctattgatgcttgattcttcttgatcaagtcagaaacgatggtcgagtcgttttcgatttgtgccttaggcttcgtaggcggcacgcttttattgctcttaccagaactttgatcatttggtaaaggttttataaagtctcctccctctattatgcttgtaagtgcgtctttcatgagcggatcatgttgtcccatggcacctaacatcatttttctgctgtcaggtgaagccaccatagaggtgacatcaacaaacagccttccaccggctgtacgcatcggtgcattagtcgttaacagaaaaaaagacaatcccagtggtttcatggcatcggtcatcatttgttgatgtccaacagatacataaacacgattttcctgatcatgtgcttcaggaattggatataaagtagtgattggacgactttggacaatataaaatgtatcatcagccaagcaccattcaatatcttgaggacaaccaaagtaagcttcaagctgtcttccaacgccttctagctgtaaaatttgaaagtcagtgagcgcttgcgttttttgcagatcgaaatgaacttccttcgtttctgttccgccttcttttaatccgtaaatagctacctttttagctgctatttttttatcgacgatttctccttcttttactttatagcaatcggcagagaccaaacctgacactagcgcttctccaagtccaaatcccgcatcgattgataacagctttcggttagaagtaattgggtcagcggtaaataaaatacctgaagcctgtggaaaaaccattcgttgaacaataaccgatacgtgcacttgactatggtcaaatccatttttaatacggtaggttaccgcgcgatttgtaaacagggaagcccagcatttgctaatgtgctgcagaatggcttctttgcctctgatgtttaaataggtgtcatgctgaccagcaaaagaagcatgtggcaaatcttcagcagtcgcacttgaacgaactgcataagcatgctcttccccaaactgagagagagaatgaataactgcttttacaacgtcagaaggaatttttatttccagaatgatttggcgaattttttcgctaatttcaccaatttcatctcggtcatcagcttttaacatcgtcagctggttcagtaacgcctgaaacgtttcattttgttcaaaggctttttgatacccggccgctgtcacacaaaatccgtccggcacttgtattccttgaatttttgataacgcccctaaatttaaggcttttcctccaacaagtgaaagctgtgtatcttttatttcttgaaagctaagaactaaagagttcattcaacatctctcctaaccggtaatgttttattgattttaccaccagtaaatgagaataaacagtctatatcggcgtttttttatgtgatataattaaagtaggaagagaaatacatacctttttgtttgcagttacatatttaaaagttgtataactaacttatctaattgattcgtatcctttttaaagcaggtaagtacacgtttgaagtatttgttgatcttcctcatttagcactttctttttagaggataaaatttcagcaattctcctcattttaacccttctttcatttggtcacctgaagagtctagctcattagatgactaactctctttttttgaactattccgaaaccatagtgttacgaatgtatctcttcgctcgttttctagcaagtgtataaataattacctgcagcacaagcgccgcaaggcttatcagtactacttgttcgacagaattaaatggcgaaaaatatttctcccatttagaatcagaaagccttaatgcattataaaaatatgaagtactaaaagaaattatatttcctaaaataagtgataaatccgctctaataagcccacttagataagacagtgctactgtaactatggccatgattatatagtttacctttgaatcatcctcaaaatcttttcgcatagataaataaactatgttccttcaaaactggcactgttgattggacaatttcaatcgttttagaatcaagcatatagcatcgttaagtgaatctatgaaaaatggttaactactctttaagcttatactaattatgtatggaaattttatgtaaataaacctttttattacgtgaaatgaacatcaattaattcacttaatctcatttaaaaaatctgttattttaatggtttttaccactgcatcaataatcatttttgtgttctttattccattaaagcgacagatttttgaagattttaaaattactatttcttatcgcactaaaggaccctttactttaagtacaatctttcacaatctgcagtgtttcttcatttaataaacttagttttctcttattcggcttatatctactctaggtggaaaaccaaacattcgggaatattctcgactaaattgcgattgactttcgtatcccaccctgaatgcggcctcggctacatctgttaattctgttaataacaagcgccttgcctcctgcaatctcagttgtttttgaaactgaatagggctcattgccgttacctctttaaaataccggtgtagcgatgaaacactcatattcgctatttcagcaagctcttcaatacgaaaagactctccatagttattaataatatgatctataacctctcttattctagaggcatggctaccttctaacgctatttgttcaagtgcttcgccgtgtggaccatgtagaatccaatagagaatttctttttttaataaaggggcgagaacagggatatgttttggagcgtctagcaaagatgctaaccttactactgcgtccaacaaagatggttctattttgctaacatacatacctcgttttacgttctttccttgccccgttttaatatctgtaccatttaagatctctaaaacctggctagaggtaaattcaagtttcaaggctaaatatggggactcgactgaggctttgatgacttgacctgtaactggcaagtcaacagatgccacaatataatgaccagaaccgtataaaaaacgttcttctcccaataatacctccttctctccttggaggataatgcaaaaggatggctcgttaactctagaaatgggttcagtaataatggattcgcggatgagaaataaagatggaatagtagtagagtgaacaccatcctgcttcgaaaagcgttcaataagtttagcaagttcatgttgctgtttataggggttgttagacataccttattctccttttatttatttttggtttattataccggatattcattgattaagtaagaggacctaagaggattaggcaaaaacttgatagcaatgtgctaatggtttctttattatttatgacataattaaccgtaaataagtcacaagaaatgtgataaataactaagagagaggaagcagttaaatggaatatgtaaaacttggtaatacaggcttagatgtatctcgactttgtcttggatgtatgggttttggggacgccaacaaatggcttcatcaatgggtgcttaatgaagaggactctcgccttgttataaaaaaagccctggacttagggattaatttttttgatacagcaaatgtatactcactgggtacaagcgaggaatatcttggacgagctcttaaggattatgctaatcgtgatgaagttgtcatagcaactaaagtacacggacaaatgcataaaggtccaaacggctctggtctttccagaaaagcaattatgggtgaaattgataaaagtcttaagaggttggaaactgattatgtagatctttatatcatccatcgctgggattacactacccctcttgaagaaacgatggaagcattacatgacgtggtgaaggctggcaaagcaagatatattggtgcttctgccatgtacgcttggcagtttcaaaaggcattacatgtggctgaaaaaaatggttggactaagtttgtgtccatgcagaaccatttaaatctaatataccgtgaagaagaacgagaaatgttgcctctttgtaaggaagagaaaattggtgtcactccatatagccctcttgcatccgggagattaacacgtgactggtcagtaacaacacatcgttccgagacagatcaaattcaaaaatctaaatacgatgcgactgtggacgcagatcgattggttgtagagcgagtagcattcatggcagaaaaacatggtatacctcgcacacacatcgcacttgcctggttactacagaaagaattggtagcagctcctataattggtgctacgaaaatatcacatcttgaaaatgctgtaggtgctttatctgttaagctaacagctgaggaaattgcgtttcttgaagagccatatgtaccacactcagtagttggccataattaataatgatcgattaacgtgtttctatctctattgaactttcattatgggctacctctctatagtaattagaggtggctttttattttaatttgataatatgtttatttaaattagttctgtatatgatatagaactctagccactataaaggccgaatgagtaggtagtgatgcaagttgtacctgtcttttatatgcttatcattgtcttcacatatctctttataaattggacgagaagttataatattccctaacgattaaagcagatccttatgaaagataagaataacgtgaataaccataaataaaaaagaagtcaccccttggtaacttctttttattctaatatgtgtgtaatcaatattacaaggaatagcagggcccaaaaaccatgaatgatacttgcattagtccctctgctgaaaccttaaataatgaaagggttgcttcttcactttattttacaccaaggctacctctttcttcattcccatataaaaaatcatctgaaacttgtatagtagaaaggaatttatagaaaagctgttagggtttattccctttaaatataatctttcttttctcctgtttaatccgttttaagcgcagttctatctttttatctaacgctctatatagtatttcgctagttgtgcatatacaaaataagattatagtaatgattacagcttgtggtacatcaaaatagaaacacagcatgactatgagtagggacatagcgtaaatggagttgattacccatcttctatttctatgagcttcaaggtttctttcaagtaactctttttgtccttcttctttttttgtattctctaaatggttgtacgtataattcattgttgtttctcccctaaaaaactaattttagattatgcacgcattatatttcctatatgatccaatttcggaagaacggaggggtgacctatgaatagaaaaatgcctaattatattatctttttatcatggtttttgtttttagttcttttatggattcttttctcattttttaaaggtgaaaatggacagcggtggtctatgtatcgtttaaatataaagaaatatggtccttgggctttagaggtttcttacataaagtttagtattgctgctgttatctccttagtaatagcttatatggtgagttttggcttcaaaagaaaaagataaagataaggttaaataaagtgcttttaaggtaatatatatcattcaatttaatcgtaataagcaataaagataaaaagaccttaattaatttgttaataaggtcttttaagtatatacaagatttattacgtattttaaaagcaaaaaaaacggtcattgttacttatcctctaaatacttaagttaagtaccataagataatgattcaaagaaaacagaaatatttgtgtttctacaaagtaattttatattagaaaagtattttgactaaaggtaagctgttgattgtctaataactaattcaggagatagaagtaagcgctctttatggggcttagattcctccatttcttgaagtaataaatcgactacttttgcccccatctctttcataggttgagaaaccgtagtaagcatgggagaagtggtagtagacagcacagtattatcaaaccctacaattgataaatcttcaggaagatttaaatttgcttcttttgcagcctgtatgacgccagctgctaataggtcattacaagcaaagatagcagtaggtttgtcgtccaacgaaagaagctgcttagcactttcatatcctttttgaatagtagcttctgtttttattatgtattcatctcttataggaagttttgcttcttgaattatatctttgtatgctgctaaacgtggtgtattacttcgcacatcttctgaaataaccccaattttcttatgccctaaagataataaatatgaagtagctaagtatccacctttataatcatcaactgttacggtattaatagacaaactgggtatttctgaagctattaagacactaggtactcccttatttatcatttcttcaagcaaatgtgtacttctaaaagctgaggctaccactacgccgtctactcgttggctagtcaataaagataggtatgttttttccttttttacctcattgtctgtgttacacatcataacgtttaatcctaattcatgactacgatcttcaatacttcttgcaatttcagagtaaaaagggttagatacatccggaacgagcaagccgatcaattttgttcgcttccctcttagagaagctgcagctgcatcaggcttataattaagcttctccattgctactagtactttcttttttgtcttttcactaatctttcctgtatgattaatgacttttgaaaccgttgctatggaaacacctgcttcttgagccacactgcgaatagttattttcataagatccctccctatcactcaggtatttagtttataaataagtatgtattgcgatagattaattttattcattatagcatataaactatcccatttaataaatagacagctttgcctaaagcaaagctgtctaccattattcgtccgtcatttataatttttgtacatattaaagaatgatgttcaataaattaccttgcctgtttgctctctaattcttggtcatcataggaacggaaatagtattccagttcttcaagtgatttccctttcgtttctggtaaatacctattcacgaatccgattgctactaatcctagtacgccaaatacaaaaaaagtggtagataagcctatagtgttaagtaacacagggaacgacaagctgattaagaaattaacaatccacatccaaaatacactaaagcccataccaagaccgcgcattcttaatgggaatatttccgccagtgttaaccatgttacaggtcctatagccccctgcatgaaagctaaaaacacaaccgttaaagaaagaacgatgtaaggaagtgccgcggaaccattgagaataaaagagaaaaaaccaatgagaaaaagagacgtggtagtaccgcataaaccgataatcaacattggccgtcttctcaccctaccaagcaaccagattccagccaacatcgccactaccgaaataacaccattggcaatgtttccaattaacgctgctttggttccccatcctgtattcttaagtatttctgttccataatacataattgcgttcacaccgttaatttgattaacgatagcaatcccaattcctaaaaataaaatgcgacgtacccaaggaatagacaaatctttgaaactagacttttctaatttggactctttttcaactgatgatttaatttctttcagttctatattcgcctgattctcctctcggatttgtttaaggactcttaaggaatcacctattctgccttttgatgcaagccaacgaggactctctggaacgattaacattccaaaccataatacaacagctggtagtgatgcaatcactagcatgaacctccagacatgccctacatctcctaatacattgcccaagattgcattgcatgtaaaagctaaaaactgacctgtaacaatcattaattcattttgtgtaacaatctgtcctcttgcttcagctggtgacatttcagctagaaacgttgggacagttacagatgcaccacctacagcaactcctaaaacgaaccgacaaatgaccattaacgtagtgtttggagcaaaggtgcatccaagggttgctacaaaaaatagtaatgctagatataagatgtttttacgacgcccattataatctgataaacgtccgccaaataatgcaccaaaagccgcacctaataaaagggagctagctacgagtccctgtgtaaacggatttaaatcaagctggtttgcttctgacatatacggtaatgccccgtttataacgccagtatcatatccaaagagtaaaccaccgaatgtggaaataaaagcaatttttcgtaccattcttttagggttctgtttcttctcttttgtctctatgtacatccattctcctcctactcatattaaacatacagagtaatgtctacgagcttataacattagtagaaaatcaaattagagataacgcttacaatatcaaaggaaccaatttcctattattcagagggacttcagaaaacacatactagtaactagtacgtgcccttataggtaacggcatggctattcaattataaagatgatggcacaactttgtaaggcgactgtactgaaacgagttctcctgtttcaaatgattctttgcaagcgtagcctaaagcggtggataatactccatcttctactgtgacgtttggttgtctactttctctaatacaagagataaactcttcaacttcacttaagtatgcctgctcaaatcgctctaagaatccatctgaacattcttttatcgctccattttcatcaaatacagttaccatattcttttctggggttgtcccaattcttaaagttccttttgtcccgataatttcagtttcaatatgatatccgtgtgcacagttacggcccgcaacaaaaatacccattgtatcattttcaaatttcactaaggcagcacctgtctctgcgtcatttaattctttaatttcaggataaccgtaagatccgccaatagcccacactcgtttagcttctgaatttaagtaccatctagctaaatccaaatcatggatagccatatctaggaatagaccgccactatagttgttcttagcaaatgtcatgaacccatcaattgcttttgtaggatcaagaccatagcaacgaatcaagacgggatctcctatttttccttcttcaatctgtttcttcgcgtatgaatacgatttatcatatcttcgcataaatccaaccataaaaaccttatcctgatgtttgttaacggcttcttgtacttgtaacgcttcttctagatacaaaccaagaggcttttcactaaaaacatgtagattagcatttaaggctttctcaatttgcacacaatgaaaacccgatggcgaagcaataagaactgcatctagctctttgttctgtatcatatcgtcataattagtataggcatatttaactccccattcttcctgtacctgttcagcctcttctttgatcacactgcaaacggctagtaattcacaatttgggattcggaacgctaaattttctgcatgttttcttcccaatctccctaatccgacgatgccaactttaacttttctcattcttaatcactaccttccagaaatttaattagaatattcagaaataaaaccacaaaaataaaaagaaaacgttttccttatgtttttattataattagcttctcataacaaagtcaacatttttcgaatttaaatataaaatccttttttaccagcaaataagcacttataatagctgtttagccatccgtaggttagttcacttgtaaactcaggttgatttttacaagaaataaaaataaccgatttaaggaaaaccttttccttaaatcggttataaaccattcaaaaagatggttattgaaaata

SEQ ID NO: 56 - DNA, 23021 bp, Priestia aryabhattai
  source 1..23021: mol_type = genomic DNA
gtataaataaaatgataggatttattaaaggagaggttttatgcaagatttctcattagtacatataggaacagaagtaagggaaagaaaagaggatttcaataaaatcttttcattgatgctggatagtaagtattatgatgcattagaagaaagaaatgagcatcaccagcgaaaaaatgatgatatgttcagtgattttactgatgaagaaatgatttactactatgtccaccaacgaaagcatattcgaaaggaccgagaacgaaaagaaaatacaaaaaccgaatacttacggattttgttgcagttttatcagtatgcggttgagagtgattcattcttacggcaggatgtagaagattatatagaaaaaacgatctttaaaaacctaagaccttggcatatacggaactaccaaacatatttaagcacagcgttattagggaagagtgggaaaccttattcacccgcaactttagatgccaaaatgacgattctgaagagctttatgaagtggttacatgaaacgaagtatattcagtatccattgtataaagaaatattgagtacatcattatctgaacaagaatttccgaatcgagatttatattatcatgaagtaaaacagcttctcgactattacaaagatcatccgattaactatgggttgttaacaatgctagccatgacaggtcttcgtgtccaagaaatagctaaagcttcgtggggagatgtgtatctagacagtttaagtggccattaccgcctaaggggagtaggtaagggtggaaagaaatttgataagttacttcatccatctttatatgagcgtatcctttcctttcgagaacgacgccatgtaagtacagcattaaattcaagtgatcaaggaccattatttccaactaaagatggagggtattaccaatataaaaatttaagtaattatattgtacgtattattcaacgaacggagttaccttttataaaagaacgaactggcaggattacacctcattactttcggcatttttatgcgatttatagtaggcagcagggagccgatattttcttaattcaaaaggagcttggccatagtgaccgtaagacaaccgagcgttatctcgagaaagttttgcagcgtgaacatgaaattgggctaatgtggaaggaacaggatttttaaatatggttttatattaagttgaaaaccctaattgttgtgagttgaaaacatatattaagaaaagctactgattttttcagtagcttttttgtcttttttgtctttttagtatttaacttgcacagccccatctccatttgtatataaattccatcattatacataataataaaaaaacaatttttcaaaaggggcttttaatagtgaacaaagaacaagtcattgaaatttatcaagatgttctagccaaaagaagaaaacgatttcccaattatttctttgtagggaatgagggaaaaaaatatatgcgctatatgacatgctatttacttgagcaacacttatcgatccccatcaatgaaatcccttttcaagtaggcgcaaatacattatggtctcatcgcctcagaccctctgctatgctatatggatggaattattatgaggtcattgataatgcctatccaggaatttttaaaccttggcagtttcaacaagttcctgataaatattgggatggagaggaagggaaaaaaagggctattgaagcagtaaagtatgtaatagaggaaaaactaaagatccctcttaaagaaattcctattcaggttaatattcatttttttaatcaaaatagcttaggaggtgtcttttcccttttcggtcaatccccttttcaagtagtagacgctgtttatccaggaatttttaaaccctggcaatttgctcatgtccctatgaattgttggaaaaataaaaaatatattcaagaggcaatggaagattttttattcaaacagcttcatttctcttcttatcacgaggcttttctccaattaaagggaagtcattttaccgattttcagttaacgggtctttttcaaatggcttttgattctagaatgaataatgtaagggaatggataaaaaaccaactaaataatctagatgatggattattttatgtgaatcattgattaataaaagaaccgattgaaacagatagcttgagctacattcctattatttttatctcctattaaaaaaatagcgatttataagtatgtagttacttgctctgctttttcttcttcataaaaagatataaagattcagcaaaaaaaagaaaaagaagaaaaaagagcacaaataattcggccacttccattaccctaaagggactcacggcgttgtacaatgcctgagagacatcaaatccttgaagaatatcaatgcctaaagaaaagcctattaagcagcccatcattaaaaggctaattcctataattttcatatcaatcacgctccatttaataggttcttctctttcttctatgatgatacataaatctttattgttaatttttacataaaaaactcttatatggttaaagtaataaaaactgaaagaagggtgcttaaatctatgccttcgttttttaaagatcgcaaaccaaaaaagaaacgaccacgggatgacgagaatcaaactattgattctccaatagaaaagatacaattttcactatcaggcaaccttaatatgattaagcagaaaaccggaaatagctcagatgtcgttattcgtgagttatcaatgggaataaattccaatataaaaacagccattgtctatgtagaaggaattgtagacaatcaatcgattcaagagtttctactgcaatccataatgaaggataatcataaagaaaaagtgaatcagcacaatgcgttagatcttctgtctgaagatatgatgacaattgggaacgtatcatctattactaatttggatgacctgttcgcatctttaatggtaggagatactcttattttagtggatggagtagatcaggcattgagtgctagcactaaagggggagaaaaacgttccatcgcggaatctactactcaaatggtggtgcgaggaccaaaaggggcctttaccgagtcacttgggaccaatacagctatggtacgccgcatcattaaaacccccgatttatggatggagtctttaaaagtgggacgtgtaacaaaaacggatgtgacatttatgtacatacatggcattgccaatgataaagtcgttaaagaaattcgtcagcgattgaagcgaattgatatcgatagcattttagaatcaggttatattgaacaattaatagaagatcaaacattgaccccgtttccaactatgtataacacggaaagacctgacgttgtagcagggaacctgttagaggggcgaattgctatatttgtggatgggaccccttttgtcctaattgcgccagctttattcatgcaatttttccaatcggctgaagattattatgcccggttcgacattgcaacctcaattcgtcttttgcgtatttttatgttcatgatttctcttattgcgccagctacctatgtcgctgttacaaccttccaccaagaaatggtgccaaccacgcttattgtagccattgcagcacaaagggaagctgttccctttccagcatttgtggaagctttactcatggagttaacttttgaaattttacgggaagcagggatacgcttacccaaagctattggttcagccgtatccattgttggggcgcttgtaattggtcaagcagccgttcaagcaagtattgtgtcaccagcaatggttatcattgtatcaatcacagccattgccagttttgctacaccttcttttgacatggcgatttcagcgcgcttaattcgctttttgtttatgattggtgcagcaacatttggtttctacggcatcattttatgccttctaatgatggttgtccatctatgtagcttacgttcatttggggtaccttatatggctccatttgctcccttcatccctgtaaacaatggagataccattgtaagattaccgtggtggacactgagacaaagaccgcgattaatcactgctaacacggttcgagaaggatcaaatcaaaacccgcacccccctgcatctcgtggtatggtgaatcgcgattttgaagaaggtgacaacaatgaagcgtaaaggattttttcttttattgatgatgacggtaaccatcttgctcaccagttgttggagtaaaaaagagttaacggaccttgccatcgtggcagctctgggcgtcgataaaacaaaagatggaagatatcacataacgctccaaattattaacccagggaatgtggcaggaggtatgcaaggaggaggtggtggtactcaaagccctcctattaccatttattcagcttcaggagacaatatagtggaagcaagtagacgggcttcgggcagcatttctcgacgattgtattatgctcacacaaacttggtcgtggttggggaaaaactggccaaagaagaaggaattaatacattagtggatgcatttgatcgagatccagagtttcgaaatacttccaccctcgttattgccaataattcgtctgcagctgatcttgtgaaaacgttaacgccagttgataagattccagcgaataaagtgctaaaaaccttagaatttacggaaagaagatggggagagaatgtaaaaacatcgcttcaagaggtgatgaagagccttgaatctcccggaagaggaactatcgtctcaggatttcgcctagttggaaatccccagcaagcacaaaagctggataaccttcaagaaagtgcacctgcagcaacgcttcgagcttcaggaattgctgttttaaaacaagggaaattggtggattggctgtatggaaaaccagcaagaggaacggtatggattctcgataaaatccaaggaacggatattaatattgattgggaaggtaggaaagaagctattgcctatcaaactgtacgacaaaaaacaagtgtgtctgctcaagtgaagaatggacaccctcatatttctgttcatacacgtgttgaaggagatatcagtgacatggaggtacctgttgatattaccaatccaaaggtcatcacaaaaatcgaacaatccgtgagaaaagaaattaaaaaagagctacagacagctattaaacgtgcgcaaaaaaacaaaacggatattttagggtttggtgaagtcgttcatcgtgctaggccaaatcaatttaagaaattaaaaatagaatggaacgatgtgtactttcccaagttagatgtagatattacagtggaagcctacgtacgtcgcgctggcttacgaaacaagtcatttctctcaggaataaaagagaatcaaaagtaaggaaaaggaggtgccagttaaatggagaaagctaaaattagtgcgattcagctctttatcttaatggttctatttgagttggggagtgctttactggtacctcttgccatcagagccaaacaggatgcatggcttgcgattctactgggtatgttaggcagtttcgttttatttttagtttaccataaacttcatacctattatcccaacctcttacccacagaatatatgcaaaaaatcttaggtaaagtattaggtaccgtactggcctttatttatattctttattttatgtatgatgcctcaagggttctacgtgattttggtgaaatgctgctaacgttcgcttatcctgatacgcctttattcatcgccaatgcattattaatgcttgttattgtttatacggtcagaaaaggaattgaagtcatagctcgatcaggagaactgctttttatttttatgtatgtccttgcaattgctggctttatattaattatttcttctggtttaatccagattaaaaatttacaacctgttttggaagatggattgttatcaccggtaaaggttgcattgtctgaaactttatattttccgtttaccgaagctatcgtatttacgatgattttgccgtatttaaataaccctaagaaggcaaaggtgaccatgctatgtgcaactggattaagtgggatcaatttggttattacgatgctcatcaacgttagtgtgcttggcgttaacctgactacacgttcacaatttccacttctcagcacaattgcgagcatccaagtagcagattttttagaacgactggatgtattttttatgcttgctatggtgattgggattttttttaaggctaccatattattttatgcagccactataggaacagccaacttactcaagattaagtcaccttcaatgttaggatatcctttaggcattgttattctatttttatctgttacaatcgcgagtaatttccaagaacatctccatgaaggattatatatagccaaatttattctgcatattcctctattcacaataattcctcctatccttcttttcatagctttcttacgaaaaagaaggatcagggaggcaaacatgtctgaatagctagttttcatatagaatattgtccttatagcgacatttcctaataaagcaattacccatagaaagatttttcctacactagagttacctttagagcaaatctcttatgtaatatataacgttcagaaaatcataagtgttggaaaggttaaataacgatttaaaaaagcagaaaaatgcttttttaaaaccaaaaaggaggtcttaattgaatggaaaaagctaagattagttctagtcagctctttatcttaatggttctgtttgaattggggagtgctttactggtacctcttgcgatagatgcaaaacaagatgcttggcttgcgattctacttggaatggtatttagtttcgttctattattagtctaccataagctttatacctattatcctgaccttttgcctacagaatatatgcaaaaaatcttaggtaaattcataggcaccatactagctttggtttacattctttactttatgtacgatgcttcaagggttctacgtgattttggtgagatgctgttaacctttgcctatcccgatacccctttgtttattgcgaatgctttattgatccttgtcattatttatacagtcagaaaaggaattgaggtcatagctcgatcaggagaactcctttttatttttatgtatgtccttgcagttgctgggtttatcttaattgtatcttctggattaatcgacattaaaaatttacaacctattttagaagaaggtttattccctgtcctaaaagtggtatttactcaaacattgtattttccatttacagaagtcattgtatttacgatgatcctaccctatttaaacaatcctaagaaagcaaaggtaactatgttatgtgcaacgggattaagtggaatcaatttaactattaccatgcttattaatgtttgtgtactgggggttaatttgaccgcacgttcacaatatcctcttctgagtacagtagaaagcattcaagtagctaattttctagaacgtcttgatgtgttttttatgcttgctttaattaccactatcttctttaaaatttgcgtgttattttacgcagctgtcgtaggaactgcttgtttattcaaggttaaatcaccttcacggttatcgtatcctttagggataatcattctctttttatctattgccattgcgagtaatcttcaagaacataaccatgaaggactgaaggtggcaatgttcactatacatatacctcttctcggggttattcctcctttgcttcttcttgttgctttctttaaaaataggaagaagcgtgcgaagaatagattgaattaagttaatttttgtgtgaaaaatggctttttttggattttctagtgaacaaaaagtcaaataaccattcaaaagaaacaaaagatcgttttagcaagtttaaacaggaggccggttgaatggaaaaagcaaaaattagtgctatccagctttttattttaatggttctctttgaactaggtacttccttgttactacctgtcgcaatgcaagcgaaccaggacgcatggttcgctatcctacttggaatgattggtagcttagtgctatttgtaatttattgcaaactttattcatactacccagaccttttacctaccgattatatgaaaagaattttaggtaaaaaaataggaagcgtattggcctttctttatatcttctattttatctataatatggcaagggttttacgtgacattggagagatgttattgacatttgcctactcggatacccctttattcattgccaatgccttactagtattagttgtcatttatactgttcgaaaagggattgaagtagtagctcgatcaggagagttattttttatatttatgtatgtacttgctgttatagggtttcttctaattgtatgttcaggattaattgattttaaaaatttacaaccagtgctggaagagggaatcttaccagtgttgaaagttgtttttgttcaaaccttatatttcccttttggtgaagcaattgtgtttaccatgattttaccttatctcaaaaatcctaagaaggccaaagtgaccatgttatgtgcaacagggctaagtggcatcaatctcactatcaccatgcttattaatattagtgtactaggagttaatttgacttcacgttcacaattccctcttcttagtactgtacaaagcattcaggtagcagattttttagaacgtcttgatgtgttttttatgcttgccttagtcattggtggtttctctaaaattagcgtattgttctattcttccatgataggtacagctaacttgtttaaaattaaatcaccttcaagattggcctatcctattggattaattgttctttttatgtctctaacgatttctagtaactttcaagagcatcttcatgaaggaatagggatagagatgttttttatacaaattcccttcatagcgattattcctattctactttttcttgttgcattcttgaaaaatagaaggaagcagaaagcatgacaaatttgtttactaacttttgatgatacaaatcttccaacgcaacaaaccattacaagctaatatttatgaaaatgaattttaattatgtgaggtgctttttctgtatacttggttttatgatcattttattaatacaattctatttcctcttacttgtatagtgacggtagctatcatactaagtgcatacgcatactttaaacttagaaaaaactgatcatcaacagtctctcttatttgacgatttctaatatagagctttttcttttaagcttgattattcgtttactcatagcaatggtttaaaaagctcgctattttaaaaaataagttattatgatacttctttccaggacgcattaataaagcactccctcggtatataaattttacattttacacttcctaaattatgaaaaagaagcccttaccaaaagaacaaacagaaatttgggaatgtgagtcagaaaagtgtaatggttggatgagaaaaacttctcttatgaaaatcaacaaaagtgcctttatgtggcttaaaaatgagagctgaaaacggaggatgaaaggtttattgttgggaaaaataaacccgaaaggagtatgctaaatgaaaaaagcaaaaaaatcaactgataaaccaacaatcgcggagggaataaatactgaagatgaattgcaaaaagatgcaaccctagaggaaatttctaagggagaatatactaacgtaacgactctctctttagacgaaaatgatccaagctaaattatctcaggacaaatttttattataccctttatttgaaacggtgtttttattgattatttctctctaataattattactctatccagtattaaattatttaccacaatgtaatttatcagcagctatatcctcaaaagcccttttatcaagggcttttggtataatgtaaacttaattctctcattaaggcaaaaagattacatagctttttctaccttcagatatcgtcctacttttctttttattcgttgaatagcattatcaatagacttttcagacacatctaataattttgaaatttctgtatatgaatagtcatttatatataaagcccatactctttgttctaatttactaagtaattcggctattttttgtttcttttcttccaattcttcttgattaataagtaataattctggattttctatgtttttttcggctatcatatccagaagcatataggttgattcttgattagataaaggtttgtatagggaaacataggcatttagaggttcatgtttttgacgagcagctgttttaaccgcggtgaacatctgtctcttaatacagagcccagcaaatgttttaaaagaggacattttatctcctttaaaattacgaatggccttatataggccaatcattccttcttgaataagatcttccttatcggcccctcttaaaaaataggttgatgcctgcgcttgaacattcccctgatattttttaattaaaaaatttaatgcctcttcgttcccataatgaattagatttagtagatcttcatctttatatctatcgtaattcttaattaattcagtttcgatatttgtactcactcatatccctccggcaatcttaggtgaattttaaaagtatttttggaatagtaagcttaattcttttaagattatcttagtcagtaaaagagattttttataagacaaaaaacgcctagtacagcctggcgcttctctatataccttttatttttggttattatttctccatccctctaaagtataagaaactagaagtgaaaatgttgtcgaaccttggtaatgctcgcaaatttcaacttatttaatgcaaaattcaggaaattatcttgattataagtcaaagaataaaagaggaaaagcaatatatgtctagaatctacatctatgtttcagcccatctatcgtaccttcttatagataggcgtttatttaataattaagatatcattccgattttaccacaaattctttttaatagtttagtaggtgggaactctctgtacttaattcgttataacttccataccttatgtatatagcatacccttatcaatttacctcatttctttaactcgtaagagcattagttttggaatccttctaatggatacgcaaattaataattgtacttggaaacggagcgatacgatgaataagacgtatgatatcatcattaccggtgctagagttgccggctctacccttgctatttatcttgggaaggcaggttttcatgtgttgttagtagaccaagcgacctttccaaaggacacattatcaacccatacttttttcaataatactgtcgctcttcttcgagaaatcggtgtcatggacaaattattggaaacaaacgtcccaccggtacaggatattaaatttcaatttgaggataccgcgatagaaggactcatcccaaaggttgacggggaagaaagttgttactgcattagaagaacttatctcgatcagatcctacttgaacaagccaaatcacaaatgaatgtaaccgttctagaaagatttcgtgtgacgaatgttattcatgctgacgatacagtagtaggggtggagggtttagatggcaataacgagaaacaagaatttttagctcgcctggtagtcggggcagacggccgatcctcaattattcgcaagctggtaaaaagtgaactcaaaataagcatttcggcaaaagtcggcatctatttcgggtacttctctgaatttcaccatgacaatgtccctaaatttgaagtatacaagataaaagataacacagccattctctttccaacgaatgataatttatatgttatcgccggcattttcccattagaaaataaggaattgataggacgattgaaattaaatccggaaagctgtctacgcaatttcttaacagataactttccgaatacaacaatagggacgcgtttaaaaaatgcggaattagtagaaccggttaaaggcattctcagatatgataattactggtataaaggaatgggaaaagggtgggcgttggttggagatgcagtttgttttaaagatcctggcatggcacaaggtatccatgatgctatatgtggagcacgcatattatccaatattctctcaaaatataagggacaatccaatcaatcaaatcaaatgtctgaaaaatatcaaaaggcaatagaagacgagtttatggttcggtttcacatgggatgtcaaatttcgcagaatgaacgcatctctgaacaacagaatgctgtcaataagctaatcagttcccacccagaggctatagagaagtttttagggatttataattactcaaacgagcccgatgctttagaaaaagaactcacacgaattatgcagtcaatctagcaataatttttagaaattaagggattcaagtacaaaataattcgttataaacataaaacaacaatgtgttgttaattttaggtttgtaaaactaactcaaacaagttataaagttgaaataatcatatccttcctaaagtcatattccatatatctaaaaccattaaataaaacttaatctataacataggccaaatcttttaacgtacagatatttggcctatatttatatcaaaatacccttagtatacaaaatttccgaaatgttagtgatactactatctgaaagaataaggagataaaaaagatccttttagattatcaaaagaaaggttctcttcttgataaaatgtctacactgataaaaagtaaattggaggggtagagatgttttatattctagaaattggaaacataaatgtagctggaataaatatagatgatgaaataggtttaattgactttcatttatcagatggaagaggatatttgatgctaagaaaaacagatgaacggtttacgaccgcgatagattatctcctcgaaaagaagacagcatttcgagtacaaaaaacccaatggacggaaaacgggcaaatgaaggaaccttttgaagatgtaacggataaaatcgtaaaggaatatcaatctaaatatgcatgatgatagaagatacttgataagggtatcttctatcattgaaaggatttgtataataagattaaataaataataatcttatatactacaaacaaagttaatatgtaatagaaacgggattcatccaatttgttgattctctggcaggtctattcatctttattgacaaagcattctaactgagaaataagttgagattaagtaagctaatgggtgttcgctatgtttaaaaataatttaatactatatttcggaagttatagggtcaaatttgcagtataatattcaataattggcctttaaatagttaaattttattgaataaaagctttcttaagcatcagtaagaaatatccatcagcataattaaaattccataaataaataaaaatcaattatttatacgaattttataacagtgaggtgaaagtatgaaagaaaacaatataaagaatctagaatatgaaattataaaaaagcatgagaaattatttgtaacaaaattagaccttgagagtgaagcaaatcgcttgatgttagaaattaatttattggatgcacagcatactcttcataaagtaaagcagttaaaccgacagatagacgatataatctctgaaatggattatttgaaacaggcgcttgaagctataagtaagatatatcaaagtattccaaattttacaaccccgatcgattctaaaagaaatttaaaggagttttcctaatagattatcaggaaaaaccagtggccctttatttaaaataaaggttgatcgtttatataaaaaataaggctaggacttaagcaataaaacactaagttaaggaaagtaaatcgtactatatgtgcccttttttcttaaaataaattggttcctagaatttatcttatgtaaacttgtaaaagaaataagctcttttgcatttgatattttgattggagttgcagccagaagactgagcagccatcttcctttctgtcatgttaattacacctgttcgctatgtggttttatcagaacatattcgtatcatacagttggcaagcatccatgaattaatggaaaaatataaaagttcttcagaagaagcaaaatcaagacagttagcttcttctggtagaattaaaattaatcttatgtaatgcagttacacactgaaaataagaaatggcattgtagttaaaccattcaatttactttaccttggttttagcatataaaaaggagtttttaccctcaaagaaaacatattaaggataaataggatcacatctaatagaaagcaattcttaacatgaatttttcacatagaaaaaagcaccctcatcgttaatggcattggagaataagggtacttcttgagaatttaagttttctatactaaagtataagaaagattaggtctatagtcattataacacataaactgataggttgtcatacaaattttattgtagaagagcacccctgtattcaaataacaggggtgctcttaagcatggtcatacgtatttttatcattttgtaacttaacaaaatatcttttttaagaaagcatataaactgttaacaactataaatttttatagttttatatttttgaattctcagattaaccaacttttttctttagaagctttttatcctatagaagaataatagttcttacaatataatgttttcctcattatgcatatccgatatatgacttcgttgtcctggtttcacgaatatcatagataacattccaattattacggcaacggcagcagcagtaaacatagcattatacccatgtttcgcaacaaggcttcctgttagcgtaggtgcaataatagttgccaggtttgcaataaaatgggttactcccccaaaagttcctgctttattgggctctgtatcaagaacaactgtccaatagatcgaattgggtaggtaattaaaggcattacctatacacattaataaaagtactgaggccgcgcttccaaccgatgggattagcataaaacaaatagctgtaaaaaataagcagactactgtgaaccaggatctagctatacgcaaatttccagttttctcacgtaatttatccgaaattttccctcctactaatcctgtcacaatagcacctacccatggaatcatacctatatacgaaagagatgctaaagaataattaaattcatcttgcagatattttggagtccaagttagtaataggatattgacatacaaaaatgcaaagtacccaatagcattcattactaatgtagggtttttaaagaaataataccaaggaacatttttggagtttgttttttctaattgtgattcaccttttattaaacaatctatacttcgaattttttgtagttcaatttttgaaactctaggatgatcttcaggtaaatttgtaaatatttttctccatattaatacccaaacaaaacccaacagaccaagaataataaatgttaccttccaattagtaaacgtcaaaaggcccactacgataggtgcggtgaccaatgctccaattggagttccaactaagccaagtgctacagaaaaacctttttcttttggggacacccaatttgccatcgttcggttcattgtagataaagtaggtccttcagccagtccaaacaaaacacgaaataccgcaaaaccagctaatgcagaacccccaaagaacgctgcacctaagtgaccagcaaatattgtcccaatttcaaatatagaccatgtggttccagcgagaatccacataaacttaggacctttcttatctgccaacgctcctccgaatagtgcaccgaaaatataaccatagccaaaataccccaaaattgctccccagcttacgggatttaagttgaattcttgaataatttcagcctgagcgtatgaaagtgctcctctatctatgtaatttatgatggttataataacaatcataaaaataataaagtagcgataattatttttcactaattatttctctcctctctcatttggtcactcttcttactgagatagaaagtttcataacaaatgtctagaaatttagcactttcaaaggaataaggaagtcactattttatttcctccttgcaaagcctgttaaaaaattcaagaatacatgaactcctgctttaatagtaattcctgatttatcgcgtaagggatctaaacatacaatatccattgcttggactaatggatgtgagcccgcaatgtatatggcttcgaacaattcatccgttctcattcctcctgtagttcctgctggtacaccaggggcataagccacatcaagaacatccatatctaccgtaaggtagatgacatccactttcttagctaaatcatctaaggctttttcaactgtactagggatccctgtttttctagcttgaagtaaggtcacataattaaccttgtgggtatctgcatactctttgagagattttgagttataaaacccatgcaggccaatattccaaacgttttttccttcaatcgtaccactctcaatcaagtttcgaatgggtgttccattggatggcccgttatcttctaaactgcgtaaatcaaaatgtgtatcgaattgaagaattcctatacgttgttttggatgcgacgctttccagccttttactaacatagccgtaattgaatgatctccccctaacatgataggcagtgtatgagggtgatatttccgcattgaaatcatggcttctttaatatactggtgagaaagcgaaatatctgttacatgctgtttgacatcgcctaaatctaaaaccgataaggaggtcaaatccgtatcatattcaatatgatacggattaaacgatttccataattgtctcatagcaaggggtgtttcacttgcccctgaggcactaatagaagatctcgaaagagggactcccaaaacagttacatctacagcttgaaaatctatttcatcttgcacttcaaatgtctcgatccaatcacttaccttaggttcagttgaacgctgtctttcccaatgaaaagagggacgattaagttgtgggtacgggtacgtcacgtaaagccccaccttccacaatcacttgtccttttttaatgacagtatctacgaggttcactgcatagttatattgcaacgtttgataatttggtgcatcaaataaaacaaggtcccctttctttcctacttcgatactcccaacttcatcagctcttccaatggcatgagctgcattaattgtacatgctgttaggacttcggctggcgtcatcttcatcgtaagacatgctagattcataataaaaggtaaggattcagtaggtgatgatcctggattacgatcagttgaaagggcaaccggaactccagcttcaatcatctttcttgcattcgcaggcttctccattaaaaagaacgctgtacctggcaacaagactgcaataacaccacttttagccatttgtttaataccttcatcggatgcctgtaataaatggtcggctgaaacagcccctacttttgctgcaagttctgcaccgccaaattgaacaatttcatctgcatgtattttgggctttaatccgtagacttttcctgcctcaagaatttgctccgactgttcaactgtaaagactccttcttcacaaaaaacatcgcaaaactcagctaaattttcttctgcaactcttggaatcatttcctctatcactaaacgaacaaatttgtttggattttctttatattcaactggaacagcatgagctcccatgaaggtagaaactaaatcaacagggtgtttttcgtttagcttttttgctgctcgtagctgtttcaattcatcttccagtgtcaaaccatatccacttttcgcttcaattgtcgtaactccatattgtagaaaacgattcaggcgtttggaggtttcctggatcagttgttcttctgtagcttctctggtacttgttgttgtttggagaattcctccccctgcttttaggatatcaatatatttagctccgtttaaccgcatctctagttccttttcacgacttcccccaaacacaatgtgagtatgagcatcaattagacctggagtaacaatctttcctgaagcatcaatcgtattgatatgtccattcaacgtatgaacatagcgttctgcttcaacatctgatccaacaaatgtaatcaacccattttccactacaacactgccatgttcgataataccgatatcggacatatcttgagcacgttttggttctttagttccgcctctaactgtaatcagttgtgaggcacgtttaatatacgtaatagatgacataatgctcactccttttcttttagtctaatgttggaatgttcatgcctttttccttggctgtttgaatggctaattcatagcctgcatctaaatgacgaactacgcccataccaggatctgttgttaatacgcgttcaaggcgtttagccgcatcttccgtaccatctgctactacaaccatacctgcgtgaagagaatatcccatgcctacgccaccaccatggtgaacagatacccaacttgcccccgcggctgtattaactagtgcatttaaaataggccaatctgctacagcatcacttccgtctctcatcgcttctgtttcgcggtttggtgaagcaacagatcccgcgtctaaatgatctctaccaataacaataggtgctgaaagttctccagatgcaaccatttcattaataatttttccaaatcgtgcacgttctccatatcctaaccaacagatacgtgccggtaatccttgaaattcaattttttctctcgccattttaatccagttacaaagatgggtattatatgagaattcacgtaaaataacttcgtctgttttataaatatcttctggatcacctgataaagctacccaacggaaaggtccttttccttcacagaattgaggacggatataagcaggtacaaaacctggaaagttgaacgcgtcttttaccccttcatctaacgctacttgacgaatattatttccgtagtcgaaagcaatggccccttctttctgcatatctaacatagcctgaacatgaacagccatactcgccttagatttccttacatattcttcaggattttcagtacgtaatacttccccttgctctaaggtaaagcctactgggaggtatccatttaatggatcatgcgcggacgtctgatccgttacaatatctggaataaatccgcgtttaatcatttgaggaagcacttcagctgcatttccaaccaaaccaatcgagagcgcttttcctgagtcctttgcttcttgtgctaaagcaatggcatcatctaggctttctaacacaacgtcacaatagcgtgtttcaattcgtttttcaatacgtgttcggtcaacatcaattccaatgactacgccccctgccattgtaacggctaatggctgagcgcctcccatgcctcctaatccagctgttacggtaatagtaccttcgagactaccattaaaatgttgtttcgcacattcagcaaatgtttcatacgtaccttgtacaattccttgacttccaatataaatccagctaccggctgtcatttgcccatacatcatcaatccctttttatcgagttcatggaatttttcccaatttgcaaaagccggaacaatattggagttagctaagagtacacgtggtgcatctttatgagttttaaaaacagctactggttttccagactgtactaatagtgtttcatcctcttctagatctttcaaagtggctacgatacgatcgaatgcatcccaatttcgagctgccttccctattcccccatatacaactaatttctccggatgttctgccacttctggatctaaattgttcattaacatacgaagaactgcctcttgtacccaaccttttgtatttaattcttttccatgaggcgccttaattactttttgttcagtagtcatatttcttccccctgtaaataaattcaaataattttaaactgttttttaaaatttattcttatagataattacttataatctggccatatttcatacgggtttactttacgcaggaaatctcataaatctttataattgagaaaaagaaagattgataccctaatattttaataagtttatgctagagttttataataaaaacgacttcacacgttcattaatgtaccatttcgtaattaacttcttttacaaccccttttaaatcagcagccaatttttcaatatcacgtgagaagattcgatcttttgtaattgttggaacagattttctaattctcgaataaagtttcgttgtttctggagctaacttacttacacctctaatatcagcagcctgagcagcacagatagcttctatggcaagaacccttctgctattttgaataatttgataagcatggcgagcagcagttgttcccatactcacatgatcttcttgattagcagaagatggaatagagtctacactagaaggatgagctaatgtcttattttccgaaactaatgaagcagcagcatattgagtaatcattaagcctgattgaagaccagggtcaggacttaaaaatgccggtaaatcacttagttggggattcaccaatcgttcgatacgtctttcagaaatatttcctacttcagacattgcaattccaagaaagtccatcgcaaaagcgataggttgtccatgaaagtttccaccggaaataacatttccactgtccgagaagattagtggattatctgttgctgagtttatctcaatagatagtttctcttttacataatttaaaacttgttgaatagcaccatggacttgtgggatacatcgtaatgaatacgcatcttgaactcgaatttgtccttgagtagtggttagttgactaccgtcaaggtaagaaagaattcgttcagccacttgtttctgttcagggtaaggtcttacagaatgagattctggggtgaaagcgtcaacaattccttgtaaaccttctaatgttagggaagcaattccatctgaaaggtcagctaacttttgagcctccatataagcaaccacacctacagcagtcatagcttgggttccattgattaaagcaagcccttccttagcttgcaatttgattggttgaaggcctgctaatttcaatgcttctgtacctgacatttttttaccattaaagacggcttctccttctccaactaataatagggctaagtgcgatagaggagctagatcaccacttgctcctagcgatccttgactaggaataactggaacgatattttgatttaaacaatctattaataactgcagtgtttctagacgaattcctgaatagcctttcgctaatgcattagctcttagaagtaacataacctggcttacttctataggaaatggctccccaagcccacaagcatggcttcgaattaaattgatttgtaagtcagctaaatcgtcctttgaaataactgtgtcactgaatttcccaaatcctgtgttcacaccgtaaattaccttgttattggtaatgctatcctccactaaagctctacttcttttgatattttctagagcgtgatcactaattttaacagaataaccttcataaataacttgatgaatttgttcatacgttaatgagttaccgtctatttgaacaaacattctaatcactcctttttaaattaaaaaatcttattgttttttgaatataaaaaggggctatatcaaaaaagaaacaaatctcttttgatatagccccctataaactaaacaaaataaactatgggctttaaatacaattttaaatatctaaaacaaacataactaacaatgctaaatgaatctatactttaaggtctaaagcttaaagcaactaatgtatctgaaactagtatctctttatctgaatactttgtcaattgttttttaaaataatttaaaattatttatttaaattactttgaatagatttttttagatatggttaaacccaaaacctaatgcatcatgttcaaaccctttctttggggcccctatagttccatagacacatacactaatccattctccaccataaccagaggagtcaatatttcctctgacaattgaaaaagttaaaccaactgtacgtaaaatatctcctaactgtaaagtccccctacttactccctgaattgcttccaatatggcatgataaagagcatggacttctctatacgaattagcatttataatatggttatttttagcacttgtttcaatagcagcaactacttttgataactccatagccccgacttttccaactgtatagttataaccccttgagtccagttcttgttcaacttctttcaccagttcagtattatgcaagagaaccaataaagaagttaacttacccattgaaaaattattcttttgtttaacctgattgttcataagatgttccccctttgtgcttcccttactactagattagtatatactgaagggtatattaggtgtcaacctagcttttggtagcgcatacatttctgcgttgacaactatttattcggtagatatactgaatataattctgaaaattctagataatatagcctttagtggatgaattaaattttagttaatggaggatcttaacaaaaagatggaaatataaaaattaggtatgatgttattt

SEQ ID NO: 57 - DNA, 22600 bp, Priestia aryabhattai
  source 1..22600: mol_type = genomic DNA
tggaatattgttgtccgttaaatatatttaaacaaaatcagcgcataaaaaaatctgccgcagtgcggcagattttttctataaatcatacgttctataaaatcattccggttaaaggcgctttcgggtttccatcatgatctgaatcttctttgtctactaaaacaagcaagctgccttctttgagtgaatcattatattgttcggcctgctgttttggaattcccataccgactaaaataccagacagacctcctacgctcgcaccagctgccgcacctgttaatgtagctacaattggaccagccgccacaattgggcctattcccggtatggcaagtgcgccggcacctgctaatattccggtcaagctccctatcgtacctccggtaagtgctccagttgctgccccttctgcttttgtcttcgtttctttctgaacttttttggtctttttatgtttgccgatgatagatatttcttctgatgtatacccttcttttttcaaactctctacagcttgaattgcttcttgttccgtttcgtatacccccacaacattctttgcttttgcttccatactatctcctcctcattaatgttgtgtgtacccgggagtatggctttgaaacgttttagagagtacgaggtcttctttattcttaaataaatagccctaaatcacttttcatttagtgacgtttttatttaaaaatgaatgaactcgctctttttttaaccatattcctccacaagcaatgaaacatgcaaccgtactaaaagccaacgcatagctccggagccaatccacaaggagcccaaaccaaatcggtgcgagcacgatggcaaattgattgagcgttaacgcaatgcttaccgttaaaccaataaaacgatcatccgctttttctgctattaacacgataaacaaactaaaccagccaattgcaaaaaagccaaggctaaaacaaaaagcagttagtagccaaaaaggcaaattaaatccaatataagaaataactattgttagtcctgcagtcatccaaaccgtcgcttgcaaaggagttcttcgatttccgttatacacataatcacttacccaagctaaaacaattctccccaccattccgcctaacagtgtgatgctcagcaggatgcccgctgaagcaaaatccatctttatggctttcgttaaatagctcataaagtgcgcaacgataatgatttgaagagaaatcattgaaacacctacaaaaaacagcggatagagcgttttatcttgagaaatgcgcttgattttttgacgaagcgtaaatgtttcttttttttctgacgatgatgattgctctcggtagaacacaaaaaaaagaagacctcctccgatagctgccgctgcctgtacgagaacagccccatgccacccgtattgatgaaacagcagcggtaatgctgctgaagcgacagcgcctccaatcggtatccccgtttgccgaatccccatggcaaggcctctatgatgagaaggaaaccacttcaccactgctttgcttcctcctggctgtgctgttccataccacacgcctgctgcgagaagcacacctgttaaatacatataatgatcagctctataggcaaaaagcatgcttacccccagcaaaatagatcctccccctacaagccacctttctccataacgatccatccagtttccaaaaagcaacatggaaaaaatcgggccaatttgaacagctgatacgagcagtcctgtttgaaactgcgataaatcatatagtctttgccaaaacgcggccaatggccccgccccgtaggtgacaaacgttgcacatgcctgagaaagagtggcaataaataaaatcatccacttataagaagctttttgtctgctcattttctctcctccacctctactttcagtgtagagaagcggcgatatcatgtaaaataaggaataaagataaaagtcatcaataaaaatgatagctgaaggaggagattttatggatataaaagatttgcttgtttttacaacggtagcagaagaaaaaaatatttcaaaggcagccaaaagcttaagctacgtgcagtcgaatgtcacgatgcgaattcagcaattagaagctgagctgggtacacagctattccaacgaagcggtaaaggcgtcactttaacttctagcggagagcttttgcgtcgttatgctgaagaaattcttcgtttaaccaatgaagccacggcaactgtgcaaagcagtgcgcacacaccgatagggactttaaaaataggtgcaactgaatctactgcggctcttcgtttaccgccttttctatttacttattgcactgcctaccctgatgtagacttcatcctagaaacacatacaaccgatgttcttattcagctggttttagaacgaaaacttgaaggagcattcgttgcaggcacctgtgaacatccggatgtaaacacattatttattcaaaatgaagagcttgtacttgtgagccgccatcctcttccgtctctttacagcctaaatgatctgaatctattagctttcagcagcggatgcgcatatcgacatacgttagaaatgctgctgacaagagaaggcgtgtttccaaaacgcatattagaatttggcacaattgaagcgattattgggtgtgtaaaagcaggtatgggcgtagctgtaatgatgaaatccattgtatctaatcacgaccattcattaacgttaactccgctgccagaaccgtatagaaaggtttccactttttttattacgcgaaaagatacctttgtatcggcggctttacgtgaattttcttctcttcttaccaaacagctttgcataacaaaatcctaagaaaatatgcgttcttagggttttgacttaagcagctgccggattctttttcacgaacttcataaacagtccgcgaactaaaggacccatgatgagaagctgaagcgggtatgccacgatcaagtttttcataacgatccatgtatagcttgaaagaagcggctctccgtctaaaccttttgtaagtgacatcgtaattaacccgtatacagacatgcaaagcaccattccgatcaccatacatgatgacaaaatcaacacgacttttaactgtttcgatttatcaaacagcagtgaaaatgctactttttttgctacgggaccaacgaaaaaagtctcgacagccattgcgactacaaacgtgataaccaagttcaaaataccttctgcaagcgtgatatgcccgatgacgtcattcattaacatgttatacaccgtcatcacaagcaccatccctccgcacatcatcattccaaaatacatactttcttttttagttgttggcacattcctcatccttttcatgttttttacttggcttagtatagctttttacattccttcttcgtaagtgaacattttgtgaacatttgcaagcggctgctcctctttttgtggagggctgactatgacaaaccactctagtctgcacctttgaaacgtaaacaaaaacccccgctttatggactaaagcgggggttcattttatagagattccgtgtgcgacccgggcgggatgggcgtttgggctcgaaatactttttcccattttgagacgacgatacaggcaatcgcgtggcctgggacgttgactcctgttctggccatatccataatgcggtccactcctgcaataattgccactccttcagccggcagacctactgcgttggctgttgctaaaagaacaacaagtgaacctgacgggacggccgcaattcctttacttgtcatcacgagtataagcatcataaataattgctgagttaatggcatatcgatgttaaaagcctgtgctaaaaagacgcatgaaacggataaatacagcgtggatccatcacagtttaacgacaggcccgacggaataacaaacgacacaactcgtttaggacatccgtacttttccatccgttccatcagctgtggcagcaccgtttccgtacttgttgttgaaaacgcaataagaaacaaatcccaaatcattttgaatacttcaaagtagttgaatttgaataaaaacccaacaagaggaaataaaacaaataaaataataaaaagacctaaaaacacggttccaattagctttagcattggaagcagaagtgcaataccgtattggcccacagatgcagccattagcgctagtacaccaagaggcgctgtgaccataacaatttgcgttaatttaaacataattttagccgtagattcaaaaaatttcattgcaggttcggatgctttaccaactcctgaagcggcaacaccgaataaaatagcaaagaaaatcacggccagcaaatcattttttgccatcacatctacgatattcgttggaatgatgtttaaaatcatttgtttaaaatccacgactttatcggtgtactgagacaattcaccgatatcttttttaacaagatgagaaagatcgaggcctactccgggctttagcaaattcactaacagcagcccaattcctaatacgatggtagtaatgatttcaaaccaaataatcgtctttaaccctagactccccatttgtttcatactgccgcttcccgcagcacctatgacgatggttgaaaagacaatcggcaccacaatcattttaatgaggcggataaacccgtctcctaccggtcttaaagccatcccgaagtccggtaagaagtgtccgataacagctccgattactaatgcaattaaaatttgaaacgctaaaaactttttcacatttctccctcctttttgccttcatgaaacggacatctattccattaatatccaaattctcagacactttaagtaagttcgggacatttagctagattccttctaaaatggacaaattggtctatatatttcgctttgtcagttaaaacacatagaaaaaagccagagtgaagttgatcttcatcctggcttttttaattcttatgcttttttaacaaactgagattttaagctcatcgctccaaatccgtcaattttgcagtcgatgttatgatcgccttctactaaacgaatgctttttactttcgttccgatttttacaaccgatgagcttccttttacttttaagtctttgatgacggtaactgaatctccgtcttttaaaaggttcccgtttgcatcttttacagtaagctgttcttccgtactttctgttttttcatcttgcctccattcatgcgcacactccgggcagacgaacaggtttccatcttcatatgtatactgtgactgacagcttgggcaattaggtacattcattttcttttcctccagcagcagctcgtaaccaatggtacgatcacgagattacattttttatctgttttatactgtcacaatttcatgagattaacaagcttttctatttccttgctgctgatgttttcttttccaaataagtgagccgataaacagaacaaaacctgctccaaagacaagaagctgatctaaataaaggtcacctgtttttacataccgtataataaataatcctccgaacatgagcatcagcatacatgaaaaccgaatgaggtatgaattgatttccatttttcattcctcctttttgtaagactttttgttacgaaaaaaacacgaaccatatgccaaatgtaactccgtataacggtaaaatgacggctagtttttgcttccaccctttaaaaaaggaagaattacgaggcgcaaaccaaagctctaacgtcccgtataacagcaggactcccgctgctagtatcgcaatcacagtctctcctaagtccatacacactcctcactttcattctatgcacttgaagctaagcgcagcgtatatagtaagtctcatcattataaaagagcttataatcgtaatgcatacagattttgaatacctttcaacaatacatttattaccattatatcataataaaagcatttttgagactttttatacatgtaaattatcgtataatgaaaagtagatacagagaaaaaaaggggggattttttgaagagaactcagcttatttttgttattacactgcttattgaagctggattaacctatgcgtgctcatcattcttgtctatccgctttattgagcttatgttttttagcggacttttgttttcagttttgactttttggttttcaagcagcggaagcaacagcgctcattctcactataaaactcattccatgaggttgatgtctggggccaatattgaacacaatccgtttcgtttgcgctggacggcttattttcttgcttctttaagctttacgggagtgggcctgatttttttcattctgctgctgacagacgttattcctccagtaagctaaaaaacctgctcttcacagagagcaggaacttacgagaacagcttgagaagcaggcattttcgctttactttattcgcaacagcttgagtcacatgatcttttaaaggccgagtcaatattcgtttcagcggatgttttagcatccgtttgctcacgggaactttaaagataacgctgagaaccactgttgctaaaaccgagagcagtaagaccgcaaaaggctttttttgaaaccatctcgagaagataagcatcattacataaataagtgctgaccaccccaaatgccagccgtgcctaaatgtaatccctttacacctgagcccaacccattctacaaacgaagctgtacatacccattttgtaatatatttcacctgcttagcgagtgtagacggataagtagctaagaacgacaaaatcatgagaggcgtaatgaacataaggtgtaaaatacgcagtacttttaatgaaagatgagaagatttaaaatcccaaagcaatttatcattacataaaaagtagtagagaatattaaaaaagctcacgtataaaaccccagcatacagctcgcgtattttgttccacgtttttttatggatattttgaaaaatcagccatagaaagacagaaatatgcacctttgttcacctctctaacgtcttttttagaatctctgctattgtattttcgtttcttcctgcttcttttcaatttttcgaatccatccaatcagcattcggttaagatacgattttaacgttacgctagtaaaagtgtggtaccacatccagcctgttttccactcgatgagcttcgttcgtttttcagcccataattcaataaaaaacatcgggatcgtaaaaagcacaattttatataaaacttttaaccctttatcgtaatacgtagcctggttaatcatgacggatatcataggatacagcaaaaagtcgaacaacacgttaattctaaactgttttttcaataagcgagttggatatcgaagaaggccgtgggttacaataaatttatcaataataccatttgttaaggcgttaaatacataggccagcagccaatctttaattggtggttttctaaataaaaaagggagaatccccagggcgataagtagcattacacgtaaaaatttcacttcaaactttttatttctcatcaccttttcgctcctttcaccaagtgttgttagcctacccctaccttcatgtcaattggcagcttgagacggctgttctcaccacgctcaattattgcttatgttaatttataaagatacgcagcagcgtctaatgtaaatttcccggacataacccctaagttcacgctatccatacatacgtaaatgtttgttttagttttaagttctttgaagagatttatacatgtggttgagacatgaaaaaagcccaactctaatcagtacgggcttcctccttcacctattgtgtttttttaaacgttaccatccagctacaaatccacccgttcgtgattcacttcctccgcatagcacgccgctttcaggatctctccaaataatctgtccgcgtccaaatgccattgaatcaacagctacttcaattttatgtccttttcgttcaagcgcttgggctacgtgtgagggaaaagctggttccacaagcaccgttttatcttttttccactgccatcttggcgcgtctaaagcagcttgaggatgaagctgaaagtcaatcgtattcatgacgacttgcatatgtccctgcggctgcataaaacctcccatcacgccaaacggtcctacgggctcattatttttagtgagaaagcctggaataatggtatgaaacgtttttttattaggagcaaggcagttatcgtgatcaggatccattgaaaaattatgtccgcggttttgcaaggcaattcccgtttctggcacaacgattccagaaccaaagcccatataattgctttgaataaacgaaaccatgtttccttcttcatcagccgttgctaaatacaccgttccgcttccgacaggttctccggcttcaggctgcagggcatgttcttttataaggccgcggcgatagcttacataggtatcagacagcagttcgctaacagacacgctcatttttgcttcttccgtaatgtatttttccccgtccgcaaacgcaagctttatcgcttctatttgtttatgatacgtatccacagcatctttttcttgaagctcaaagccttttacgatatttaatgccattaacgcaataagcccttgaccgttcggaggaatttcccacacatcatatccacggtagtgagcggaaatcgggttcacccactcagactcataagcagccaaatcttccttggataaaaagccgctatattttttgctgaatgcatcaatacgatccgcaagctcacctttataaaacgcttctgcatctgtttcgccaatgagctgaagcgtacgagcatgatggatggatgaccacctttctcctgcttttggtgctcgtccatttggggcaaacgtttgaaaccatgactcaaattcttcgcttgtatgtactcgtttgaacgtatcgtacgcttgtttccattgtttcgtgagagtaggcgctagcggaaacccttctttggcgtactgaatggcaggctgtagcacttgagaaagaggcagtttactaaatcgcttcgataaagcagcccaagcagccggagccccgggaaccgtaacgggaatcattccgtacttaggaatatctctgtatcctttttcctttagcgcatcaatggaaatagactgcggagaaggtccactagcgtttagtccgtacagctgatcatttgtccaaacaagcgcaaacgcatctcctccaattccatttgacgcaggctctaatacggtaaggctcgccgctgtggcgattgctgcatcaatggcattgccgcctttttttaaaatatctaggcctgcctgcgctgcgagcggctgagatgtggataccattcctttttttgcataaacgggaactcggtaagatggatatggatgataatgcggatcataggtcataaaagcgcctcctttttcagatgtttaaattttccgaataatataacttctttattttaccatatttataacgcatcggctttttttatcttagaatgacatgactccttttacctaaaattggtatactgatagagtacaagaattgccaaggaggatgatgtatgaaaaaaataaaagctgcctttccgctcgctgtttctttagcactcgggcttcaagtactccctgtgtctacttcacctgttcaagctgaagcagcggcaaatgctgctcatcactcagcaaaaattgaagtcaaacgagcaaacgcatttttaaagaatgtggccaacggcaaaacaaaagaagctaagcgctacttttcccgcagcctgcagtccaaaatgagtgaaaacaacctaaaaacatggtggtcagctctaacggctcagtttggttctgtaaaaaagattggtacgtctgtacaaggtgaagtcaataccgttcatcgaaatatagaagtgcccattgaatttgaacacgtattagctactttaaccgttcgatttagtcaaaatcgtcaaattgatgattggcgaatcgtaccggaggagcgccagttttcattttccacaccgccttatgacacccctaagaactacagtgaaaaacagctttcaatcggcaaagcaccttacgaacttccagcaacgcttactcttccaacacgttcaaaacaccaaaatgtacccgttgtcatattagttcacggatcagggccttctgatcaagatgaaacgtttatgagcttaaagccgtttcgagatctggcttcaggactggcttctcaaggaatcgccgttttacgctacaataagcgtacatacgaacatacagctaagatgtccggtgaaagtaaaataaacgttgatgatgaaacaacggatgatgcagtactcgcagtcaaagcaatggcgaaacaaaaaggcatcgacagccgcaatatttttatgctaggacacagtcaaggcggcatgatgatgcccagaattttaaatcaaacgccggataaaagcgtgcgcggttctattttgcttgcggcaccgagccgcacacttccagagttaatgcttgaacaatttgcctatcttgtatcgctgaatcagcttccgaaagaacagcttgcttttttccagcagcagtttgccattttacaagacccaagcttttcaccagctcagccgccaaaagaattcctgcttggcacgccttatttttggtatgacttagctcactggcaccctgcagaagtcgcaaaatctcaggacacgcctctgctttttttacaaggagcgcgtgattatcaagtaacgaccgaagattttgaaggctggaaacaaagcttatctcagcgttccgacacttcttttaagctttatccaaagctcaaccactttttcacagaaggaactggtgaaaaaagcacgcccgatgaatatgctgtttcagccaacattccttcttatgtcattgatgatattgtcaaatgggttcgtgaaactaaaaaataagagaacaaggcgctgtttttccagcgccatgttctcttatccattaaacctccccatcatcaccgtactatagtacttgccgtctgacagcagcttgtcattttttaataccccttctatttcaaacccgaactttgtatataaatcaatcgcttttttattggtctctagcacattcagcgtcattttcttcatgcccgcgctatctgcccacagtatggactgctgtaaaagctctttgccaattccgtatccccaacattcttttgcgatgcatacgccaaactctactttgtgggcaaatcgtttaaactcgttgccttcgcatcttgaaaacccgacaatttcattatgtacacttgctactaaaaataagttttgtttactttctgtgtcacgttgaataagtttttcaaaatcggattcgtccatatacccttctcctggttcacgatctaagttttccgtttctccgtctagctgaactctaaggtgagacaattcatctgcatcgttagtggcagctgagcgaatgatgtactgaagtccttttacattatagatttgctggttaatgaccatcatattcctccaagcgtctttcataaatctatcaactgaatttaatttcctttactataaatattatacatacagagatgaaagagagttgaacaaattggtctggttattgcttttaaccctatacggcatttacaagttctataaatcaaggagaccactaacgaagtttgatcatttttacgagagagcgtttgatctggaagagaaaaagcgttacggagatgcgcttaatatacgtaaccaaggaattgaactccatacccttaccgatttagaacgagctgatttacatttagcaaacaggcgtatgcttttgaaactaaagcagtatgaacaagcaacgaaacactacgacgcctcatttaaactagcaaaatatgaaaaatttccttactcagaaggatttgacgaagtcattgaagcttacttgtatgcagggcgtagagaagatgcactaatcatcactaatgacatgttaaaacgacaaagctacgatcaaaaatttaagaagctagagcctttaaaagaaaagcttctttcacatgaagactaatggtaaaattaaacaaatggaagcgcattattaagagcgattgaggtgagtatagtgatcataaccgttattgtaggagtgctgggtctagttggtttaattgcagcaggatttgcgacgaattataaggatacgaagtaagaatacataaaaaagaacaagaaccaaataggttcttgttctttttttaacgagccaacagcttttctgttatgcgcaaaaacatctttacgccaacttcaagcgaggcttcatctaccgtaaacttcggatgatgatgagggtacacgatgccttgttcttcatttcgcgctccgatgttaaaaaatgctccttccgtttcctgcagataagctgaaaaatcttctcctcccattttaggagacagcgtctttacacgttcttttccatattctgcgatagcagtttcttcaattaaccttgtaatttcttcagagttaatgacgggatgatagcctttttcatacgtaaacgtgtactctgcaccgtaagcttctgttagcccctttacgatacggtcaatttgtgccggaactttttctcgcagcgcagcgtcaaagctgcgaacggtaccgttcagctccactttatcaggaagtacgttgtgcgtagttcctccgtgaaattgcgtaactgatacgactaatttatcaatgggattgatcgttcttgaaacaatcgtttgaaggttcgtcacaatttgtgctcctacaacaatggcatcaactgcttcatgaggcgctgcggcgtgtcctccttttcctttaatcgatatattaaacgtgtcaggcgaagccatcataggacctgcaagcacgccgatttctccgacgggaagaccagaattcaaatgtgtgccaatcacgtaatccacaccttccatcacgccttctttcacaagctcctgcgctcctcccggcagcagctcttctgcatgttgaaaaatcaagcgaatttctcctttaaattcatttcctaattgagaaagaacagaggctacccctagcaaaatagccgtgtgaccgtcatgcccgcatgcatgcatcacgcctttatggaccgaagcaaatgcaaacgtgttttcttcttcaatcggcagcgcgtccatatccgctcgaatcgcaactacttttccctcttcttttcctattaatctagctaccacgcttgttgatgtaggacgagtaatggtaaagcttccaaacgaacgaagcgtatcttcaacaaactgagccgttcgatgttcttgaaacgataattcagggtagcgatgaaaatgtcttctccactcaattacctgcttttttaagctttctgtgacgctgtattcactgattgatttgactgtcatacacatactcctcctttgtttgactatatcgattatgtggaacggaaaggtccaaatttccgcgcagcgtactgctttcatatgaagtgccgtaaagcccacgctcttgtaagataggcactactttttccccaaattgatgaaacgtatcgctcataaacggacgaagcacaaatccatccgctgcttcctgctcaggtgttcctgaaaacggtgaacgaggcaaaattgtttcaaacgcgacctctcttaacgttaactttcgagcagccgccgcttgtttaattttatttgtcgtgctttgaaaggcattggctccgatatctcctagctctgggaacggtgcgtctaggtcaaattgttgaaagtcgtagtcatcaaaaaaacgagctaaatatgtaatggcgtgatcaattggaattagcgcagcaagctccccatatcttctttctacatcttcctcgctatctcctataattaaatcaatacaaagagatgctttgattgttcaaagcatctccagtcgtctggtcgatcggttttaaatagatgtttagttgacttatctgcatgttatacccactatccaggtaagtcaaattagctttttaaatatgtgcttttattcttttaaaactatagctacatttcctattttatgtccggtttcgacatactcatgagcttctggaatttgttctaaagaatagcatctatcaatcactgatttaatcctcccttcttccatcagctttttaagaagcaataaatctttcgtctgcactttcgcaattccttgcccttcgaccgaaacaaaacgtccatttaaggctaacgctcccttgcactgattttttgtgatttttccaacggcatcaaaaataagattatatctttcttcttttttactaaaatcttcgttttggtagtcgatgacgtaatctgctcctaaagattttactagttcactatttttagcactgcacacacctgtcacttcagctccgtaatagctcgcaagctgtacagcggcagttcctacagcacctgaagcaccgtagataagcactttttgcccggcttgaatgtttccttttctaaaaaatgcagcgccgtcgtgcctccgaaagaaatagaggcggcttcttcatgggttacattctctggctttacggctatcgtccccttttctggtaagcagatatattccgcatatcctccgaacttcatgcctgtcatcgcaaaaagctggtcgccttttttgaaccgcgttacgttctttccgacgtcctctacttctccggccagctctacgcctagtattgattttctaggcttccgtaatcctaaaactattcgcattggaagccataacagcagtggactattaaagctcctcactctgcagtcgcccgatgtgaccgtggtggcatgaatttttaacagtatttcattctcttttggaataggcttttccacttctttaagctgaagaacatctggtttaccatactttgtcataccattgctttcataacagctctccctttttcactagagttcaatatatgtttataaactatgctcgtcgaaagctattctttcacattttataaagaacgccggtgaatctactatcacatatggtaaataaaaggatattgctataaaataagtataaaaacagaaagcgtggtacgtgttattgtttaaacttcttttaattgaagacgatgtaacgctgtttaacgaactgaaagagcggttggagcaatggtcttatgatgtttacggcatccgtgatttcagtaacgttatgcaggagttcagcgaggtaaaacctgatttagttattatggatattcagctgccgaagtatgacggatttcactggtgcagaatgattcgttctcattcaaaaatccctatcatttttctatcttcacgtgatcatccttctgatatggtaatgtctatgcagtttggcgcagacgactttgtgcaaaagccgtttcattttgatgtgcttgtagcaaaaatacaggcccttctccgccgcgtgtataattacagcgttgaacaagtaaaccttctttcgtggcaaggagctacgattgattatgaaaaaaataaagtatcagcgggatctacagctattgatttaaccaaaaatgaaatctttattttaaaatgcttaatacataaaaagaatacgattgtaagccgagatgaactgattaatagtttgtgggaagataaacggtttatcagtgacaatacgctgacggtaaacgtcaatcgcctgcgaaaaaaattagatgaaattggacttggagcttttattgaaacaaaagtcggccaaggctacgtagccattgaagaggaacgctatgattaaactctttattcgggagcgtctaagctggattcttttctttttcatcatacatttttttatgctttttatcgcgtatattgatgaatccattcctctgtcttcgattctctatatcgtgtttttatcatcgattatctttcttattttctgcgtcttccgctatcacaaagaaacgaaattttatcaaaagctaaaagatgaagaggacttctttgattcttctactctttctcatccgctgcgtccgtttgaaaagattgttcagcgaaatctgatgcagcaattagaacaagcgaaaaaagatggcgtgcaaactctgatgcacgtgacgcaggaaaaagatgaactgttagcttggattcacgaaattaaaacgccgttaactgcgatgcatttaataattgaacgcttagaaaatcgagaagttaaagcaaacttgacgttcgagtggctacgtattcactttttacttgatcaacagctgcatcaaaagcgcattttctttatccaaaatgatatgtatattgaacatctggatttagagtcccttattttcactgaaatcaaaacgctgcaagcttggtgcatgcaaaaaaatattgggtttgatgtggacttacaggcagaacgtgtactgtgtgacgcaaagtggctttcgtttattatgagacagctgttaacaaacgcagtcaagtacagtgaagaagctgatgtgatgattagaagctacgagcaccgcggtcaagtatacatcgaggtaaaagataacggacggggcatttctcctcaagatatgccgcgcatttttgagaaaggtttcacctcaactacgcagcatgaagacggccgcgctacaggcatgggcttatatctcgctcaaaaagctgcgcacgctctttctattcacattggcgtgcagtctgctcttaatgaaggcacaacgtttacacttgcctttcctaaatcaaatgattttgtggatatgaaaagcatgtgacaaaaatgtcacatgctttcgttatttgttcgctgaatcaaaggaaaagctaaagccctttttctataataaacgtatcagattaaaggagtgaatacatatgaacatattagaagcaactaatattcataaaacctacggaaataaatttaatagacaagaagtattaaaaggtgtagacattacgattatgaaaggagaatttgtaggaattatgggcgcttcaggctcaggcaagacgactcttctgaacgtgctttcctccattgataaaatcaacggaggaaccatcaaaatcgaaggaaatgaaattagcagaatgaaagaaaagcagttagcaaacttccgaaaaacacatttaggctttatttttcaagactataacttgcttgatacgctgacagtgaaagaaaatatcctcttgcctctttccgttgcgaaaactccttcagcagtagctcacaaaaaatttgacgtgctggccaaacagctcggcatctatgagctgaaagacaaatatccaagtgaaatttccgggggacaaaaacagcgtacttccgctgcaagagcctttattcatgagccaagcatgatttttgctgatgaacccacaggtgctcttgattcaaaagcggccagcgatttgctaaacaaactgaccgagcttaatgacaaaagaagcgcaagtattgtgatggtaacgcatgacccagtggcagccagctattgcagcaaagtcatttttataaaagacggacaaatttatacgcagctgtacaaaggcgatcaaacgcaaaaagtcttttttgacgatattatgaaaactcaaggcgtgctaggcggagttcaacatgaacattaatcagctgattttccgcaacttcaaaaagaatgtaaaaaactattatttatacgtttttgcactaattttcagcgcagctttatattttgcttttgtcacgctgcagtatgaccccgctcttgatgcaaccaaaggttcgattaaaggaggcgcagcggttcgggccgcttctgttttacttgtagctattgtttctatctttctattatatgcaaacacgatattcatcaagcggcgcagtaaagaaattggcttatttcagctaattggcatgaccaaaacaaaaattttccgtattttgaccgttgaaaattttatgttgtattttgcctcactgattgtcggcattttaatcgggttttcgttttcaaaagcggtcattatgattttgtttaaaatcacggatacaaaaggcattgccaagcttcatttttctgaagaagccttgattcaaacgctgattgtgttcggcgctatttatttgctgattatgacgatgaactatctttttattaaaagacagaccattttggcactattccgcgttacgtcatcaacagaaagcaaaacaaaaaaaatcagtattcttgaaatcattattggaattcttggcatgatctttattgcttccggctactatatttctgccaaattgtttgacggatcttttacaagcatgaatgctttgtccatcgcaatggtatccattttagcttcggttatcatcggaacctatttgttttataaaggctcagttcgctttttattaaatctgatgcgaaaaagcaaaaaaggctatttatcgattaacaatgtattatctctttcttccattatgtttcgcatgaaatcaaatgcactgttgctgacggttattacaaccgtatcggctctggctattggcctattgtgcttgagctacatctcttattattctgctgaaaagtcggccgaagattatgtgcctaacgatttttctatcaataatacaaaagacgctgcttcgtttaaagccgcgctggatcgaaagaaaatagcatatacagaaaaaaaaatcgacgtcatccaagtaaaagcaaacgtaaaaaacatcttagaaaatgaactaaaaagtccaatggtggactcgtccgctatgattttttcggttgttagtgaaaaatctgttagtggtgtaaatgtagctcaaaatgaaactttgtttaccggctataatgatatgcttcaacgagtaaattcatttaaagattccggagaaattgagctaaaaggaaagaaagaagtcattctgcaaaagtatataggcttaaatcgaaaatttctcttatctacttattttacgagcggtatgcctactatgattgtagacgattccgtgtttaatgagctgaaaaaagacgtggatccttctattcaaaaagaatcttctgtgtacacaggggtagatatatcacaagaaaatgacttaccaaaagcaaacgagattttcaaagaaatgaagttggacaatcataccttcaatgattcgcgtatcgaaacggtaaaaagccaaaagcaaactatgggtctaattatgttcattgtcgctttccttggactagcatttttaatcacatcagggtgcattctttactttaagcaaatggatgaaagtgaagatgaaaaaccaaactatacgattcttagaaaattaggctttaccgaaaaagacttattaaccggcataataattaagcagctttttaacttcggcattccgttagtcgtaggtttactacacagttattttgccgtacaatccgggtggttcttatttggaacagagctttggacaccaatgattatcgttatgattatctatacggccctgtactctatttttggtattttatctgttctttactataaaaaaattattaaagaagctctttaaagattaaaagcacaagctatagcttgtgcttttgatctttacatgccattaattgctggcattttctttatttccctgactggctgtatgtaaaaaactttctagtcgctttttgacaaacggccactcgtcgtcaattacactgaaaataactgaatctcgtacgtatccatcaggtaaaaccatgtgttttctggtgatgccttcttgcgtggcacccaagcgtttaatagccgctctagatcgattgtttcgtacatccgttttgaattgaacgcggtgaagcttcagctcttcaaaacagtattttaataataaatacttacactccgtattgacccgggtgcgccacacggatggatgataccacgtccaccctatttcgacgcttttgttgggaagtgatatatctaaaaatcttgtgcttcctacaatcgaatgtgactctatatcaaacacagcaaaaggcagctctcttccctcttgctttgcttttaaagcactttcaatcagccgtttcatatcacttagactatgaacttttaccgggaggtgctcccaaatttctttcggttttgcagcttcatataattcttgttcatgctttttttcaagcggtactagttttaccgctgttcctacaagttcacctgactttagcataacctcgctccttttcaatacgtctaaagaaaatgttaatacatgtatatgtactgaaaaagggtcagtttctgcttattgtaaggtatcactttcattataatactagttatcagctaagtttttttcgagaaaatcacttattgtttggaaggcttggtctgctgattctttattaaaggtttgtgaaaaaggattcataaaaccatgaacaccataaaactttttgattgccaaaagcggctctcttttttgctctaatgaatttattaaacagtctacatcaaatgtttgctcttcagcaggaaaaataagaagagttgggcaaacaggacttctatttacataatctctaatacgcgatccgtaacagccaatcacaaagttgcacaaattgctttcactgcatagccacgatattgttgctcctacactgaagcctataactcctacttcttcatattcttgttttagttgaattaacatgttagtaatttgtcttgaaccctcatcaataccaatgttttgaacaaagttttgataagccattccttcttcttcataactataagaaacatctttagataataagttaggacagataatatctgcctctaacttagaaaatttctctttcataaacttcatatgatcgttcacaccgtatatttcatgaatcaataaaatcgctttatttgattttttcattccttttataaaacagtcgtttcccttgtcaattcacgatgcaatacgtctcccatgcgcttcatgccttcaacgatttgttcagcagacatattagaataattcaagcgcagcgcattgtttcttgtgccgtttggaaagaatggcgttcctggcacgcaggctacgttattttttagacattctgaaaagatatctgctgaatcgattccttggggcagttccacccaaataaacaatccgccttctggcttactgtaagacaaattctccgggaaaaattcttcgatgcacgataacatttgggtacatcgctctttgtatacggctttaattttttgaatgtgctcttcgatatcataaagctccatgtacttagccgttacgcgctgagcaaagctgtccgtatgcaagtcagccacttgcttaaacgctacgtacttatcaacaaaagcttcatctgcacatacccagccgattcgaagacctggtgcaaagattttagagaaggtgctgatgtaaatcactctgccttctgtatcaaaatgcttaaccggcggcagcgtttctcctgcaaatcggactcctccgtacggattatcttctacaatcagcacgtcgtatgcgttcgcaagttcgatcattcgctgacgtctttctcgcgttaaggtgcgccctgtaggattttgaaaatcaggaatcgtataaataaatttagcatggggattttcctgaagctttttctctagctcttccataatcattccgtcttcgtccatgtccacttctacaaacgtcgcattgtaggatttaaagacgttaatagccgctagatacgtggggctttcacagattaccacgtctccgtcattaagaaacagtcttccggtaaggtcgattgcctgctgagatccggacgtaattaaaatgttcgaaacagtggattcgatgccgatgtcctgcattcgtttagaaatggcttctcgtaaagggatatacccctctgttgtactatattgaagcgaagcggctccgtcttcatttaatacggcgcggcacgcatcgttcattgcttcaacgggaaatagctccggcgctggaagtcctcctgcaaacgaaatgacttctggtcgttccgttacttttaagatttcacgcgtttcagaggattttacaagactagctcgttgggcaaatttatctttcattgatgatcattccttttctagattttaaacttttaataacgagttaattattcgaatagtcagaaaaattaaaacgaaaactttccctatgagttcaggcttcttttaagccttggaagatgcctttttaatagacaaccagcatctgcttgctcgctgactcttcatttcttcttgatgtcacgtcctcctttcggtacatatttttctcattcactatttgtaat

SEQ ID NO: 58 - DNA, 22177 bp, Priestia aryabhattai
  source 1..22177: mol_type = genomic DNA
tagcatttttagaaggaataagcttttaggcagatgccgtgtataaaaaattctgaaattttattattgactgaaagcgtttttaatattaatattaattcaaacttaaccaatatttaaccaacacataacaaaagagtttttttatctacaaatgaaatcgatttcatttgtagggttataagattggtaagttttatcactatctatggctagtgaggcagcattacacaataaggggaaaagaggaatcaaaatgggaaacgaaaatattctgtggggaattgctccaatcggctggagaaatgatgatattcctgaaattggtgcagaaaacacattgcagcatctgttaagcgatatcgtcgtagcaggctttcaaggaacggaagtgggaggtttttttcctgaaccaagcatattaaacaaagagcttgagcttcgaaatttaagaatcgcagggcagtggtttagcagttttatcattcgtgatggcatagaggaggcgtcaaatttatttcacaaacattgtcagtatctgcaggaagtgcatgctgatgtggcggtcgtatctgagcaaacttacagtgttcaagggattgaaagaaatgtttttgctgaaaaaccttatttcagtgatcaagaatgggaagctttatgtgcaggattaaatgagctggggaaaatcgcagcagaatacggtttacgtcttgtctatcatcaccatatggggacaggtgtacaaacattagctgaaattgatcggttaatggaaggaaccgacgcaaatcatgttcatcttttatatgatacgggacatatttacgtttctgacggagactatatggagctattacataaacatatagatcgtattaaacacgttcattttaaggatgcaagaagaaacgtgctggagcagtgcaaaaaagaaggaaagtcatttttgcagtcgtttctagccggtatgtttaccgtgccgggtgatggatgtgtagattttacaagcgtgtataaagcgttagttgattacaattacaaaggatggattgtagtggaggcggaacaggacccttctattgcgcatccattggaatatgctttaatggcccgaaagtacattaacgaaaagttagttattcattcttaaaataagacgggggaattagcatgggtaaacagggaaatcaacattcatttttacgtacgatcattttagtttctacgtttggtggactgctttttggatatgacacgggagttattaacggggcactgccttatatgtctgaatctgatcaattgaatctcaactcttttactcaaggtcttgtaacgagcgctctgttgtttggtgctgcatttggtgcagtggtaggcggcaggctagcagattataacgggcggcgtaaaacgattctgtatcttgccattctattttttgtttccacaattggatgtacaatttcgccaaacgcagctgttatgattctttgccgtttcctattaggacttgctgtagggggagcatctgttaccgtaccgacatatttagctgaaatgtcaccagctgaaagccgagggaaaatggtaactcaaaatgaacttatgattgttactggtcaacttcttgcctttacgtttaacgcgattatcggaaatatgctaggagaaaaccctcacgtttggcgatatatgctgccaatcgctgccattccagctgtctttttattctttggcatgcttagagtaccagaaagtccgcgctggcttgtgtcaaaagggaaaaatgacgaagcgctaacggttcttcaaaagatacgagaaaataaaagagctaaatcagagctgcaggagattgagagcgcttacgagaaagaagcaaaaatggaaaaagcaacgtttaaagacttaacaactccatgggttcgaagagtcgtttttcttggtattggaattgctgtcgtacagcaaattaccggcgtaaactccattatgtattacggtactgaaattttaaaagacgcgggttttcaaacggaagctgctcttattggaaatatcggaaatggagtcatctccgttttagccacttttgtagggatttggctgctgggtaaagttggacgcagaccaatgcttataacgggattggtaggaacgactactgccctgctgctgattggtatattttctcttgtatttgaagggtctgcggctcttccatatatcgtattagcactgacgattacgtttcttgcgtttcagcaaggagctatatctccggtaacctggctaatgctttcagaaattttccctttacgtttaagaggcttagggatgggtgttaccgtattttgtctatggggaattaacttccttgtagggttaacgtttcctgttttactggccagcattggcttatccactacgttttttgtctttgttgtactcggaatcggagcgattctatttgttaaaaaatttttaccggaaacaaaagggcttacgcttgaagaattggaacaaagcttccgcaaatatgataatgaaagctctgacgtaatcaatgacaataaaattatttaagtaaagaatggagagaatgaaaatgaaactatgttttaacgaagcaacaactttagaaaattcaaatcttaaaaaagacctggagtattgcaacaagcacggatatgactatattgaaattcgtacaatggataaactgcctgagtatttggaaagtcactcaatggatgatttagcgcagttttttaatacaaatcatattaaaccgctcgcgttgaacgctttagttttctttaataaccgcagtgaaacagagtacaaggaagttatagaagagtttaagggtatgctagaaaccgcccaaaagataggtgctccctatatcgtagccgttcctttagtaacggaacaaaaaatcataaaagcagagattaagaatagctgcgtacaagtgctgaatgaattatcggaattggctgaaccttacggagttaaaatcgccgttgagtttgtaggtcatcctcagtgtacggttaatacgtttggtcaagcttatgatattgttcaagctgtgaaccgaggtaacgtagggttagtacttgactgcttccacttccatgcgatggggtcaaaattagaagacttaaaacaagcggatatttccaaaatatttatcgttcatatcgatgacacggaagattttcctattggcttcttaacagatgaagatcgagtatggccaggtctaggagcgattgatttagacgctattttctcaacattaaaagaaaaaggctacaaagacgcggtatctgtggagctattccgacctgaatattatcaattaagtgcggaagaagcaattaagacagctaaagagacaactattaaggctatctcagaatactacagctttgaaacaacaaaatcatattcatgataaggagtgttagtcagtgacgttagtatcttcaaaactagtatcaatgaaagatatgcttcatgccgctaaaaaaggaaactatgcggttggtcagtataatattaacagcctgcagtgggcacaggctattttacaagctgccgaagaggaaaaagcgcctgtcattgcagccgtttcagacaggcttgtcgactatttaggcggatttaaaaccattgtaggcatgatcgaaggtttgttagaggaaatgaatattactgttcctgtcgcgcttcacttagatcacggtatgagtgtagaaagatgtaaaaaagctatcgacgctggatttagctcggtcatgtttgacggttctcattacccaattgatgaaaatattgccatgactaagcaagtagtagactatgctggtgctcaatatgtctcagttgaagctgaagtcggaacagtcggagggatggaagatgggcttgttggcaacatcgtgtacgctgatcccgctgaatgtctgcgtcttgtaaaagaaacgggagtcgatgctttggcagctgctttaggttcagttcacggacagtaccaaggcgaaccgcagctgggctttgatgaaatgaaagaaatagctgacttaacagatgtgccgctggtgttacacggaggttctggtataccaaactaccaaattcaaaaagcaatagctcttggacatgcaaaaattaatgtgaacaccgagtgccttcaggcctggacgcgcgctgtccgtcacacgttggaaagcgacagtgacgtgtatgatccgcgaaccattcttacaccgggaaaagaagcggttatggcgactgtaaaagagaaaatgagagagtttcatacaagtcataaagcttaataaaaaagaggctgagacaaaagcattacagttgaagcaagatccgaacgatgaatggagattcttgatagaaaatccagctcgttcggattttttctttgatagggtctcaatctctctttgttttagcagttactcttctagaaaatgccttttgtaaaggttataatactaagtaacaaaaaagcgaaaagaaagataaacggaggaggtagaaatgttaaaaacgaagcgaattcaacaaattcaagagtatgtttttgaacatgaatctgtctcattagatgatttggtttcggtgtttgaagtctccaaaaacacgattcgacgcgacgttcaaaagttagtggatgaagggcatattaaaaaagtatatggcggagtagccgttaatcatgtgaagcttgaatcatttaatgaaagacaaacaagaaaccagtttcaaaagcgtttaattgcccaaacggcagctcagtacgtagaaagcggagacgtcatctttattgattcaggaaccaccacgttagagatgattgaatttctaaaagacaaatcgataacgattgttaccaatagtttagatgttatagtaaaagctttgccttttgatgcgttaaaagtaatttctacgggcggctatctcgagcgtgaaactcaatctttttcaagctttaaccacgccaatcctgtaaagaactacaactttgataaagtatttatggcttctacgggtatttccatatcaaatggcgttaccaattcatcgcccgttgaaagtgaaatcaaagaaacggttataaaaagaagtacaaaagtgtttttattagcagatcatacaaaatttgataagtatgcaatgattacgtattgtcagctgcatgaagtggattatttaattacagataaagtggacgtcagctatcagcactatgcaaaagaaaatgagattacgcttatccttgcggaagaatgagtgtttttgagttattatacatatgcttagatctagagccagtaggcatacatagaagtatgccttttcttttttcttcacatcgtgctcctctataaagcggttacagtgaataaaaagataaactaacaaaattttaaaaaaagtgtttacaaagtaaactgaatattataaactaggttcatagataagaaagcgcttttaaaactaaatgaaatcgatttcatcaaactgatctacatgtataataaaattggttttacaggtaagacagagcatggaaaattgatggggaagttaaggatgaagtttgaaaaatatttttttaacaccaaatgaaatcgatttcatttgaaagtggaatttatgatggatttcgagcttttctccatcttcaagcgttaaaaagtgcaggggctgaaagtatttgtctcatcgctaaatagcagctgaaacaaaggaaagagctaggaagtaaaaggatagaacctcatttattatattgaatgaaatcgatttcatctaaaaatgtgaaaaaagggtagaaaaatcaatttgatggtgattaatttcagaagataaggtaggaaggtatatgaaaacgataaggttaacaacgagtcaagctttagtaaaatttttaaatcagcaatatgtagaatttgatggaaaaaaagaacgcttcatcaaaggagtattcaccatttttggacatggaaatgtggtggggatcgggcaagcgctgcaggaaaacccaggggagcttgaagtgtatcaaggcagaaacgagcagggaatggctcatgctgcagtagcttttgcaaaacaaaaacatcgaaagcaaatcatggcctgctcttcttccgttggtccaggctcagcgaatatggttacatcggctgctacagctactgcaaacaatattccggttttgcttttgccaagcgatgtgtttgcaactcgccagccggacccggttcttcaacaaattgaacaaacacatgatttatctctttctacaaatgatgctttccggtccgtcagcaagtactgggatcgagtcagccgtccggaacagctgatgtcagctatgatcaatgcgatgcgtgtattaacagatcccgcagatacaggggccgttacaatcgcgcttccgcaggatgtacaaggggaagcgtgggattttccagaaagcttcttccgtgagcgtacccacctgattgaacgccgcgagccttcgcaagaaagtatcagaaatgcagtggagctgattaaatcaaagaaaaagcctcttcttattttaggcggcggcgttcgttattcagaggctgcggatacatttgctgcatttgctgaaaagtttcatattccatttagcgaaacgcaagctggaaaaagcggtcttgaaagcaatcatcctttaaatctaggaggagttggcgtaacgggtaacagcgctgctaataaaatagctcaatctgcggatttaattattggtgttggcacacgcttcacagattttacgacttcttcaaaactgttttacgctgagacggatgtattaaccattaacatttctgaatttcacgcatcaaaattggaggctactaaaattgtcgcggatgccaaagtgggtcttgaagctctttcgtctgcattagaaggctataaatcaggctatgaaactgaaattgaacaagccaaatcagaatggaatcaagagctgactcgtttaaaaaatattgcatacacaggcgaagaatttattccggaaattaaaggacattttgatcaaagcctgtcggagtataaagatagcctaagcaccgaacttgtccaaacgactgtgcttggtaaagtaaatgaactaattgcacctgattctattattacatgtgcagcgggaagcctcccgggtgaccttcagcgcatgtggatctcaaatgaacgtaatacgtatcaccttgaatacggatattcatgtatgggctatgaaattgcttctgccttgggcgctaagatggctgagccggataaagaagtgtatgcgatggtaggagacggaagctacttaatgcttcatagtgagctggtaacgagcattcaagaaggaattaaaataaatattgttctttttgataattccggctttggctgtatcaataacttgcagatggataatggaattgaaagctttggcacagagttccgcgtgcgtaatccacggacggggcagcttgatggagatattatgcgcatcaattttgctcaatctggagctgcgtacggagcaaaaacatatgaagtgtatacgatggaagagcttgaatatgccattgaagattcaaaaaaacaaagtgttagtacactgatcgacattaaagttcttccaaaaacaatgacggacggctacgattcttggtggcacgtaggagtagcagccgtatctgaaagctcagacgttcaaacggcgtttgaaggcaaagaaagtcagttgcaaaaagcaagaaaatattaatcttttaaaaagctagaatatcgagtttgcttgattaaagagtgtccctagcataaatacgttaaaaaataagaaatagaaaggtgtggaaaggaatggctgatttaattgtaccgacaaaaacagctgacagggatggaaacgtactaagcatcacgccacaatctgcgggatgggagtacattggctttgacgtttactcattaaaaaaaggtcagaagcttaaaaagaacacggaaaatcaagagatttgtattgtgattttaaccggtaagtccaacgtttcgacaaaggaagaaaaatgggaaaacatcggacagcgaatggatatctttgaaaaaattcctccgtattccgtatatgtatcaaatgatgatcattatgaagtagaagctgtaaccgacttggaaatcgcggtgtgcgcagcacctggaaaagggacataccctgctcgtttaattacgccgcaggatgtgggcgtagaacatcgcggagcaggaaatatcgcaagacaagtccataatattcttcctgaacaaaagccggctgatagtctgctagtagtggaagtgtttacgccggaaggaaactggtcaagctatccacctcataagcacgatcaagataacttgccgcatgaatcgtatttagaggaaacgtactatcataaagtcaacccaggacatggatttgcgattcagcgagtatatacggacgatcaatctctagatgaaacaatgatcattaaagatggagatgcagtcttggttcctaaaggctatcacccggtatcagcgcctccaggttatgaagtttattatttaaacgtcatggctggtcctgtgcgaacatggaaatttaacaatagcaaagaccatgaatggattatggaagaaaaattagcattaaagtaaggagacgacgtgactatgagttatttaacattcgattcgcaaaagcgatttgaccttcttgcagtaggaaggctttgcatcgacttaaatgcaaatgaatttaatcgcccgatggaagacacgatgacgtttacaaaatacgtaggaggatctcctgctaacatcgctatcggtctttcaaggcttggaatgaagacaggctttattggaaaagtgtcagacgaccaaatgggccgcttcagcacccggtatttaaatcaacataacattaacacggaaggcattgtagttgatcaaacaggagccgtaacgggactggcctttactgaaattaaaagtcctgaagagtgcagcatcctgatgtaccgtgataatgtggcagacttaaagcttgatccaacagaggtttctgaagagtatatcaagcaatcaaaagcgctccttatctctggaacggctcttgctaaaagtccttcaagagaagccgtgtttcttgctcttgaatatgcgcgaaaacatagagtagttgtattttttgacgttgactaccgtccgtacacgtgggagtcagaagctgagactgccgtctactataatttagcggcagaaaaatcagacgtgattatcggtacgcgagaagaattcgatatgatggaaaagcttttaaattatgaagaatcaaatgaccaagttacagctgaacgatggttttctcatcatgctaagattgttgtcatcaagcacggaggagaaggatcgattgcttatacaaaagacggccagtctcatcgaggcggcatctttaaaacgaaagtgctcaaaacatttggagctggcgactcctacgcatctgcctttatctacgggttaatgcaagggtttacaattcctgaagcgatgagatttggcggtgcttctgcttccatcgttatttcaaaacacagttcttcagatgcaatgccaacggtagaagaaattaagcagtttatggagacagctgaagaagttctgcaacaagcgtaatcaaaaattgagaggagaatgaacatgacacaaacaacagtaaaaacagtaaaaaactatattggcggcgaatgggtggattcatctacaagtctaacagaaccagtttataaccctgcaacgggtgaagtcattgcagaggtgcctctttcaacaaaagaagatgtagatcaagcggtacaagctgcgaatgaagcattcaaaggatgggcaaaaactgcggtgccaaaacgtgcgcgtattctatttaaatatcagcagctattagtagataactgggacgaattagcgaaacttgtgacgcttgaaaacggaaagagctttaatgaagcgcgcggagaagtgcagcgcggaattgaatgcgtagaatttgcagcaggtgctcctacgttaatgatgggaaaacagcttcctgatatcgctacgggcattgagtctggcatgtatcgctatccaatcggtgttattggcggaattacgccgttcaacttcccgatgatggttccttgctggatgttccctcttgcgattgcttgcggtaatacgtttgtattaaagccgtctgagcgtacgccgcttttagcagcaagattagtagaattatttgaagaagctggattgccaaaaggcgtattaaacattgtaaacggcgcgcatgatgtggtaaatggccttcttgaacataaattagtgaaagcaatttcgtttgtaggttcacagccagtagctgagtatgtgtataaaaaaggtacagaaaacttaaagcgtgttcaagcattagcgggtgctaaaaaccactcaatcgtattaaacgatgcggacttaaacgtagcaacaaaacaaattatcggagctgctttcggctcagcaggtgaacgctgcatggcagcatctgtcgtaacggtgcaagaaggcgtggcagatgaattaatttcacgactcgttcaagagtcaaacaacatcgtcattggaagcggattagaagaagatgttttcttaggaccggttattcgtgaaaaccataaagaacgtacgcttagctatattgaatctggcgtagaagaaggagcccgcttagttcgtgacggccgtgaagatcatgcggtaaaagataacggctattttgttggaccaactatttttgataacgttacacaagaaatgaaaatctggcaagacgaaatctttgcaccggtgctttctatcgtgcgtgtaaaaacgttagaagaagcaattgacgttgccaataactctcgattcgcaaacggagcttgtatctatacagacagcggcgcaagcgtacgtgagttccgtgaaaatattgagtcaggcatgctaggagtgaacgtaggggtgccggcacctatggcgttcttcccattctcaggctggaaagactctttctacggcgatctacatgccaacggtacggacggcgtagagttctatacaagaaagaaaatggttacggcacgctactaagaatttacttatcgtactatgggatactaccggcatttgctagtaccctgtagtacaatcgtataaaaaaataaaagtcggttttttcacagtaacaaaatggaagtgattagttgagtgctataagtagcgtcaaagataagtatctttttgcagtcgtttcatttatcttttggttctcgcagtttatttacgtacctattttgtctccttatatggaagggctgggaggcaagtatgcctttattggtttagtgttaagcagctatggactcatgcagctattatgtcgccttccgctcggtatcttttcagactttgtgaaaatgagaaaaccgtttgttatcttcggcatgatagccagcatgtcaagctgcctgctgttttcgttgaccgatagcttaataggcgtgtttatatcacgctgcttggctggattggcagcggcaacgtgggttgcctttacgattttatattcaagctactttgaacgtgaaaaaactactcgtgctatgaatatcatttcgtttatagtggttttggctcagcttttgggaatgagtttaagcggttacattgtaagtgagtggggatggcacgctccgttttggataggaacaatcttgagtgtaataggcgctattctttctcttttcatttacgagcccaaagagaacgtaaagagatcgcctataaagcttaaagaactaatgagcgtaataaaagagccgtcgctattaaaaatttcgctgctgtctattttagcacacagcattatttttacgaccatgtttggttttactcctgcgtacgcattaagcgcaggatttaaagagagcgagctgagtttgattgtcttttcctttatgatccctcatgcagctgctcctcttattatggaaaagctatttgtttggcgctttggaaaatggacgatcttgaaggctgcattttttctagctgcattctttacttgcatgattcctataacagaaaataaaatcttgctttgtttcattcaaagcgtgaacgggttttcattaggattagtgtttcctcttatgttaggaatgtctattgaaaaaatagctgtagaaaaaagagctacagcgatgggaggctaccaagcgctgtatgcgttaggaatattcggaggtccttttgctgcaggaatattaaattcttggatgggacttaaagcaggcttcttttttgcagcagccttagggttaaccgctactgcttttgcagcggtatgggataagaaagaagcgtcatataaagtttttaaagcaaaataaaacgtatggaagcaagcatttatttctatttttaaagctcacatattaaaggaggccatagattatggtgttgaaaattggtgttattggaacaggagcaatcggacaagatcatattagaagaattacaaatacgttatcaggcggaaaaattgttgcggttacggatgtaaatcaagaacaagcaaaagctgttgtaaaaaatcaaagcttggatgccgttatttacgatgatggacatgagttaattaaatcagaagaagtagatgcagttgttgtgacttcttggggaccgacgcatgaggagtttgtgctagcagcgattcaagctggaaaacctgtattttgcgaaaaaccgcttgctacgactgcggaaggatgcaagagaatcgttgacgctgagattacacacggcaagccattggtgcaagttggctatatgcgccgctacgatacagggtatcgcgctttgaagaaagtgattgaaagcgggcaaattggtgaagcattaatggttcactgcgcacacagaaaccctacggtacctgatacatatacaggcgatatgtcaatcgttgatacattcatccatgaaattgacgttttgcgctggttattaaatgacgattatgtatcggttcaaatcgtggcaccgcgaaaaacgagcaaggcacttgaacatttgcaagatccaatcatggtgctgcttgaaacaaagcaaggcgttcgaattgatgcggaggtttttgtaaactgccagtacggctatgatattcaatgtcaagtagtaggagaaacaggaatcgctaatttacctgagccttcaagcgttgtgttgcgcagtgaagcaaaacgatctactgaaattttagtagattggaaagatcgattcattgactcttatgatacagagcttcaagactggattaattcaacgcttaaaggcgaagtgaatggaccgacagcttgggatggttacgttgcagctgttacttcagatgcttgcttagaagcgaaaaaatcaggaaacattgttcctatttctttaggcgaacgtcctgatttctatcataaaacattaagcgcagcaggcaaaatgtaagcgtaagaacgctctgtttatgaaacagcttactcatagatcacattaaaatactgggggatgggcacgtctagtgtgcataaaagaaaggggagctttaaattgcgtttagcatatgatccgtcacattaccgtgataatacaagtttaaaagatacgattgatacagttgcaagattaggttatgaatacgtagagttatctccgcgcaaagattttatttggttttatgaatacccaaaagttgataaacagcgtataaaagacttaaaaagatactgtgccgatgctggggtaaagatttcttctgtgcttccggtgcagcagtggtcttcaccaaatgagcaggaacgtgaagcggcagtaaggaattggaagcgtacaatcgaaattacttctgagctggaagtagatttaatgaacagtgaattcagcggtgacaagagccggcctgttgaaagtgaagcggcttttgttaaatcgatggaagagctgatgccgatttttgaaaaagaaggaattaagcttaaccttcaatcgcatccaaatgattttattgagttaaatacagaagctattgcaatgattcgtgcgctggacaaagactggattaaattagtctattccgtccctcatgctttcttttatgacgatggcattggcgatgtagcaaagcacattgatgaagcgggtgatttgctcgcacatgttctaatcgctgatacgcttaaccataaagcagcgtttggactgcgctatattgtaaatccgcctgatgcgaaggtaacgattcaccagcatttaaatcctggtgaaggagaaattgattttgacgcactgtatcgcaaattaagagaaattaaatttgacggcatcgtaacaaactctgtatttgcctaccctgatcgaccagaatggtcaaacgaagtaacgttaaagtcgatcagagaaggattaaatattaaagaaggcctaaacatttaacgtgatcgactgaagtgatgcgaaacataaaaagatatgttttgcatcacttttcatggtttatgcttgaaagaagatcagaacttgtgggcatagctagtttaaaatagtcttaattgttctattcggcctccatcatgatgataaagagaggctttattatgctggtaaggtataatagagatggatgcaaaaccgatagaactttttattataaaatgttaattactacagataaaggtgagtgaacgtatgtcagttaaaatgagtgatgtggccaaactagctaatgtagctccagctactgtctcgcgagttcttagtcagccccacctagtaagcaaagaaacgcaggaaaaagtcttaaaagccattgaagaattaaattatcagccccatattatcgcaagacagttcaggaaaaaagaaacaaaaaccattttagtagttgttcctgatattacccacccgtttttttctgaagttcttaaaggaattcagcatacggccattaaaagcggctaccgagtaattttaggagatacagaaaatgacattgagcgagaaggagagtttgttgatttattattccaaaagcaagcggacggcatgatccttctaacagcccgcatggataaagacagaattgaacaagtctccagacagttccctacggttcttgcgtgcgagtatatagatggcttagatatctctaccgtatctattgataatattagcggggcgcgaaaaataacggagcatttaataagccttgggcataccaaaatcgcgcatatcactggtcctatgaatgttatcttaagccgtgatcgattaaaagggtaccgccaagcgatgattagtcacgatttacccgtggattccgcttttattcaagaaggagacttcagcttagagtccggttatcatcaaatgattcgcttattatcgttagaacaacggccaacttccgtatttgtttttaacgatgaaatggcgataggagcgataaaagccgcaaaagacagcggtttaaaggtgcctgaagatatagctgtagtcgggtttgataattctaaaatgtcggatatcattgaacctcatattacaacgattgagcagcctaaatatgaaattggaaaaaaagcgatggaattactgcttggattaatgagcggaaaagcgttagaacaaaaaaagtttgtattaaaagatgaactaatcgtacgcgagtcttgcggaagtaaaactacagtgaaaaattttatccagcttgaaggctcagctaagaaaattaactagtgctgtttaaatgctatgaggttttttgctgagaagtaaacaagagagaccattatttttgtcttctcttgtttacagcaaagcggaaggaataatctgataaaaaagagaaggtgactttagtgaggattaagggaacagtattcaaaaaaagaacatacccaaagcatcactataaaagaatggatcgtctttcttttttagaggtgaaagataacatctcctttgatggcgatgtgctgaaaatccttcctgttcttagtcaaaaatcaatggaatgctggaatatcggagatgaaattgatgtggaaggtgaagtgaagtatattcgcatcattacttcattaggaaaactcagccttctgcctgtccctgtgtttatcgtcaaaacaattaaggaaataaaaccttcttctgtaactagttaacctgtcagacataaaacggctggtcattgtcatcaatcatggtcacattttaacgggagttgaattctgaaatttcttataaattacaggttccttcagataaaaaggaggtggagtatgtgacagctaatcttatcgcagggaaaatttctttaaatgaacgtgtccatcgtacacaaggcaatgaagtgtcttttcatgttcactactggggagttatgcccaagcactatgataatgtcactcataagcattctttctttgaagtgtgttacgtgcttgaagggaaaggaacttatatagacgacgggcgtccctatccggtaaaagaaaatacaatattcctttcaaggcccggggtattacaccacataaaaagcgatactgggctttttctcttgtatgtaggctttgaactggttgaatcagaatcaactaaaaagtggatcacactaatagaagaagctaaacggtgttctgaagtagtgatagatgtaaaagaggatggaactgctccgttaatttggaagtctcttttgaaccatgcaacaaaaagtgaagataccttttttgaagaaatactgacaaatttagctcattctcttatactttcgctcataaatacttttgttttccctttaaattaccatcatcggaaagctgttcaaaagacatcttctttaacccttaatcttgcaaaattatatattaaagataatttatctaattctattaaacttacggatacagcgactcatttacatctatctagccggcatctgtctcgtctatttaaaactgaattaggtgtcagctactcggaatatgtacaaaatgaaagaattcaaagagctgcaatactgcttaaaacaactgatttatcgattagagatattgctcaagaaacggggtttccggacgttcactactttacgcgtgtttttactgcttcgatgcgcagttcaccagggcgttttcctactctatataccaaattaaaaacaactgcatataaagattagtcaactcttctctacctaatgttgtgtattacaagtagaggagagttatttttatggaataaaattaatgaggattcaaacatgtcctcaaaagataaaaagcaatctttttaaaacaaagacgagtaagatccaaggttatataataacagctatactttattaaagttaaataaaagcgtttacaatcagtgtttttagcttgttgagattaaaagctgcagacgaatttattaggaggagaagacaatgaaattatcttatgtaacagacagtttaggacatttgccttttgaagaaatgttagatgtaatcacagagatgggaatcaatacgatcgaaatgaccacaggcgggtggtcgccggcacctcatttgaaactaaatgaattagtagaaaatgatgataagagaagtgaatttttacatgcattagaaaagcgtaatattaaactttgtgcgttaaactgttctggaaatcctttagatccaggtgaactggggaaagaacatcgagaagtgacggataaaacatttgaacttgcgaaattattaggtgtaaagaaagtgatcatgatgagcggattaccagctggaagtcctgaagacaagattccaaactggattacgtatacggtgagctggcctccagtgttaaaagatatcttagattatcagtggaatgaagtagccatcccctactggaaagaactcgttaagaaagctgaagcctgcggtatcgaaaaaatcgcccttgaaaacttcagctctcaactagtctataaccctgaaacgttatttaaacttcgtaatgcggtgggacctattgtaggattaaatttagacccaagccacttgatttggatgggcgcagatccgattttatcagctagagaattaggggcagctatccaccatgttcatggaaaagacgtgcgccttgaaagacatctatcaggagtgaacggagtgatggaaacaaaagaagtgacggatgtagcaaatagagcctggaattacgtggccgtagggtgtggtcaagatttacagtagtggaaagagtttttctccgttgttaagatgatgggctatgatgaagaagtttctttagaaatggaagatttaacgatgtcagttgaagcagggtttcgaacttcagttgaggcattaaaacaaacgcttagcttttaatttaaaggaatttccacgttttaaccaggaaaataatatatatcattttctggaggaatacgatgaaagagctaaaaaggttagaaccgctgcaagcagctacacaattcatttttaaacattttttattgccaatacgctcgcttacataacgcacgaatttgttttaagaacaaacggtcattggatcggtgattctaaatggattgtacggtctttgaataattacaataaaagctttagtaaagagtttgtggaggcattcgaaatcttttataaaacagggagtaaagataaagtgattcaactagttgataaagtgttagcaccatatggaggccggctgtttgaagggttttcactggggaaagagaggttgaatcagtagccttgttagaaccccactactatttcttgctagtagtggggtttgttttttaggaatattcacgtatgtttaaagagtttgcccgttatcaatcgtaaacacttggcccgtcacggactcttgctttaactgaaacaagatggcatctgcgatatcttcgggggaagaaatgcgctgaagaggtagatttcctgcaagctgatacattttatcttcgttgccagcccaccaccttgtgtccactgcaccgggagagatgcagtttactcgaatatgtggtgccagtacaatggctaaagacttagtcatcgtatgaatcgctgcttttgtcgctgcatagggaatagatgacccgattccagttgtacccgcaacgcttcctacattaacaatcgcccctgacttttgcttttttatatgtggaacggctgcttttacacagtgaaacatgccttttacgtttacattatataaggcgtcccatacgtcatccgttgcaaaatctagttcattcatccggatttgagctgtaatactagcattattcactaatccatctaaccgtccgaattgtgcaatggtttgatcaatcatattattaacttcatgctcactggctacattcgctttaaaagcaaacgcaattcctcctttttcagcaatctcctccacaacttttttcgcttctgtttctgagttgctgtaatttataacaagtttcgcgcccatgtcagctaactttaaagccgttgctttgcctataccagtgccgccgcccgtaataataaatactttatttttaaaattgttcatttctataaaccttcctttctcttaacatcttttattatatcttcgatgggaaaaaggatataataggtaatactaagagaggtatcatttaaaatgatatcaacggaggaattgagattggaaagccaagacttacgaattttcaaatgtgtggcagaagcgaagtcactatcaaaagctgcggaggtattaggatatgtgcagccgcatatcagccagcggattaaaaatctagaggaagaattagacaccaaattattgatacgtacgaatcgaggagttacgttaacaaacgaaggggaagctttgtttgactacgcccagcgtattttacgtttaatggaggaagctaaagcagaagttaatcctaacaagtttagaaaatctttaatcatcggtgcttcgcagacggtttctgctactaaagttccttatttgttctcgtcttttctgaaagaaaacaaaaatattgaggttaaaataaaaacggatacaaagaaaactttagaagaaatgctttcgtacggagaaattgatggactttttcttagcggtacctataatgaggctcagtttgaaacagtttatcactatgcagaaaaaatggtgcttatctcacctctatatgaagctagagaagaaaaagaccaaccaacgttactcatcaatagtgatgtaaactgcatctatagaaacagactattagagttttcaaaagaacatcatatacataaagccaatattatggaatttgattcattagaagctattttacaaggcgtccatgatggacttggaatgagtgtagtcccggctagcgtagtaaattctcgtggtgatatgaaaagcattgaatatcaagagctttcagaagacgttcatattgattttgtagtaaagaaagggaagcagcgctctcaaagtcttgaaaagtttattcattttttagggagtctatagattctgtcttgaggtggcgtgatgtcttttcttttcaagtacattaaaaagaacccttaatgcctgaaatgcgcttcaagggttctagctttcttatgttccaaagatcatgcagctaactttctacactcatccgcgcatttcaaacaggcttccgcacatttttgacagtgatcatgattatgttttttacactcattttaatttcaatacctaatcctcatggttgaagaaatttgctgtcttttattatggattgtcttcgtcgcttttgtactccaaaatatcgcctggctgacaatccaaagtcttacatatcgcttctaatgttgaaaaacgaaccgcttttgctttcccatttttcaggatggaaagattcgccatagtaattccaaccctctctgaaagctccgtcacgctcatttttcgttttgctaacatcacatcaatattaataataattgccatatcctccacctcagaccgttaaatcattttctgattttatgttaatcgcttcttgcaaaagtctttggagaacagcagcaaaaactgcgataaccaacgaagcaaaaggaatgaccattccaacaaaaatgagacctggggcatcgtctttatctgccacgagataatagatgggcaaacctaagacatgcaaactacagatagaaatggcgcagtatttgatgctcattaaaattcgaacagacaattcggagaaagcaatgttcttgtcaatataactcaacagtttaacagcttgataaagggcgaagtaaaaaggtaatgttcctccatataaaagaatgaaaatgatatattctatggaatgaatacctaagaaatctgctacggcatctgccagttcagggactagaaatatgcacaaagtgagaaccagaattccaatgagaataactgctatcttcaaaaataatgtggttgctattttcataaaaaacacctctcctatattttgaaatgttaattgttttttggcagtgaatccatgacattctttataggtttttgaaacacgtccacaatggctgcgatgatacttgttgccaagatgcccattagacctagagatattggacctgctgcatcatcaccagtgaattgagcatgcacccttaaataaactattgctaacaaaacaaagaaaatgacagtaaaagtgcatttttttattaccttcaaagattgaagagataactcagaaaaagcattattcttttcgatataggttaaaagtttaaaagtttgatacaacgccaaagaaaatgtgatacatattccatatgtacataccaaaagtggatatagcgaataatcaccaggacgctctacagcatctcttctggctgcttcaggcaacaaaaatatacatgcggcaagcactgcaattccaatca

SEQ ID NO: 59 - DNA, 21740 bp, Priestia aryabhattai
  source 1..21740: mol_type = genomic DNA
taataccagttttatttgaaaactttaagaacttaaacaagaatgaagtgaaattaacacatctacaaaatcatgtagttgaatttatgtatatgcaaaaaagagatttgaatattaaggaggttagcaaagggttaaatattgccaaacaacagttaacgaatgttatcagtgaattagaaagtgaaggatacttaatcaaaatgcctgatccgcgagataagcgtgcagttttagtctcattaacgtctaaaggaaaaagtattcaagaggaaaaatggagagagatttatagtaactttcatacaaatcttgcgaagttaaatgaagaagagcaattagatctgcacttcgctcttcataaattaaatgttttattaaaaaagttggagggataaatcatgaatcaaagagagcgaatttcactcattggtgtaggcgttataggcgggacagtaatgggagtaatttataaagatatatccaactgtttaattacaggtgttattgtcgcttcaatcattacggtaatgctcaatcaaaaagcgaaaagaacagctagatagtatgaataaacgtaagacagcaccagcaagtcaccaattcagctatggtgctgcctctcgtttataaagtttattttctaaatgaacattactaagctgtatatgatttaagagctacaagcatcagattccaaaacccatccacatcaagggttaaaccaaacttcgcattcgcattcgctttccttcctgtaactccaagcaaatcaactgaagttgttccagacgtgtattctccgcgtgtttctactaaaatattaacttctttgagcgtaaatagttctggagctatacaataagcaacggtcaatacatcgtgaacgggaggaccgtcaaagccaaacgtttccttataggtagatttaaaaaatgctaataattcacccactttttttgctacgttattatcaatgttcatcacttggttaataacattatctgttgcaacggcttgatgcgtaatatctaaccccattactacgagtgggatgccgctatcaaacacttttttagcagcttctggatctgcccaaatattaaactcagccgttggcgtccagtttccgaaggttccaccgcccataaggataatttcttcgatgttttctttgatttctggagcttttattaaagctaaggcaatgtttgttaaaggaccggtaggcataagcgtaacgggatcttctgactcttttaccattcgtataatagtatctactccatgctcttcactccagctccgagacagagccgggaactcgggaccgtctaaacctgagtcaccgtgtatactaggcgcgttttcgcgtctgcgcatcattggttcgcttgctccttttgaaacaatcacgttatgtaacgataccaaatcacacaccttcaaagcattcatcgtcgttttttcaatttctgcgtttcctgaaacagttgtaatcgctaaaatatctaatttcggtcgtgcggcagccaaaataatagcaatggcatcatcatgacctggatcacagtccataataatctttctttttttcattatgatcacctctatagaatggataaattgctgttaattttacatggattttattttttctaaaatagcttctgtaaactccgacgtagaggtatgtccgcctaaatctttcgttttcacttcagcttggagcgtttgataaagtgcgtgttctactgtagcagccacttctgtaattttgtgatccgcatgtttttcagccagccatttcagtagcatgactgctgaagaaataatcccggttgggtttgctatgttcaaacctgcgatatctggcgcagaaccatgagctgcttgtgccatagcgatatgttcatttgcattaagagaaggggctaatcctaagctccctacaagctcgccagctaaatctgaaagaatatcaccgtacatgttttctgtcacaattacatcaaaatcggctgcacgacgtacgagatgagcagccatggcatcgatatggtagtcgtccacttttacttcaggatattgctcagctacttctcgacaaacgtttagaaatagtccggtacttaatcttaaaacatttgctttatgtacgattgttacttttttacgacgctgcatagccaatgcaaaagcttcatgcgcaattctttctacggcttttcgcgtaaatacgcccgatgtcaccacaacgtcttttgtaatttgccattcgccgtgtccagaatacatatttcggtcagcataaaatccttctgtattttctcggacaatcactaaatcagcttctttcacgacgcttttaatacctggcattgttttagcagggcgaatatttgcgtaaaggtctaaactgtgacgaagctctccgctaggattacgcttttctttgtgctggagaggataagcagcagaatcgtgcgggccaagtatccatccgtgcgtatgttttaaagcatctatcgttacttctggaagaggatcgttacattgtttaattccttcccatcccatcggcagatgaatccactccatttttactcctgctttgccagaagcatttttaactaccttaactgcggcatcgacaatctccggcccgatgccatcacccgccaacacccctatacgataaacagtcattggtttgaacaccctttcattacgcgcaatgcttttataaatagattgaatatagtattaatctacttaaagaaaagacaataataaaatagtatttttttatgtttatagattaaattcttttatctttctttttgctgattttaaaaaaagaactagctaatgcttcgtgctccagattttctatcaaccagcatcttaattggcgctgttaaatttttaaaaacacccaattaacacctaaaacacgatttaattatatcataattcagaaaattaaacggttctacgttggcacgaaaattgcttgtactgtatatgaggaatgcaaaagaaaggagcaatatgtagttgcagatgagtaagctgcttttaaagaacgagaagtctgttcaaagttattatttcacaatgaaggggagaagaagaatgagtgaaccgcaaaaggaaatgagttcattaaatcaggtaaggaaaaaagagaggaaaataaacgtttttgctttattgttaggctttcttgtaattgctactattttaacgtatatcttgccagccggagaatacgcacgtgtagaagtagacggacgaacaacggtagaccctcagtcgtttaaatggattgattctacaccagttggattctttgacatggtcaaagcgatacatacaggaatggtagaaggagccgatattatcttttttgtattaattatcggtggtttctttggtgtattaagcgctacgggaacagtagatgtattaattacaacgatggccaaaaaacttgctacccgagaaaagttattaattcctgttatgatgctattttttgcggtaggcggttctttaatggggatggcggaagaaacgctagcttatcttcctcttttaattccgctggcacttgctcttggattcgatgcattaacggggactgccattgttttaattggcgcagctgtcggttttactacggccgttatgaatccatttacagtgggtgttgcacaaggagtagcagagcttcctatgttttctggaatgggctttcgccttatcttatttgtagttgtttacgccgtgtcggtttggtttgtctaccgatatgcgatgaaagtgaaaaaaagcccttctattggtacgtacggaaaatacagcataactaatgcaaataaacttttaaactctgatgcgaagttaactagaaagcataaatggattatggcagcatttcttgttaactacgtaattcttgcttttggcgttattaagtacaaatggtacattactgaaattgcttctttatttgtcattttgactgttgtgattgggattattggaaggctctctgttgaaaatacagttaagtcatttacaaacggggcggcagcattagtcggaggagcactagttatcggagtttctcgcgcagttcttgttgttttaaatgaaggtcatattgtagatcctatgcttcatcaagtatctggagccattcagcatattccgcgatatttaagcgttatcggaatttataatttccaagcgctgattcaccttattttagcatctggaacaggtcatgcgatgctgacaatgccaattatgacgccgcttgcagatttgcttgatattacaaggcaaacagcagtattatctttttcttttgcagacggcatcggaaatattattttcccaacggctggaacattaatggctggcttagcgattgcgggaatttcatggacatagtgggccaaatgggtgttgccgttagtccttattcaatatgtgattggtttaatcgcagttgtgattgcttattttattaattacgggccattttaagcattaaaattatatagaaaaatgttattcgtaagttgaacttactagtaggaggaatagaagttgttaaccttaatcaaaaacgcagaagtatatgcaccagagtatttaggaaaaaaagacgtattgcttgcagacagcaaaatcatcctgataaaagagtgtattgatcatgtaaatacgtctattcctattcatgttgtagacgctgctaatgatattatagctcctggctttattgattcacatgttcatattattggcggaggagaaggcggatataaaacacgcacgcctgaactaatgctaacggatgcaacgactgccggtgttacaactattgtaggtgtacttggaacagatggtacaacaagaagaatggaaagtcttcttgctaaagcaaggggattagaagaagaaggaattagctgcttcattcacacaggttcctatcaaataccagtaaaaacgttaactaccagcatagaagaagaccttattttaattgataaaattatcggagtaggtgaaattgccatttctgaccaccgttcttctgaacctacatttgaggaactggtaaaggcagcttctgctgcccgcaatgaagggattttatcagggaaagccggaatattagaagttcatgtaggcgacggggaacggaaattatctttattaaatcaaatcgcagatgaaacagacctgccaattcgtcagttccatcctacacatattaatcgaatagatagaaatattattaaacgtcagcggctgaccgcttatacaagtagtaggcaccttattcgttttagctagataaacagctgcgtttgtagagcctggctgtgttactactttagctgaaccatctttttctaccagaagcgctgactgttcattaacagcaattcctttggcgcttgttccagtttcttctccgtcttggatattacgcaagaaatgttaaaaagcgtcccattctatctcgttgttcaaaatgagtgtctgtttgaatgttattattatgcggggtttgaatcaaataatctgtaaaagaaataagagaactatagggattgtttagcgctgttttcgaatctaaagttgtagagcctgctgagatagagtcataaacgtgatcaccttgaatcatggtgccggcactcgttcctccaaaaggaatgccttgattaatacgattatttaaggctgtaagagccggggatccttctaagaaatctacgtaatcagcttgattgcctccagcaaaaaagatgccttctgctttgttaattttgtcaattaaagaagagtctgggcctgctcttattaaatcatcaacaacaattgtgctaacagagttaaggggcttacctatgcttttgactaggtcatagatatatgaattataggcgtcagtacccgtcgctcttataaccaagaaatctccgccgtttgccttttgaatcatccatttgaatgcttcatctacatcggtgcttccgcccatatagacttgtccgaagcttgtactagtcgctttgtctgcagtacttccgacttgataaagcgtataaagtgcagaaacagcggaagtggaggttggaagtaaaagagatgccgcgagaacagcacaagtaatgacctgctttttaatacttttcttacgttcagcttttttcataaagttctcctcctttaataagtgttcatagatgaacatgcaagttttataccaacttattgaacaccggcaaaacagtgaaagaaggatttttttaaaagatctaggtgtaatataggttatttatgggtcattattaaggttttttacacccgaaaaatggcgagaacgactctaacttggatgcctaatagtgaaaagaaaattgtaaaaggtatattacaagattacatccctcattgaaaaataacctttaaaaacttaaaattataatagaaaggaaaaacaaggctaaaaagaagagctgtccgcagtagtgacttatttatcaaacagaccatcattctatcaatatcttcatctcttaaacgttttccaccagcatttctatgcagaaaaaattatacatgagaggatctgtcaaaatgaacaaacaggaaagtagctacagatgggttgtttttggaaccgctttattagcatattatttgattgtcagtcaacgaacagcccctggacttattacagaacagttaatgaaagattttcacgtttcagcgtctgttataggattaatgactagtatacaatttttagcatatgcaggtcttcagattcctattggtttactttctgaccgatacggtcccaatcgatttttgattatagggtcgcttttaactggaataggaagtcttatctacagcacggctcctaacgaatatgtgttaattttctctcgtttactagtcggtacgggagactcaatgatttttgtcaatttagtgttaattttaagtcagtggtttaagggaaatgagtttgtaaagctattaggtttaattgggctggtaggaagtgtaggttcattatcagctaccgtgcctttgtctatgtggatttcattttcaggctggagagttccttttcttagcataggtctagttttaatggcagtgtcctacctgctttatgtcgttttggtggtaaaacctaaacgattatttcaagatgatgctaaagcaaataaatcctctgttaagactccggaaagcgtatgggcgatcctaaagagagtgatgacgactcgtcaagcctgggcaacatttctttgtcattttggtgtagtcggtacatatatcggttttattggttcttggggagttccttatggaatgaatgtgttccatttatctcgcgctgatgcaagtcagcttattatgtatggtctgtttggcgctatgattgggggacctttaatcagctggatatcaagcaggttaaattccattaaaaaaatttattcacttactcatcttattgtggtgcttagctggactggattattactttccggcgtgaaaccttcattcatgctagtcgttattttgctttttatcatcggctttggaaacggagcaagcgctttgacatttgccgtagtacgtcaatccttctcagtaaaagaagtaggagttgtatcaggttttgccaatatgggaggctttttaagcgccgtattattacctagtattttcgggaatgtcctggatttattccccgagcgttcgctgcatgttggttatcattatgcttttatgattcccattttgttttcaatgatgggattattaggtgtcttactaattaaagaaaaaggaaaaaaggagcagaaagtgttgaatgcttcttaatgtctttacataagagatgttcaccatataagttcgtaactttagtgtaagaaaatatattttatgtaactattcctaatataaatcattaaaaataacacaacacataaagcttactttaatgcacagctgcggaaataacagaaaatgatggattgaatgttaattaaatgatgctgataacagaaaatcctgttcatacacaaactatgcagatgttaaaaactgcgaaacaaacaaaagaagatgactgaatagttatcttcttttgtttgttctattttagtatgtactgcttaaataaagagctacatcgcgaattgctttatcagtttcactttctattaactctctgtcctttgtatacgaataaagagtatcgccgtgaagaaggtggtctgataagtttaataagccgacagcgcgcttgttgaatttatgagcaatggctaaagtggaagctgtctccatatccacgccgagaaaatctgcaagcgaccattcttttaccatgtcatgcgtctcgataagcatggcgcccatactaaccacatgtccttttatatatttgtagcctttttgttcacaatacctacaggcggcttccactaactctttgtcagcttctacaagcgtttgttctggtaaataccagtgtgatacgccatcttgcatttttgctgcagatacaattaaaatatctccatattgtatagtagaagataaacctccaaaatatcccgtttgaataaataagtcggttccgctgccagcaaattgatgtacaatgtttgacgccatcggactgccgtatacattcgcaaatcctatatttctgttattgaacttacctattaccgtgttccatttaggcgtatgaacatcagtggataagatctctttccataaatttatattatcttggaattcccactcaccatgaataataaatgcattaggcagctctttttctgatagctttaatacgtttagccaatcttttttttcaaaatcgccatacagcttcatctttttctccttattttctcagttagactagttagaaaagaattcttcattactagctttcattcctttaatttttagaactaacaaatatagaagaaatgacagtgctgatttaaaaatgaagttatgcgtgcttttttcactcatttctcgacaaatatttagaattaaaaaggagttcagtaataataagagaaattccttactaacgcttatttaaagtagataaagctgtgagaaaagctccgtttagttaataaatgaataagaggagggaaggtacagatgtcaaattattttcccataattaaaacaaaaaggcttctcctaagggaaattgtagcagaagacgcaggcaatattttaaaatacctatccgataaagaaataatgaaacactacggcctagagccttttacaacggttgaggatgcttcaaatgagattgcgtggtatcaatcgatcttaaacgaaaaatctggaataagatggggtattactcttaaagaacaggatgacattattggcagctgcgggtttcttaatagagttcataaccattaccgtgcagaaattggatatgagctaagcaaagattactgggggaaggggattgctaatgaggcattggacgctgtcataaaatatggttttacacattttaatttacggagaattgaagcattaatagagcctgctaatgctgcttcacaaaaattaataaaaaagcatggctttataaaagaaggcctattaagaagctatgaatttacgtgtggaaaatttgataatttgtacatgtattgtttattaaaacaagattttgacaggcttcaaccacatgaagggaatatctagacatcgttattaagcatccgtatagcataatgacagataaggggaaaatgtatggcccattttaatattgatattgttcactatcatcctcaatttgctgagcaaacggtaaaaatgtggagagatagtaaagaaaaagcgattaaacaaaaggaaatgcacagttttgaccgtcatgtctattttttaaatcatatattgtcagcacactataaaattgaattagcattaatggatgaacaaatagtaggaatgattgcttatcatgctgacgaaattagccaactgtacgttcatgtagattatcaaggagaaggaatcggacagcgtttactcgaaagagccaagacagaatcaaatggaaaattaatattacgtacatttgaacgaaataaaaatgcccagaggttttacgagaaacacggcttcagtattataaaaagaggatgtgaaaacgaagagaaactacccgatattacatatgaatggacaaacaaatgaagcatacgtaattttaataaaggagcggttagtgtgaatacgttagcacatgaaatataacaacgctgtctatatgtccgtggtccgccttttactagtttaggatagatgattaatgctagctataaaaaggaggagttcaatatgataacggacaaacattttttaaacgctgtaaacaatacaaatgttgattttactggatgggatttttctattattactcgtactggtcgtatggatagcgacatgctttcgtggtcatacggaagtgaagcttttcgtcttattcaaaactctaatgccgctttagatatgggaacaggaggaggagaatttttatctttgttacagccttttcctcacgttatgtacgctacagaaggatacaaacctaacgttccaatcgctaaaaaacgtttagaaccgcttggtgtcatagttgttgaacgaactgaagacgaaaacttaccgttcaaagatgatacatttgatttgattttgaaccagcacgaatctttttgtgcttcagaagtaaaaaggattttgtcaaaggaaggcacgtttttcacgcaacaagtgggagggtgagactgttcacgaatcaatgaatgtataggggttccaataaataaagagttttgtaattggaatttaaagaaagcaatagaagagcttaaacaaagttcttttaacatcatctcttgcaaagaagagtttcctgtacagagattttatgatattggagcactcgtcttttatttaaaagcaatcccttggcaagttcctaattttgatgtagaaacatatatcgaagggttgtataacatacatggaattatacagtctaaaggtttttttgacgtaggacaacatcgttttattattaaagcggagttaaaaagatagggtacttaaacacagaaagcggatctctgactggaggtgcgctttctgtttattaatgatggctatacataaaattcatgatgtagacagaagtcgtttcagttatgtaatggaacgcttatgattttgtgaggtatgagattttggtaatatgcagtctaatgctcttttagtaatgggcataaagaaattaagcagcaagccgcctaaaaacacggttaataatgttccaacaccaattggtccgtttaaaagcatcgcagctagtaagaatgtgaggtaaagaagtgttcttgaaagcaataagtttgttttagctagtttttgtatgagtaatgttaagcggtcaattggaatgggtgcaaaatttgtatgtaaataggctgaggttcctacacctataatgattaaaccaattccaaaacagcataatttgctgtaccacatttcaaaggaagaccaattctgtaataaaaaaagccatacatcaataccaagacccgttatgaatgctgttaacagtcccagcacttctggcttttgtttgcttaaaagggcattaccgcaaattaaaacacatgcaagtataatttcccagcttccaacgctaagacctacgtttagggatagtccaactaaaagtgcatcaaaaggtgaagctcctaggttggattggatcgtcaaagcaattcccagagttaatagtaaaattcctcctacataaacaacatatttcactgtaatcagctcctttattcgttttttttgttgcaaatgcaactatttcaaggtacattaaatgtatattatttttattgtatttgcaacaaaaatatgtacaaaggagacatttatgagtgaaattctgcgtgaaattgggatgatagcaagagcattggattcgattagtaatatagaatttaaagagtatgacctgactaaggggcagtatttgtatttagtgcgaatatgtgaaaatcccggaatcattcaagaaaagttagctgaaatgataaaagtagatcgaacaacagcggctcgggctataaaaaaacttgaaatgaatggttttattgagaagaaagacgatctccacaataaaaaaaataaaaatctttttcccactgaaaaaggaaaggacgtatatccgtttataaaaagagaaaatgattattcggataaagtggcattagaaggttttacccacgaagaagcagataccattcttaagctggttcaaagagtaagaaaaaatatagaaacagactgggagtttgtcaaaaaaggaaacaagagaaattattgatgatataaaggagaggcgtatgtcagtgatgatgcagataaaaaagtgtactcttgaaggtgtaaatcaccttcaagatattagttacaaaacatttaatgaaacatttaaagatcaaaattcacctgaaaacatgaaagcttatttggaaaaagcatttacagtcgaacagttagaaaaagaactgtcaaatacgtcctcgcaattcttttttatgtatgttaatcatgaaattgcaggttatttaaaggttaatacggacgatgctcagtctgaagagatgggggaagaagcgcttgaaattgaaagaatttatataggtaacaactttcaaaaacaagggctgggtaaacatttatttaataaagcagtagagatagcaacgacacttaataaaaagaaaatttggttaggcgtatgggaaaaaaataaaaatgcgattgctttttacaagaaacagggatttgttcaaactggatctcactcgtttcatatgggagacgaagaacaaatagacttcattatggttaaaacacttttatagtttttctaagataaataaagtacgataaggattattcactaatttagctggtagagaataatccttattacagagattttatgaattttttaaagctggtgctcgcagggtaagcagtaagctaaataatatggctgctgtgccagcacatagaagaatgaaattaatgtcacatgcttaccaaaacgttggcttctttcattttggaaattacatttttactttaattctatttgaaataacacagactaattagatatatatcgaattagaaggcttaaaaaacgaacatttttacgtccattttaaaagataacaggccacatctctttcggatttaactcgtattctccattttgcctatacataaaatgctgcataattaactctctgcgaatcgtcgcataatcttcatgatacttttttatatgttcattcagttctttttcttgatacgtttttccgtgctgtaaatcgcgtattaaataggctaatattacgttctttttctttctttgacttggaatgatctttaaagttccatcactatttataaagtttttaacaatcgataatttgtctttatcctgtaaatggttttcttgattttccatcgaatcctctccaatactcaaaatagccttcgagttatattcaagtctttcaaggtctagataaaaataaataatattcccttgtcttctttgataaataattcctacatttcttagttttgaaatgtgatgagtaatagttgaaggctgtaaccccagcttataagcaattgcttgcccgtgaagaggtcctttttttaatagtaaaataattctaatcctggtaggatcaccaacggctttatgataattcaccaacttatctaattgcatagcttactaccttctttctttaattcgatatacatctaatttgatattaatcgaattagatgtatatgtcaaaaaaatgaaaatatttaaagtgaagacttgtcacactatatataaaaaaatctgccctgtataatctttaaactataaaaaaagctcctatttcttcgtatattttaaccattattttcacctgttctttttattattaagaaaaagttaccatgttttcatcaaataataccggggaacatattcaaatgtttgttccaggaggacacggaacgatgtttgattttccagacgatacgaacttgcaccgcttgctcactgaatttgctgaagacgacaagctgattgcagcggtatgccacggcccggcagctcttgtaggcggtaagcttaaaaatggtgagccaattgtaaaagggaagcgcattacagcatttactgatgcagaagagaaagatacaacgttagataaatacatgccgtttcttcttgaaacaaaacttcgtgagctaggcgctgagtttattgcaaaagataattggacagatcatattgaagtagacggaaaccttttaacaggacaaaatccacagtctactatcagcctcgcaaaagaatttgtgcgtgctttaaacgcgtaaaagtatctataaccttaatggggatgtctcatgattcattgagacatccccattttctttggattaaaatagtgggggattttagggaaggaaaaaggcggctatgtaaatagctgccttttaattattagaagatttgtttctaaagaggtatgtagtaattcctgtcacaatgataacagctacaatacaaataactagacggacaatctgtgtcacaaagatattatctgcaatgctcatgtgtttcgttagaattaacgctccataagcagctaaaacagataaaaacatattgacgattcgttgagccatgttgtcgttactcctttcgtttcactactttacactttaacacatgtgttcactgtaaaaaatattgaattacaagtatgtcagaaaatcagcactctagtaaaacaatccactattaagggagtagctgatatcatattagttatgacgactagagctcagagaaggaaataagatttctttagtcgaatttaacatgcttatattatttttttagataggtgggaaaagcttgtttgataaattaaaaaagctatttatggataaacaggatcaggaaacagatgacaaatatattttagtccttgagagtgaaataaataagaatttaaaaagagatatagtgaagttggaagaagtaggagaggcatacagcgaaaatcttcagcacaaatatagaaataaatttgaacatgatggtaagcataacttaaaaatatgggtgtgtcgagatattgatggcgaccaactaccaaatctaagttcggagcagtgtctggaaaaagaatatcgttcccaagtggcaataaactttgatgggtttacagatgaagaagatgcatacgttcattacatccaattgtggtattactttagtgggtattttaaagggacaggcactttgtatgatttgtcaaaaaatcatttagaagctgatattgaagaaaagttaaaaggaatacttgagcaactataactttctacttagcactggaattatttgttagtgtataggaggaagggatatgaaggggcggccagagctagaaatagaaacagaaaaagtttataaaacgaaaaagaatcctaatggaacatttatagcgcgggttgttcaagtgcctaagaaagaaactatgttagattttattctagaaatcaaaaacttaaggaaaaaggaacttacttataggaatctattaataacaactgaaaactggtatgattcttttcgtcttgctagaggagacctgaaatgggtatctttgcatacagtagcggtatgggaccggttaggacataaataagttgaggtagcggccccagccggtaaggaaaattatcgtatttcagatgaccactgttcaccttaccgagaaaagtaataatgacgatatagtaaggagaaaacagatgaaaaagcattgctgcgattatatgaattatcatgcgaactttacgtgtgatattcacagtgatccgtttgattgtccagataatcttatcttatttgataaaacaaataaggaatacggtttaattatctatgatggtggttcatccatcattggaatttcattttgtccatagtgtggtgcaaagctatgaattaagaaatgaagaggtgtcttttgcttaagagatcctcttcactctgggaatggaggataaaatcatgaacgtaaattaaaatagttttattattgtattgaataagcctgagaaaatcttagcaaggagccatctgggtcttgaactataaattctttttgagtaaagccactatagttatttatcatagcgtctctaaaaagtgaaatattatggttctttaagttttgtaaaataacctctatattttctacttcaatttgaaaattaatccctcgcccatatgggtattcaagttcactagtttcccaatgaccattacattgctcaatcatcatttgtgctccgtttagtgaaataaatgcaaattggtcctctaggcgttcatatacaagttcaaacccaagtatctctaaataaaattcttttgatttataaaaatcttttacggaaagttctggtattaacttattaaatttcatgtaatcgctcctttgttaatagggctgctcattgttttaataataccgtatagatgtaacctgtacacgccttcttctttgttatgtagaagtaaagacagaatttttgttacattgacaaatggtttatacgatattcataacagtttaaagccatagtattatagatgtaaaataccgaaatgggggattaggcttgatttttcgttatctagctatgttatcaggattgggaatcgttttattaaacctttttgatcctatacatcaaggggttacgcgctggttgatggtcatctgcggtttattaatctttagtagccatttaaaattcatcttagataagaaatcaaaaacaacggataatcaaaagaagaactactaataagaatttcttttgatgttgtactgttgataattatgtaaatgaaaaacctatagaatatgtagtaaagaaataaaaaagaaaatcatatgttataataatcattaatatccaaataaaggaattttatgttgttatgaatcgtaaatttaattctctatttatagtctatcctatcattttctttgtagtacgtactgctttttcttttgtgaaaaatagcgctgcggaatctgtctatgagacgttagctatacttgccatgtattactgtgcagttagtgttttctattcgattgacttgtataggcatttcttatttatacagcttttttctttttttatttttgtcattaatacccctagttttatgtttagtaatatggtttaagaatagggaacgtctttttctgtttttgactgtattttcaatccttcaacttatgtttactgtttttatttatcttttaccagaagcaggaaccaaaccattaatttatgaaaaagtaatgacaaaagaagatgttttaaatacataagcttacataaaaaatctctcaaaaagatagtagtatcttactttttttattttgggctataatgagtcctatatagctttaacgttttataaatagaactaagaaagtgagaagaacatggaaaatagtgtttttgaaagaattgcaaaaagatatgattcagaagaacgaattgaattggctaaaattatcgtgaaggaagtaaggaaagaattatccaaaagtgagtcaaaatctttaatagactatggaagcggtacgggcttagttagcttagaattatcggatgtagttgactcgattttgttgatcgattcgtctgaacaaatgctggaggtagcgaaagctaaaatttctcacaaaggacttacgaattccaaagtactttgttcagatttcactcaagaaactcctgaacttaaggcagatataattttaatgtcattagtccttcttcatgtcccagatactaaaaaaatcttacaagaattatttaatattttaaatgataacggaaagctgattattgtcgattttgataaaaactatagtattaatcatccgaaagttcacaacggctttacacataacgaactgacaaaaacattagatgaaattgggtttaaatcaataaaaataaagaccttccatcatggtcataagatttttatgaatcaagatgcctctatgtttatgtctagcagtataaagtgatttttcaatataggcgtctataattttagagaatttatgattggatgaaaggcttaacaatttagagaataaaagtatttttaggattacgttgtttataataaaacttccgttagagctaatgtatgtactagttcaataaaccctaaaaaggatcttccgttgaaggttcttttttacttttatttaacactcagtatgttgaataaaagcttatatcatatataagaatagaatcatattggttttcattgctattttaactacaatatgttataacgttttaaaaatggtggtgtgaaaatgagtgaaaataatgaagcacctgaaagaagaagagaaaggctaaaacaggaagaaataaaaagaaatccagcgggaaatgttaatgatgcatttaacagaagtgtaaccgggaacctatctggtttagcaggcagcttaggatggaaggggttaggtgtacttattgctataataattataggttttatcgctgcgtcactatttttgaaataatatgaggtttataaattaaaagtactggaggcgctattttgaaaaattatgtagtgtttattagtagttttatagtgttaatgtttgcttttcaaattctttccgggctgtttcttacacttacatatgtacctgagccttcacagcatttaagtagctcaacggtcagtattttctctttcaattatccatttttaagttctactatagcagcgaccttttcatttattatttcaaaaaaatatgtaaaattaaaaagagcacctataaataagtaggtgctctttttgtgttgagaacagtgattactgtttttaataaatttttacctttttatggtattatatatagatacgtattcagtacttttgaaagagggagataattaatgttgcaatcactgatttttgatatggatggaactctgtttcaaacagataaaattttagaattatcacttgatgatacctttaaccatttgcgtacactcaatcaatgggatgccagtactcctattgataagtaccgtgaaatcatgggtgtaccgttacccaaagtatgggaagctttattacctgatcattcagatgaaataagaaagtatacagatgactatttcttaaaaagtttagttgataatataagaaaagggaaaggtgctttatatcctaatgtaaaagaagtttttagttatttaaaagaaaataattgttccatttacatagcaagtaacggtttaaaagagtatctagaagcgattgtagaccattacgatttgaataagtgggtatcagagacatttagtatccaacaaattcaaactctcgataaaagagatttagtccacacgatcataaagaaatacgatatcaaatacgctgcagtagtaggagaccgtctatctgatataaatgctgcaaaagataatggtttaatggcagtggggtgcaattttgattttgctcaagaagctgagcttgcgcaggctgatgtggtaatagatgatttgatggagcttaaaaacattgtatctaatataaataatagtttttcaatctaatagacccttaaatatcatcctaaggtaaaaaaattattgatcttcactatttgttgaattcctaaaaaaggagaataatttaatgttgaacacccgcatagctcacccaaaagatgccgaaaaaattgttgcgataaaaaaaggtatcgttatgacaaatgatgttcttcttcgattacctgaggataaacaagaaacagcagatgaatatcgaaaaaagatacaaaagaaacaagataatggtggattgacattaattatagaacgcaaggatgaagttattggattcctttcttttttcagatcttcttataagcgtttgcatcatactggttcgtttggtattagtgtgaagccagaatgttcgaacttgggtgctggaactaagttactgtcttatttaataaaatgggcaaaggagcaagaggggttagaaaagataaacttggatgtattctcaaacaataaaccagctatccacttatatcaaaaattagggtttaaagaagaagggaaacaagtaaaccagattaaattaaaagatggttcctacgctgatataatctttatgtcgttgtatttataaatttctcgataaaattctttgtattagctgattttgtacatgatacacaaaaggataaacctttaaaggtctatccttttaatttacgttacaatattatttttatagtaagggtaatccatttgtttttgaatctttgctgcagtttctgctccgtcaattaactcacatatgtatagacctaaatctactgaagttgaaactccgccacctgtaatgacacctgcatcttgaacaatccgttcttgttctactttgtttgtatattgttgtaataaatcaaatgcatttgggtgagtggtagcttttctgtttgtgagaaagccagccgctcctagtaaaagtgagcctgtacacacggatactttatacctcacatcttttgccgtttgtaaccaatcaataaactcggcattatattgtaaaatcctagtccccgttccgcctggcacgaaaattaaatcgtattccggtaggtgaggcaaaactttatttactttaaacgtaatacctctgtcatcatgtacctccttagttagcccgcataaatcccatgttacatcatctttaaaccccagcgtttttaatcttgtaatcccatcgtaaaacccaataaaatctaatgctgttaattgatcaaacagaataaaaccaattttcatcttgtatgacaccttccttactataatcgtctatgtaatttatttctccattaattttaaattttccttttggttacaagtctttgtttggtgtcaggttttctatttaatggtctaccttcagaaaaataatatgttattttgagagtgatttttgatgtagtaattaaaagttaggaacgctagaactctctatgctttgaaagcacagcgggttcttttttgttttgtaggggacacatttaacggctccccctacaattctccaatgtttacataattttttcttgtcattaataaatggtttacaatactgagctatgcttaggttaagatttccaaaatagttttatattaaaaataattctatgagaaaggagatttttgattatggcttcgcatatgattcgtaaatctgatagcgctcacttatgtattagagggtataagataaaattgacactcagccagtggaagcttgtaagcactccgagataatggttagcccaactataaaa

SEQ ID NO: 60 - DNA, 21625 bp, Priestia aryabhattai
  source 1..21625: mol_type = genomic DNA
taacaattgtagaagagcttataaaaaatagcaggttaaatatgatggtgaatttgcccatttaatcaaaaagttgaaggtttaagactttataaccaaatgaaaaatataagaggagaaaaatgagataattactccattttacctatttgacttttcaatattatgcaagtaatcttggaaaggtaatggaaccggttctgttgtttcgccagattgatattacttctcgatacatagaaaatgaattgcttgtgagtgacacaagaaaaggtattatacaaaagggagaaaaacagatgaatattaagaaaatcgcaaagcaaactacagctttatcttttgctacagctctgttagtaggtgctggatctcaaacatgggctgctgaaagcaatcataaagataccaacaataattatggagtttcccatattacgcgtgataacatgctgaaaattcctcagcagcaaaaaagcgaacagtttaaagttccagcttttgataaatcaacaatcaaaaatattgcctctgcaagagggtatgataaatcgggcaatttaattgatttagacgtatgggacagctggcctctgcaaaatgctgacggaacagtagccaactatcatggttaccaagttgtatttgcactagcaggtgatccgaaagatgctgatgatacatctatttatgtgttttatcaaaaaatcggtgaagattcgattgacagttggaaaaatgcaggaagagtgttcaaagacagtgacaaatttgtaccgaatgatcctcatttgaaaaagcaaacacaagaatggtcaggatctgctactttaacatcagacggaaaaatacgcttattctatactaacttttcaggtacaaactatggaaaacaaaccttaacaacagctcaagtaaatgtatcccagccaagtggagatacgttaaaaattgaaggtgttgaagatcataaatccatttttgatggtgatggtaaaaagtatcaaaatattcagcagtttattgacgaaggcgcatatggttcaggagataatcatacgttgagagatcctcactatgtagaggataaagggcataaatatcttgtgtttgaagcaaactcaggaactgaagatggttatcaaggtgaagattccctttacaatcgagcttactacggtggaaataatccatttttccaatcagaaaaagagaaattacttcagagctctaataaaaagaaagcctctttagcaaacggtgcattaggcattgttgaactaaataacgattataccttgaaaaaagtaatggatccactgattacttcaaacacggtgacagatgaaattgaacgcgcaaatgtatttaaaaaagatgggaaatggtacttattcacagattctcgcggatctaaaatgactattgatggtatcggccaagatgacgtatatatgctagggtacgtatcaaatacgctgacaggaaaatacaagccgctaaatgatacaggacttgttttacatatggacctcgatcctaatgacaaaacgtttacgtattcacattttgcagttccgcaagtgaaaggagacaatgtcgtaatcacaagttacatgacaaacagaggcttctattcagaggaacattctacttttgctcctagcttcttgttaaatattaaaggatcaaaaacagctgttgtgaaaaacagtattttaccacaagggcaattaagtacggataaataatttttaaaaacgaaagaagatggcggtagctgctgctgttttctttcgttttattatttaatcaaaaatgtgctgtaaccgcagtgctgattaaaataaaaagcggtatctacattaatagtcatttaaagaaaatgaaacattcaggcaggctataactttaagaatgaaaccggttgacatgcaggtttgactaacttaatatatttacatataatgatttgaaacgttttcatagattagtatgacatgagggtacttgtagatgaaatagcttgtagtagtggggaatgatcatttccttgaaagagaaaatcccaatcgtgaactgaaaataaagaaggtgtttctaatgaaacgaattgataaggtatacaatcagctgttgagtaattttcaagagtttacagaagtggaacttttacataaacaaggaagctcagcgattgaaattgctgaacagttagatttagagagatctaatgtaagtcttgaacttaataaacttgtccgcatgcaaaaagtaatcaaaattaaaatgttccccgttcggtacgttccgctagaggttgtcgaaaccatttgtcgtcaaaagtgggatacgaataagatggaagtagaaaaactagagcagctatctaatgggggaaaagaagaagctcttcctgctaatccttttgaattaatgattggagctacaggcagtttgaaaaaatcggtttctcaagcaaaagctgctgttctttacccgcctaatggattacatatgctgctattaggtcccacgggatcgggaaaatctctttttgcaaaacgaatctatcaatttgccttatattcagagaggctaaaaacagatgccccgttcattacctttaactgcgctgattattaccataatcctcaattacttctttctcagttatttggtcataagcaagggagtttcactggagcaactgaaagtaaagtaggtttagtagaacaagcaaatgaagggattctctttatggatgaagtacaccggcttcctcccgaaggccaagaaatgcttttttacctcattgatcaaggtacgtacaatcgcctaggggaaacagatcataagcgaacgtctaaagtattaattatttgcgctacaactgaaaatcccggttcagccttactgcaaactttcttaagaagaattccaatgactatccacattccctcattagaagagaggtctttaaaagaaaaaattcgcctcaccacgtttcttttagaacaagaggctaaacgaattaataaaaagctaagtgtccacattgatgtattaaatgctttaatccacactgaaaaattcgggaatgtagggcagttaaagtcgaatgtgcagctcgtttgcgcacacggatttttaaataaccttgatagtaaacatatggtggaacttacagtacgagatctgcctgatgatattaaacgagattggatttcgaatagtaaaaatatggagcgcagcagaaaaatttctgaatatgtaaatctcaaaacgatcatttctccagctatggagagccaagaaataaaaatggaggaagacgtatcatttaatttatatcagttaatagaagaaaaagtagatgttttaacaaaagaaggtttatctcaagaagacatcaatcaatatattcttaccgacattcatttgaatgttcggagcttttttaatcaaaaaaatggccagagttctaatttaatgaaattcgtagaagacgatgtgattcagcttacaaaagaattaaaacagttggctgaaaaagaattgaactgtaaatttgatcgcagatttattcattttttaagtatgcatatggagtcctttttaaagcgaaaaaaacaagtagacgtattaaatacaaaggagatagatgaaattcgcgaaacatatccaaaagaatatgcggtagccctgctttttaaaaatcgaattgaaaagtggtttaacattagcgtgccagaactagaagtcatttatctcaccatggttattcaatccattcgaacgttagaagaaaataagcgagtggggattgtagttgctgcacatggaaacagcacggcaacttctatggtagaagtggctacggagcttttaggaagcactcctattatagctattgatgtgcctttgacggtatctccggtcgaaattgtagacaggttaatccagggaattaagaaagtagatgaaggagaaggcgtattaatgcttgtagacatgggctcgcttgccatgttagaaagcaagttggaacaaaaaacagggactaagattaaaacaatcagcaacgtgacgacgtctatggtgttagacaccgttagaaaagtaaattatttagacttaaatttatatgccatatttgattcggtgcaaaaagactttatggaatttatagataagcagcagcacgtgtttggaaaaaagaaagcccttgtttctatttgtacaacaggaagcggtacagcaaaacaattagaaaaaatcttaacgattatttcacgcaaagtatctcaagagcctattaaaattctaaccgtttcttctattaaattagcagcaaacattcgggaaattcaaaaagaatatgaaattgtcgcaacagcaggtaccaaaaaccctaagattgatgcgcctcatgtatcactagaagtccttatggaagggcagggagagcgaatacttcaacaggcaattacaaaagaaacgatacgctatgatgaggatcagaccgaagggaatattgtagtgcgtgaactttgcgaagaaaacttgcgaaagtaccttctatttattaatccgtatctcataagtgaaattctgttagagtggttaagtcacgtgcaagatgagttagaaatggaattaagcaacaccgttatgattcggattgtgatgcatacagcctttgctttagaaagaatgataaaaaacgaacctcttacttttcccgaggatgaagaaatcactcaccaattggaaaatatttatcaaaaaacggaaaaaacattacaagccgtcgaaaaaaagctgaaacttactttaacaagagatgaaaaattatttatttccaccatttttgcggatgaaatgtaaaaatcatattgtaatcctaagaaactagtgtgatttatatgccactagtttctttttttctcccattttttaaataacagaaaaacctgtattaaaacgcattgagttttgatacaggtttatttattttaagaaacctgtatcaataacaaagaaaaaagtattgaaaaataaatgaaagcgcttaatactctttgttggcacgatacttgcaacaaataagtgtagaacgcaaaagagaggagcaagtgtacatgatttcagtcattattagtggacatggtgatttcgcaccagcattagaaggatcttccaaaatgatatttggtgaagagaatcacgtagtagccgtaccttttctaaaaggagagggtatccaaacccttgaagaaaaatataagcaggcactagaggaaatgcctttagaaaatgaagtgctttttctagtcgatattttcggaggtacaccctacaatgcagctactccatatatccttaaaaatgaaacagcggatatggtatcgggagttaacttgcctatgttactagaagttttagccatgagggaacacgttacattaaaagagatgctaggaagattaaagcaggtgaatgaagaaagttttcaagtgtgcagtgaacatttggagaaaatccagcaagcaaaccaaatcggagaggatggattattatgaaaatcgttttagcaagaattgatgaccgctttattcacgggcaggtattaacaagatggatcaaaacaaatgcagcggatcgaattatcattgtttcagatgaggtggcagccgatgaaatgagaaaaacgcttattctttctgtagctccttcgaatgtaaaagcaagcgctgtctcgatttctaaaatgacaaaagcctttcatagtccgcgttatcaggatacaacagccatgctgctgtttgaaagtccctcagatattgttgcacttgttcaagctggcgtacctattgagacagtaaacgtaggcggcatgcgttttgctaatgaccgaaaacaaatcactaaatctgtaagcgttaccgaaaaagatatcgatgcttttgagaaactgcaggaactaggcgtaaagcttgagctgcgccaattaccttcagattctagtgaaaattttattcaactactgagaaacgaaacaaaaatcaaataaggagatgagtttatgtcttccatacaaattattttattattagtcattgcagcgataactggcatcgcaagcgtgttggacgaagggcaatcccatcgtcctctcattgcctgcacgttagtaggcttggtgcttggagatttaaaaaccggcattattttaggtggaacattggaattaatggctcttggatggatgaatgttggattggcgatggcacctgatacggctattgcttctgttatttcaactattttagttatcacagctggtcaggggattggtgaaggaattgcggtagccatagctttagcagccgcagggcaagtactcaccatttttgttcgtaccatcacagtatttttaattcatcgagctgataagtacgcggaacaaggaaactttaaaggaattgaaattatgcatattactgctatgggttttcaggctctccgcgttatgattccaactttaattgttacattaatcagcgtaagcgccgtgcaaactttcctcggaaatattccggaagttattacaaaaggtctgcaaattggaggaggtattatcgtggtcgtagggtatgccatggttatcaatatgatgaacattcctcatttaaagccttttttctatatcgggttcttattagcggcatttacagggtttaacctggtaggatttggggcgttaggtctttgtttagcccttctttatcagcaagtaatgcagcagcgaaatcaaatacagccggcaggcgttcccgcagctacagggagcgaacaagtatatgatgatgatttagatgcctaaacggcgaacttaagggagggatagagatggaaaatgaaaaaagattaacgaaaaaagacatctttagcatgtttattcgctcgaattttttactcggttcatttaactttgagcgcgttcaggcaatgggctactgttatgttatgattccagcaatcaaacgcttatatggaccaggagctcagcgaaatgcagcattaaagcgtcatttagaatggttcaatacacacccatggatttctgcacctatattcggcgtcacggcagcaatggaagaagaaatggcaaacaaaaaagattttgatgaaaaagctatcagcggaatgaaaattggattaatgggcccgcttgctggcgtaggagaccctattttctggggaacgctgcgaccagttctcgcagccctaggcgcctcgcttgcgttaggcgggaatattgccgggccactgctgtttttcatcttaattaatgcaattcgattaagtacaaaatattatggattaaaatatggctacttaaaaggaacagaaattttaaaagatttagtaggcaatcgaattcaaaaactgacggaaggtgcatccattttaggactcttcgtaatgggagcgttggtttcgaaatggaccactattaatataccagtggttgtttctaggatcaaagatgattctggtaaagttgtggtaaaaaccgtgcaagacgtacttgatagtattctaccggggctgcttcctttagcactaactttattagtagcatggatgcttcgaaaaggtacaaatccgctgcttattattttcggtattttcttaattggtataggaggttattggataggctttttaggatgataaataagaggagtcatctattcttctaacatctgctggtgaaaatgttttacataaccagtatgcaaataaaggaggaaaggaagatgaaaagaaccgttaaaaagttattgatgattggagtcgcttgttctataagcttgttttctgcatgccctgtattagctgataatacagggtattatcaagaaaaataccggaatcaatttcatttttctccagaagcgaactggatgaacgatccaaatggaatggtttattataacggagagtatcaccttttttatcagtattatccttacggtaccacttgggggcctatgcactgggggcatgcggttagtacagacttggtgaaatggaaacacctgccgattgctctttctccagacgagaacggagagatcttttcaggcagtgccgttatcgattggaataataccgcagggtttggaaaagaagcaatggtagctatctttacacactcgggcaataaaggacaagtgcaaagtctagcatacagcaaggacagcggaagaacgtggaccaaatatgaaggaaatcctgttatgccgaatcccccagttcctgactggcgcgatccaaaagtgttttggcatgaccaaaccaagcagtgggtgatgtctttagctgctaaagataaaattatgttttatacatcacctgacttgaaaaattggaaatacgcaagtgagtttggacctgatggaggcatccaagcaaacggtcaaagtagtgcctactcatatactttatccgaacaaaaaggtcaatcctttactctaaagggagaaattacgcttgtagaaaagaatggacgcgcaggcgcaggcggtcttgtttttcgttctaataaagacgcaacaaacgcatataccgttaatttagatgctgaaaagaacctcttaacacttaacaaagtagagaaaggaaacataacgaccgttgtttcaaagtcgatgaggcttgatacatcacaagcatatcatgtaaaagtagaagcaaacagtcactactttaaggtactgctaaatggaaaacaggttctagaaggcagtgatgcatcttttgaaaatggtcagtttggattaacagcatggaattccacagctgtctttcgtcatgttaaatttacgaatcaatctaattttataaccaatctatctaactggaaacctgttacgggaacgtggaatgatactgctgatggaaaaatcggtaaatctgacagtgatggatatatcatgagtgaagaacagggagatcagttcatttttaagtcaaatatgacatttttagatgaaaaccctggttcaggtgcactactctttcgagcagacgcggaagccaaaaacggatatatagctagcgtggatgcttctaaggatacaatcaaactagtaaagcttcaaaatggcattttaactgtccttgccgaaacaaacgaaaagattgatacgagcaaatcacatcaagtaaaagtaactgcatcgggaaataaacttgatttgtatatagacgataaattcacccttactgcaaaagatgaaactttttcaaaaggattgtttggattacatgttcatcaatcttcagtccggtttcaagatgttaacatgaccaagtttattgatacagatgaaaaggaaattaaaaataaaagttttgaaacaggcgatctcaccggctggaaaacgataaaaggaaatgcattcacaaacgatcatgtaacggatgcaaccgcaaattggagcggtctctttgaacaaaaaggaaagtatcatttatgggggttttccgataagcaagatggcgataatgccactggagaattacattcatcttattttaaattgagcggctcaggtgaaatcaatttattaatgggaggcggaaacgaccccgcaaaccgctatatctccttagtcagggcatctgacgataaagaattgattcgtcaagcgaatacaaagtttgcagatgaaaagtatcagcgctacgtatgggatgcttctaagtatataggagaagtactgtacattaaagccgttgatcaagctgtaggcggatgggggcatattaatctagatgatgttaatgtatttaatacagaaaaaatgccggagaaagtagacagtgtagcaaaagaaccggaggaagttaaacaaagggaaagaggagagctttcagattggaatactgtgtcaggagaatgggtgaaatcaactcatggaagcaacggagggatttgggagtgtcctactttactcgaactgccggttgatggagacagcacaaagaaaaaatgggtgctgcaggtcagcatcaatgatggagcggcagctggaggttcaggtatgcagtactttgttggtgattttgacggaaaaacatttaaaaatgaaaaccggccagaggaagtgctttggacagattatggtgccgacttttatgctgctgtagattggagcggagttgaaggagataacggagaaaagtattggctaggctggatgagcaactggcaatatgccaacaataccccaactgctacttggagaagctctatgtcaatcccaagaaaaatagaactcaccaacacagcaaaagggcttcgtttaaaacaaatacctgtttcaattgattcaattcgcaataagcaagaaaaaaaggtgttgaagaatctgatggttgttgaaaataaaaatcttctttcaggcatacaggaaaacaaatatgaaattattgcagaattcgatgtttcaaatacagatgcacaagaatttggttttcaaattcaaaaagaaggcagtgaaaatacaaaagtcagctataacgtaaacaaacagcgattatttgttgaccgaacaaactctggaagttttgattttggtgaaaatgtgaaagacatacactctgtttccatgcttccaaaagacggaaaggttaagcttcatatgtttgtagaccagtcatctgtagaagtatttggtaatgacggcacggaagtaataacagatcagctctttccaaagctttcaagcaataaaataaggctttataccaaaggaggagctgtaaaattgaattctctaaagatgtatccattaaaatctatttggaataaaagtcctgttgatacaaacttatcagggtggaaaagcattagcggactatgggccgatacgattaatggaaaacaaggacgaagcaaagaagatgcctttgctttatcatcagaaaaagcaaagaattttatatatgaggcaaagataaaggtgttagacgatcctgtttcaaattcttcaggagcaggagcgctagtattccgttcggatgaacaggcaaataacgcttatgctgcgaatgtagatgtgcttaataatcaagtaaaactcattgcgtttagagacggaataggcaaggatctcattatttacgatgatgggggaaagttggatttaaagacaaatacggattatcgcttgaaagtaacggctgaaggagaacacattcaagtttatctcgatgataagcttgtgattgatgcagtggaccacaccttttcagaaggctatgcggggttgaatgtgtggaattctactagtttgtttaatgaagtgaagtttgaaacagtggattaagggattgtgaaagcttctgcttatttgagggagtttttatataccataaaaaagcatgctgcggtgaagtagcatgcttttttgaatttcataggttaatgaagagggttttgacatatgataaatatcttactagtctaattaatcgtacattttagttcttaaaaggtcttttgaaaaatcctcataaaaatatgataaaatcggataggatatatatttcgaggaaggaaagtgttttttatgattattggtaacgaacaagatttagaaagtttacgcaaaattggacgcatcgttgcacttgcacgcgaagagatgaaaaaccaagcaaaagcaggcatgacaacaaaagagcttgatatgatcggtaaaaaaatattggatgaacacggtgctacttctgcacctgaaaaagaatataatttcccaggtgtaacgtgcattagtgtaaacgaagaagtggctcacggtattccgggagatcgagtattaaaagatggcgatttagtaaatgtggatgtatctgccgtacttgacggctattattcagatacgggtatttcatttgttattgggcaagatgaagaaaaagaaaagctttgccaagctgcagttgatgcattttgggcagccatgaaaaaagtaaaagctggttcaaaacaaaatcaaattggtcgtgccgtatctaactttgcacacaaaaacggatacgctgttattgaaaacttaacgggtcacggtgttggccgcagcttgcatgacgctcctaaccatattttaaactattatgatccaatggataaagcccttttgaaaaaaggccttgttattgctgtagagccgtttatctctatgaaagctgatcatatcattgaacgcggagacgacggctggacgtttgttacgccggataatagtcttgtagcacaatgtgaacatacgattgttgtaacaaacggtgaaccgattattttaactgaactataatcaagtttcccacgtcttcttatttctatagattccattaattaataaaaagctacttcacttagcaatgtttttttcattgcattatagtgagttagcttttttgttactatgtaatgaatgattattatagtgatctgctttgttcatacaacgtttgaaagatagtgtaattgaatatgctcaagggaatgctaaacataaatcaaaatgaaaaggggtataaaatgtggaatatataggaagagaagcgattgtaagtgaactgacgcatcatatggatgacattttaaacaaatataaccttcaaggcgtctctgtatatgaagaagaaggagaaggaaatcactattatcttggctacacagtaaaaaagaatgatcaggtgtttatgcttaacagaccttatctaaaagataaagacgggaaactagcagtagaaaagcaagaatggaccgttcaaggtagcgaaggagaaacaaatggatatacttcgcttgaaaatgcatttcaaaaaattgatgaaatcatacattaaataaatttgatgaatttcactgaggatgcttttctttgaacgcttgagtacgagcagtagaagcgttaataggtgacgggtgtctttcatctatactatctaaattttctttgctttgaagtctagaaaattatataataaaaaattgttttttaaggttttactatataaatacggggtacacatatagtacggcagctatcatgcaaatggttgttgtgaaaggttaaatacttagcgtatgaagggactgattagttttgaaaggcttaacagcgacttcagcaaatgtattaccgcaaattgaaagtagatattcgtatctcacgcaaggcactttggttatgaaccgatatacgtaacgaaagggcctgactaggcaaacaaaggaaagactgaatcaacgagaagaagcctgcatctaaaaatgtaggcttcttcttttttacagatgaaactaagatgatgaatgagtacataacgggtataaattaagaagattcacattcaatcaattttctgtgcacgtttttcttgaaaaaaggtcataagttgaagatactgtatataactatgtaaaagaatttttgaatacaaaatagtaaatctgcttgaggtgaaaatgatgagaaaagcaaataaaagtgaatttctgtggaatacgttagacggctggctttttatccctaggaatattcctttactatttctttttgtatttctcttaggggtttcttacctaggttgggttaagctgtttcataaattcgtttagatacaccaatgagctgaaacaaaaaactgtttcagcttgttggcgtgctgatttatttatttatttattttatgtatagctgtaccgtaatttacctaaattattcattccatcctttgcatacatcaacccactttaagcatttcgaaaattcttctagttcgggtattgttaattcgattgcactatttccacttccacaggcagggaaaacggtgacaaaacgtttcagagattcatctagatacacgttaacaccttcattaacggcaaacgggcatactccgcctacggcatgaccaatcagcgtttctacttcacttgctccaagcatttttgctttggttccgaactcttctttatattttcggttatcaattttcgcatctcctgctgccacaatcaatagaacagttccttccgcgttaaaagaaagactctttgcgatccgtttcggctcgcattttaaagcttgcgctgccagttctacagtagcactggactcatccatttcgataattcgattctccataccatattgtttaaaatatgcttttactttttcaatcgccattttttatatccattcctttcgttaactcttgcaaatatgtatgattgccttacagagaatatacagttgttctttaaagtgaaaaaatcttattattttaatatacagaaattatacacaactttgaagctaaaagcacatattcgttttaattaaaaaagttacgtaggtaaagtatttttaactgattaaagcaggattacgggaccctttgacgaatgtaactatgtcggctgcgaaaacataggcattagaacgaaagataaatgatgaaattgaaaaggcgcaaacgttctagtgaaatgaggagaagtaatgccaaatttacacactgtcgtcagtttttttagcagtacatgtatggcaacgatgagtatgatttatttgttttcccttgtgccgcgcgcatggtcttttaaatttcgatttggagccatggttataggaatcccagtcggcattataatgggacaggttgctatgctgatcggctggcaccatcattaaaactttgaactttttaacaaaaaggagacgtgtaaaatgaagattgttacattaaacaacggcttaaaaatgcctcagcttggatttggcgtatggcaagtagaagataaccaagcagcatctgcagtgtcaaaagcaattgaggttgggtatacctctattgacacagccatgatttataaaaatgaagaaggagtaggtcaagcgattaaagaatcttctgttcctcgagaacagctgtttattacaacaaaagtttggaacagcgaccaaggctatgaaaatgcattacgtgcatttgatgaaagcttagaacgattaggacttgattatgtcgatttatatttaattcactggcctacgcctcaatatgatgagtatgtggagacgtataaagcattagaaaagctttatcacgatggaaaagtaaaagcaattggcgtctgcaattttgaaattgagcatttagagcgcttgttaaacgaatgtgatgtaacacctgttttaaaccaaattgagtgccatccatatcttgctcaaaatgaattaaaagagttttgcgccaaacataatatttttgtggaagcatggagccctcttgatcaaggaggagaagtgttacaagacgaagtcattcaaaaaattgctgaagtacatagcaaaactccggctcaagttgtattgcgctggcacttacagaacaacacaattgtcatccctaaatcagttacaccgtctagaatagaagaaaactttaacgtgtttgattttgaactcactgccgatgatatggcagagattaatgggttaaacagcaatcgccgcaaaggtccgcacccaagtgacatgaacgtccgataacgtttaaagaaataagaatgtgcagctgtgaatcatcgctgctataagaaataatgaatttatttcagattatttaaaactttcttaaataataattgacaaatgattaattcagcgtaatacttagtgtaggtaccctagttgctttaagttgtacagcttaaagtgtatagtgatttagtcaattagcgattgtttgtatgtataaggtgaaatgccgattattaataaaagcccatagtgtaagtaggttagtttatagggggctatatcaaaaggagcttgtttcctctttgatatagtccctttttgtgttcaaaaagaaaaggtagtctacagtttaacaagggagcgggtatgatgtttattcaaatcgacggaaattcactgacgttcgaccaaatttacaaagttatttaccaaggatactccgtaaaaattagcgatcacgcagttgaacatatacaaaaaagcagaacgttagttgaagagagtattacgaacaacaacgtaatttacggagtaaatactggattcggaaagtttagcgatacggttatttcaaaaacggacttagctgatctgcagattaacttgattcgcagtcatgcctgcggactaggagaaccattctctttagaggtaagcagagtgatgctgctgttacgagcgaatgctttggctaaagggtattcaggcatacgactggaaaccttgcagctgcttatcgattgtttaaaccaaaatgtagtgccggttatcccaagtcaaggttcacttggagctagcggtgacttagctccattatcacatctagcgctgctgttagttggagaaggagaagctgtatatagtggtcagcgaatgcaaggagaagaagctttaaagctagcggggcttgaacctatccaattacaagcgaaagaagggctagctttaatcaacggcactcaggcaatgacagctgtaggagtagtttcgtaccttgaagctcaaaagctagcagatcttgctgacgggattgcagcactgacgttagaaggtctgcaaggcattttagatgcattcatgcccgagtctcatgcggtaagaccttatccggaacaacagcaggtagctgcccgaattctctcgtatttagaaggcagtcaattaactacttctcaaggtcaaataagagtgcaagatgcttattcactgcgctgcattcctcaagttcatggtgctatttatcaagttttaaattatgtaaaagaaaagctgttaattgaaattaattcagcaaccgataacccgctcatctttgccgacagcggaaaagtaatttctggagggaactttcacggtcagcccattgcgtttgctatggattttctaggaattgcaatggcggagcttgggaatatttctgaacggcgcattgaacgaatagtaaaccctcagcttagcgggctgccggcatttttaagtgcagatcctggtttagagtccgggctcatgattactcaatacgctgctgcttcattagtttccgaaaataaagtattagcgcatccatcaagtgtcgattctatcccatcttcagcgaatcaagaagatcatgtcagcatgggaacgactgctgcacgtcatgcttatcagattatccaaaatacacgaagagttctatcgattgaagcaatttgtgcggctcaagcagccgatattcaaggagtggataaacttgcttcggaaacaagaaaaatttattcaaaaattagaaaaaccgtaccaaccattactaaagatcgaattttctcacgtgatattgaagcgttagcagctgatttcaaaacctttgtgcaagatactaattatgaactagcgctgtaataaaaatgttagtttaacagtttttcatttttatagaggaggaaaaacaaaatggagacaaaacaaaatggaatgaaagcacctcgtggaacggaactaacgacaaaaggctgggtacaagaagctgctcttcgcatgcttctaaacaatttagattccgaagtagcggagcatccggaaaagttagtcgtatacggaggaattggaaaagcagcccgtaactgggaggcgttcgatcgtattgtcgcagcgttaaaagagttagaagaagatgaaacgcttctcatacagtccggtaagcctgttgcggtttttaaaacccacagtgatgcaccgcgtgttttattagcgaattcaaatcttgttcctgcttttgcaaattgggagacgtttcatgagctcgataaaaaagggttaatgatgtacggacaaatgactgcaggaagctggatttatatcggaagccaaggcattgttcaaggaacgtatgaaacatttgctgagtgtgccaaccagcattttaacggaactttgaaaggaacgattacggtaacagctggattaggaggaatgggaggtgcacagccactggccgttacgatggcaggcggcgtcgtaattggaattgatgttgatcgcacgcgtattgaaaaacgtatcgaaacaaaatattgcgatacggtagtcgaaagcgtagctgatgcgatcacgttagctgaagatgcaaaaagattgggcaaagcgctttccattggattagttggaaatgcagccgagattcttcctgaaatgatagaacgaggatttatcccagatattgtgacggatcaaacatcggcacatgatccgcttaacggatatttgccgattggagtcagcttagcagaaggagaaagattgcggaatacaaatccaaatgaatatataaaacaatcaaaagcaagtatggctattcacgttcaagccatgttagagatgcaaagaaacggcgcggttgcttttgactatggcaataatattcgccaagtggcgttcgatgaaggtgtcacgaatgcatttgatttcccgggatttgtcccagcgtacatccgtccgcagttctgtgaaggaaaaggaccatttcgatgggttgctttgtcagggaacccagaagatatttataaaacagatgaagtcattttacgtgagttttcggataatacgcacctttgcaactggattaaaatggcgagagaaaaaattgagtttcaaggattgccggcgcgtatttgctggctaggctacggagaaagagcgcgctttggaaaaattattaatgatatggtagcaaacggagaactgtcagcgcctatcgttattggcagagatcatctagatgccggttctgtggcgtcgccaaaccgtgaaactgaagcaatgaaagatggcagtgatgcagtagcagactggcctattttaaatgcattagtaaatacggcagcaggagcaagctgggtatctattcaccacggaggaggagtaggtatggggtattctcttcacgctggaatggttgtagtagcagacgggacggaagaagcctctaaacgtctagaacgtgttttaacaacagacccaggcatgggtgttgttcgtcatgtagacgccggctatgataaggccattcaaactgcaaaagaaaaaggaatacaaattcccgcgttaaatgaataaaaaaaggaggggtacgtatgactattacgtatatcaaatgtgctgcacaagtcattacggttaaaggaggaagtcagcctagacgagtggaggaaatgtcagatctaggaatcattgaaaatggcagcgtactcgtgaaaaatggaagaattgtatttgttgggcctgacgtcaaagcgcaagaataccttgagcatatccatgaacctattaatataattgatgccgaaggaaaaatcgtaacgcctgggttgattgatccccacactcaccttgtatttggcggtagtcgtgaaaaagaattagaaatgcgcttaaacggagcaaagtatattgatattttaaaagcgggaggaggaattttacaaacaaccgttagtacacgacaagcaacggaagaggagctaatcaagcaatctacaaaacgtttaaataaatttctgcagtacggagttacaactgtcgaagccaaaagcgggtacggtttaaatcttaaagatgaaatcaaacaattaaaagtagcgaagaaactgaatgaacagcatccagtagatattgtttcaacctttatgggagctcatgcggtgccagttgagtacaaaggaaatgaagatgagtttgttcgtttcgttatcgaagaaatgatcccaattgttgcaaaagaagagctagcggagttttgtgatgtattttgtgaagaaggtgtgtttacagttgaacagtcagatcgtattttacaagctggaaaagcatacggactaaaacctaaaatccacgctgatgaaattgtgtcttttggcggggcagaattagcggctaaagtgggagccgtgtcagcggaccatttgttaaaagcatcggatcaaggaattaagcaaatggctgaaagcggagttatagccgtcctattgccgggtactgcattctttttaatggaagagccggcgcgtgctagaaaaatgatcgaagcaggagtgccggttgctttgtctacagatcgaaacccagggtcttctcctacggaatcgctgccgtttattatgaatttagcttgtttaacgatgaagatgacgccagcagaagttttaacggcctgtacgatcaacgcggctcatgccatttgcaaaggagatcaaatcggaagtattgaagtaggtaaaaaagccgatttagtgctatttgacgctcccaattaccaaacgctgcagtataactatgcggtaaaccttgtagacacggtattaaaagatggaaaagtagtggttgaaggcggtgttttacatgaactatccgtacccacagcttgatcgaccgcctttttgctggcagcgtcaaagtacttctgaccctaaagtaagtgactggattcagacagttgaagatgggagcaacgtcgactttacatcgatagatattacggtcttgggcgtgcctctttcaagatcttccattagcgcttctggagccagtgagacgccaatggccatgaggaagctctggaaatcctttaacccgtatcatattgagtatgatacggatttgacttccttgtcagtgttggatttaggagacgtcaaacagcacgtaacggatatagggaagtctcatcagtatataaaagaagcgatgatgtctatgcggaaatgtcatccacgtgcgctgcctattatgcttggaggagatcattctattacagctatgttagtaaaagggtggaaagagtcacatcccgaacagaaaataggaattttacagtttgatacgcactttgacttacgcagcttagaagacaacggtccttctaacggaacccctatacgaaatttaatcgaaagtaatactattgatgcagctcatgtatggaatatcgggcttcacgggttttataattcaaaatcgttaaaggaatatgcagatagcaaaggcattcattatgtaacgttactgcaagcaagaaaagcaggaataaatcataccgtgaaagaagcattaaaacagctgagcaaagaggtagacatgatctatttaacagttgatatggacgtgttagatatcgcttatgcaccgggagttccagcaggaacgacaggcggaatgaggacagatgagttgtttgaagcagtatacaccgccgggagtcatccgcttgttcaagcaatggatattgtatgtctagatccgctgcgtgatgtaggagaaattaccgtgaaagcaggcgtacacgtgtttttgaattttttaacgggcgttgcaaacagaaagtaaggaagtgtgcttccttactttttttatggctatttttataagattaataaacgattgttgagagcgggataaaataactttagaagtgtgtatggattttagtaaatatatttttactaaaa

SEQ ID NO: 61 - DNA, 21362 bp, Priestia aryabhattai
  source 1..21362: mol_type = genomic DNA
cggaaagaaaattgcaaaatatagaaaggccaaaaagttaagcagcaaggagttagctaaccttgctgaaattactccttctatgttaagtcagattgaacgaggatttgcaaatccttctattcaaacgcttaaaatactagctaaaaaacttgatataccaacatttatgttttttttggaggaaacgaatacctctaacttagtagtgagaaaagatcagagaaagaaaatgattgttgataacttatcttatgaattgctatctccagattttaaaggcaaccttgcaaccgttattatgaccgtttctcccaatacgacttcttctgaaaagcttttagctcatgaaggggaggaaattgctttaattttggaggggaagattaaattatatttaaacgaagaagaatatgtcttagataaaggagacagtgtaaaaataccaacgaacttaaggcacaaatgggagaacacttttgaccagaatgcggttgtattattttcagttacccctcctattttttaataattagtacgtgtaggaagaaaaaaactaaatacacgctaatatttaaagatatggaaatttattagtgcttgcactttaaatagtggcatctttaattacagagaatctgaagaagagagagtctctttcttatgcttctagataataggcatgttattttgtatctcataataaataatgaagacaaagtgaggtaccttcttttatgaaagatacattgaaaattcattataaaagaggaacagaggaactaaaaagagataatattcttgcccatagattaactcaagaatttaataatacagatgttgaagaatttgaaagaaaagaagagattattaggacactttttggaagtgtcggagatcaccctagcctcgaacataatttccattgtgatttaggttataacattcatgttggtgacaatttctatgcgggatataattgtacaatcttagacatgactgaagtgattattggagacaattgcatgattggtccaaatgttggtatttatacagctggtcattctatagaacctaaagatagaaataaaagtggctatgcaatacctatcaagattggtaatgatgtatggattggtggaagttgcaccattttaccaggtgttacaattggtgataattcaattattgctgctggttcagttgtaataaaagatgttccaagtaatgttattatggcaggaaatccagcaaaaaagttaaaagatatttaacctttcttaagatacatgatatcaaaaaataaccaattaattttaattggttattttttgattccgagaatcaaacttaggttaagtaaacaaaagcctcttctgtataaagaagaggctttaaagtagttataaatatatataaaaccttagctttaccttatatgcaaaaggtcacttactgcgtcctttagttttccataggttcttattttactgaagtctatacccaactgaacggctgttaaagcgatctctggacggatacctgtgatcgttgtatcgattcctagcaattctaacatgtttaccacttgaaacaattcattggtcatcattgtatcaatggaaggtacacctgatagatcaataattaggcaagacaattcaaggtcttttgcttgcaccataattttttctgcaaagtcattgctcttatagtcatcaatctgaccaattataggaaggacaccaactgtatctgaaatactgataactggtgtactaagttctgaaattagcattttttgagcatatacttgcgcctctgatacttgcccataatacatggtaaagagttcaatcatccgatcaaaggcttcgtttaaagttctgttccataaaataatatcttgttgtgtaatactagactgatggagccctacaaatgcttcaaccttgttaagaaaaatagaacgaaacgttttaaaatgacgaatactctggtaaagagggttccctaagcgagctcgtttggttgcaatctcttgggcccaaccactaagatttttaaaagatccatcctttaggaccttcactattgtacgggtaaaatagtgattttgttctcgaaggtattcagttacctctgaagaagcatcagctgtataaacagaattctcttctatctctcgagaatctaaccactcttgagccatttcattcacatgttgtaataaaaaatcatgtaattcttgagtcattttatccatagtgttttcccctttggtgatagataaatttatctttcccttttattgaacacaaaaaacctaactactattccttgtaatattgattacacacgcatattagatttaaaaaagaagttaccccttggtaacttctttttacttggaatatccaagaaaattattaactatgattataaccaaactactttaatttttcatttccatttttttattggacatttcattttccagagatgttttcagttgttctttgctcattattagcgcggccacaaatgcaagcaccgtaggaatgagtgcccacataaaggtatgggcaatagaagaagaaagaactcctacaattttatctaacacaggtgctgggatatgagcacgagcctcaggcgcaagaattacacgaggatcgttaaatgtcggattgttgaccatttgatcttgtcctgcaaaaatctccttaagtttagaagaaaattcgtctcgttgaatgattccaaaaatggtaataccaagtgtcatgcctaatgagcgaataaaagaaacagttgagttaacggaccctctttgtgccggctcaaaatgatgaattgctgcgttactgagaacagagaatgttgctccaatccctagtcctgtaagaatcatatagattgtaactaagaaacgacttgtatcaggactcaacgttgttaggaagaatacacctgctcctagaataattgtaacgacaatcatgatgctacgatagcttaatttattcattagaaaaccgccggttgtggctgaaacgacagatcctaacatcattggaagcaatacaagacctgaattagtagctgtccctccaagcacaccttggatgtagataggtatatacacggaagccgtgacaaatgccatcccactgaaaaggcctaaaaggttacttgtggtgaataaacgaatcttaaacatgggaaaagagataataggatctttagcttttctttcaattaagataaaggcaacaaacaatactgcaaaagcaatgaataaacctaagatctccccggaattccaatcatatttattaccaccaagttctaaggcaaacattaagctgacaactgaccctactaaggtcacggcgccccaccaatcaattttttgttttgcatgtacaggtgattccttatagaaaaatacgatgaatgctaatgctagaagccccaaaggaatattcacataaaatatccagtgccagttgatgtaatctgtgatataagcacctaacaatggcccgaaaatactcgataaaccaaaaactgcaccaaataacccacctagtttaccgcgtttctcaacaggaacagtatcaaacataatagtaaaagcaattgggataagtgctccgcccccaatcccttgaattgctcggtagatactaagctgtataatactttctgccgtaccacaaagaattgatccaatcaaaaagacaattagtccaaaaacaaagaacattttacgtccaaacatatcggacagcttgccgaatatcggcatacctgccatttcagcgaccatataagctgatgtaacccatacaaacttatcaagcccgccaagctctccgactatagttcccatagcagtagcgacaatcgtgttgtccatagacgccattaaaattgctagcaaaagacctgctagcactatctttaaattaccttgttttgcattcatatttaatcatttttctccttttgtaacacaataaattctgaataactaaagaagaaccagccaagactagtccaccgtttcttctttagaagtaagatataacgatatctcgcgtaaccattcccaatcccattttaattttttatcttgaatatcgtcgatggtagattgggtccagtctaactcagctagtgacatagttctctgatattccacctcaagtaagaacaatcgtggaatacccctacttgtcgctatttccatctgtttttctacgtaagctaatgttttctctaaagcaagcactcttttttgaagttgctctttcacatcttcaggtgttaaaagagcgagaaaagaaatagcagctggaaattctaagaattcctgcttaggtgtagaaagtatttctcttatccactcgtgtgcagcttctctcccttcttttgttacttcataaacaattaaatctggtctcccatcgttctgttttttctcttgaatgacaatcgctctatcgcgatgcaaacgatcaatggtctgatagatgctatttcgataacgaacgttaataacttcatcctttcctctctctttaataagctgttgcatgcgataaggatgcataggctcttcaatgaggagacaaagtatagctaaagcaagaggtgattttttaattttattttccatagttataatgttactattaataatattactaaagcaagaggaagataaatctaccaaatacgcagatagatttatcaagtttctataataaattcttaactgattgcctcgatgttttcttatttccaaaagaatgtagtatatattcaatagatccttcttaagccttgtcttctttttaataacaagaaaaatctcttttgttacgcagtaaactatattcaatacaagaatacttttatgagtttattttgtttttgtcttttgataaaataagagctaagaagaagaagaggagaatacaacacatgagtgagttagaaaaggtattaagagctgttgaagccggctttacacaagttaatagtcgattggacaaaattgaaaatagaataagtacagtagaggaagcaacaggaacaatactggaaactgtgacaagaattgaactaaatcaacctgaagatattgagggtgtgctgaaacatgtacaatccaataatcgttatttagaaaaaaagttcgttgaaatggataaacggttagttgaacttgaggatagactacaaaattaaaaaccaagcagagtaaaataagtctctgcttggttttttatgtaacattaaataggttttaggcatcgtgcagacacacgtacagtttcactcctttatttgctctagctttttaaatatattttcctcagcatttattcaagttggctcttgcattaatatatttatacttttttcttctcttgattctacgttaactaacatgttcgccttcgttccacctcttgtcttatgctttctatgtactttttattataaaaaagaatgtataaaaaatggtgagaaaacaaagggtaaaagaaatattgggatagtaaggaaagaactgttcaattaagtcttataagttgctttatttcgtataatgattataatcacacctaatttatataaaaatctttaaaagagagaagtgcctttatgcgaaaaataaaaccttcatttcaacatctcattaatgagaataaaaatcagattcaacaagataagagattattggatcaaattgaagaacgcattgactataggcatgagcatgcgataaaacaaacaatcctaaagaaataaagaataaacgccacttatctaagtggcgtttattctttatttcttcctactagtatgctgatgggagctatctataattgcaccttcaagtattaatctttgtttaaataggaaggagatgtttatttataagatgaaagcagtttctctgcttgatatatatttataaaagcaacaacatccaaaaaatatttttgtattttatgaataaatgattcttcttttacacatgttaacgttgtaaactttaaaggagctgaataaaatggcaaacaataaaaatagcaacaataacgaattattagtatacggtgcgcaacaagcaatcgatcaaatgaaatatgaaatcgctagcgaatttggtgtaaacctcggtcctgatacaactgcacgtgcgaacggatcagtaggtggcgaaatcacgaaacgtcttgtacaaatggctgagcaacaactcggcggcggacgttcttaaaacaactttataaagtagtggctaaaggaagaatgcactccattcttcctttttatcgtagaaaaatagagaaacttcttgaatatatgttttaaaaataagaaaaagaagctatcttaggatagcttctttttcttaagaacatcatactttgagataaaaggaattggggtccttatcatcttagtttgttcaaaaatttaagttttattcctcttttagattacttctcatcaattattaaaactgcctgtcctagctattgcagtttttcacgtaagataggcccactcttatataaaacttctacatgatccccttgtaatatatatttgtctccatctaaagaaagcaagctatttagtaccacattcccatcccccatatttgtcttcaatacactttctacttctccttcgatgttaggggacatagtaggaataacttttaagtataaattggtatctttttcatatcctccgattaatgtaacatctatacccctattctttattatactcttatgtctatttagctcatctaggaatttatttttcatcttcatcgtttggtaaggtataaattcctttgaatgatgattttctattaacaaatagtcaccataatctcttcctggaataacatcttgcaattctttaaagtaagtatgaacagcctgtatcctatctagtctataacgtgtactaaggtaccgtatatacatctccatcgcgttgtaaacaatattgaattctaatgacgattttacaggtgcttttcctctggtccaaaaactgtaattgggagcagatcctgcattaggtgtgcacaataaaatgagtttatctacatcgtagaggtattgttcactttgaatataagagcgagcgactaatcctcccatgctatgacaaaccaagttaactttgttatagccagtctttagctttatctcctcaatttttgggattaagtaacgttgtgcagaatgagaaattctttgactccagtcataaaagcaagtaaagagatttttattacgttgatagccaatgctttctagtagttgaataaaagggtcatagataaagcttgctcctccaaagctccagttaccagtgccaggaattatgacattactcattgaaccgaacaggcccggtataaaaatgataggattttttttgaatttgtaatttaacatgatgattcccccataatttgtacgtgagaacggcttcttaccattttatttcaggatatatgctttatgttaaactcatactcatgcagtgaaagtttcttttttattagagtttcaaaaaaattgactatatagaactaaagatgaatatcttatgcaatttgaaaagggttttaatacccaatagttttttaccttcgcttatatttataaaaactccaaagtatttagactgttcattataaatctaaccagtaaaacgtgtgatataggaagaagaaatctagtcatggtatactaataacaaacatgaacataacggagggcattatgacgaaacgattagatttacgtgttgactttgcgtttaaatcgttatttggcactcatggaaatgaatccattttagcagcctttttaaatgcggcactttgctttccagatgagaagaagattcaaacagtccagttattggacccgcattttaacaaagaaaatcaagaagataaacgctcaattctagacgtacacgcgcaactagaagatggaagccgcgttaatattgaaattcaacttaataataaacatgatatggaaaagcgaacactctattattggtccaaaatgtatagtagtcagatgaaagaaggcatggactacggagaactttgtaaaacgattaccattaacattgtgaacttccgttatttatcacatatgaatgattatcactccacctttcagttatatgagcgagaacagaaattgcttttaaccgatatgctggaaattcattttatggagctacctaagctattaattaaatggcgaaataaagaggtagatccacgagaagatcaacttgtgagatggttattattacttgaagcatccgaagatgaagaaatcactcaagtattggaggagattgctatgcaagaagatcaagtactaaagaaagcaatagatgaatgggaacgcgtgagtcaggatccagaagtattacttgcttatgaagcaagacgaaaagctcttttggatgaaaaatctgctttaaaaagagctgaaaaaaaaggaaagcaagaaggactagaagaaggacgtgaaaagacaataaaagcgatggctattggaatgattcaagaaggaataactaacaacataatcagtaagttgacaggtctttctatagacgaaattgaaaagcttagacatcaataaataaaaaacgtcgcattaaaaggtaagctgttccgttttggagtatcagtacaggaaaatacacgtataaaagcagtatattttataattgaaatacgaaattgctaatgaatttggtgtaaacctcggtactgataggatttcacgtgcaaacggatcattaggtgaggaattcaccaagcttcttgtacaaatggctgagtaacaacttggcggaagacgtttctaagacaatattataaagtgatgatttagggaagaatgggaatccattcttcctttttctaagctaaaaaagtatttactaatactcggactaaatttatgtcacttatatcaacatttgaatttaaaaagattaaaagcttatatctaaatcactaagtttataattaacatcataatgctcgtttacaatagtaatcaaagaagcaagtcggcaattttcatcaacttctatacctaacaagtagtgacaaaaagcgatttgagtcagtgtaattaatacacgattctctaaatcctttttacccatacattcatgaactaatttatataggttctccattcgatcagctacagaatctccttcaattataatagcctctttaaatttaaaaatactcatcttctacctcaactcactttcactcatgtattacataacattaatatcttctgaaaagctaaaaagataccctttgttatgtaacaataagacccttttaagtaatattaattagtaaagtgctcaacatgggcttaggaggttttttcgtataaaatgaaggaaaaagcagacagaaaatttcaagaaggtgttttgtatgaagaacattgttaataaagaaagcattcactacttaaaattctgtattgtggggggattaaatacagctattgatttttttgttttttctttcttatcttatttaggcgtatattatataatagctcaatgcgtatcttatgggtgtggtgtactaaacagttaccttttaaatagagcgtggacatttcaacagcaggggaaaggaaggaagcatgaatttctcgagtttactgtgttgaatgttttcactttaattgttacatctttcttgttaactttgtttcactataaatttaacataccacttctttacagcaaagttttagtaacaattgtaagcgttggattaaactatataggtactcgtttttggattttcaaaccattaaaaggataaaataaataattaacgtattctaaaggaaacatgtaagatgcagtaagatagttatattttaattttttattaagaggtaagaacttcattacataacgaaacaagcatacctttgcaaatatgcttgtttgtcttagatggatacaaattattcatttgaataacttttaaaaatatctaataagtgctaaaacaaaacctagaatgaaacaaaaaatttatgcgatcaaatagtcatctgaaaataaaaaatatcataccagagagaagttaatacaaaaatagttataaaaaagaaagaagtaagtttgccatatataatctatacacattataaaaagagctgatttagttgaactcttctttagttaataaactttcttctggaaacgttgacacccctaatctttctgtatataagtcaatatcaattgcataaggaggcctcttctttacttctataaagatctttccaatatattctcctactactccaatacttattaactgtatggcacctaacagccaaatagagataattaaagaagtccagcctatactcgtgttacctaataacttttgaataaacgcataacaacctgtaatcacacttataaaaaataacatgcaacctaaaaaagtaaaggctcgtattggaaccacactaaatgaggtgaggccattaaaggcgaaagagaccatctttttcaaaggatatttggtttcaccggctagacgctcttttcgattatatgtcacttttgaggatttaaatccaatcaaaggaacaattcctcttaaaaacaaatctgcttctttataacgcgaaagttcttcaattgctcgcttgctcattaaacgataatctgcatggttataaataaggttgatattcaacttttgcataaggcggtaaaaacataaagcagtatttcgtttgaaaaaagtatctgtttctctgctatcgcgtacaccatatacaatttcatccccctcatgatactttaagaggaaacttcgaataacagaaacatcatcttgcaaatcggcatcgatggaaatgacacagtccgatttagatttagctttctctagtccggcaagaagcgccttttgatgtcctacattgcatgatagttttagtcccgttacatagctattaatggtactctccatcgcaattaatgaccatgtccggtctttactaccgtcatctacaaataatatcttgctattagctgaaattaactcttcttttcttaaatcatctaaaacagaggagagttgcgtaatggtgtcttttaatacttcttgttcgttataacatggaaccactatggttactaagggcagcattggcttcaatttttctacctcctacattacttgatacaagtaaatcttccacgcagattctttatgattaaattctttcaagagcgcaaggttattatctttcgcgttcaaaataggtaccgatgaaaagatataacgaccacccatttctttaaattgatttgtgtttagctgcaaatgacgtacttctatattttgatcttttgtgaactcatatgttttaccgagttcattgacaaagatgtaacagcgacttccccattcatcgtaatattttcttaattgcttatttttttctaactcttttgctattatctttcgaaatttatacttgtattcaaggggatatacattgttatacgtatctagtgtgtagaagccgttgtattgtgaaatagctggatggagtccaatacttgctacacgatacgaatcctgaggatcccctatgtattcttttatatcgttgaattgttctgtagcataaaattccttaaaagaaggagagtgaaagtgatagccataaagaagttcttcgttaaacaggagaagtgtgacgatctgacatagaatcgctatagtagctagtttcctccaaaactttcctagtgaccatagaatgtaacagcctaagccgaaactaaggtaaataacaataattcgtaaaaaatgaaacctcgcaaagttaaatgtatttagaaagctgaccttttctttgagaggaatccataaattattaaaccaaaaagcgtaccatattgataaagcaacatttaaaagaaataaaaaaacgaatagtttgttatgttttatattattcttagcagctaataaaataagtgttaagaataatattgggagaataacatgcgtatgaacagtcataacatgtgtatgccctatgagaaagtttttaagagaaaggcgcatagagtgccaaaaatcatgtcgagaagatataaattccatcctatgatttggctgttctgaaagaaccattgaatagacaaggcgatattcaattaaaaggtaaagggatgtcataaaaataaggctaaatagaaatggccaattccactttctctttctaattaagtcatagatccataaaaaagaaattgctactaaaaagaagaaaaagccaagtacaaagcttgagtaaaagggtaaaaggaaaagagctacccattctttccatgaaaaatcttcagaacggatatttagaaatgcccataaagcaagagggtatcctaaagtgcttaacatgcctgaaggccaaaaaggggtaagtgcaaatgcaagtgatacaccaacacgaacaaagtgagcatcttcatgtttaataaagtgcttcttcaatagtaaatacattccaccaaaagccactaaccgagtaatcgtttggcttaaagcgtacgcagtcatagatggaaagagagcgtgaagccaaacaatcccactgaatgctgtgccgaatgcatcacgaggcaatccattgataacttgagggactgtagaatgaaggccgccaaatatctggccactttcagccagtaccttataccaggcaatattagaatctagattatcatgaacacgtatgtgagcattttctcctaatacatacatagggagaaaataaagaaaaagtaatacaagtgcacttataatataaattttcttttttttctttcctattgtagacactgacatctattacacatccattaaattatttttaaaacgtattaattctctttagcgattctaatcatacaaaatatttgtttattactattcccatcactatactgaaaatgtattttattgaaagattttgaaattatcatgagaccatacgaataaaactccctaataattaaggagctttaccatataaacagagtatttggtggttagttaactttaattagacctttttatctttgtacgtaatcctgcctgtgctactacaagaatccctctaattcgtcgttttatctgtactaggcgttaattagttttattataatgagtaaactgctcgaattattttaaaagttagaagacattcaaatagaggtttcgtttactataaatgatatagatggagaaaaaaatcatgaacttaaaagtaattggatcatttattttaataacaattttattgagtggatgtggaaatttaaaagaaaaaaaggaagtcactctatctggccctgtaaatggtgcaattgcaatagatgtttatcagtgagaggaataacaagagcaaaccggtaagtagaaaaatgataataaacgaacatttcaattcgataaaggatttgaatgtaaagttatggaggtgaatgacacagagagcaaggtattgttaaagactgtcaatggattaagtaagggcaatgaattatgggtttctgtaaatgatttgaaagaagcaataaataatagtttatttgcatgtcatcagatgtttacgttgaacttctatcctataagaaagagtcgacttattataaatatctttattgctttttattgtattcgtgcatactagaaaagtggtacggaatcggtaaacaggaggagtttggattgagaaatagatgtagcaatccagtgttacacaacgtttttctgatcatagtaagtagtttgggtggttctcttctttctttaactggtatgtctattgggtggatgattggcagtctaatgatggctggatttctttcattttatggatccaaatggaaaaaggaatcctcttcaaacaaagggattcatccttactggcgtcaaatcggccaaggtattttaggaattcaattaggacaaagtataagtctatctatttttgatacgtttgaggatcattttatcatcatttttattattcttatcttttctattatttttgcccttttgtcagggttagttctatggcgttatagtaaagctgatatgatgaccagtttgtttggtactacgcctggtggaatctctgcgatgcctactattgcagaagaggtaggagcaaacacaataatagtaagtattgtgcaaacattacgtatttttcttgtagttgggactatccctcttttagctggagccgttcagccgaatccagtgcagcatacatttacacattcgggtacatctttgaatatgtggacgtttacgtggaccattttattagtcatcggtgccttgagtggtgcatatatcggaaaaagaactaatttacctgcgccctggcttgtgggaggaatgttgggaacggctgttattcaaacagtgggttcatctgtcataggtaaagatctagctacgtggtggccacatgtgctgattattctagctcaaatactaattggaactagtattggctcacgtgttcatagggagatgtttaatggttctaaacaggttatagctgtaggtcttcttacttctactggcctggttactgcaatggttttatgtgcattccttatctctatgtggacacatattccattgataacttgcatcttagcatttgctcccggtggcgtagcagaaatggctaccacgtcacttactttacatgctgattcaacgtttgtagtagccgttcagtctctaagattgatgaccattctattaattttgccgtccctctttcgcttactaaatagttcatcctttcgaaactccgttttgtacaggaagaggttacgtaattaatggcaggtaaaaaatcgtgtatagaggcttcatgtgaataaaggcaatttaataaccatttttggctaccaactatgcacgtttcactaatttttcatcattagttgataaaatatcgttggtaatgcaataaagcatttttttcatagatatttccctttataggctgacctcaaaaggttagctttttttatgtttcatttttctctccttgtgagtataattctaaaaatacatatgaactgttagaaaagacaaaatgctccttggacttgcgaacaaagaattcgaactcctggccttttttatgcgtagcatcaacaaagttttgacgcgaaatatgcttttagcacaagtaggatgatatgattcagatgtggaaacgaacattgtggatgtgttacttttttctttatatttaaacatgataattaaaccttgtcttcaaaataaaaaagaatcgcaaattgcgattcctttttttatttatttgctccgtttaggacactaagtgaattgttaagtgctgatttgcacttattgacatcggggtttgatgaacgaactgatgctaatacaacatcaatagttccatcaattttagtccatgtagaaccgtctattttcctaagtttaggctctgacgcatcccattgatgttctaaatcatctgctccttttttcgccgaagtaaagttttttgagtttatattatttagaatatctttttcaattttagtaaaatcagttagttgtccagataaactcgcttgtgaagaactagtttttgatggtgatttatttgcactgtttaaaacattaagagaatcgtttagcgcagatttagatttattgacatcaggatttgatgaacgaactgatgctaatacaacatcaatagtcccatcaattttggtccatgtagaaccatctattttcctcagcttagcttccgaagagtcccattgatgttccaaatcgtctgctccttttttcgccgaagtaaagttttttgagtttacatcctttagcatacctttttcaattttaataaaacctgttaattgtccagataaactcgcttgtgaagcagtggattgtgatgctatatcattactccgccaaatataaccacctataccaagagctaagaaaatacatagtaccacaatggtttgtgtcaaaacatttttctcgcttccatctggttggtttatatctgctgtttccttcttttgatttatatcaatttttgtaacagcaagaaaaacgattatagctaaaatagctacaagaaaaataacactagtaacagttgttcccaaacctaacccaccattgacttttgtctgagataagtaatctcctaatgatgctccaagtggacgagtaagaatatacgcaatccaaaacgataaaattccatcaagcttcaatttgtatgccaagaagatacaccctatgataataatgactgttacacctgtttttagataaccaaaacctagttgttcagaatatagatcgccaactgctgttccaagtgcgaatgtgaatagaatggtaagccaataaaaaacctccctttttcttgtataaattgagtgtatggagagtgttttttcactaagataccaaaaaagaaaagttaatccaagtagaacggagaagacaattgtactaacttcaagagggactcccattgcgtctgtcaaattatcagttaccagcgttccaaatacacttataaggacaaccgttgcccaataaatggctggtacatatttagttgctctgaattggagatacaatacaacaaaaaacgctatccccataattacagtagtgagagttaatccaagtcctaggttgaaatttaggaagtcggcaaatgtttcacccacagttgtgcataaaattttaattatccagaaaaaaactgtaacttctggcaccttgttaagtaaaatttttaatttattttggttctcttgcatacacattccctttctttacagtggtttcccacaactttttttcgcatcattaaataaggaaaacgctgtttctcccctagtatcgccatgaattttagaattcaaaaaataattgtaatttggagcaacttacttaacaattggttttcgattatttatttttttgctaggacttaatttttctcaaaaaacacctcatatccaatataatttttaaaagctaaaataattatattggactgctcttaattatttatgaaaaaccaattaacaattcattagaattgttaattggtttttcagcttgtactacgactaatatttcattttacgaaaacattctaaaaggtaggcgcctgcctaagacgtgaatgttccaattacattttaatagttgatatgtcatcaaacgaatatctaaatgcatatagcgaattagataactatacaatggaagaacttcaccaagttcttattaaaaagcttagaagaacttaaaatcaagaaagattctggttcttatattgaaattgtaataacaagaaaaggtggtgttttttcatttgaatgtcaatatgaaaaaaagagaagagtaaacctactttagtccttgggacacctttgaatctctcgttcattccatgaaaaataagagccaataggccaactcctagctcattaaaaaccatcacttcttacatcaccgtctaccccttacctaccgcagtaagggttctttgttattttttgagtggacaggcaagcttactgcagtagctacatagtatctaaagaattacgacttcattacctaatcagtattaagttcagtaactttaatgcgttaatacaagctgtatacgcctattgaagcccttcatggaacctgtaagggagctaagccgaagaggcgaagggggcgaccggatggggtgagctgaaattatgcataaatcaaaggccaaaaattgaatgaatgaaagaaggtatcaacatgagaaaaacaaaaggattcacctttcaaaaaacttttcctccacctcacaaaccatctcttacgagatctcgtcctttcagggcttattcctttgttccgtttagtccacttgccatgcttgaccccactattttgaccataggaggcattgtcttgggaattgccattatcgaacgcatactagagcgatggggtgtcattgatcttgttgatcagttcgcaaaggtgatgcgctttatcttgcctgtcaccttctatagcgccttgatttacttttttgcaacctttatgttttgaggaggtatgttgatgtttgaaaaactcaagttacgtggccagttgataaaagcgtttcgtacggcagagatttaccggatggttaaacgtggagaccgtacctcctatctgtttccgaaaattcatcacatcgatagccaacatacgtacactcggtacgccttttccttattaaatgggattgatcctgagctcttaacaaaaaaaagatgggcgttacgccaagtattaggcagcaacatcgagataaatggcagcctaaagaattttagcatcaccgttcaccacaaaagtctacctaagatgcttacttacaagtatgaaaccattcgtcctcacattgagaaaatggaacttcccgtatgtataggtcaagatatctatggaaaccccgtttcatgggattttgcggagttagaaaccttattgatatcgggtgagatcggggcaggaaaaagcagcctcatgcgtgtcatcctcacaacgtgggtgaagtatgcctcgcctgaagacttgcgcttagtgttagtagaccttaaacgagccgatttagggttatttcatggaattgatcacgttgatgcgctttgttttgaagcgaaagatatgagaaaaccttttgccttacttcgggctgaaatgtatcgacgaggcgacttactattagagcacggcgtgactcacatcagcaggcttccatttaagctgcctcgtatcgtcgtcgtaattgatgaaatgagcatagtgaagagagaaacggatcttgtagagatgatccaacagtttgcgagccaaggtcgtgcactaggtgttcatacgattattgcgatgcagcgtccagatgccgatttgttgaattcagcactaaaagcaaacttacgggttcggatctctggaaggcaggcggatgcgataaatgcgaaagtagccggagtaatcggcgcagaagaaattgatgctgcagccagggggcgcatgaaaattaaaattgatgaggtgaaggagtttcaagcctatttcttagatgaagaggcttgtaaggaactactttcaccttataaaacaaaggtaaaagatcctgaatctcaactggaggttgtgtcacagtctatctttggattgttagagaaggaggaacagcgatgagctttcggttatctcagcgtgataaagacatcattgcgtttatcaatcagtttcgggctgtggatcgagactcattagtggaactgttctttaaacagctcaaatcacctgtcaatgcgtgtaatagcgtcatggtacgtttatatcgattagggctgattgaacgcacccagcagtattctccgacggtctatttgcctgtggatgcgaagattaaaaagaactctcaaaaaatattacatttcctttccattctagatatctataaacaaatgtgtacgtatagtgtacctaaacaggttattgtcgaagataagcccacaggacgaaaaggaggcattgaacccgatctcttttgtatctttaaaggatctccgttttgggttgaaattcaacgaaatcagtattcagaacagagaatgcaagcgaagattaatttatatgaggcgtatttcttttcagatgagtggaaaacgttgcattggcagccaaagaatcgagcagccatattcccttccgttatcctggttacgcctattcgctatgcagtgtcttcagatcatttccgaattattcaagtggcaagtattcatgaattgatgaagagttataaaagtcccaataagcagcatgatgcaaaaacaaaatccaacacttcttctagtggaataacaatcaatttaacataaccctatgtctttaaattaagctgctattcaaagcctaactcaattagttaggttttgaattatttaatagataaataataaccaatatgtaattaacattatctttatctatttatatatcccaaaaatcatttattttagcactactatctattctacggactgtttttaagatcttctttattatatcttgtcgaggaatataatttttgtcattacaaactatacctattgtctttcgactaactccacaggctttagaaaattctgtagtagtaatactatgtttatcaagaaatttacctaacttacttctttttttacccagtccgaacatttaaatcaccctcctaaaagtatatttgcctaaaatgagaagaaaaatactcattttgaagaataaaatacacatattggacaggtaaagattcatagactatattaagatgttataaaagctgttagttaacaaggaatctccgactcttatgatggctatgcaatagataataaaaaaagtggaatgttatttagaataatgtcgatatttttgtcataatcatatagcatgaatacagttaagaccgccttatacactgataagtaatgggcggtctttgttatgggtatgatatgatttcaatcattttacataaaaaattcagaaatagacatactgatactataaaatgtttaacattttatagtatcagtatgtccaattttaggagattaattacggccaactttaagttttggcattaaaacttaaagttttatatcattttgttgcaaataatctcccctcctttttaataatacttacttatattctttaagtactctcttttccattgataaatggcttttccaccacttttattctaaactctccatttgttttgtcattcactctcttcttcgattaattaagttaaacttaaggtacacttaattaatcgaagaaaaaaatcggaagattaagttgaactaggggttggactagattaataatcctacataaaaaaggaataacgttcctttctttttccgtttaaaaaggataaacggaacgaaataaagaatatattccgtaaacatttccggaatatcaaaataaaaaaaaggaatgatttccgaaataagttctattccgtttttattttttcttactatatcaatggata

SEQ ID NO: 62 - DNA, 21228 bp, Priestia aryabhattai
  source 1..21228: mol_type = genomic DNA
tttatagataagctcaacttcttcatagattgctctatttatgttattagatatttttcaagtattcttgtttgtaaataactaaatcttgaattgattaaagccttggtaattaaggcgtgataatgattctggaatgtactttatctagctttaaatcaagaatagaaattcaatttaaattccagaatgataaccatttaaatatagacgcttatatatgatatttttaaaatatcttagattaatgctttattattaatctatctaaccaacaaatttcgatttaatgaaagtggctgcgtttattttaaaccaagaagttaaacttaagtttaacttcttggtttttttagagttaggcacaataaaaagagaatataagttgaactcatcatataaaagtactttaatttagcgattttaatagaaaataagtttaacttaataaaaaatgcattttgaagcaaaataggaactttccttattttgtttttaggtatttcttgtatcgatacaaagcatggcgactagacaaaccaaagtaggtgataaggtattcatttgaatatccttcacagattttatttagtatacaactgtttcgaaactgtgttgatcttgccttagcttgtatacctgagcgttcgacttctttctcaatcatccgctttacaccaattagactaattcttttaggcttgtttaaattataatcgtaccaataaaccatcttctgaggatgaaaagaaagaaacaaaggatcgtctgtataatctttaggtttaaataaggcaggtatgtttgaaaagtaattgtatattatttttttatcgtctttagaaaggtttaagacacgttttcctttgttagttataatagttaattcattttggctaaagttaatattctttatatttaaagataccacttcattaagtgtaaggccgtaatgaagcattagaatcaaaattgaataattacgaggagctgtatatttatgtatttgcaattgagtttctgtcagattttttttactgacaacagagtttaaaagcgaaaaggtatccttttcagttataaagtcactgtcaactaaatccctctgcttttttgttgtagctttaagcgctccaaattgatccgttaaattatgatattctaacaatctgttcagatgggaagccacacgccttaaattggcctctgataagtttttttctttcaggtaggtaaggtattcttcgtaacaacttttctcttctggcaagattcctggcgttatatcaggggagtgttgatttaaccatttgaagaacgccatcaaatcatgtttatacatggaaactgtagaatgttttttccctgtttcatgtaaatgaataaggaaatgttgaacaagaagaggaatatccatataaaacacctccattattggtaaatttaatatactattaatgaatataaaaatcaaaaaaacgcccactagattaagtaatgtatattgtatattaaatttacctttcgcacaaaaaaattccgtttaaaaacattaaaacacgcccataaaaggcgtgctaataacactattttttattaaacttgtttatgcaagaaggttcgatatatttcccttagttctttattttcgaagtcatttatcagccttggcttaaggcctatttcttcacgttttcttaagtcctcgttcatatttcgtagtacttcttgtactgctgcttcttgggctttttttacttcttcctggttgggctcctcggaatttaaaactaacatttttcttaattctttaaattgtaaaagccttttttcaaattctatttgatttccattttcttcataaaataattcttgtttttcctttaatgtaaggttttcaaaagccttttctttatcttcagcttctatcataaaatctggaactaactcttttctagtagactttttaggtgtagcaacctttgattcttgtgatactttcgcgtagtctttttgaatggcttttattacatacgaatgcggatgagtaatatccccaataactaaacgaccctgcgtgtattttacatttctttcaacttgttcttttgcaaattctgataaaacccactcgattttttcaggcttaactcctaagctcactaggtcatggtataatccattttctttttcgttatctaataaatctaatgaagatcgggttgatttaagtttcgtctctttggaagaactagtaccattcaaagcagaagaactagtaatgataaactctatagaggttacttttctgcctgtttttatttcaacaaattcaaagtgaatatctgttttattatttatttctttttgagctactgctaatactttgctcttaaaatggccatactgtttgtatttagtaggctcaatagctaaaaaatgacgtaattcttcaagagttagttctctttttctcaaacgctcgtattgcttaagaagttcataaatacgaattgaataaaccgaattaagcctcacaacattttctaactggtacgaagtaaatttttccttaagctctaaaaataaatattttagactaggatgaaattgtaatgttatatacccttcattttcttcgtagatcgaggtaataacccagttatagtttctttgtcggcctttttcctttatggtaagaatttttgtttgaagaccattcacaatttcttttaagtatgagtagaaccctgttcccttcttatttcccactatttctataaaatctttagctcggaatctatatgtctttaacgtttcgtcattaggttgaactttagatgccataatcaacaaaatcctttgttcctgcaaggataatttatatgtactctcaattaaaatgtttgacttagttacccagttttttatgtttatgctttccagatcatatggttgaactacatttgatttcttcataaaatcccccatatttttctaaactatcactaaaatatcataaaagtgatactgtgtaaattgcatgtttaagagcagcctgtcctttcaatttaaatatcacgcaaaattagtgatagttcaggaggaattttaaccctaaaaacataactcaacctcagtttattaccttatatcttaattttggtgcgcaaaattggtgatacttaaagcatgtctacatttatcacgcaaaattggtgatacttaagccggatctgcatttatcacgcaaaattggtgatatttacaaacgtatagggataaatacgcaaaattagtgatagttcgcgcaaaattagtgatagtttcacgcaaaattagtgatagtttcacgcaaaattagtgatagttcgcgcaaaattagtgatagttcgcgcaaaattagtgatagtttatgcttataaatgctgtaatataaggatctacagagggcctaaaacaataaaacaataaaacaaatatataaaacaatatataaaacaggaaaacaaccgtagtgtgttttatattttaagattatcattgtttagagagaaaatcttaatctaagagtagttactttaacagcgtatccaattgaagtgattttaatcataagtgaagggaggttatattattttactgaggacttggtgaatttttattgaattacaagattaatagacgttataatagagtcaacaaaacagtccggaatataaaaagactccaacgtgtgcaagtggtgcgccaacacccttacaccgttaaccctaaaaggcctagggaaaacacctgtcgaagtcctaatacataaatttaattacgcctttattttataggataattagatttatttcaagggcgtagtctgtcaaaaaatccgacatcgttttcctattttatgggatgcgatgtctttttttgttcctgaaaaggagaggatagactgatgtctactacgcggatgcttacggcaaaagaatttaattatatgaaaagttatcagagtttcatagaaaaccgttctcaacatcaatcattgaaacgaaaattacttaaggaaattattaacctttatggagaaaaattttatcggctccacgaaggaactaaaaaagctttagaccggctttgttggtttgctgcggaaagaggattttgctttcctggtagtacatatttaggtaaaacatacgaaaagtcaaaaggaacaattgatcgtcacctaagtgagcttcgaaagcaaggacaaattgttacagtttatcgacgttgtcctcgtaataatggaaaaggcagtcctgtacatctgtttgtaaatcatccttatttcaaatattgggtgaactatttacaactaaatttggctaagaatgttgaaacagatgttaaagcagaaaaagacgtaatcccttgtgagagtaagaaagaggtctctaaaaattcttctacctataatttatctttaaaagatttaaataaatacatacgtaaagaagatacaagtattaaactttcacaggattatgtaccatcttttattccgaaaccgtttaaacaagcagtagctccattctttaggaatgcagatgatatttatagcttatggggaaaagtcctgctagcttataaaattagtggcttagaaaagcctatagaagacttagtttctattgctgtgcaaggttttagggaaactcttttcgcttacaaaagaaaacgaataaaaactgtctttgaagcctacttttttgggacattaagaggtttatttagtgctgaacgtagacgagaggttcagcaaaattccgttaatcctttattttttaattttttagaagcataattttgcttcttatcttcttgcttagtatagaatcctaggagtttgtaagtaggtaaagagttaacataattattattctagatatcaatatttcaaaattaattttctttaagtattgttaaaaaatagtctaattcgataagacaagcatacaatcacctttgctatcaatgaataaattataaagataaataaaaaagaaggtgattacaataaaaaaatacgatggtgaatatagtaaacagttaaataatcaacaaaaaaacaaaaaatgcaaaaaaggaaaaatttgtattaatatcaacatttacaaccatgccgaaactggaggacaaattagtggtaatggaggacaaaacgctaatcaaggcggtcagattgcccaaacaggtggacaaaatgccaatcaagatggtgtggttgttagaaaatgtggcaaaaaaaataaagataaaaaagtgaaaaaaattaatttcgaagataatatgaaataattagactgcttcctgagctgaggagatactttacttatgggcgctgaaattacaataagcatcaattacagagttaatattatttttagtcctattaggtgattacaaatggatactaaaagaagagaataaacttttgatcttgagtaaactacacaaggggccctgaggtatctatcacttttcttaattaagtttagcgcagaaaaaaccccaactgcacaaggggtttttctgttttttagttgtatactgtattaaatcttagttaagtcgggcaagttagggacagtaatgcccctgcctcccattgcagatgtatcttcatcatataccataatggtaagtaaaacatacgccgatgctcctagtggaggtatacataccagtacgtttcttttgtcaaaagatagccacaacattatgtgcctacgagaaaccaacgagaagcaggctaactttcgaaacaatggcattcgctttttctcatattctttatcctctgtcacattgtttgatctcacgattttgttcaccataatagattctataggcattaaaagcctcttcgatactgaagaggcttttaatatgttaagggtatatttgaaaactgaatgagatggaggatatattaactaccaaataaattatattgattgaccaactttaagtgaattatccaatcaataaaacgacttaaaagcaatatatagatcaattcatgggttacttaccctccagcaagagataaaaataaaggtgataatcggtttgttatatcaatgttacttaccgaattgtcagagcaaatgcctgaagtttcatctctttaataaatgtattgatacaaagatcaatagtcaaccatccattcagaaacgaaggggaaagaatatgataaaagaacatttttttaagggtacaagcagcctttcatttattgaatagaatatcaagaaagatataaagagagggtgataaaaatagttaaaaaaattaaaggtaacaaggacaattattgctttaaccccccaacccaaccaggaattccatcagctactaccatcaatttggctgttgtgggcgatagccacgtaggatttcaaaatagtcaaaacatgtttaatacccttttgcagagggtggtgagcaatggtaacaaaaggtatattattttcgggggagatgatgtgcatgctttgggggcctcttcatcgcaagaagctgagagatattaccaacaattcacacatattttaaatagtgttttaggttcaaatatcttccatagaacagccataggaaattgggaagataccgatagaaataacagtagagccttatttcaacagtatctcaacccttttttaactgggtatgtgggtattccaggaacgcaggggctggtacggcatgtctggttagataacgggcgtggaggaatattcagccaagatagcttagacctattaaggaatttggatcctaatcattattatattattgattttcattggcctttgagagttcctggaatcactaatgcaatacttgaagaccatattatgtctcaagcagaaacagagattttttttaacgcaatacctgccaatgtgagaaatagaatcttggctattttcactcaccatgcacataaattttattcaaattcaaataatattcatcctggctttcctaatacgccgttttttgtaacgggatgttcaggagattatgcatgtagttctgctagtagaggttattatgatgtggacttaacgatccaaaacaatatggccactctacaggctacgccaataagggtccagtagctagtagaatgaggaaatgaaaaagagcttaattgtagactactctaagctcttttttctatggaaaatatgttagttttttagagaacattaaaccttgagattacatggccgccttcaggcggaccaacttttagacgttcctaatgtgtgtctgatgaggaacggtttttatcaaatccctttataacggtcattgcagctatatctaaaggaagttttcttcttaaatagcatactttaaatttattgaataatagaatagtaacgtttctttctgttattaatcaaacttataaccatgcttttctaatttgatacaccatttcctaatattgctggaagttgtgtttagccgcctggtcatttcttcagcatttattgtatcctgcctgatatctatagtttgtctccgttcctattgtgtgcaccttgtatcccccgatgacacaattttacgtaaataaattcaagggaaatcccttttatctcttttcatttagtgtgatttaagtgttaaaaaaagcaacctcggctaggcgagattgctttctaagagatagaagaattaggggattcttgcttaacttagttttaaaaaggcttaattgaacgttgtttccaacactatcacaagtgattatcattgtaacgagatcctgtgtagttatatttcttaattcaagtatcgagttgtctggaatagatagaatagtatccccaacaattggtttgcaacctcggccttctgcttgagtaatttcaagtccaaagctagcttgttcgagtgaaacttgaacattatttaagaataatccaacagtaggcaggtgaggaaatgcagttccagttagtactgttacgagactagtattattgaaaaagttaccgtaagcagggcaagacttaggtggcgattccggagatgaacaagaagtggacaacatacctttctttttttacatgaagacatatcataacctcctttacccgatatactatattcaatgttgaatattttttttgtttgtatgcttgtccactagtaaataaaaatatttacgtatggtaaacattaataagtttttgtaaaggagattgccttagattgaaatgcagcatatatataaaggacagactttttatacatcttccttccacctggatcctgagaaaaatccgttatatcagggatgtatgaaaactgtttaatcaaaaaatttattcttcctgggaacccttgtcttggtgaacaagggttcttttttattgaggattataaaagaagctgcaataaaaaaactacattggtatttcaaaatgagctgaaattaaaaattagacacttcatttaggcagccgttagacattatcaatgtatgattccttcctgagtcttgaggtggagtactatggatataggtaggatgaggtacaatctgagaccaatttcgtgaatctgtgtttaagtttacaggaacatttgctaagggatagccacttgttacggtataatctgaatctatgtactctctaaacttcctgctggaatagtatcaagacaggaaacaataacatgttgtggattcattccccctaggatggcttaaatgacaggggatagggctgccttttcaaggtctcaaacggttacttcatctaaagcttcttacagttgttttacaattaaagagtctgaacggttagattttgttctatattgaagttcctttatgaaagaagaattagaattatgctatcgattttatattaaaatagtttatatataggctatttaccttataaagatatctgctcaactttaactattaaatttaagtaaatacatgtggttataagttaaaaccccatagatttaagaatctatagggcggtgagtcttacatagggtttactttattttactaattatatatgttttttatgactacctaaaaaggtaattacggcaacttgagttgaaatcctcttatgacacacattaggcatttaaaagtaaatttaagctcgctatgatttgtggaacgaattcccacttgaattattatattttataaaattttaatctattaaatttattccttctaatagaacattccaaatagaagggttaataccattttttcgggaaacccgaacccaacaaataccgtcttcagctgtcccaaaattcatatccttcacgccctgtaagtcatcatcaacggtttctattaacagaatattaaagttaccattagtcatttcagctaatatagactttagtatgactatatcttcataatttgttggcatccattcgtgtcgtataaataaggtgcgttgactttgtgcaatttgattaaggaatgtttggatgcgatgaactaatcttattttataagggggatattgtagaacccatgcttgatcagggattattggaaagtcatgaacagagtcgatgttatattgggtatcagtaacataatgagctcttaccggttcatgagtttcaaatttaaaaataggatatccattatcgtctatatagttggctaatatatctttttcaatcatattttctaattccataaaaccttgaaatttattttttagtaatctatttacatcagaaagaaaaggggtttgaacccaatcaagtgggaatgaatgccttcttaaattatgacgttcggaataaagtgctggaccgcaccaactccctaagcctgctattaaattataagagccccgcagagtttgtaaattcatactaatcactcctacgcttttttatattatataggggagcaacctaaattgattggacaagacagaatatatttaataatattttcaggtttaagtggtttttcatagattgaaatttaaattccatatcctaagattggagaattgtttgtactacatattttatcgtatccaagaaaagcgaacaggatgaaatgggtcattttcataactataaataagcttttggcttgtactaaacttaatttttttcatagtatgtattattccttatcttttttaggaggtgatttcatgtctaatggtcatacttttgaaggcaatcttaacttaagtgataacattacgcctttagaaggagaattttcaagtgatttcgattttaatggtttaagaagaggagatcgaattcaaattttttcttctggaaaccaaattgatggaaatggcacttttattcatgtacaagatggatttctaatttggacagatagctcggataatattaatacaaccagtttagatgctattagtatcagtcgagtaactggaacagcttaatttagaagggtttcaaaaatgtattggataaagctctttaaagaactttatgatgaatttaagaaagaaggagcattctataaggaaatgttccttcttttataatttcaggcaacaaaaattagggtacgacaagcagttgctactatatatgagggcaaaagccactagtttagacgcaaaaagtattcatgtcaaaaaacgttggcctggtaacggatttgagggttacatgagaaagcactgaaatagagaatcgatacacggtctggaacactgttagggaagataagtaagataaatgaaagtgaaggtttgtaagccttgtaaatgtgagctcaggacagggcacagatttgtttacgtattggcaagatacataatacccctgtgatgcgtcatgtatcttgcctggggtaaagaatctacttaagctgattgtatctataggatgatgaactcagtaaaccccttattatatgagtaggaagactgtacaatcaaatgacgtgacagggtataaagaatacaagagaaagtgaacaccggtatatggaaagtgaacagaaaagcataaaactgcataactggatgaatactattttccttatggacaaacccatgatagatctgaaatgaagctgacctcttgctggtcccttataggtacataaggttgtgtctatcctctgatgaaagaaagaagctgttatgtggacctctatttggagtatgggcgtacgttttatctaccaatacggtatgatgaggagacgacaaataaacttgctatgggaggcaggggcaatgttgcccctaacttactcgacttggtaaggctagataaaatttatagagtaaaacaaaaaaaatatccccatgcagaggcatgtgttttcacatcattaaaaattatttattgaattgaagtcctatattaattaataatgcttatatttctatataaataaattccagctaatattttttatttttatcagctagatatttggcatattgaagagtattccttactacatctaattcaacattcataatgacaggagggcctggtctccaattcacctcaaaaatccaaagtctgcctttttcatcaagtcctacatcaattcctaactcgtcaaatagtatatcctgatatagagattcaaaatggttagaaaaacttaaagcaaattgttcaagatacttttggacattatagtagttatctccaaattcctgttttaaaaagatatcaggaatacaagtatagccaccgttgcctaggtttgaagctatactacctattttacctattcttggatatatagctgtaattaaccaattgccatttccgcctttttgtacatgtaatctaaaatcatatacatttcctaattttgtcttacatgttataaatttttgtactaagtaagtgtcctgttttatatgactatcgataaactttgctagttgattttcactaaatatggagtcctgttcatctttactaactttataactgtcacctatcttctctatatagaaaataccaacccctttatgcccggataagggttttacaattatttttgtgtagctttccgccatatttagcaatactctataattagttaattctgaagtaggaataaggtactgattaaattttttagccttattcactttgttataaacagttaatttatccccaacggagtgactggtaaatggaattatcttccttaattcatctactatatctgctgctttatcacttataggggggctggcattataaataacatcaggataaggatatcttttctctatccattttcctttctcgtatgttttacctaaaatagtatttttttctaaattaactttccctggagtgaaataaaaaaattctataccttcgacttttgctactgcagcgaaagcataagcttttctaacatttattgggtccttacgatgatgaagcatgccgattgaagccatagcaatcatcctttcttctactcttacttgtttaggtatattcaccaaattcgcatattatttatatttggacgaaccttggttgtcttttttttatatcatagagtgagagaacatttttgatcggataggatgagggatatttatggatactattgtctttattgaaacaaataaatcaggatcgagtcgggaagcaattaaggcagcaaataatcttaatttctttacggttttgttaacttgtagaaagaaatttcttaaagatcggagtgaatttccagatgtacatgagatgatctttactgatataaatgattatgataatttagtcactataatcgaaaaattaaaaaaaacaagaaaaaatataaaaggaatttttagtttcattgacccttttgtttatgtggctgcacgtctgtcagaggaattctgtcagagtgatatatccactgatgcaatctatcatatggaagataagatattgactcgtaatgtgctaaaggaattacccatttcacttaattatttaatttataaaccaacagaatcattatcttcatttcttaaaactaaagagataaattttccccttattgttaagtcccctaaatcaacaggatcaaaggatgtattgttagcaaaggatgagagtgagttaatatcatctatgcatacccttttaaaaaagctacctaacgaggaaatcttactcgaggaatacgtagatggccctcagtacttagttgaggtgttggttcataatgaaagggttcatattattgcagtaattgaacaagaaattaccctttttgagcgttttatcgttactggttattctttgttagggaaattgaataatagcttatctcatagtctttttaatgctgttagttccattatacaggcctttggtatgaaaaatggagcgtgtcatttggagcttcgtaaagcaactgaaggttggaaattaattgagataaatccaagaatatcaggtggagctatgaatcgtatgattgaaatcggacatggaattaacttagtacaagagactatgcaattaatgatgggaaacgaaccttccttgactaaaaaggatgataaatatgtatacgcccattatttaacagttgagtctaaaggaaagctaattcaagttacaggaaaagaacgcagttctaactaccgaggcatagaagaggtttatataaagcctaaaaaaggggcaattttacagccacctacatcaatggggcatcgttatggttacattttagcgtcatcatattataaagaaactgctaaaagaagagctttagaggcagcagaagaaatctcctttaaaattgcaacaacagatttaacataaatacgatgctgtaacatatgcattattacggggtttttccctttaaataacaataagtttaatattgggcttagggcttcctgtagctgtgtttatattaaaataaatcattgtatatggtatagagtatgaaaacaagaaaaaccgctggggctaatcagcggttttttctgctctattgctgcaaggattttcgtagatgcctcacggcatcatctatagtttattcattcatataatacatttgacttatgttacaaggatctaaacaaagtattaatttgacgagtatcatcagatccaatactttcaatttgaataatgtctttctcactaaacttaatgtcaagctttctgaatatatttcttacacaacgaagaacatcaattgtttctgctctagtacctccaactacaagtctaataagattttcatttacattaatttttttttgagagtagtcattaatattgattcctttttgagcaatactatttaaaatatagcctaaagtacgactatttgttgtaaatttaaactgggttcttatgttaaagttaaatctttcatcgttcattcttgtgtttattctcctttcataacagatactagtggtagaatacagaaagagtttagaagaaaaaaagctactggcctaaacagtagcttttcctcttgatatactgggttatatgacctgatatttaacgagcttttggatagtttgctcaaataatgggttaacattgagggtggaaaattaatttaaaagcgagtccgtaaatcaattatttatcacttgtccaatctagaaggttcttcataataatttcaatctttgttatgacatccacaacgatgtgtttttttgatcatcttcaaaaatgtcttttaacagtttttcaaaggctttttgtaggatggactgacagttgtttttgtgttcatgtttttttcatggtattcactcactttagtcactcctttttttctcataatatactattccttaatcaagaaagtgcttgtgtacttgtccattagcatatgaattctatatgaagaagatctcaaaataatttactttagatatgtttattatgttaactaagattgtatatcatacacagcttaaatttaatccaggaattgaatatagaaactatcaggagtgatagtttctttaatttgaaatcctctcataatacacattggacattcgataataaaatgaccgctttttttaggatgatagaaaccggcacggtggagccaggcatgaaacatagatccagtgagaaacttaatattcaaatctgaactatcaagctgcgctgggttaacgataagggataggggaacttggctttgtgctaaagtagttaaagcaaagatggtggaagaatttgcagggaatgaaatatttgaaaaaatttttgcctggggagccagtccaaatccattgtcacgtatgagtcgagtaaattgatccatggcgatattagtagcggctaatccattatgaatgggtaaccctagataccaagttggtcgtaaatttctgatggcgtataaattagtgcaatttgccaattgggagatcccattattagagcctccattccatttttcagttagatgttgaaaccattgaaatagcacaccgttaatagcatcacgaatccattgttgttgggctaaggtaaaacggttatcaatatcaaaataaatgaagagtggtaagtcggatacgccaggtggttcaggtacaggaaaggctattttggtgaatgtgctggaatagggaggtactaaggagtttatttgtaatacatcttgcagaatcaatttcattatgattagagttcgttttacactatgaaacatttttattttatcctttcatagaagatacttgtactagtagggtatgtaaccaaatgaaaaaggtttggacaagcgctggttttctataaaatccattatgttaactaaaatgtatacggtgctcatttgtaaataaaaaacactttagaaaaataaaaccagtctaaagtgttttttatatagattgtccccattagtaattaaatctccttatttatcttgttgaagaagagaatctagcaccttaaaaatgtgtactaattacaccattagtatccattaagttcgtaccatctacactgctttgagcaaagatatcgactctatctccagttactaacttaagaataatagaagcatttactgcattggtgaaaattagtcctcacctgagaaatcattatcagtagcgatagcaggttttctatttatccgaattcctacctgtaatctttaatctaagctaggatagttaagactaagtgaaatagtccaaaggctgaatatacaccagcttttttttgctctttcaattgatgggtattccattatagaaatgcaagatgttttgttcaaagaagagagcacaattaagaaccagggacgcagccttctacaaaaattaaacatttcttcgatgagagaagcgatcgacttctataaaaaaataccaagactttacaaattatcattaagaaatatttaaaaaactaattagaacctcataaaaatcgaggagaatctgagtagacagtaggtcaacatagatgtacagcatatcaacatccatatcgacaccagttctacagtaagttttttaatacgctttaggtcaacagactgggaattttcgtagtactactttttttgaggtgaaaacgttgttttgcggggctttgtccagcacgccatagctatgtgatatcagaaaccccatatgctcttccttattcatactggaaattttaaaatttgacaaaaagaaatgattaaattaaagagtataggaatgccttaagtgattctaaaaatgatttaagggagttagaggaataaagacgagcagatagcgagcaagcaaataggcaactcgaacagttgcaagccagctttgataagcaagccgagcaaatgaaaaaacacatagagagccgtgataaagaaatgatggaatacattcgctcatcacaaaaacaacagcaacgacatttacttgaaacagcagcggcccaggaaaaagggagagaaaataaaaaaggcttctttgctcgtctttttgggaattaagacgaataaagaagcgctggtgtaatctatttcattacagtaccatcgttttatgaaatagagaaggataattgagttattctatacttgttcactaattcctgtaaaaaagatttaaaaaaagtgctagtactaagcataagttcaaagagcatttttaataaatgatacatgttcgaaagataagaaactttaatgagtgtataaagattgcaaactcaatgatcgtagcaagtcaagatgcacaaaattatacacaactatcttaaatcacacttcacaaaaacaaaagagtcaatatattatgtagtggctcttttactttattatacttatttttagagatggatagcttaattaaaccaagcgcaccaagagcactaaaatcatagttgctattaaaaaacaccctttcatagctgaagaaaagggtgttttttcgtaaaaagtgaaggatgtaaacaagctaattttagaaagtttacataaagttttgtgggataaaaacttatatactatcttattaatattatgaatttatgtgttgcttattttgcattttattcctataaaacattaggcgagcaattttgcaacttgtacatataataaagaaagaatattataggtggtgaaagtatgggtaactttggaggcagcttcgctttattagtggtactttttattttattagttattgtaggttgttcttgttttggtggggggtactaagaatataaatgacctgtaaagttcgtgggccttattttactatagggcttacgaactttgttttcctctctcagtctgcttacatattcaatcgtcataaggacaaaaaacagagcctttgggactcacttgggctctgttttgcaatgattaccatccgccaaaacaactacatccgacaatgataagaaggataaatagcacaactaggaaggcaaagcccccgccaaatccatatccgccacattcagacatataataaacacccctttgtattttttatattagatgaaaataattagtggatagggtacagcacatttttagtatatgtctgagtggttatatggtttatcgctcttgtaaaataggcctttgtcccacatattaagcttttataagtttctaagctcatatgatcgttatctattaagggaaatacgacttgagacagggcagttccttttttaaagctatatccgacataatgatcccccactataaattgggtaatatcagggtttatagaggggggaaatagaatgtaaggacctcgcaacatttcttaaggaattataacgttattttttaagaaattttgtaatgaaggggctgaactgattaaacaatcccttcgcttgctgcgcagtaccagcaatcttgtcaaaatctaaatttccatctgatgtacgaaaataggacaatagacttgggttattttgttttatattcggacgctgaaattgatgtggaaaaaaagggtttataggtcgacgtgttcttctatacattaatttaaagatctccttttagttatgttaattttataatatgtacaaggagtaagaatgatcgcctaaaataatagttttaaataaagataaccactgaattaaaaaggctagctttattaagatacttgggaattatgcttactaattcattgcggatttatacaagtaaggcaaatctaaatttctatacatctaaaaaatattttattaagttattaccttttactttttttctcataccttgttacatacaaaaataagaggtgattcatatgaagtatatggatatgcttgccttactaggggttggtggggcccatcctggcggtttacatttaacgaaacagttgttggaaaaagaggaaataaatagcgatacctccatattagatataggttgtggtacaggacaaacatccgcatacctatattgcaggtatgggtgtgaaataacagcatgtgatataaatgcaactatggtacaaaaggcaaataaaagatttgaacagttaaaaataccctgcaaggctacaattgaagatatagaggatctctcatttgataacgagtcatttgatatcattctgttagaatctgttgctgcctttacaaatctttcctcttcgttaaaggaatgtaaacgggtgctaaaaaagggaggaattatcttagctattgaaacggtaaaagaaccacaaatgacagaacaggatgaacgtttagtttcggaattttatcattttcaatccatccctaatgaattggaatgggtcgaatattggaaaaaggcaggcttttccactgtggtaagtaggcgtgaatataaagtggaaggggaagatgaagagcaaaatattgattttggaacagagtttgatttatctgatgaaatcccttcaaatgcttatgatttacttgataatcatgaaagattaactaaaaagtatcaaaatttattaggatttcgtatatttcgttgtatttactaattttcaagacactcgtccagacatttaggacttccttttcatatcatatcagataaaaagggggttctaataatgagcggcggaaactattatcaactttgtcatcgacaccgtggatgtaccgtaagaattaatgatcgttatggtcgaacgcatcttggacgtattacaagggtaactccaagtcatgtttatatccagcctatgagacgtagaaatggtattggctatggtttttatggtgggggtttttatgggtttggagcaccttatgctgtagcactgggagcaattacaggtcttgcattagcttcattgtttttctggtaaaagtatgaaattaacatcataatgagttttatcagaagaaacagccgctggaattaatcatttcaacggctgttttcatatctaactatgtccaagctccttcagtggtggtgtagaaaaactgacccataaacttaaccgaatgattttggataggttagcttcttctattttgttttacaggacaggctagtaaaataagtgatgcttgttaattgctcttaattacctgtggttagtaaattgattaatcattttatttcatattctttgtgctcgaagttcccgctaggacctacccttttttgaatgaggaaaagcattagggtttaaagaatattataattccagttacaaaaaattttataactcatcttgtaatgccgttataaaaaaggaatacaagaaaatctctaagctttttattctcctgaagaggtggcgttacaattaagtattcaaagacaaacagtaattaagtatggtacgctacaacttttgaaaatgggagttttatattccataaagatgacaaaggtaacagatcttacaccgatacaagcgtttcaaagttcagaagagttacagataaaaaaacgttataactcttgaaacgtccgggaaaggcctaataccaacatataataaagtttttataactctatgcgctacagaaatatctactggaaatgagcattataataacggtgtaaacgaaaaattaaatgggcatgggctcaatttaaacttttagaacatgtagagaacatcagaaagagagtaaggaggaaatgctgcccattgcgttagataaagtagcagttgctaaacaagatgagcaaaaaatcgttgtaaaggtgagcgagcttattaacaaaataaaaagcaacctccagtcgtcagtagaggttgcctttagaacatcatcattatggaattatatattaatatctttttccaaaaaaagctatctctgttgggatattgcatatgtataaaaagctgcctaaagaagaaacaaggccccatctagaacccaagaaggttctttttggtgatgtgttccgaaatgagacattatgttaactaaagatgtataccatatacagggtgaaaacagaaaaaactactggctcatccggcgccaatagcttttttgctaaggaagaaaattagttgtagatgtctcacggcttctagagtagtttgctctaattatttttgttttattcatgtggacaattcactaaaagtaagctaatgaatataatttatttggtagataatataatcatccttttaagttcct

SEQ ID NO: 63 - DNA, 20964 bp, Priestia aryabhattai
  source 1..20964: mol_type = genomic DNA
atatagaattaatgttataccttctttagataaatagatattttctatttatccagcatttactgttttcactttgacgtttgcttgtataaaaaggtggttcttaagatacataaatgaaaatttatcatttactatttaacttcggattgaaataattttctgaattttagattaaattagtttaaaaaggttaaattatccactcatctcttatatactaaaaatagaaagttactcaacgtatataggggagtgatccaatgtcaagtgtaaaaaagctgtatatattcattgtggaacgaaaatgggtgtttttaaacccgaagaaatcacaaaattcagctacatgcattccagaggattttttgcttgcccaggttgtggtgtaaaagtctttcataaacgtcaaaatggacacccaacatttgttgtcacgtctactaataatcatgaatataactgtctttatagagaatagaaaaaactcataaaaaagtagccttcgctcaacgggagcaaaggcttttttagactaagggatttggaaatactttattagcttataaatgtgaaacaatcaattcgcagtttccacttatctcaaaatttcttgtttttgcaggaaggataaagtgtctacctttataaaatgaatattctccttcttctcccctaagagttccgtttccgtctattacactacacaacataaaaggtttatccattgttaaagatgctttcccatttattccccatttacaaacagagaaaaatttattttttacaaaagtagtaattagtaaatctttatattttgttacaaagggtttattatctacatctatatgaggaactatagtaacatctatagcctttttaagatgtaattcacgtttttttccattcttatctcttctttcataatcataaacgcgatatgtagtatcagaactttgttgtgtttcaagtacaattgttccttcacatagggcatgaatcgtgccactaggcacatagaagaagtcacccggtttcaccttaattcgacgaagtaacttatcccaatccttgttttcaatcattttagtgaacccttcttttgttttagcattatgaccgtatatcacctcagctccttccttacaatcgatgatataccaacactctgttttacctaactccccgttttcatatagatttgcataagcgtcatcgggatgtacctgtacagacagatcttgattagcatctaaaatttttgttaaaagtggaaaagtaactcctccatagtaaccaaaaacttctgggtgattcctccaaacctcatttaaggtctttccagaaaacggaccattttcaacaatagacggtccatttaaatgtgctgaaattgcccaacattcacctgttctattatgaggaattttgtatgcaaatttagtttctaatccctttccaccccaaattctctcctgaaaaactggctttaaaaacaatggctgcaccattacaataccccctttgttctttcatttttgtttttcgggttgtgtctcgtaagcttttctccctagaagcaaggctcctgtgattcctgcaaggtcccctaaccctgcaggaacaatgtatttttctatttcatcagaaagttgcggaatttcgatgtatttatttagcaacttctttacatctctataaataagaggaaacaactgtttttgcttcatcacgcctccacccaaaataattttcttgggtgacaaaataagaatatagtgtaccaaagcttgtgcaagatagtaagattccatctcccatacttctggacgatttactaattcaatccctgtttttccccatctttcttcaatagcaggccctgcagcaagtccttcaagacaatctctatgataaggacatttccctggataattatcatttaaatgacgtctaacaataacatggcccatctcaggatgtgaaagcccttgaagaagttttcctcctaacacagctcccgcgcctatacctgttcctaccgtaatatataaacaactatcaagatcttttgcagctccaaatgttacttctcctaaagctgcagcattcacatctgtactaaaccctattggtatattaaatgattcttcaagtgtctttaaaataggataacctctccaactgagcttgggtgttgaagtaatatgcccataggtaatgctttcaaaattcacgtcacaaggaccgaatgatcctaaacctatggctcttaaattaaatcgactaaagaattcaatgacttgctccatcgtctcctggggtgtagttgtaggaaaatggactttttcaaaaatttgtccattattatcacccacagcgcatacaaactttgttccccctgcttcaattgcaccaaaaatcatactaagcctcccaaattttatttatagtgaaaatacaataaagaataattgttgtccttactgaccaaatataactattcataaagttattgtagggattaattttttatagatttaattagaaaaattaatggcatcaagtttaggaaaagacttgatgccatttttaacactatctaacgatatttgaatttgtgaatatatcactgctgtcatcgctgtttgatgagaattctgatataactgctccttcaggtccagctttaaaccaatgatttgtatcagccgggatagtatattggtcacctggataaagaataatttcttttctagctgtatagtattcagcatgttttgttggaggctctactgaaatttggctctcctcgtttccttctatatagaggtatactgttccaaatcggcacctgaatgtttcttgtttcccatcttgaccattacttctccgaggatggcgatgttcagggcaagtttgatttggcagcataaccagttctttagcacaatatcgttcattatttatatagactactagttgtagtccttcttcataaagattttctaaaccaaaatctgttatttctatagtttcgttttcttcttcattcaaaactatacctaccttatcaagataagttagcacttggaatttgacgttgttcatgtcttgctcctccatataaatctgcctttccatcagaattaaagagacgcattttataattaataacctttcgagcttctataatacactctggataaattacatttgggtcccataactctgtagtacttaaaatttcacgagcttttttgaaataagcaaatttcatatcactagaaatattaattttacttactcctaattttattgattgaacaatttcactatctggattagcagatccaccatgaagaaccaatggaacttcaacaagattatttatttctttcaagatgtccatttgcaattctggctttacatcttttggatatataccatgagctgtaccaattgcgacagctaatgtatcaacacctgttcgttttataaagtcttctgcttgaagtggatccgtgtaagtaactgttgaaactcccccttcaatcgagtttcctgtttgacctatagtaccaagttctccctccacagaaactcctactgcatgggcaatttccactgcttttttagttaattgtacattttcttcgtagggtaacattgatccatcaatcattactgaagtgaagccacagttaattgctctcattacatcttcaactgatcctccgtggtctaaatgaagtacaaatggtactttacttacataagcacggtgctttacataagagaaaaattcatcagttaagaagtctacttcagtaggatgaatagcaattatagcaggtgaatttaaattttctgcttcttcaacgacagctcttaaaaaagaactgtctgcaacattaaatgctcctactgcaaatttattttcttttgctactgtaagtaactctttcattgttatcaacataattaaatacatcccctttagttttaattagcttttcctgtggatcctgataaattaatataatgtaatattgcctctttacacgccttttccatgttcatcagtaaatcaaataaatctaattctggatttgttgttaacaaattaattaaacatttttccccggctttgaatatatctgccccgatattaattttattaatgccgtaattgacagcttttctaatattgtcatcacctgcaccacttccaccatgaagaaccagtggtttgttagtttttcgcttaatttcttttagtaaatcaaaatcaagatttggtatcacatcgtccttatacaacccatgggcagtcccaaatgaaatggctagggcatcaacaccagtctcttcaaaaaaagatgctgtttcattcaagttggtaaaggattttcggaatgattccgaattatagtggttagcatctccaacgtgtccaagttcaccttcaacacttaaattggtggtagaagccattttaactacttcttttgttttacgaacattttcttcatatgaataatctgatgcatcaatcattaaagatgaaaaaccatgtctaaatgccgaagcaattaatttaaaatcctttccatgatcaagatttaatgcgactggtatactagattgttctgccaatgttttaaccaaaggtaccataagttctgccttagcatgtgtaaccatatgctcttgaacaacattgagaataataggcgccttggtatcttctgctgctgatattgctgctcttgctgtctcgagattaaaacagttaatagctaaaattgcataataaccttcgtttgcatcttctagcatttttttcattgaaacatacatgagactatcacccctattactctactgtaaatacaatatcatcatatgatacattagtatcttcagtgtcatcgaattcttcatcgacctcagttactgcctttttcattaatgataatgtaacgccacaaatgacagatccaatgagcagtgccagacagaaaagccatggatgcgtaaacaatgggaccacaaataatccaccatgagggactggagcttccactccccacaccataataagacctccagcaatagctgaaccaattacacaagagcaaacgacgcgtactaaatctcttgccgcaatgggaatcacaccttctgtaatcatacagatacccattggaaatgctgcttttaatgcttctttttctgattttgtatatttatttttggtcaataaataagaaattgtgataccaaatggaggaataattgaacctacaaatttcacagcctccggtccataaattccgttaaccaacattccatccgcaaacaaagacatcgttttattaactggtccaccgaaatcaaaggttgccatagttcccaaaatagctcccatagcaaatttcgatccaccttgcatagattcaagcatgtgtgttaggccattttgtaaccatactattggttgcccgataaagagaaacatacttaatccacaaattaatgtcgttaatactggaataactagaattggcattaatccttgcatagatcttggtaattttacgtactttttaatccctagaacaacatagccaaccaaaaatcctcccaccataccaccgataaagcccgcattaatctgtgtacagacaaaaccgataatcagccctggggcaataccgggtcgatctgagattgaataagcaatggctgcgcagataagagggactattagactcattccccagccaccaatttgattaatcatatatggaatagaaccagtttcttttccaacattcggaccacctaaaatttgccctagtgcaatacaaagaccagctgcaacgattagaggtatcatataagaaataccagtcaacaaatgtttttttattgttgaacctacatttttctttttagcgcccatgtttccccctccacattaaggtgacttagttagctatattcaatgattgctccactttttcaataaatttaatcggtgatttaataacggtttctgttttgactctaacaatccgtttacccttaaatctatcttctccaccgattttaatatcagttgccaggattacaacatctgccgcagcaatttcttcaaatgtcaattcatcctctgttccaattgttccttgagtttcaactttcacttcatgaccacgtgctttagctccctttattaatttctccttggcaatataagtgtgagcaattcccgccgtgcatgcagcaacaccaacaattctcataaataagacccccatttattgtttaggttatatagaatttggatgcttaaaaccagagattcactttatagtggctaagcactttgacgttgatcaaacagattaataattttagttggatcctcctcagtcaataaaaagttaaccgtatcttcatcagcaagcgcgctagctacttgggatagtagtttgacatgtgtagtagtctgatcaactagcctaacagcaaacaaaataatacagtgaacaggttttccatctagggtttcccaatcaatctcatttttagtgcgtccaatagccaacgatgtctttaatacagcttccgattttccatgaggaatagcaatatgattttctaatccagtgggtccagcttcctctcttaaatacacatctttaataaattcttcttttgaggctagtgcaccatcgttttctagtagctgtgcaagttcccataatgcttcatcttttgtttttgctttgagatgtagatcaattcgattttcattgataattttaataatatccatgagaaatgctccttccaatctatttaaattaatacttcttctaattcaagaagagtctttacttgtgttaatctttcaaacaattctttatgagtagctaaagaaaatacctctactaataggtcattcaacattatttcactttcgaaagcgataataatctctaatctgtcctcttcgagtgttaaaccttttgtaatattaataccaacagctggctgcttaactacttttgaatttaaaagaaaaacagaaagctggctacttactttaacctctgaaacaattttttcatcaggcaatttcttattaagggtagtctcatctatcattttatttagtatcttatcgaagtgattttctttttctaattcttctaatcctataaatagatagtttggacataaatatttcttaagtaatggaaatgaaagactatccatttctttctttagcccatcttcagcaaacttttctttaatatgcttaatatcactttcattaagtaatgttgatacataggctacgggaaggctattttggtgaagtttaacggttgaaataattaaatcaatatcagctaaatccagagaacgatttaaccagcttgcggatactacatcaacaatctcccattcaggaaacgaacgatttatacgattctttaacaaatgagaggttcctattcctgttgagcaaactagaattactcgtttctttttaatctttttttcaatcgccacttgaaaatgtagtaataagtaactgatttcatcttgactgatttcatttaattgatgagctcgcataatagggatcattccaagacttactgcaacaaatacgaaaggatattccttgtagagttcctctaaaagaggattcctaatcgtaatctggtattttacgcgattcagcataggctttaaatggatgattaatccttcataaagctccttatcacctgtcaaatccatcttcataatattggaaacagctttgattaattcttcagctattacccttgattctggatttaccctacttaataagttcgtagtttcgaaatttaatgatgtaacacatacaccagaagaaataaggtattgataaataaaataaatttcctctttaggtagtaccagttcaaactgttttgtaatttcatctgccatttcttttgatatggcgtacaccttttgatccattatggctaaattgtaagttatatcttcttggtaaacgatgcttcctttctttatgcgtttaatacaaattagtaaatgagtaaacatattaatgtaatatggatcgccgattaaatatcccaatcgagattctgtttcatctagaattcgtttaataatccctacattttgctgtccaaactgatttactaactcgcataatgtggtttgctcgattctaaaatcaatttctttctccatttctgattcttcattaattagttcgtttatgagatgtatcatcgctttgcgaatatctccttcacgtcctattaatcgagttccatttttgttcttttctaactgcaagttaaaaggttgtatccattcttcaattattttcaaatcatttacaattgatgctttaccaataaaatatgtttctgaaagtttgttaatagaagtttccgtaggagaatcatatagcaaattggttaaaatcttcattcttcttgcctcaactgacaaactagggactacttttttattcagcgaaagaaattctacgttgagttttatcatttgatcctttgttaaatctagtaatatacctacacctggtcttttttttaaataaatgccttcagactttaaatctttctctagtatttttaaatctctgtatattgttttttctgataaatgcatttgtctagctatttcttttaccggtacataatttatctgacccaatagataattgaatatttgattacctctatttgataacgctttcatttaggaacgcctcctatccttccttaaatcaaataatatcaccatctgaataattggaaaatatcaaactgtgtccacattattaaagacattttattatactaaatagtccacgaatacatctggacattattaagatagacgtattctatatacaatacttatgtttaatttattaataaaaggcttaaagtactaagctagattggaatttgaaaagaatatgtcttttttgaatatgtttctgtcttcttatttaataatcaagacgttaaacaaaaagaaactgtgaggcatcaaaatgacttttcttcactgtttatcatccaaaatatagaaacagaaggcaaccacctaatccgcgagtagttgtcttctgttttttctggtatagcttatatgcaattctagttaccataatcaaagttctcggaaggccaaagcttctctaactaccatcctactaccctattgtaggtatggacacgtatggtatgtgactcaatcaacaataaacaaattagccgttcattacatcgatatgatttttcactcgtataaattatactgttttaattgctactgtgttatttcctgacgtatgactagtattatcttgtgctctgtaaacaggtttttttaacactccaattatacaagccgtaataattgaaccaattaaaatacatgcaatgtatagcaatggactgcttgcagcaataggaattacaaagattccaccatggggagcctgtaaagaaattcctaatgccatacaaatccctccaccaatcgctgaaccaacaatatttgctggaattattcttaatggatcacttgcagcaaacggaattgctgcttcagtgataaaagatgcccccataatataagctgcttttcctgcgttgcgttcttcaagtgagaatttacttttaaatagtgttgttgctaatgcaatccctaatggaggaaccatccctccaaccattagtgcagcagatggttcgtaaatatgatttgcaaacatcgctaaaccaaatgctgatgctgtcttattgatagggccacccatatcagacgccatcattcctgccaaaagcgcccctaataaaatcgcattcgaaccagttaaaccatttaaccaaccttgtaacgactcattaatccacgccataggactattaattacaaagtgcataataaaggctgttgcaaacgtagctaatagaggaagtataagtaccggtaaaagactttgcaatgaatctggaatgccttttaataattttttcaatcctaagattgtataaccagcaataaaaccagcaatcataccacctaaaaatcctgaaccaccaagggttgccatcataccaccaatcatacctggtgctaaacctggacgatctgcaacactatatgcaatatatcctgctagtactggaaccattagcgcgaaggccgcactaccacctgctgtacctagaaaagcagcgaatgcattatattcagagctttttgggtcagaagcatgaatgccaaacataaaggagattgctattaatataccgccagctacaacaaacggaatcataaaagataccccattcattatatggctgtatattttaggttgttttaatcgtgttttttcttttgcttcctttaacttggtgtcttcctgatttaaagccttcccttttccagaaatagcatcttcaattaaatcctttgcatgatgtatcccatttttaacagacgtttttataacctttcgattaccgaagacatccatgtccactttaacatctgcagcaacaattatgccatctgcttcaagaatatcttcctcagttaatctgttctgtatacctgtcgatccattggtttgaacttttatttgaacgccaagctcctcagcagcattttttaatgcttctgcagccataaaagtatgtgctattccagtaggacatccagtaactccgaccaatttcttgccaaaatacttcttatcattcgtatctacttgtatcattttttcttcagcatttataaatagttggacaacttcatgactatctttggcaagaataagcttagctctaaaggtttcttccattagaaaagtggagattttagataaagtctttaagtgctcagttgaagaatctttaccggctgctatcatgaaaaataaattacatttttctgaactatacttaattccccttaaggatcttcccataataatagcaggagatttaactgcagcagattttgcatgtggaattgcaataccaaaccctacttctgttggaacctgatcttcacgagcccaaatatcctgtttaaattgttcaagatcatgtaaataaccgtttttatttaatttttctgcaagctcattaattaagtcctctttcgtttcagcagctagatctaatattatattttcttgccttaagacactagaagtctccatatatgatccctcctcttaaatttcccctaatttatagagtgatgctttacccgttgaaccaaacagatccatttttttctttactaattcaatagctaccctcgttgcttcaggcattaatagatctggttcataagcatcgggattttcatccagcgtagctcttaattgattataaaacgctctcttcatatctgttgataagttaattttagcaatgccatgtttcacagcttctcttatttcctcatctggattgtctgatccaccgtgaagaactaaaggaatgtttactttttcatgaatcttcattaatcgatcaattttaatagaatgatctttcgtttttggatataagccgtgtgaagttccaacagcaacagcaagggtatcaatccctgttttttcaacgaaaatagctgcttcatcaggatccgtatataaaatctcgtctgctccgccttctgaactaccctcattacttccaatagtacctagttcaccttctacagacacacctactatatgagcaagttctactgctttttttgttaatgccatattttcttcaaacggtaaatgtgacgcatccatcatcacagacgtatagccatttctaatagatcgagtaatatcttcaattgttgccccatgatccaaatgaattacaaaaggaactttagactttgacgctgcctctcgtacatatgccacaaattcatctgttactagattaatttcattcgggtgaatttgaagtatagctggggatttttgctcctctgcagcacttattacaacttttacaaattcgctattcgccacattaaatgatccaactgcaaatttattctcataagctacttgaagtaaatctctcatattaactaacatttctattcctcctaatattatttggaagaccaaacttccaaaaattcatcataattagcaacattcaataatttttctgtcatatttgtttgcttaaacacatcatgaatctcttcaaagaactttgtattatttaccctttgattttttggagggataaatagaaagataatttgagccattttatctccccacaaaattctttgtttatttattgctactaacactcgtaatttttcattatttccacaatcaaatggatgcggcatcgcaactaaatttccaatattggtactcgacatcttttctctttcattaatgcttgtatacagatgttgaatgcctccaatatttgtaagggttttcaataagcctttttgagtctcttcatctaagaaataaagatcattcggtgataaatagtatttcagtaaaccacgatttaattgaatagaaatggtcttcatatcttcgtttgtaatcatttcactaacacgaatacaatttttcacgtttagatgctgctcatcaaagatttcactagtagttactatagtttctatcccttcaggaagtaaatgcatttcataatttgcaaataaaccatcaaccttaatatttgggaagtataaatttatttttctttctaatagcttacctactaaaggatttttcccataaattattgcaattctttttcttgtttcttgcgaattttcgataatattcatgatatgtagtgttaagtaaccaatttcattttctggtatctttatatttaagcaaaattgtaattctttagctaaaaccactgcaatattataagcattcatatattccgactttatttgagaaataaatggattctctacaggaaagtaatattttaatggatataatgattttgtaatatgtaccaataatccattaaataacttttcattctttcgatttgaaaaaccatatcgggcccaaactttttttataaccgattttactttttcctttatttcatccgagtcttcttgctcaattatttcatctttctttggtaatatttgcaaaacaattaataggtagcataaatactggtattcatattcatcaaactgtacattcatttccttagctaaacgagtaaggattaatttcgctatttttaattcttcaaagctagtattatctaacctcatgtctttttcagcaattttttgattaagacctactcgttttaaactaataattatgttcacacatattgagaataattcttgagagcttagtaataaattatacttagtgacttcttcttcaatacaagaatatactaattgaattgaggactgactaaaccaatcatcaaaatagtattgcagagcttcatcaagagacatcctctttaaacaatttgttgttactaatttttttagtaatagccgtttttctacttcacttcccttaagccttatcccttggaaaataattgcttccacttcaatgtttcgtttttcggcttgtattatttgaaataatttttgtacgtctttcctaattgtttgagtggaaaaataaagtttttttgccaattcatcataagttataaaatcagtttcagataaaagtgtttttattatgtgaaaagctcgttcctcgtaatcatcttcattttgatgaatatttgataaatccccaactaatttataccctttttgagtattaccagtaattatgactttacctaaataactttcatttatttccctaatgtcgtttctaattgttcttgtcgttacattaaatagattagcaagttcccttccattcacaaaatcatttactgactgttctaaatattccaatattttaatgtaacgctttttcattagtattgcctcctcactttttatattaatgtaagcgcttcacactcaccaagtctatactttttcctaatagttaggaaggtttttaatattagaatgaacgtaaataataaattacatagcttcttttttctggtattcaatccattgagtccaaggtgacttgtatattaattattcttctgacagtacatttaaaattgggataaggtgatgtgatttaacataaggcatgttagtggactttgaaataaaagtttcgtgagttgaatcaatttcacatgtataatttgaaagcatcaacgcctttgaggctttagcagcatttcgtatccattgttttctgccacctttattaactattggatccggtcgatctttcttcttctcttcctcatagatatcttgtgggtttttagagacaacagatttctgaactgctaattgatactcttcttcactagtcccatcttctagatataacccatcttcatgtaataatatgtaatcattaaactgttctatagaccggttaccaatgagccctaccacttccctataagtcagtagcaaaccttgtaaatcattaatgatttcctctgcacctggtaaattatcaatgtcataataacgtccgcaaatgtgccctagctcatatcctttagcaaggttatgaggcacaggattaagtttatccctaacaatagaagctgtttttcgaattttttctctacctatctttgttccatacttatctttaaaataagtccatccctggtttaaactaatgtacagaccacttccatcggcgctaaacaaataaacaatatagtaacctcttgtagctgaagtagttaaatcttttaaaaagacacagagccatggtatctccgcccaccgacttattccaactgtgacctagctacataataggtatcagaatttagaccagtctccttgatcagaacttcttttattttactccgcaagatctgtcccataggatgccctttaaaattttcagttttttcttgctgatactcagttactatattgcgaatatgtaattcaaagttactaataacagtaccttgagtgcctgtattgacttcacttctattcaacttcaattcctccatttctaatgatattagcttaacatgtaaagagcatttgaatactatcaaagactggctttaatttaaaatctttattttttagtttaaggacccttataaaaaacagatttaaaaagaacagacaatcaaaagatagtctgttcttaaaagtgtattatgcacacttgtaaagatgaaaatctgttcttacgtatacagaaagaacagattttcaaaagcgataaatttatcaccttattgatcacacccaatgccatcgccatctctatcaaggtgttttgcataacctggctggccttcataaacaggtgcagctccagctgcccttgctgcagtacagttttcgtaataaacatttgtattagttactgaggtttgtttatcttcttgctcttttgcaagagctgccgcctcttcttccttacgcttctcttcggctaatttctgagcttcctcttccttacgcttctcttcagctagcttctgagcttcctcttccttacgcttctcttcagctagcttctgagcttcctcttccttgcgcttctcttcagctaatttcttggcttcctcttccttgcgcttctcttcggctaatttcttggcttccttctctttgcgcttttcttcggctaatttcttggcttccttctctttgcgcttttcttcggctaatttcttggcttccttttctttgcgcttttcttcggctaatttctgagctttcttttctctagctaatttctgggtttctgcacttaatttctctttttctttatttagcttcttaatatcttcttctaatttacttttcttctcagctagttgtgtaatttctgatcttgtctcagagctttcacattttgtaacagcagacttttctgcagaaattggttcttctacagtaaagaaaatagctagtaacaagaaagcaataaatgagaaagaatagtaataaacagctttctttcttgttttatattcggcttttggtaagactattgaaggctttataagaccaattataagagctaatatgctaagtaaaaaacctattattcctatactcatgaatacattaaacgtagaagttggtagaatggttcgaaataataataaaaacaataagatatatacaatagaggcgataaacattttcgaacttgttcctgaacgatatcctaaaattctaattttctttggtctatcccctgtgttacgagtattgaatggcaattgtgtatgcttcctctctaaaattagtaaactttcttattaaaaccaatccataatcttgaagacttttatttaactacttaacaaaaaaatgaaataaatgggaccaaacgagttaattatatggctacgcttcttatacttcaattgcattttttaatattttttaaattcctttaataagggaaaatttactcctatttatatattatggagaataaaaaatgaattcatttactttaaatatgtcaacacagcaacattctttaaacagtacatttcatgaccatttaccttccctttgtaacatgttctgacatatatcgagacttttttcatcataataagtaaaaatattgaaaaaacttgtataactaagggcttaattgttataaaattaatttgttattacgtaagaatataacggggggaacatgatgaaaaaagtattggcagcaatattaatttttgcattctcactaacaggttacacagtgagtgcacaagcagtagcaaacgacaaggattgtggagatttcagcgacaatcaagcagtaatgaatttctggtacagcaatggttacagcgcgactaatgatcctcatgatttagacagagataacgatgggcttccatgtgaagtatctaaaagtgattataatagttttgtagcatcaaaaactgatgatacaaacaaatcagatgagtctacttctgatgaagcaacaaaagaagaaagtacatctaattcttctacgactgaagaacaacaaacaacaacaaaaaatagcagttcagaaaaagcttctattgaacaaaaagaagattcaaagcaacaaggtgaagagttacctaaaacagcaacgaattctgtgacgatgatggttgtagcgtttggattagttgcagctggtctattacttgtgtttcgtagaaagaacgttaaagcatgatttaaaacggcagggttaaacctgtcgtttttgattggttatttttggggtgatttgatttgagaaaatggattggactgagtttaatcgcaataggtttgataataggaatatattattacctagattggaataaaggtcgttcatcagccgaggaattaacaaacaaagagctaaagcattatgaggaaaatgctgatcaaaaaacaatacctcagaagaaggtaactccaacacaaacaccagcttctcaagtccaacatgaagcaggtgaacatgtcgcaaaccttattattccagcaattaaaaagaagtattccgtttattggggtgccgacgaagatgttttaaaaaaaggtgttgggatgtttgtaagtgacctcactacaactccatctggaaatggacataccgtattgagtggtcatagagatactgtatttactggacttggtgcgttaaaagaaggtgatcaacttcttgtagaatatgaagaccatacttatacctataagattaagaaaacatggatcactgatgcagaagatcgtacagttattgtaaagaaagaaaagtcagttcttactctaacaacttgttatccttttgattatattggtcatgcacctgacagatatataattcaagctgagttaatataaaagaaaatgactgaaatgtagatataaatttattttgaagaacatagtatagcaatatttattgtaaacatatcattggaaggtggaaaacaagtgaaaagtcgtattatcaaagtcgtttcatcattagctataggattgggaattgttctatcccctgcctcatcatatgctgcgtctccaaaaagtatcaaagtacattacattgacgttggccagggagatagtatctatattaaagctcccaatggtgaagatattgtcattgatggtggaaacaaaggaaaaggcaacgcagtcgttagctatttaaagaaacaaaaagtcgacgatattgaagtattaatctctactcatcccgatgcagatcatattggtggattagatgaagtaataaatgcattcaaagttgaaaacgtctatgcacctaaagtaagcaatacaactcaagcatataaagactttttaaatgctgttaaaaagaaaaagttaacgattaaaacggcacaggcaggcataaagttacccgttaaagatgtaaatgctcaaattgtaggacctgtaaaaacgtatgctacaagtgacttgaatgattggagcgctgttgtacacatagcttacaagaaaaatacattcttatttactggtgatgcagaggccaaagcagaagcagatatgattaaggcaaagaaaacattgcgtgcagatgtgttaaaagtcggtcatcatggggctaaaacttccacaagtaagaatttcttaaatgttgtaaaacctaaatatgctgttatcagtgtaggtaaaaacagttacgggcaccctacgtctcaggttgttaacttgctaaaaggtgctaaagcaagtattctacgtacagaccaaagtggtaccattatcattactggaaatggaacatcctattctgttaaaaagtcgaggtaattatgaagaagataaaaggcattattgaccgatttgaagagggatttgccgttgtggaaattgaaggagttacgaaagactaccctaagattatatttcctaaagaagcagaagttggagatgtcgtttacattacaggagataaagtgacgatcgataaaaatgaaacgaaaaagcttgagaaagaaatcaaagatttgatgaatgaagtatgggaagattaacatcaaagaacttctatgtaagtagttatctaaaggcccccgacctagtcagtggcctttatatttattttgaaaagatgatttacatatgtattatcgtttatgtggcttggaagacttttccaaaagttgttttccagctttcattgtatgaccacataaaggacacttctgcttatcctcatacgagaaattttttctcatccaccctatacaagcctctgattcgcattcccaaacctctatttcttctttaggtaagggatcctgattttttttagaatacataataatatcactcctcttattaatcctcttatatagtattgccataaataaaggaagtaatagagactttacgttttcaattcttcgctactatacagcaactgtcgactgcatttaattcttcctttcaaaatagttcaaggatacaatatatataattaatcaataggctgtccaatgcagatagtcccataaggtacacctttttagactttaaaaaccctaacaataaagtgtctatttaactcataaaataaaccttattgtacgtataaaaagtaattaatctttttatacatttttttacttctccctttctaatataataagaccctaccaattaacaaattgggagggctctctataattctagtattactttatttctttaagggctttaaatttatacgtgctatttccttatgattccttattataaccaaggtaccttctaatgctttttgtcttaatttctctaatttatctttgctaggtactagaggcatttgactgttcttaacagttgtccctagatcataattgagatctagacttgcttcaccacttttattaaagtctccaatccctatacctttccctagccccccagcacgctcatcatcactgtaaacattgaagcctaagatatccttagaagtagatttcaactccttgtttggtattatttttacgtcaatgttatcttcaccagcataatacattttcttattgcctgtttgttttatcttaaatttataatacaagctagtggggacaagctctaatgacttacctttttcccttattattgtagatcctacaatatgtttgtcattgaccaaagtaacttttacctcagtaatttcaaatggcgcttttttgtttgtttgctgatttgttgtttctctttcatttttgattacacctgagctttctttgtgtgaacaagctccagtaagtagtaaggaaacacttataagagcaattccagcaatctttttcataattttccccctaaactaaaaaagtactgctctctatgtatatagctaactaataaaagtatgggtgttaatcatttttatttacagatttaagatcatagcgacttatttctttatgctttcttgtaacaacaagagttaccttcaaaacaccttctttgaagttatttatcttttccttttcatgtaaaaaagttcttaatctattagcagatataagtcgttaatgcttaaattaaaaagaatcaattccattccccaatctaaatgataaattcctttttactcccaaggtttttttaatacttaaataaatctatggattagctttatccaacctaagtaagagattcctaaaataaaagcccaaagaaatgctatacgaatatttctaggtatagaaatccatagctttaaca

SEQ ID NO: 64 - DNA, 20666 bp, Priestia aryabhattai
  source 1..20666: mol_type = genomic DNA
actaaaaaatattagtcaacattttttagcacatatgatataatacccttttttcttttctactacttctacttcattaaatagagattctaatttcgcaagagcagatggcgcaccttgctttttctgaatcacaatccaaagttctccttggtcagcaaggtaatctaatgatttttctaggatttcatgaacaacttttttacccgcacggatcggcggattactaagaatagctgcaaaattcgtttccttcacattttcatagcaagagctttgatagattgaaacatttgatactgaattagcttcagcatttttttgagctagtgctaatgcacgttcattaacatcaaccatatgaacgtttctttggctgtcctcttttgcaagcgccaacccaattggaccatatccgcatccaacatccagaagcgggccgggactctcgggcatttgaaacgtttcaattaacaggcgcgatccaaaatcgacctctttttttgaaaaaacaccgcggtcactcgtaaatgaaaaagaggttcctctcaattcaaatgaaaagcgctcttcattacttgcagacaatggtgtattagaaaaataatgttctgtcaaaatagaacctcctaatcaatatgttcttctttactataaatgaaaaggatgacagaagcaaaaaagctcgcttgtacaagcgagcttttttatatcagttgttaagcaataattacttaacttctacagaagcgccaacttcttcaagtttagcttttgcttcttcagcttcttctttagaaataccttctttaagagcttttggagcgttatcaacgatttctttagcttcttttaagccaagaccagtgatttcacgtactactttgataactttgattttttgtccgccagcactttcaagtactaggtcaaattcagttttctcagcagcagcttcaccagcagcaccgccagctacagctacaggagcagcagcagttacgccaaattcttcttcgattgcttttactaaatcgttaagttctaaaacagtcatatttttaactgcttcaatgatttgttcttgagtcattgttaatttcctccttgtgattgtgttatatataacagactagattatgcaccttgttcttctttttgatctgccacagcttttgtagcaagagcaaggttgcgaattggagcttgaagcacgctaagcaacatagaaagtaagccttcgcgagatggtagttctgcaagtgctttaatttcttcaacagatgcaacattaccttcaattacaccagctttaatttctaacgcttcgtgttctttcgcgaagttgtttagaattttagctggagcaacaacatcttctccaccaaatgcgattgcatttggacctactaacgcatcattaagatctgttagttcaagtttttctacagcacggcgagttaaagtgtttttgtaaactttgaactcaatgcctgcttcacgtaattgcttacgaagttcagtaacttcagcaacattcaaaccacggtagtcaacgacaactattgagttactcgcttgaagtttttcagcaatttcgtctacgacttgtttcttttgttcaattacgttgctcatctttacacctcctgtagatttccttccgtacactcagacaaggtgcaataaaaaacctccatgacaataaagacatggaggtgtagtaagcgaaccataacgtttcactaatttatctcacacacctcggtaggaaattaagctttgcagcacctactgtctacggtacaaatgttattctttttaacaacattatctattataatcagggactttcaaaaagtcaacaccgatttatttccaaatttattaagcagagaatgaagcagtatcaactttgataccagggcccattgttgaagtaacagctacgttcttcatgtatgtgccttttgctgctgccggcttagcttttaccatagtttcgaagattgtagtgaagttttcaactaacttgctctcttcgaaagatactttaccgattggtacgtggatgttaccagctttatcaacacggtattctactttaccagctttgatttcgttaactgctttttgaacatcaaatgttactgtaccagttttagggtttggcattaaacctttaggtcctaatacacgaccaagtttaccaacttcacccatcatgtctggagtagctacgattacatcgaactcgaaccaaccttgttggattttgttgatgtagtcagcatcgccaacgtagtcagcgcctgcagcttcagcttctttagctttttcgcctttagcgaatactaatacacgttgagttttacctgtaccgtttggtagtactactgcaccacgaatttgttggtcagctttcttagggtcaactcctaaacggaatgctacttctacagttgcatcaaatttagttgtgtttgttttctttactaattcaatcgcttcttgtactgaataagtttgtgtacgatctacaagcttagcagcttcaacgtactttttaccttttttagccatttttgtttcctccttatgtggttttaacggaataacctcccactaataaaggttgcgagcataggaaaacttccatttctcgcaaccttctaacacccaatcaaatggaattagtcttcaactacgattcccatactgcgcgctgtaccttctaccatgcgcattgcagattcaacgctagcagcgtttaagtcaggcattttagtttcagcaatctcacgcactttgtcacgcttgactgttgcaactttattacggtttggttcaccagaaccagactcaataccagccgctttcttaagtagtacagcagcaggtggagttttcgtaataaatgtaaatgaacggtcttcaaataccgtgatttcaacaggaatgataagaccagcttgatcagctgtgcgagcgttaaactccttacagaaacccatgatgttaacaccggcttgacctaatgcaggaccaactggtggcgctggatttgctttacctgcaggaatttgtaacttaacaagtttaattacttttttagccacgagacacacctccttaagtccgtgatgtggtaatagggcgatgccctcccactcaatgttctttatatataaaataaagaaatagttgttttagtctctagttttgagacatactgacttatgaaatattaacattaaacttcatgaattgcaaggtcttacagattatattttttcaatttgtgtaaagtctagctctactggcgtttgtcttccgaacatatccacatgaaccttaactttacgtttatctgtatcgatttcttcaatggtaccttcgaagtttgcaaacggaccttcttgaaccaatactgtttcttttagttcaaagtcaaagtcagcatgcttctcgtccatgcccatttgttttaagatcatttctacttcttctggtagaagagcagttggctttgatccagaacctgctgaacctacaaagcccgtaacgccaggtgtattacgaactacataccatgaatcatccgtcatgatgatttcaactaacacgtaccctggaaatacttttttctttgtaatcttttctttgttgttcttaatttctctttcttcttcttcaggaacaacaacgcggaaaattttatcttgcatacccattgtttctacgcgcttttctaaatttgtttttactttattttcatatccagaataagtatggactacataccaatttttctccatttctgaggactatacgtccttccctcccagctcactataaaataagatgtcctaatctattgcacagacaacgcactaggaaaatagttgactcctagcacaatcattcttaaagcaaattaaaaaacccgtctccgggcttttctgaaaaaaacataatttagctttattataccatgatttaagtcaatttattcaagggattaaacgaataagtgacgaaattccgtaatcaactactacaaaaaagagtgtcataaatacaactgtagaaataacagtaattgtataacgagttagctcattttttttaggccaacttaccttcttcatctcacgcccaacatcacgcaagaaatttcctacacggttcatgtttgtaacctccaataaattaaaaggggtattagtctgtgcagattattgatctactttgtttcacgatgaatcgtatgtgcgttacacgttttgcaaaacttcttcatttctaaacgctcttcgttttgctgtgtgtttttcatagtcgtatagttacgactagcgcattgcacacacgcaagtacaacttttttacgcataatgtcaaccacctatagagtgataatgtctataaaaaagtatcacagactttcttagcatgtcaatatgaggatagaaggctacattgtgatttcacgaatctcgaggtagcgctctaatttcctcttcacacgctgaagtgcattatcgatggatttgacgtggcggtttaactcttctgaaatctcttgataagattgaccatctaaataaagaacgagaacttttcgctccagatcacttaacagttcagccatctttaattcaatatcatcaaacttctctcgattaatgagcaactcttctggatttgctacttttgtccccgaaataacatccattaaggttcggtcggactcttcatcatatattggcttgtccaatgatacataagagtttaatggaatatgtttttgccttgttgcggttttaatagcggtaataatttgcctggtaatgcaaagttcagcaaaagctttaaacgaagttagcttatcttctctaaaatctctaattgccttatataaccctatcataccttcttgtacaatatcttcacggtctgccccaattaaaaaatatgaccgcgcctttgctcgcacaaagtttttgtatttatgaatcaaatactctaatgcgtcaatatcgcctttatgcacaagatcgacaactgtttcatcctcttgttgttcgaaatgagcatgcagttttctcccataattatcgcccatatcgatccccccgaccgcacagtagatagaaatattatacagtagctaattccgtaccgtcaataacctcaccgctgtccccgacgccatttttcgaaaatttcggctacttgattggaaagttgaatgcgtgccgctggcttttgattttgaatagacttcacatcaagattaatatgtttctcaatttgctcaatttcgttgtacaattctcgagcagaaattctaagcgcaccttgtccaaagattgcccactgctccgtaaaatcagatgtagcaacatgaatctgtgtctttacattgtttagctcttgagccagcttttcaatgtactcatccgctgtttcattttctcttgtaaatacaacgtcaaccttatgattttttgccttcttttcaattccttcgaccatatgagcatcgaagacaataatgacacgataacccatatatgcttgatactctgccatcttttcgattaacaggtctcgagcaccggctaaatcattatctctaagctttcttaggtcgggccacgcacctatcatgttataaccatccaccagtagaatatccattcttattcacctagaggatggcgttttcggtaaacctcatacatgagaagactagctgctacagatgcatttaacgatgtaacatgcccaaccattggaagctgtacaaggaagtcgcatttttcacgaatcaaacgactcatgccttttccttcgcttccaatcactaacgtaagcggcatacctccatctaagttgcggtaatcatcgctttctttcgcatctgttccaacaatccatacgcctcgatcttttaattcatcaatcgtccttgataggtttgttacccttgctacgggaacatgttcaatcgctcctgtagaggccttagctacagtggctgttaatccaactgaacggcgctttggaataataataccgtgtgcgccaacggcatcggctgttcgcataatagaacctaaattatggggatcttcaagctcatctaacagaagaaaaaacggactttcattacgtttttccgctaagttaaataaatcatctaactctgcatactgataagcagcaacttgtgcagctactccttgatgaataccgtctatcatttgctcaattttcttttttggtacaaactgcaccaatacaccattacgttttgctaactgcgtgatttgccccatagaaccgccttgcgatccttcggcaatccatagtttgttaatgtcgcgcccagactttagggcttctaggaccggattacgtccaatgataaattcatgttccatgattcattcctccctctccttcatcgacgaaagagatagctttagtaataagttccatcattctttcttcctcacctaagagatacaaatagcctacgaccgcttcaaatgccgtactgtagcgatacgtttgcacatctgtgtttttagggactgtaccggactttgcattgcgtcctcggcgcagcacaccttcttcttcttcagtaaaaaagttttcatttttaaaataatatacgatttgcgcttgtgcttttgctgatacgtattttttagctttattatgaagcaggttagggcgcactgtccctaacaccagcaggtggcgacgaacatgtaaatcaaacaccgcatcacccatataagcaagagctaagctatttagctgttttacatctaatttactgctgctcataacactattatcctcttttccatcttgttccttgtgccgtatcttctaaaataatatttttagcctttaattcatctcgaatttgatctgctaattggaaattacgatctttacgagcctgaatacgatcttggatcaattgatcaatttcttcgtctagaagttcagcttctccaaacgtaatgcctattgcagcacctaattctttaaattctttaataaaagcttcaattacatctgtagacgttgtttgttctaacaaatacaagttagcttgctttgctagctcgaacagaacagaaatggcatttgccgtattaaaatcatcatccatctcttcaacaaacgtttcacgaagctcttttagcttttcgaaccattctgaagcatcttcttgaagatttgttgctgcctctagacggtgagttaaattgccgtaagctgtttgcagacgctcaaaccctttgcgcgtattctctaaaatttcttcgttatagttaattgggtgacgatagtgaacagataaaataaagaatcgaagtagggaaggatcatgctttttaataatgtcatgaactaacacgaagttccctagtgatttagacatcttttcattatcaatattgatatatccgttatgaagccagtatttcgcaaacgatttcccagtgagcgcttctgattgggcaatttcattttcgtgatgagggaaagctaaatcctgaccgcctgcgtggatatcaattgtatcacctaaatacttgcgtgccatcgcagagcactcgatatgccagcctggtcttccttgaccccaagggctatcccatgcgatctctccatctttggttgctttccaaagagtaaagtctaatggatcttctttcttttctccaacttcgatacgagcaccggattgcaattcatcaatagactgatgtgataattttccgtatccttcaaacttacgtgtacgatagtatacatcaccctctgactcatatgcatatcctttttttaccagttcatcaataaactcaataatgatatccatattttcagttacgcgtggatgcacatcggcatgcttgcatccaagagctgacgtatcttcaaagtaggcatcgataaagcggtttgcgatcgttggaacatcttctcctaactcttttgctgccttaattaatttatcatccacatctgtgaagtttgagacatactctacatcgtaccctctaaattctaaatagcggcgcaccgtatcaaatacgattgcaggacgcgcatttccaatatgaatatagttatacacggttggtccgcacacgtacattttgactttgttttcttccagcggtacaaacatctctttttgacgtgttaacgtgttatatagcttaattgccatggtgaatcttcccttcttttaattcctttaattgattttgcaggtgtaaaatttctttctctagctgtttgaaacgctctgcatctggatctggcaaatcttgatgattcaaatcttttggaatccggacgccattttgaatgacgactcggccagggataccaacaaccgttgagttttctgggacgtcatttaacacaactgagcctgctccaattttggagtgcgcatgaatcgtaatcgaccctagtactttagcacctgttgcaattaagacattgtcttcgatcgtcgggtgacgctttcctttttctttccctgttcctccaagtgttactccttgatacactgttacattatctccaatttcgcacgtttccccaataacaattcccattccgtgatcaataaaaaatcggcggccaattttcgcacccggatgaatttcaatccctgtgaagaatcggctaatttgtgagattacacgtgccagaaaaaaccactttcttttaaaaagcccgtgagctaatctatgtgcccaaatagcatgcaaccccgaataggttaatatcacttcaatataacttcttgctgcaggatcttgttcaaatatggcctcaatgtcttcctttaacaactttagcatcatctcaccccaattccgctattcctctatctactcattgattgtataaaaaaacgcccctatgtcaaatgacacagagacgtatatacgcggttccactctgtttggatcaacaaacgatcccaactcttctctcataacgtgaaagtacccgcttttgcctacttacttagtagcattcaacaaaagactcaaaggcgcacttcaacaagttttgtcataggttactttcagccggtgataaccctctctgatatgcaatgaacttgcctactcttccttctcaacgatatccatatttgattattttatcatatgggcaaaatagaaatttgttaactataaatgctttctaaacgagctaaaactgtttcttttcctaaaagagaaatagcttttggaagctcaggaccgtgtgtttcgcctgttgttgctacacgaattggcataaatagttttttacctttttgacctgttgctttttgtacagcctttgttgctgccttaatttcatcagcgctgaattcttctaaggaagaaatctcttcagcaaatgcttttaacacttccggtacttgctcttcagcaagcactgcttttgcttcttcactgtaatcaatttctttcttaaagaacatttcagtaagttcaacaatctcagcgccaaagctcatttgttcttggtatagagcgactaagtcacgtacccattgttctgtttcagcattgcgcgtttcttcaacttttccagctttcactaagtgaggaactgataaagctactacctcgtctaaatccaattgtttcatgtattggttgttcatccaacgtaatttgcttgtatcaaatagtgctggagattttgataaacgagctgggtcaaaaatttcaatgaactgttctttagagaagatttcttcttctcccacaggtgaccagccaagcattgtaataaaattaaacagtgcttccggcaagtagcctaattctttatattgctcaataaactgaatgattgactcatcacgtttacttagtttacggcgattttcatttacgattaatgtcatatgaccaaatacaggaggcgtccagcctaaagcttcatacacaagaatttgcttcggtgtattagaaatatggtcatctccgcgtagaacatgtgtcatcttcattagataatcatcaattgctacagcgtaattatatgttggtgtaccgtcttttttcacaataacgaagtcaccaatgccttcagactcaaatgatacttcatctttgacaatatcattccatttaatttctgtgttactaggaacacggaagcgaatgcttggctcacggccttctgcttctagttcagcacgctgttcagctgttaagttacggcatttacctgaatagcgcggcatttgactattcgcctgctgttcttcacgctctttttcaagctcttctgacgtacagtaacagtgataagctaatcctttttcaagaagttcttccgtatatttttgatagatttccgtacgttcagactggcggtaaggaccgtactcgccgcctacgtcgatactctcatcccattcaatacctaaccattttaaatagcgcagctgactttcttctccaccttcgatattacgcttttgatctgtatcttcaatacggataataaatttaccgttttgatttcgtgcaaataaataattaaatagtgctgttcttgcattccctatatgaagatgtccagttggactcggggcataacgaactcttacttcgcttgacataactaagatgacctccaatttaatattacttatagtatgtatttatatgttttagacatgttctaattttatcaccaaataggtatctgtcaaagtcaactgtttttatttttgataaactaaaacggctgcttgggcggcaattccttcttcacgtcccgtaaaacctaacttttctgttgttgttgccttgacgttaatttgagaaatgcttgcttctaacagctgcgcaatgcgctctctcattggttcaatgtaaggagccattttaggtttttgcgcgataattgtgcaatctacattgcttaattcatagccttcatcttttagtagtttccatacgtgttgaagaagctttgctgaatcagcatctttaaattcagggtctgtatccggaaaatgctttccgatatctcctttagccgccgctcctaataaggcatctgcgattgtatgcaacagcacatctgcatctgaatggcctaataatcctttttcatacggaatttctaaaccgccgatgattaaaggtcttccttctgcaaattcatgtacgtcgaaaccttgtcctacgcgaatgttcattttcccactccttcagtcctgtttagctttgttaatatggcttctgcatataacaaatcttctggtgttgttagttttatattatcgtaatttccctctacaatcgatactttttgccccgttttttctactaagcttgcatcatcggtgcctaagtattcatttgtttttgctttttcgtgtgcatccattactacatcaaaaagaaaagcctgcggcgtttgaatagcccacaagctagagcgctcaactgtttcaatgacagtaccctggtccacacgcttaattgtgtcttttactggaacagccagcacagcagccttatcactagcagctttttctactaactcatggattgtgttttgttgaacaaatggacgagcgccatcatgaattaataccatctgagcctgctttaaacttttaaggccgttataaacgctatgttgacgttcatcgcctccagctgtcaatgattgaaccttttgaattggatattcgattaataactcttcaaaaatctccacttctttttcgtttacgactagtacaattccactgcaccaaggatcttgttcgaatttttgcagcgtatgaatgataagcggaacgttttgaatagttaaaaattgtttgttccgccccgctttcattcgcttcccctgacctgcagctaacacgataatttcatacttcataggtatactccctttacctgttacgtcacagtgctttttctaacaacttgggtttcgcaaaaatcatacggcctgctgaggtttggagtacgctcgtcaccagtacatcaatttgctttccaatataatttcttccttcctctaccacgatcattgtaccgtcatcaagataggcaataccttgattgtgctctttgccgtcttttataaccaatacgttcatttcttctcctggaagtacaattggcttgacggcatttgctaagtcattgatatttaaaacgccaacattttgaagttcacatactttatttaaattaaaatcgtttgtcacgaccaaaccggaagtcagctttgccaatttaaccagcttgctgtctacttcttgaatgtcttcgaaatcgccttcataaatttctaccttcattgccagttctttttgaatacggtttagaatatctagacctcgtctacctctgtttcgttttaaaacatccgacgaatcagcaatatgctgaagttcctcaagcacaaagcgtggaataacaatcgttccgtctaaaaatcctgtttgacaaatatctgcgatacggccgtcaataataacgcttgtatctaaaatcttaagagactttaatgattcttcgttatctgtttcttcttcttgtccttttttcttcccaattcgagccggcatcgaaaacacgcttacaagttcatcacgttttttaaacccgacttgaaaccctaagtaacctaaaagaatacttagaaagattggtaaaatggtacttactacttgaagttgaattctgcctaaaaaagctccgaccaagtaggccacaataagccctaaaatcaatcctaagctcccaaaaagcacatccgttacaggcgccttcagtaacgcctcttccactcggcgaattaattcaactatataatcaacaatccaaaacgtgacaaggaaaaacaaaatggctcccagtattgcatcgacgtaaggcttttctagaaatgctacatcttgcagatttaataattgaataagttcaggtataaaaaagacgcccaatgtaccacctgtaataataaaaaataactgtacaaaacgttttaacacgccttcacctccctttatcattataaacagtttacaatgattgaaacctgttatttaaccaaaaaacagaatttgtaaacaaactgtcactttttttgtattttcacaatatcttaatgaatcaaacatttaatgtcaattaatatcctatagctgacggtttgtaagatgctgctcttttagtctttttaggccttctctgatttttcttgctcgaatttcaccgatgccttctacctcatccaattcttctaccgatgcatctgctatcgtttttaaatcccctaattcatcaatgagattttcaataataatcgatggaagtcttggaattttatgaagcattcgataccctctaggaataacgctgtcttcaaagcttgtatacataggatatcccattaagcgaaggagcgtttggtcatcgagaagaacattatttgacggctgctgcatgcgttcaattactcggtaagggtcaaagctgaggtcatacatataatctttgattaataaagttgcttcttcctctaagtgggaaagtagttcattcatttggagccggattagtcttccttctgttcctaactcgctaatatagctcaaaatttcatttttaatacgcagaaccatttctgtacgatgaagcgactgcagcacatctgtatgagttacttgctcttcaaactctaatgcactgagacttgtaatcgattcgtctaataccgccttgtacttttcaagtgtcccaagcgcttgattcgcttttgctaaaataacactaatgtcttttaatacatactgcagagaccctttgtaaagcgtaatcacatttcgtctttgtgaaatggctatcaccaatacacctgactgcttagctacgcgctctgctgtacggtgacgcattcctgtctgtgaagaaggagtagaggggtctggcatgagctgagcattagcaaataatatcttgcttccgctgtcgtttaaaataagcgctccatccattttggctaactcgtataaatgcgcaggtgtaaatgcacaattaatcgaaaatcctccatctaccatctttttgacttgttcattgtagcccataacaattaagccgcccgtctttgcccgcaagacgttatcgataccgtcacgaataggagttcctggtgctacaaactgcagaatttctgatatttgtttttgactaactgttgttttttctccttccactgcttatcctcctaatgtatattgcagagcctccgctactgttgataccccaatcacatcaataccatctgggactttccatcctcctaaatttttctccgggataataattcgttggaaccctaattttaccgcttcttgaacgcgctgttcaattctagatactcggcgtacttcacctgttaatcctacttctcctacaataacatctgtagcgctagaagcagcatctctgaagcttgaagcaatgctaacggctacagctaaatcgattgctggttcatctaatttcactccacctgctacttttaaataagcatcttgattctgcagcagcattcctacacgcttttctaagacagccatgataagcgaaacgcgattatgatctactcccgtcgccattcttctagggtttccaaagctcgttggactgattagcgcctgcagctctactaatacaggtcttgtcccttccattgaagcgacaacaaccgaccctgctgctccctgagatcgttcttctagaaagatttcagatggattcaatacttcttccagcccactttctttcatttcaaaaatgcccatttcatttgtggatccaaatcgattcttaaccgcccttaatatacgatacgtatgatggcgctctccttcaaaataaagaaccgtatccaccatatgttcaagaagtcttggacctgcaatggccccttcttttgttacatgacccacaataaagatggcaattccattcgttttagcaacacgcattagttcagccgtacactctcgcacctgtgagacgcttcctggcgctgatgtcacatcagcatggtaaatggtttgaattgaatcaattaccacaaaatcaggctgcatgcttgagatggcctctagtattaattctaagtttgtttctgcgtgaacataaagctcttcagcttttacacctagcctgtctgctcttaacttcgtttgtttggttgattcctctcccgaaatatatagtactttattttgtttcattgctaactgcgcggaggtttgcaaaagtaaagtagactttccgatacccggatctccccctattaaaacgagtgaccctctgacaatacctcctcctaatacacgatttaactctgcagaaggtgtgaaaattcgtggttctgttgtagattcaatcgctgtaattgactgaggtttttgaactttagaagcagtagctccggaaaaagctcctcggcgtgatgatttcgtttcttccatttcttctaccatagaattccagcttccgcatccgggacatttccccatccattttgctgattcatatccgcaatgctgacatgcaaattttgtttttcgtttcgccattatgttatcaatctctccgttcattcaatcgatttctatctctattgtacactatttcctaagctaaaataaaaagggaggcatacgtgttttttcgtatgcctcgtcttggtttgagtaaaattagctgatgctgcttggagcggaggatttaacaacaaattctcctttgtctacatctagcgtcactttctgacctttttgaacaaccccttttagcagctcttcagataaacggtcttcaatatgtttttgaattgctctacgaagtggacgagcaccgtattctggatcaaaaccttcctctgcaatcttatcaattgcctcttttgttaattcaagatcaatttcttgctcttttaagcgttttgttaactgatccgccattaatttaacgatttcagctaagtgaggtttctctaatgaatggaagacgataatttcatcgatacggtttaggaactccggacggaacgcgcgcttcatttccgccattacttttcctttcatatctttgtagtcttgcccttctgcttctactgtgaaccctaagtgcttgcttcgttttaatgtatcagcacctacgtttgatgtcataattaaaatcgtattacggaaatcaactgtacggccttttgaatctgttaagcgtccatcttctaacacttgtaataaaatgttaaatacatccggatgcgctttttcaatttcgtctaaaagaacaactgagtaaggttttcttcttactttttccgttaactggccgccttcttcgtatccaacataccctggaggtgaacctactaagcgtgaagtagaatgtttctccatgtactcagacatatcgatacgaatcattgcatcttcatccccgaagattgactccgctaatgcacgtgcaagctctgttttaccaacccctgttggtcctaagaaaatgaatgaaccaattggacgttttggatctttcaagcctgctctagcacggcgcacagcttttgcaactgcttttaccgcttcttcttgcccaattacacgagagtgaagaatctcttccatgttcagcagtctttctgtctcttcctgtgccagtttagagaccggtacacccgtccagctagatacaaccatcgcaatatcttctacggttacagctgagttttctttaccttgctgctctttccaaattttctttgtgtcttctaattcttcgcgtaggcgttgctctgtatcgcgtaaagatgctgctttttcaaattcttgactttgaacagacgcatctttttcattgcgtactgattctaatttttgctctaattcctttaaatttggcggcgttgtaaatgaacgcaaacgcacttttgaaccagcttcatcaattaaatcgattgctttatccggtaagaaacgatctgaaatgtagcgatctgatagtttcaccgcttgctcgattgcctcatcagaaatagatactcggtgatgtgcttcataacggtcacgaagcccttttaagatttgaatagactcttccaacgttggttcatccacttgaattggctggaagcgacgctctaacgctgcatctttttcaatgtactttctgtattcatctaaagtcgtagcaccgatacactgaagttctccacgagcaagagacggttttaaaatattagaagcatcgatagcaccttctgcgccaccagcgccaattaatgtgtgtaactcatcgataaagagaatgatattacctgcttgacgaatttcatccattactttcttcaggcgatcttcaaattctccgcggtattttgtaccagcaacgaccgttcccatatccaaagtcataacgcgtttgtcacgtaaaatttctggaacttcattgttgacgatttgctgagccaaaccttcagcgattgccgttttaccgacacctggctccccaattaatacaggattgttttttgtacgtcggcttaatacttcaataacacgctgaatttcttttccacgtccgataacagggtctaagcttccttcgcgcgctacaactgttaaatcgcgtgctaagctgtctagcgtaggtgtattggcatttgaagagcctccgccttgatggctcgaagcagcttcattgctacctaataaatgaagcacttgctgacgagctttatttaggctgacacctaaattatttaaaacgcgtgctgcaacgccttcaccttcacggattaagcctagtaagatatgttctgttcctacataagaatgaccaagctttcgggcttcgtccattgaaagttcaatgacttttttcgctcgaggtgtataatgaatggtctgcgttaattcttggcctctgccaattaatgcttccacttctttttgaattttttcagtgcttaggcctagagcagaaagagcttttgctgcaattccttcaccttcacgaacgatacctaataaaatatgctccgttccaatgttgttgtgacctaggcgtagtgcttcttcctgtgctaaagctaatactttttgtgcgcgctctgtaaatctaccaaacatcatataatcgtcaccctccacgtttaatttgtgtttttatttatagtgagacgttctcgaattaaggtggctcttttaatgtcacgttcttgaggctttaggggacctcccgaatacttttgtaaaaagcctggctgcgtcataatgataagttcattcaatatattttgactcagtccttttatataccctaaatcgattcctaatcgaacatctgataaacattgtgaagcttcttttgactcaataatacggctattggccaatactccatatgaacgatacactcgatcttctaactctacatgagatgttttaaacagcgcgtctcttgcagagtgctcttgtgtaattagctgctgtacgacactatttaaatctgccacaatatcttcttcagacttccctaaggttatctgattagaaatttgaaagatattccctaaagcttcgctaccttctccataaattcctctcaccactaagccgagctggttaatagcgggaataatacgatgaatttgacgggtcatcactaaagccggcagatgcatcattacagatgcacgtagcccagtacccacatttgtgggacagctggttaaataccctctattttcatcaaacgcataatctacgtatttctcaatccaattatctactttattcgctgtgcttaaagcttcagataattgaaggcctggaaataaacattgtatgcgtaaatgatcttcttcattaaccataatactcaaatcttctttttctgataaaaaacaagctccgttgttatctccttcagccaagttaggactgataagatgcttttcaaccaacacttgcttttgaagaggctgtaattcgttcatctttagtaaatgcaaattccactgattggtgttctcacttttttgaaaaacttgctcgaacactcgaaccacttcaactgcttgttctttagaaaagagagttggaaaaagataatgagttaaatttcgagccagcctgattcgactgcttagaacaatatctgaattcgaagcttcttgacgcatccaagagctaacaggctgggaaaagaacaaatcctgggacatgaattacgcttcctcctctctcgattcgttcatcttcttttctagtaatcgaatgtgatctcggagttcggctgctttctcaaactcctctttttcgatatactcttttaagttcaatcttaatgcctgtaattccttttttaaatgaagattacttgcaattcttgctggtatttttccatgatgcagataattacctccatgcagcctcttcaagaaaggaataagaggtcgctcaaatgttttgtagcaatctgcacatccaaacctgcctattttagcaaatttttgatatgtcatgccacaagtaggacaagaaagaacctcctgactttgttgcttataattttcagttactgctggatctaggttaagtaggccagctagtaagttattgattgaaaaaccttgctgatttgaaaaagaaaatgtatctccattttctgaagcacattgttcacatacatgcatctccgtcttttcaccattaataatttttgtgaagtgaagagttgcaggtctcgtttcacattgctgacaaatcatcctgtcatcactccctgttctaaataaaatagatcatgagcttatcggtagcgtaatgaattaagcattgcttttaaaagattagcccttagctcatcacgataaggaagttcaatattaataactgaacgattgataacactcaacatgatttttgcttctcgttctgtgatgactttttcttcaactaacctaataatgacgttttcagcacttacttgtgaaatttcattttgaatcatctcaattacttgctgaaacaaatccgctgcatcatgcatttttacttttgcaatacgaataaagccgccgcctcctcgcttactttctacaagataacctctctcaactgtaaaacgggtattgataacgtaattaatttgcgacggaacgcattgaaatttatcagcaatctcactgcgccttatttcaacaatttctctttcacttaattcaagtacttgttttaaatactgttcgataatgtcagagatatttggcacgctgccccctccttctgactttgactatatttgaccttaatttaaatataaaaggaaacgaaaaaattttcaactatgtactattaaagtttattctttacttttatcgttgccactaaaatttatttcaaaacctgcaaatcatgaattttattgttcttactatactttttcataaaacaaataaattgtaaacaaaaaaggactagctaaaatagctagtcctttttcagg

SEQ ID NO: 65 - DNA, 19864 bp, Priestia aryabhattai
  source 1..19864: mol_type = genomic DNA
aaagtaaaacttccttcgataatacgtgttcgtattgttctgaaaactgttcgtaaatgtcatgtgttagattagaatcgttcgtatattttttacatacataaacgaacggaaataagcgttcgccaaatgaaattggagtttgtccgtaaaggtatgcttttacgaacaaaatgttaaagtaattaatatcgtcaacaaaataaaaagcaacctcggcatggcggacgacgttgcttttttatgattcaaacttattgaagaatcatagcatggcacacgaattaaatctgtatcacaaaattatcaattaatttattatttttttgtttttttatatgtgtaaaatgaccacattttctacatctgcttcatttacaacatagccttccaaattacgccgaggcttctataacatgaaaatggaaattactgatccaacagattcccaagattctttcagttcaaaggctttgaaaatttggtctttaattcttttaaaaaaacatttgcagctgctgaaagaacatgatgctttttccacacaatatttaagcccgattccagtcttggctgtaacggcctgaaacaaaggttactattagtagacgtattcactattttatcaagtgttattgcatacccaatgccttcttcaaccataatagccgcattatatgcaagattgtatgtagtgacgatatttaatttatcaaagttttcgccaaaccaatcggcaaattcattttttgaaaatgtttgtttcatggcctgtcgtgaacaaatcagtggaacgtttaataaatccgaagcttgaatgctttctttgacggcaagatgactgtctcttctcataacaacgccccaaacatctttagcagggatattaagataattgtattttgaaatatcagctggttgaattaaaaaaccaaagtcaagcagccccttgtcaagccgttccgttatatcttcttcgtttccactgtagaggtgatatcgtatattgggataacgtaactgtacatcttttgctactcgtgcaatgtgtttcattgcttctgtttccccaccacctatatagacatcaccacctattgtttcttccatggaactaaattctgcctctaatttatcgatcatattaacgatttcttctgccctattttttaaaagcattccttcatctgtaagaatgacactgtgactactgcgaataaatagtttcttccccaactcttgttcaaggtcttttaattgtctggacaaggttggctgtgtaacatgcaaaaaattagcagccctcgtgatgtttccttctcttgcaaccgtaagaaaataccgcaaaactcgaaattccatgtaactctcctcctttcataagtttcagtgtataagttccagaaatgcttaccaagcatttcacgatatggaatataagtattttttatccccaaaagaaacagttagaataaacaacaaaggagtttatttggtgacttataccataaaaaccaagcctttaattattcaaagttgaaaggagcttaaaatgaaaaaaaaatctatgattacacgtgtattcaaagtcatagccctgtgcttgcttgtatccgcggctattgtttcatcaaagaccgacgttagcgctgcatcgaagaccgacgctgcgtataaaccagacatgtccaatggagcagacaacttttacaaaagcaagaaggtaatcaaaaagaaggtttcgtttgaaaatcaatacaacatgaaagttgcagggaatctttttattccaaaaggtcttaataaaaaaacgaaaaaccctgcaatcattgtcggacatcctatgggtgcagtgaaagaacaaagtgcaaatttatatgcacaaaagatggctgaaaaaggattcgttactttgtcattagatttatccttctggggagaaagtgaaggccagcctcgcaacgctgtctcaccagatatctatgcagaggatttcagtgctgcagtggatttcctaggcacccggaaatttgttgatagagatagaattggtgttctcggtatttgtggcagtgggagctttgctattagcgcagccaagctcgatccacgcatgaaagccattgcgacagttagtatgtacgacatgggggctgctaaccgtaacgggcttaaacactctcagactgtcgagcagagaaagaagattcttgaagaggcagcagagcaacgctatgtagaatttaaaggaggtaaaacgaaatacaccggtggaacggtacatgaattaaatgaaaactctacggacgttgaacgtgagttttatgatttttatcgtactccaagaggagagtacacacctaaaggttcgtcgccaaagcttacgactcatccaacacttactagcaacgttaaattcatgaatttttacccgttcgaagacatagagacgatttctcctcgtccaatgctgttcatcgcgggtgaaaatgctcattctagagagttcagtgaagacgcctacaagctagcaggccaaccgaaggagctctatattgttccaggcgcaggtcatgtggatctgtacgatcgggtaaatttaattccctttgacaagcttgaatccttcttcaaagaaaatctgaagaaaaaataaggcttgtattgaaaaccgtagagtagtttgcgtgccaatcgtactgtactttaagtaaagcccactgtgtgaatccctgcttatattatcgggattcacacttttttgtctaaatagaattcgaaattttaaaagtaaggacattaaacgagttttttgattggactttcagacatcattttaaacgagcaaatttcattgtttaaccattgtatacatcatgtatgtatttagaaataatagactaacgctgattaatcaatcgatgatggttgtctttcatgcgaactcaatgatgattttcaatttgaggaatagctaagtaactctatcaagtcagacaacttatttcacaaatttagagatagcattatcatcattctgcattctgtttataaaatccccggatagagagaggttaataaaatgaaaaaactggtatggctgactcctatcttagtgatgagctttgtccttgctgcttgtggcagtaatgacaataattcacctgaaaccgaccataatgcaagtaataattcaaaccgtgcacaagaagaaccaacagaaaatcgtatttcagatataagaataaaattaaggtttaacaataaagaagtattcattaagatgtatgataatcctataaatagggaatttttagctcgattgccgttaaccttaacttttgaagattatgtaggtaaagagaaaattagcattttacaaaaaagactatcagcagatgatgtgcaatccggaaaccaacccaaaaaaggagactttgcttattacgctccttggggaaatgtagctattttttataaaggttttgaggatgctacaaatgatcttatcatcctaggtcaaattgaatctggaaaagaaaactttgaaaatattcatggtgattttacagttaccattgaaaaagtgactaagtgaaaacatgacaatagctctttaaacagcccactttgaagcaacttgaacttaacacttttagaaagaggggaatttattctatgtctaaacaaaataagttacttatatttgtcttaaccttaggagctttcggtattataaatactgaaatgggcgttataggaatactgccctacattgctgatcactttcatattagtatatcaaaggctggatggttggtgagtctctttgcacttactgtatcaatatccggtccaactatgccgttattattttcaggagtcaatcgtaagaaggcaatgttacttgtactaggtattttcgttctaggaaacattatttctatatttacctctaactttgctattgccatacttgcgcgcgtgattccagccatctttcatccaatctatttttcagctgcttttacaatggctgctaactcagttagcaaggaagatgctccaaaagctgtttccaaagtctttattggagtatccgcagggatggtgctgggtgtaccaatcgcaagttttcttgcaagtacagtctcgtttcaaatatcaatgacgttttttgctatcattaacgctatagtatttattgctacatgggcattcttcccttctatgcctgttaaagaaagactttcatacggagcacagttaagtgtattaaaaaagcccgttacttggctttccattattgctgtcctgttactcaattcagcagtttttggggtgtatagttatcttgctgagtatcttaaaaccgttacgaatatctctggaaagttaattagtttcatgttagtcctattcggtatggcaaatattattggaaacatcatagctggaaagttacttacgaaaaatgccatcaaaacggtagtagtttttccttttgcattgggcgtcgtttacatcattttgttctttaccggacagtttacttggcctatggctatcatgactttagtttggggaatctttgctggtataggaacgaatattaaccaatattggatttcatcagcagctccagaagctcctgattttgcgaatggattatttttatcatctgttaacttaggaacaacgattggtacagctgtaggtggattatttatatcagaaatgggtacacagtacgttatactagtcggattattatcgttagtattgagtgtagtatttatttcactaaggaattacatggatagtcccacaaaacaacttgccaaataaggaatgaacaaaacagtgtatgatcatttttttgattatacactgttttgccattggaaagcttctaatttcacattattgtttttacagatacaacttgaattgatttaataaccaaagaaggatatatgaacacattgaatttaggcattagtactgaatttacagaaatgattacagatttagaagttgtctaaaacctccaaatcagatattcaataatcttagacttttgaatgagaaaacttcaaacttatgaagggttacacttttttatagttaatataaagtagtagatgatcatcatagaaattaagagctgtgttagaaggatgaacttttaaaggagagtgtattcattggcagaggcaattcatgttggtcaacttaaaacattacaggatgatggcgcaaaagttgttaaaggtggtaaacaagggatagctgtatttctacatgagggcaaattacatgctgtcgataaccgttgtcctcacatgggttttcctttacatatgggtagcttatgtgatggaattctgacttgtcactggcaccatgctcgatttgatgtaaaaagtggtggtacgctcgatccctgggcggatgacgtgcctacgtatcctgtagaggtaaaagacggagaagtttgggtgaagcctacaccacaccataaagtaacagttaaaaaattacaaaatcggcttcgagaaggtctagaacaaaacttaagcttagtcatcgctaaagcagttgtcggcctagtggaggccggtatctcctctagcgaaatcgcaaaggttggagtggagttcggaacaaagcatcgacaaagtggctggaattctggtcttacgattttaacagcaatgacgaacatattacctaaactggacaaaacaggtcagattcttgccttgtatcaaggtttagtccatgtagctcgtgaaagttctggtatgggaacacgctttttactaggagcattgccagtgacgagtgagattgaaaatcaatctattgaacagcttgcaaagtggtatcggcattgtgtagaggttcgtgatacacaaggttctgaacgtgttttgttgacagcgatggaattgggtagcacggatgtacaattagcagacatgatgatggcagcagtaacggatcacttttatatcaatacaggacatacactagacttccataataaggcgtttgagatcatagaacacatcggagaagagtatcgcccctatgtattgacttcattgttgccaggtatttcaaacgtgtctcgaagcgaggaatcgcatagctggcaatctcccgtgaaccttgtcaaaccattaaacgaagcttttgagaaactagaagatacccttaaaactgaaaattcaatagaaaaatccaaatttgatgaaaatgcattagttgaacagattttatctgaccgaccgattgaaaccattcaaatgatggtgcaagcacttgagtctggtttcacccctgttaggctagcacaattgctttcgttagctgcagctgaaagaattgctcgctttcatacacaaaatgattataatgattggattaccgtacttcatacgttcactcatgcacatgcagtacaccaaagtttgcgacgttccacaactgtggaattgacgcgtgctctattccatggtgcaatgagtgtttatcttgatcgtttcctaaacatgcctgcagctagaaagccgcaaccctctgaagctataaaaatacctcaggacccttcagaattattggaaatcatgaataaacaacagcaagtgacagaggctgctcgttgggtaatgacatatttagcgagaggtggagaaaaagttcccctcttcaacatactcggtcactccttgctccgagaggacgctgaatttcattcttttcaaatgtacgaagcaggtattgttgaacatgattattgggctggcgaagaatcgtcattatcactacgagcacaggaaacaatgattctcgcgatgacacgatatcttgcaggtcatgctccaaccgcaagagaaatgccacatacagttcggattgcgatgagactccatgaaggagaaaagctttttgaagaagaataagttttttctacatgcttcaaatattaaaggattaaatttttaagcgaacgatcaaaataatactttatgcttaaataaactttaaaccattattagaatttagtactctcactatcatataaaataaataaagcctcgagtcaattgacccgatgctttatttattttaatttattaaaacattcatcatcgaagagttctacccaatctgttccttccagtgtaatggccaaatgtacaaaccaactatgttttgttgctccatgataattagtttaacaaggataaaaaaatgaaaaagattttatatatttgctccatttgtcgaaattacatctttataccaatagaaagattttttctttatacgatccagagaaccgtttccgttatcgtctaaatcgacataaataaaaccataacgtttgctcatttcccctgtagaagctgctactaagtctatacatccccaaggtgtataccctattaaatcaactccatcttccatagcttcgtgcatagcaataatatgttttttcaaataatcgattcgataatcatcgttaatttcaccattttcatcaatttcatcttttgcaccgagcccattttcaacgataaacaagggaacttggtagcgatcccagagatcattcatggagatcctcaaccctaaaggatcaacttgccatccccactcactagattctaagaatggattcttaactccttgcataagatttcctgaagctggatcactcttttcagaactggtctcattaattgccatgctcatgtaataactgaatccgatataatccaccgtattgttttttagaatttctaaatctccatcttcaatttctggagtttttgcattgtactctttcagtaattgattgaaatagcttgggtagtatccacgaacttgaacatcactcgtaaaataatcaaaagctcgttgctttaattgggaagcaaactgatttacaggattcgaatcaaaagcatataacggagcataaatctgcatacaccctacttgaatatcttctcttagctcacgagcaatttttactactaaggcacttgcaataaattgatgatgccaagcttgaaaacgatttgtataatcttgagcgcctgaagatacagtcagcccttgagatagtgctggaaattccattgcagaattgatttcgttaaaagtcatccaatacttcactttattagcaaatcgattcaagataacttttgaataattttcaaaaaaaccaatcagctttctgtttttccatccactataaaatttagccaaatgaactggcatttcatagtgagaaattgttaccacaggttcaattccgtattttaaacattcatcaatcaattcttcatagaaagacagtccagcctcgttaggtcctacttcatcaccctttgggaaaattcggctccaagcaattgaaaacctgtaagctttaaatcccatttctgcaaataaagcaatatcctctttaaatcgatgataatggtcaatacccagatggtttggataatagtatttgtcttgatctatctcccaatcaaattccggggaagcaatgattgaaaatctatccttacctctaggcattgtgtcagccacagatatccctttaccatcaacatcaaacgcaccttcacattgatttgctgcagtagctccgccccataagaaatcttctggaaacttcttttcttcaaaattcataattaattcctccttaattactatctttttaattgttaaaatcaactattacgggaagagaacttaagtctcttcccaaattttctaaaagaaaatcgttaaacgactaatgtcaataatgcttcttttacctgaacagtttttttattcaattcgataatatcgatataacgatttgtatttgtaataatgattggggtagtaactggataaccagcttctttaattttttcaatatcaaagttaactaacaagtcaccctgtttcacccgatcaccctgtttaacgaccggtgaataatattttcctcctaattgaactgtattgattccaatatggattaatatttctgcaccttgatctgacgtaattccaattgcatgtccagtgggaaaaatagttgtaacaataccgtcaacaggggatacagctttaccaacagttggctcaatcgcaattccttttcccatagattctgaagcgaacacaggatcgtccacacctgctaacagtttaatttctccagttaatgggctaacgattgcttctcgtgttataaggggctctcctgcttctaccctgttttcctctattacttttttcttcttatcttcatatccaaagattactgttagaattgttgcaacagcaaaggcaattagcatagcaataatgtaggacactaaaggtgaatatattggaatgcttagagcagatggaaatgcgtatgccgttgcttttgctccaagaaaaccactaacccctcctccggcaactccagctattactatataaggaattgtacgtttgtaacgaagcgctaacccatacagaatgggttctgttatacctgaaaataatccaggtaataacgtagatccagcaagtgcttttaattttttgtcctttgttttcaagaaaataccaaacgctaatcctatttgtgagaatacagctgcggaaaccaatgcaagtattgggtccccaccacttgctaaattctcaagaataaatggtgtgaatcctgtgtgtataccaaataaggtaaggaaaatccaagcgccacccattaaggcacctgttaagactccactttcagaatataaaaagttaataaattgtccaatgctattcccaatgtaaactccgaaagggccaaatgcaattgctgttaatggtacgatgataagcaaagacaacatgggaaccaagaacatttgtagatctttgtgaacaatcttcctaaggaatctatctaaaacagcataaatactgactgcgataaaaactgggaacacagaagaagaatagttcattagaacaaccggtataccaaggaagtgagtaatatcaccttgattctgcagcaagccagtaaaattaggatctagtaatgcagctccgatcattccacctacatatggatttgcgccaagctttgaagaaacagtaatacctagaaaaataggaaggaagaaaaagatcgcatccccagcagctaataaaattgtgtaagttccactttctgtagataatacccctgtcattgttaaaagagttaacagcgctctaagcatacctgctccagcaagggctccgagcaagggagaaaaactacctgaaataacctcaaatatttttgcaataatatttccttttggtttttctgataaatcttctgaattactactcacatttgttaaatttggtaactttttataaacttcggacacatgacttccaattacaacttgaaattgcccactattctccacaacactgagaattccatctaatttttctagattattcttatcagccttactatgatcttttaatgtaaagcgtagacgtgtcgcacagtgcaccacactaattatattttgttctccaccgaccaattggactatttcctttgctaagctttggtaactcaatttcctccactcctttttagtatagtttcctgacagattctaatcttgcttaattgttcgtatggtaaagaaatttaataaaaaaacctaaatcaagcaatcaattttgaatgcttgatttaggttttgccctttaggttacaatcctaaaatcatccgttattattttttattactctttcaatatgaatcgtcaaataaatcatttcttcatctgttaactcgtaggtgtaagaaccctcgataaacttctttattttttgtgaacatttgtgtgcaactggatattttatcttgattacatgatataagtcatcatctgctgtactgttataatgattgcctttgactagacgttgtgcgaaaaatttaagatgtgttataaaacgatagaatgttaaagaatgttcattaaactccaacttaaaatgatatctaactattgttaaaatttcttgcataaccttagtcatgttttttacaacaggcatctcttcattcaattcagcattaacaatatgaagagctaagaatcctgcttcatcctctggtaaaatgatgccaaattgatcacatatcatatttaatgcttctaacccaatctcatattcctctttgtataattgctttgtttcccagagtaacccgtttttaataggcagattatttttgtatcgttcaattgcaaagtgaatatgatcagttaaatgaatataaattctttcgtttaacttctttcctaattttatttttgcatatgcaataattttttcggatatatccatgtactcaattggcagatcggcaattaaagtcttgaattttttcattgtatcttcgttttctaaagtgaaaattttatctattagttgttcatcaatatcatcaccaacacgcttattaaaagcaattccacgtccaatgatgataacctcttgtttttcttttgttgatataacggcattattgtttaatactctctcgactttcactttatacccccagacttatactttatcccctccagcaatagaaaaaggcaaaacccctacctctttcgagaataatcggttttgcctgatttaacagtaacaacccggtttggatgcgcttactttaaaacattaacttatcaacatctgtttataattataattataaacaaagccaaaacaaggcataaaaatcgttaatttcctcagatttgtagtttagacaacaaattaataaaaattgtcgattatttaaagaaatatatagtattgataacacggcaaaagtggatagataaaagaaaagccatctatgatgatggagacgtggctttaagacctatacttaaagaagaattactacatattctgcctggggacccgttagtcccttatattcaatataagaaactttttgtcctattttcaataaactaggattaaagttacgaatagaactaaaatggaaaaatacatctttttcaatactatccgaagtaataaagccaatgcctttttcataatcaaaaaaacttatgctacctattttattttccaatacaataactctcccacgaatttattttcaggatgataatataatatttttacgttacaaaaatttatttaaataaagccaaatatactttacctataattacatcaaattacacaacaaaaccaaacaccaataaaggggggcagttctattgtgtaacaattacatctgcaggactgttaaacgaacatgaataaaaatgtggtacgaaagattgaaactgctaatcactatgcatgcctataagttatcacgggatataaatagctaagaatcggacaaaacttctgatgggctttctaaataacacaaaaatataacctaaaacagtgacgagtaaaagataaattcctcttcatataaaaaattaaattattctcccttaatgtcataccagcaaatgataaacgtactgaaaggaagaagaaaagcgcatgttgctatcatttgtgtttaattaccacaaagctaatggctcactaactcttggttctggatagacagaatctatttttactagctcctcttctgtgagctggatatttgcggattttacattacttataacgtgtttaatattactagattgtggaatagcaatagtttgtccattacgaatacaccatgccaataaaatttgaaaaacatttgcgttatacttctgcgaaatatctagtaatactttttgttttgttaggttagaacctaagcgatctcctcttgctacaggagcatatgccattaatggcatgttattttctttcatcataggaaccaaatcgaaatcaatacctcgatttcctaagttgtaacgtacttgattcgtgacacaggcatgaccgttgggatggtttaacaattttatcatcttagttacatcaaaatttgaaactccccaggatttgattttcccttgtactttagccatttccattgtttctattgtttcttcaattgggataccaccttgccaatggagtaaataaagatctaaataatctgtttttaagcgtttcaaggagttatctaagcttataggtaattgtttttttgaagcattatggggaagaacttttgagactaggtatagtttttctcgttcaaaagttttaatggcatcacctactaagctttcagaattcccatcaccgtacatttctgctgtatcaatgacttgtatacctgcttctaatcctgatctcaaagcatttaattcttgcgtatacttttcctggtcatctcccatactccatgtacctaaaccgattggaaaaacttctctctcagctattttcacttttctcacttctatcaactccttcaaagttcaattgttataggataaacactttatttccttgatagataagtatcttgtagggatcttagcgcctcttcaattggtgacactccaccaactaaatcaaagactttgccgattgtttgatcattctcaagcgaagtaatcattgctgaagaaacatcttcacgagaaatttgcttatgtttaagaacactcgccacttctacctttccagtgctcgcattattagttagacttcctggagcgttatatctgagtgaattcaagcattcggcattttttatgcttaataaaagtagataaatcccatctcattactttaagagataggatttttttagaagttttatcttcccttgtcattattaccaaggttgacttgttggtccaattgtaaactcattaacatttgtatcttctggctgatcaattgcaaaagccacaacgttggcaactcgatcgggtgaaataccatattgttcgtacaacgcagtcataccttctgaaacattcttatcagtaatcgtatccaacaattctgtgttaatggctgctggataaatagttgctgtgcggatattcgtaccttcttgggcagattccatacgcaaaacttccattaaatcacgaacagcccactttgttgcgccataaaccgcaccgcctgggtaagcttttaagccagctactgacgaagtagtgataatatgtccagacttttgcgctgtaaatgttggcaatactgcagcgataccattcaatacacctttaatattaacgtcaaccatactgttccactcgtcagtttttaattgagaaagtggtgaattaggcattagtccagcgttcaagaagattacatcgacaccaccaaacgtgtctctagctagttgaacaagctggttattatcttctggatcaacaacatctataacgcggtatgccacttcaccaccatttgatttgatttcttcagctaattgtactaagcgctcttcacgtcttgcacccagtacaactttcgcgcctctttcagctagcaacttagctgttgcttccccaatacctgaacttgcacctgtaattacaactactttgttttcaattgtcatttcgtttttccatcctttcctgtaaaataaaaatcacgggtgatgttttaacgacatctgtcaataatttataatagaacagtaaacaaaacaagagatgaggatcgctgattttatcagatttgtcgcttagacaacaaatctgataaaattgtcgattactttagggaaggtatggtacttgaaacatggtaaaagtagatagaagaatagcaagaactcaaggagcgattaagaaggcatttcttgaactgatgtcagaaaaaagcttcgacagtattacaattcaggaaattgctgatcgagcaaacattaatcgtgcaacagtttacctgcattacttagataagttcgacctattggataaaattatggaggaacatattgataacatgagtgacttttgtgaatcagaagcagatttagattggattgaatcaaccatacattgcatggaatatcttgaaagcaattatttatttttttccacgatgttggcgagtgaaggagctcgttatttccgtaacagatttcttcaacacaatatcgaagagtttaaaaaagatatcgacatcacaacaggcaaaaacgatggtcaaaacgaggacattgttgctgagtttgttgccaatgcttatgttggtacagtggaatggtggataaaaaatggaatgccttattctccaagggaaatggccgaaaaagtaggagaacttttggaaaggaacatataactataggatagttttttgttttaataccgattatatagaaacttagttaacataaaacatgttggcggaagtaaaaagcacccattcgttgctgtcgcaacaaacttatactctttctcttagacagacttttacggccaagatatttaaatctattacaaggtgttaaagtaattattatcgttaacaaaataaaaagccacctcggcattggcaagcaaggtggcttttttgtaagggttcgttcatacgtattcgaagtatgaaacatacatagattaccacgttctataattaaagactatttttaatgtgttgttgcatatgtataaaagctgcataaaacagaaacaaggacctcatcagaacccttttcccaataagggttctctttttgatgtgttccggaaagagacattatggtaactaactttgtatatcctatacagcttgaaaaatcgaaaaaccaacctctgagtcctgaaggttggtttttctgctcttggagaagagattcgtgttagatatcggatgcctcacggcgtcatgagtagtttgctcaagttatcaataacttatgtatcaaaaagaaaaacccacctgatttgtcagaggtgggtttcctttagaaactgtacatgtaattagtttgctcaaaatactattaattatccgtctatataagaggcgagtataaattacttttaataagggttccgaaaatattgattatgttaactaattttgcatatgatatacattttttactgtgtaataattcccttagaatattagcctaggacccgtaccatttctgcttgcatacctctttggccattcactactacaaaagtaaccttttgcccttcttttaagcttttaataacaaccccttcagtccctttagtccgttcaatagctgtaaaatggacaaaaagatcaggtccactttctggtgtaataaagccaaatcctttctcatcattgaaccacttaactgttccaacctgtctttctgccatataaatcttccccctaaagtatcagtatttttttgtttcaataatggtgattatgtttattgaatttctatattatatacatgctttattggtgaatattcttattaccttttccctttaaagcttccactacagatcctttctttcatttcttaatactggatatcttccttagtttcctcctcctctgttttattatttttatagataaatattttaggaaaaataaagatacaagtgaagaaaatatcagaaagattttattgccttgttagcagtcggattaatcgtttattttatgtaacatactataaaataaacgattaatcacatggaggagcagcagtatgattcgaacaatcgctatcacacaagacttacacgtcaaagaagatgtatcccttgatcacttatctgacccttcaattaagtggttctgggtagatcttgcctctccatctgaagaggaagcaaaagtgttagagacgtttttccactttcaccctttagctatcgaagattgtcttcatttattacaacgtcctaaacttgattattatgagggttacagctttttagttcttcattatttaaatagcaacacattagatgttgaagaagtagatttatttattggagaaaactatttagtgaccttccactttaaaccagtactcagtattgaaacagtacgacaacgccttttacagcatcctagtggatttaataaaggagtgtcctatattgcttatgcggttctggaccaattagtggatgattacttcccaattgtgtatgaaattgaagataaattaaatgaaattgaaagcagagatgccaaaaaatcaattgctttactgatgaatgatgtttttgatatccgaagtgatttattaaagcttagaaaaaccattcttcctatgcgtgatctgctatatcgaattattaattctgaacgtttacatatacctgcggagcagaaagcctatttcaatgacatctatgaccacttgataaaattaacaagcatggtggaagccaatcgagatatgacatcagatatgagagataattacctttcacttaacgccaatcggatgaactctattatgatgacattaacaattatctcctctattttcatcccccttacatttgtcgtagggttatatgggatgaactttgatcatatgcccgaacttcactggcactacgggtattatattgttttaggaattatggctttaatgaccatcggtatgattctatggtttaaacgaaaaggctggtttaatgtaaataaataatatcagcaatatgctgacttatcttctaaaaaatgtggctgcttttttaagtagttgttatgtctttttgttcatgtaatatgagttattaggaaccttaaaaaaaagttaaagaataagggcttttaattagaaattaaaagcccttattctttaagatttccgataatttacattgtggtaactaagttcgtatatgagattcattagaaaaacagaaaaaactcccctaacacgacagggagttttttctgttgcgtatcaaacactgaactatatttaaaaattataattatcactaaagtgctcataatatgaaaaatacgttaaaaggagattcaaaaatgcttattaaaaagatactaatatctttaccactattcctttttgttgtttattcccctacacacgcattagagatgacgagtacttataggattgtaaatgataaaaacgagacgattgcttcgaaagaagtttcatttcaagaaggtgagacattatacgaagtaacaaaaagggccttcaacatagaagaatcccacgggaatattatatctataaatggtatccattcaattccaaagaaaaatatacattgggctgtttttgtaaacaaaaattttatagagttaggtttagatgaagtcacgctcaatgaaaatgatgatgtagtatgggctttgaaaaattgggataaccaagaaattttaaagtgaataacatagaaaattaaaacatcctacaaaaagaagttggttattattccaacttcttttttgtaagttataatttccgataattcacattatggtaactagagattaataagatatatatgttcattacgattaagtgttaaaatgataataaatggaaagaggtgaaatagcttgcttaatttgcttattggaggttctttattagtattaggtggctattgtatgttcaaatttatgggttcttctatttcggtaaaaagcagagataataacaatattgcaaaaccatcagatgaaagtattatcccacctaattcaacaaatggtctttaattataagaagccaaaccttaaaaaggtttggcttcttataattctgattatgttgactaattctgtatgttatatacatgtatttataataaataaaatcatatacaggcttcaaatgaaaaaattatgtttgtatttccgattcactggaaactgcattaaaaacagtttttgttttaaaatatgaaaacaaatagcagccactaattacaattatgctacctattccttcaacccagctcatttcttctcctaatattataaaggctaggatagatgtaaatataggattaaagtttagaaacaatcctgatgtattagctcccaatttttgaacaccaatattccacagaaccatacaaacaactgttgaaataatgcccgtatataaaatagattttatgaaagaagaatccatttggataaccctaaaactcgaaatattaaaaggtagaagaacaagcaacccaaatatccccgaatataaagtagacatcatgggacttatcgtttgcatagcccatttactacatactgaatatagcccccagacgcctactgctcctaacatatataaatcccctatattgaattgtaatgagagaataaaatgaagattcccttttgaaagtacaagaataactccaaagatggaaaggatcatagagaaaagctgtaatacattaatcttttcttttaagaatagaaaggaaaaaatagcaattgaaagcatgtttagtgttgatattagtccaacattaatagctgatgtctttgctaaggacataaattgcaatatttgaaataggactaccccggtaactcccatgaaaatcaatggaataatagcttttttatgagggaaaatctttttttctgtcaaaaaaacgataggggctagaagagcgatagcaattatccaccttagactagttaatgttgtaggagaagcgtgattggtaagtgtttttcctacaatgaagttccctccccagagtaaactcgtgataagtaataacaaataatatctcatatcatttagctccttttctattttcattgagataacgaaaaagattgaagccattgtgcacaacg

SEQ ID NO: 66 - DNA, 19710 bp, Priestia aryabhattai
  source 1..19710: mol_type = genomic DNA
tttaaggaagttacaagcgatattaaaaagttatagaaatggatacagctagaattcttttttgctcagatattcacagagttttcatttgtaaaaagactgaaaattttgataataaatttcactttcacttttacttttattaagggggactttttatgacaacaacggtattaaatgtatcaacttattctttttatcttaacggtgagtggaaagaaagcaaatcagggcagacaatcgacattgtttctccataccgtcatgacgtgattggaaaagtgcaggctatcacaaaagaagaggtcgatgaagcagtacatgccgcgcagaaagctcagaaagggtgggcagaaatttctctgcaagaacgtgcaaaatatttatacaaatgggcggatgagctggtgaaaatgcagagtgaaattgccgaaattatcatgaaggaagttggaaaaagcttaaaagatgcaagaaatgaagtagtgcgcacagctgatttcattcgctatacagttgaagaagcccttcatatgaacggagaaagcatgaagggagatagttttcctggcgggtctaagtctaaagttgcgattgttgaacgcgtgcctttaggggttgtactcgcaattcctccttttaattatccggtaaatttagcagctgctaaactggcgcctgcgcttatttcaggaaatgcagttatcttcaaacccgcaacgcaaggagcgatcagcggtattaagatgattgaagctcttcatcaagcaggtattccacaaggtcttgtaaacgtcgtaacgggtcgcggatctgttattggggattatttagttgaacataaaggcattaacatgatttcatttaccggaggaacaaatacgggtactcaattagctaaaaaggcaggcatgattcctcttgtattagaacttggaggaaaagacccgggtattgtatgtgaagatgcagatttacaagaagcagcaaaacatattataagcggagcattttcttattccggccagcgctgtacagctattaaacgtgtacttgtgcatgaaaaagtggcaaacgagctcgtaaatattttaaaagaagaagtacataaactatcagtcggttctcctgaagatggatgtacgatcgttccattaattgatagcaaagcagcggactttattcagattttaattgcagatgcgctaggaaaaggtgcaacagttgtgactggaaacaagcgtgaaggcaaccttatttatcctactcttttagatgacgtaaatgatactatgcgcgtagcatgggaagaaccatttggccctgtgttaccaattattcgcgtcgcttctgaccaagaagctattgatatagcaaacgaatcagaatttggcttacaagcaagtgtttttacaaaagatattaataaagccttctcaattgcaaataaaatggaagtcggctccgttcaaatcaatggccgcacagaacgcggtcctgatcattttccttttatcggcgtaaaaggatccggtatgggtgctcaaggcattcgtaaaagtattgaatccatgactcgtgaaaaagtaacggtattaaatcttcaatgattgaattccaagatctctccaaatcaagccagtagagtgtagagaatctcatgggaaaaagcctgtgctccaaaaagcacaggcttttaaacgttttatttacctatcactcgattccatctttatagttcttatgccagtttttatcacctttatgctcgatatcctcaacggttttttcaagctctgacataatgagtgttttcacttgataaatggtatcaaaaaaagctttctcttcatccggattcggctttattttggctgctgccgaaatatcaacatatctgcgatgttcagttgttaatttatcaagcgcatcaaaaatatgagaggtcagaacagcaacctccttatgattatcaggcagcttttcttttaatgtttcaattctcttatccatgttaaagtccccctataacgtgttgtatttatgtaactttcccactaataaaaatgaataaccttaaatagcaaaaattcatgagaattagcacgtgaaacaaaagtatactacaggatatcatgttaaagtgaaaaaacggtgaaacgagtggagatattttcaatatagagaaacttgtacttataaaggaaaatatcgtttagcaggtaaaaagtacctttactggtgctttccagccttgcttatatttaatcgacataaagcttttttaaaaacatttataagttgattcattttgcatcaaaagatttttttggtatattatagatgtgtttaaaaatgcaacagaaggtgattgaatgaaagtactggctatcgctccttataacggtttaaaagagttaatgattaccctaggagaaaaagaagaattcgagttgcaagtagaaataggtgatttagaagaaggcctgactcttgctaaggatgcaatacataatggcatagatatcatcatcagccgaggaggtacggcggaactcatccaaagagagttgactatcccggttgttgaaattgaagtttctggttacgatatgcttcgcgtgctgacgcttgctaagggttatccaggaaaaaaagcaattgttgggttttctcctatttcagaaggcgcttctacaatttgtgaaatactagatatcaatatgtctgcatacaaagtcaaaagcgagaaagaaatcgagcctattttagttcaattacagcaagatggatatacaaatattattggagatgccattacagtaaaaatagctgaaaagcttggactcaacggtatattgctgacttctgggaaagaaagtgttttaaaatcgtttcaaaatgcaaagaaaatatatggatttctttcgtctttcaaaaaaaattatttgatgtcttatgatattattcaaaacgaaatggaaggaattgttgtatacaattcaacgtctcaagctattttttctaatccttattttaataagaattttagtgacagctttaaacagaaccttaatgtagaagaggctataaagactgtatgtaacacaggttcttttgaaacagtttttagcagggatgatgacttttggacagtaaaaggatatcctctggaaacctcccattcaaaattgattgtgtttcgcattaatcaatataagtccaatggaaatcaaggtatagatggaatctcaattgtgtctttacagaacgaagcaaactctgcaagtagccttaatactatcgtcacaagaaatgagagaatgaacggtgttttaaaagctgcaactatttatgctaatatggaagaacctgtatggattagcggtgaagaaggaactggaaaagaacgactagcaaagcttattcatattaatagtgaaagccgtgaatatccactgcttattatagattgtgaagtcctctcaaaagcacagtgggcgcgccttctagacaaaagttcctatgatgatttattagcccataatccacatggaagcgttattttaaaaaatatagattctttagaattggagactcaaaaacaattagcaagttacttaaaaaagaattcaactacgtgccgtttcataactttatcgcgtaaaagtatcgaatacttaactgaaacacagcgttttgatcaagagttgtattatttattagctagtttaaccttggatcttccttcattaacagaaagaaaagaagatattgaaagcttagctcttttctttatcggagaatacaatataaaattcggcaagcaaattgtagggatacgtggcgatgcaaacgaaaacttaaagaattttgaatggactggtaatataaagcagctaaaacagatcattaaagaaagtgtgctattagctgaaggagcttttttagagcttcatgatctaaagaaagtaataagtaccattcgcgttacaagtgacaatcaggaaattgatttaaacggaacgttagaagaaatcgaacgaaaaatcataaaaagaatatggttagaagaaggtatgaatcaaacaaagacagctgaaaggttaggtataaatcgaaccactctgtggcggaaactaaaataaaatttcctatatatattctattgagtcaaatctaaaacccactttatctataagttagtaaagataaagtgggttttactgtttaatttttaaacaatttagaaaatactaatttttattagtttttattgttgattaattaaacatttatgtatataattcaaattgtaaacgttttaaaaagataaattgtacatatatgttgcaaaaataaacaattaactgaatacaaataggtactgtagggaggaaggaatatggagttaaaaggaattattccagcgctattaacgcctttaacaaaagagcagacaataaatgaaccggtactgcgtcaattaacgagtcatcttattgaatcaggtgtccacggcatttttgctttaggaacgaatggtgaatttcatctcttcacaaaagaagaaaaattaaaaattgctcgaatcattattgatgaggtcaaaggaagaattcctgtaatcattggtacgggaggcaacagtacagaagaagttattgaattatcaaagcagatggaagaccttggagcaaatgctctttctattattactccttattttgttacaccaactcaagaggaagtgaccgttcattttcagcgaatagcagaagaaacatctttgcccgttcttttatacaatataccttcaaaaacgggaatgagcttagatcctgaaactgttgccaagctagcagatgttcctaatattgtaggaattaaagatagcagcggcagcttcgaaaatatcaaaagctatattcacgtaacaaaaaacaaagacttttccgtgtttgcaggaacggattctttaatactaaagaccttagaagcaggaggagtaggagcagttgcagcaactgcaaatatggtccctgatatcgtcgtatctatatacaccaactggttaaaaggatttaacaacgaggcggaagcagctcaaaaaaaattacagccgcttcgagatacattccaatacggaacgcttccatcagctttgaaaaaagctgtagaactatacggaattccggtaggccctcctaaactgccagtctctgaactatcagaagatggacttgaaaaagtgaaagaaatggttgcaggctataaaaaacaaaatgcactttgaaataaactaactataagggaaagaggttaaaatgatgcaaaagctctatcagtttcaaacggcaaatcatcttattgcaggaccaaattcaattgaaaaagtagggggacacctttctctattaggtacagaagtcaaatcagccttaattattacccagccttcgatgaaaagattaggttttgttgagaagcttattcatcagttatctgacaaaggcgtatcagtcaatgtgaatattgatgttcttccagagccaacggttgaaaacattgaagaagtttttcaagctattagcaaagaacagtatgatgtattaattggatttggtggaggaagcgttctcgatgcaacaaaaattctatcagttttacaaacaaataatcaatctatccgtgaactattaggtacagatttagttaaaaacccagggacaccaactatcttaattccaactacttcaggaacaggttcagaagtaacgcctaatgcgattgttacactgccggatgaagaattgaagattggaatcgtaagtaaatatttactgcctaaattagtggtactcgatccagttctaacattaagtttgccaagacctatcacagctgcaacgggaatggatgcctttactcactcattagaatcatttatttcaaataaatcaaatttaataagcgatatggttgcattagaatcaattcgtctcatctcatctagtattatagaagcttataaaaatgggaattcagttgaggcgagagaaaaaatgcttgtaggttctatgtacggcggaatggctttagcaagtgcaggtactgctgcggttcatgcattagcatatccgctaggcggaaaatttaaaattcctcacggtgtagctaattcgatgcttttacctcatgtgatggagtttaacatggatgccattgaagatcggttgttccttgtagccgagcctatgggaattaaagtagagggtttttcaaagacggaagtagctcaaaaagtagtaaatcgtattgtagagtggacaaacgttttagaaatcccacaaaatctaaaagaatatggcgttaaggaagaagatgttccagggctagctatttccgcttcaaaagtaacgcgattattaaataataatcctaaagaagtaagtttgaaagatatggaaggaatttaccgtaaattacttgtttaaaaaggtgatgacattctatgaaaatatccgttatttctgatgatttaacaggcgcaagtgattgcggaggacaattagttcgttatgggttagatgtttctgtcgttttaaccgatgacaacagtaatttaagtaaaaaagaagcttttatatttaatacagatagccgcgctgtttcaggagaggaggcttacgaaagagttaaaagcgtttgcgaaagaattcaaagtgaaacatttgatgttatttacaaaaaaattgactccacaatgagaggcaatatcggacaagaaattaatgctgtttacgacgtatttcaacctgattttgtttttatcgctccagcctttccagacgccggaagacaggtgattaacggcgtacattttctgaatcaaaaacgtttagatgaaactgaagtagcaaacgatcctaaaactcccgtaaaggattctttaattgcccgactggttaaaaaccaagcgcaaaaggaagtgggccatctttcgtacaaagatcttcatgcaggatatgaatttatcttcaaaaagcttaaagcatacaaaaatcaaaacgtttcatacatcacagtagattcaattcatgaattagatcttaaatgtctcgttgaaacgataaaaaagacaaaattttctgttatatggtccggttcaagcgggttgatcaactatttacctcaagcttatggactacagccatccacaaagaaagtcagttttctaagaaatgatcaacccgtgctatttgttattggaagcgtaagtaaagttggaagaagtcagctgaaccaattattactaaactctgacactattagtgtagaaatgaacccatcaaaaatcatgatagacagtacttccagacaaaaagaaatagatcaggtaatagagagggctttaaaatttctgaaaaaaggaaagagtattgctttattctcttcagaagaagtaaaagaaacacaagaggttggtaaaaaacaaggctatagcgctattgaaataagtgactatatttcaatgaccatgggagaagtagctgtagatctaattaatcaatgtaatattactaatctttttcttacaggaggagacacggctcaacaagtgttaagtcaattacaggttcatagacttcatttgattgacgaagtggagcctggtataccacttggcaagttagattataaaagagagatttttgctgtaacgaaagcaggaagttttggtacagatttagctatgcttaaagctaaatcgaagctgcaggggaaaaaagatgtttgggaaccctctgtaagattaagcaaataattaaacagtgcaataaaaattgaagtgaattttaaaggaggggtatgatgaaacctgttatcggaattacaatgggcgatgcggctggagtaggtccagaagttattgtaaaagcactggcagatccatcagtttatgaagcttgtcgtcctattgttgtaggagacgctaagatagtagaaagagcgattggaatgacaaaaacctcgttaactgtccatcgcgttaacgaggtaaatcaaggggaatttactcatggcgtaattgattgtcttcatttggacttagtgtcggaagatcttccagttggagaaatctcatcattggctgggagcgcagcgtttaaatttattgaaaaagcgattgaattagcaaaaaagcaagagatacaggccatttgtacggcacctttaaataaagaagccttacataaaggcggctacccttaccctggtcatactgaaattttggcagagctgacgaatacaaaggactattcgatgatgttatcttcaccaaagctaaaagtcattcaccttactactcatatagggttaaaaaaagcaatagatgctattacaccagaacgaacatacacggtcatcaagcttgctcatgaaacattaagtcgtgcaggctataaaaatccgcgaattgccgtttgcggaattaaccctcacgcgggagagaacggtttatttggagaaggcgaagaggaagaaaagttaatccccggtattcaaatcgcagcttctgaagggataaatgttacagggccataccctgcagatacgctatttttccgtgcagttcgaggagactttgatattgtcatcgcttgttatcacgatcagggacatgtgcctattaaagtcctagggttagaagagggtgtcaacattacagtgggtttaaacggcggtgttattcgcacttctgtcgatcacggtacagcatttgatatcgcaggaaaaggaattgctgatgagagaagtatgctagcagctcttcagtccgctgccgaactgtctcctaaaaaggttttaaataagttttaaaagtagcattgttatcaagttcttataaaatgtcttcggagcaacttgaataccttttactgtgagtatagtagttgcaaaaacatggattgtaattaaagactccgaagacagtgagttatagtttgtaatgttttatccttcttcacagaacataaatgaaagcgcttaataaatatctcaatagtgactactgaccaatgacggatcactttaggatagaaaaaatggtagaagtatagagaaaaacaaatcgtaaaatatcgaaagttttatcgccatatatcaaaactctgttgttattataggaggaaatctataatgaaagtattaaatccttcaagtctgatttttgttttagcagtaattgttgtatatattttatttaccacatggttaacaatgagactaagaagtaaatccagcgcagaatttaataacgcggccaaaacattgcctgcgcttgtagttggaattttattaatgtcagagtttatcggcactaaatcaacagtagggactgctgaatcatcatttactgatggtatcgcggcttcttggtcacttattacggtaacaattgcttttttcctcttttcattctttttagttaataaattttatgggactgggaaatataccatttccggtataattgagcagaaatttggaagatctacaaaaacggttgtatcgattattatgatagctgctcttttacttgtgaatctaggaaactacttaagtggttctgcggccattgcttctctgttaggtttaccgttgatgacatgtgctattattacagccattgtcagtacgttttattttacattcggaggaatgaagggagtagcttgggtcaccattcttcactcatttgtaaaatatgcgggtgtcttaatcacagtaggagttgcattgtacctttgcggtggattcaagcctatcgtgcatgaactgccaaaaagctactttacatgggatggaacgattggtggagggaccatttttgcatggcttatcggaaatatgggagctattttctctacacaatttattattcaagccattacgtcgtcaaaaagtgcaaaagcagctaaaaaatcaagtttatatgcagcactattatgcttgccgcttgcattggcaatcggagtgattggggtatgtgcacgctatttgtatccaaatatcgatcctatctatgcgtttccagtattcttagaacatatgaatccagtattaacagcaattgtagcaacgtccttagtagcatccattttcgttggggtttcaaccgtggctttagctacaacaacattaattgttgacgatttttatgttccaaaagctaaaccatctgcagaaaaacagatgaagatgactcgaattatttctgtggttgttggtatcatccctttacttggtgtggttttagctccagaactattaactttatcttttttcactcgtgcattaagaacatctattgctgtggtagctgcaatgggattttatcttccattctttagttcaaaccgaggtgcaactatcggcttagcaatgtccggtattttcacaactgtatggtatttgctgggaaacccttttggtattgacaatatgtatgtagctgtcattacaccatttattgtgatggtaattgaccgttttatcggtcgaaaagctaaaaagtctgaaaatactgaatctaataatgtagaatatatagatgcaaagtagaaaatagcttagtttacgttaaaaggagagaaatgtaatgagtaatcaatcaacgactattgtagcagatggaaaattaaaaatgtgtccagacggattggaacatgtagaggcatatattccttctgattgtatacaaaatcatgcttctaatttacttgtgttagacaacggtgacttattatgcacttggtttggcggcacacaagagggaatagccgacattcatatttatctatcaagacttcaaaaaggtgaaaacgtatggagtaaagctgtaaaactttcagacgatcccactcgttctgagcaaaacccaattttatttcgtgccccagacaataaattatggttattgtacacggcacaaaaatccggtaatcaagacacagcgattgtaagatatcgtatttcggaagatgaaggctattcgtggggacctattgaaattttatttgatcagccaggtacttttattcgacagcctattgttgtattagataacggtgattggcttttacctgttttctattgcattacgcctccgggacaaaagtggacaggaaataaagatgtaagcgcggtaaaaatctcaaaagatcaaggcgagtcttgggaagagtatgaagtgcctaatagcttagggtgtgttcatatgaatattgaaaaattagatgatggtacgcttttagcattattccgcagccgctgggctgaccatatttatagcagccgttcaactgattacgggaaaacgtggagtgagccgataccaacgcagttacctaataacaattcttctattcaactcacaaaattaaataacgggcatttagcgctcgtctttaacaatatgaacgccgataattgtacggagcgcaggctgtcgctttatgatgaaattgaagatgaagatgaagatgaagaggatgcagatattctgtctgctaaccaagacacgcctggaaaagatgatgaaggaagacaagcattttggggagcgcctagagcaccgatgacagttgcgatttcagaagatggagggagaacatggccatataaaaaggatattgaaataggggatggctatgcaatgaccaataattcaaaagaaaaattaaatagagaatactcatatccttctatcaaacaaagcgctgatggaaaaatccatattgcttttacgtattttagacaagcaattaaatatgtgtgtgtgtcagaagaattcataaagtcttaatagcttcatatacttcggagggataaaatatgctgttggaaaacaaaactgcagttattacaggggctagtagaggtattggaaaagctattgctttgactttagctaaaaacggggcctcattagttatacatggtacgaacgaaactttattaaatgaattagccttgcagattgaagatttagggcaagaatgtattgtaaaagctggagatgtagcagatccaaatgttgcaacggaggtggtaagagctgctgtagagcgttttggaaaagttgatattttaataaataatgcgggtattaatatgcgcaactcaacattagaaatgactttggatgattggaaaaaggtattagatgttaatttgaatggaactttatatttctgtaaagccgtcttaccttatatgatagagcgaaactacgggaaaattgtcaatgtaagttctacaacagccaaaacagcacataaaaatgcagcgccatcttacggagcttcaaaagctgcagttaactaccttacgatgcatttagctttagaaatggcgcctcataatatttttgtaaatgctgtatgtccaggtcctgtagaaacggacatgagcaatcaatggacagatgaatacaggaaagaagtaacaaagcgaattccgttaaataagttaggaactcctcaaaatgttggggaaagcgttctatttttagcttcaagtatgtctgattttataacaggtgaatctattaatgtgaatggcggaacgtacatgaattagggaatgaaaagcctagagagttgactatctaggcttttcaattgtttctctaaagaatagaatataaacaggtgattaaaatggaatttttaataatcctattacctattttcggcatatttacactaggttttattggacaaaagaaaataggattcgatacaaaaacgatatccaccatggcgctttatttaatgtctccgatattagtttttagaacgttttatacgacaaaatttcaggtggattatttatatcttgctttttatacgtttgccctttgttttactttaattatagttgtatatattgtggcgtttattcagaagtattccactcgagagacatgtgggatgatattagcttcttcttttatgaacaatgggaattacggtactcctgtggttttactaatctttggagtttcaggacttgactgtgcaatcattttaatggttattcaacagctggcaatgtgtacaattggagtctactacgccgcaaaaggaagtgcagaaggaaatggtatacgttcagctattcgtgctgttcagcgcatgcctgctatatatagcgcctttttgggagctttttttcaatttttcaatattcatttagggaaatcagtcctcgaagcggtagatttagtagcgaatgcagcaattcctacggttatgattgtactcggcatgcagctggcaaaaatatcggttaaaaatttagccaagagtaaagtatctttatcacttataattaaactgatcatttctcctgccgttgcttatttacttactttatttcttccagttgatgatatggttaaacagattatgatcattacggccgctatgccaacagcagcaaacacgaccatgtatgcgctgcaatttaatactgagccagaatttgtttcaagtgcaacgcttattagtacatcgttgagtttagctactttacccctaatttttacaattgtattgtaaaaatcttttatgactacgtaatttttatgttctatgaccttttttgactactttttatggttttatgactttttttgaatgaatttgattgtttttgatgatttttcgaataatctgatatataatgaaagcgtaaacagtaaaacatgtcggctggttaagaaaaacatccataaaaacgggattcgttattacataaaatcagacctctgtttttataaaaataaatagaatttgagaaaaggagaatgaggatggacatattggatgcaaaagtagtgaatacaaagtacggtttagaaacatatctggatgtaccagaaagcgtagaaataaaagaaattcatatgccgagttcagagaaccaatctcataaaattaaatttggaatcaagtattttcttttaagagaaggaaagtattacgatagccaaaaaggttatttttggctttgtatgaatcacgattttagcagtcttatgctgagtgaaacggaaacagagagtttgtttgcagttaaaagtgaagaagaaagagaagcaacaaaaacgctgttagcagaatggtttatccaaacgaatgcgtacaaagaagtcatcaacgaatgtatccatcagattaaaacggagaatattcgtacagaagaagacattgaagaccgagtggacgccatacaatttttagaaaaattaaaggtattaactgcaaaagagattgaaaacgcttctatagaaaatctatatgccctgcagcaaattggctaggctatagttcgcgcaagttgaaatgcagattgatgtacaacaataaggaggaatagtgagatgaaattttttattgatacagcaaacattgaggatattaagaaagcatacaaagtaggtgttctagctggtgtgacaaccaatccatctttagtagcaaaagaaggcgtaaggtttgaagaccgcatcgaagaaattcttcaaatggtaccggaagttgaatccgtttccgctgaggtaacgcctgacgcactttctgctgaagacatgattgctcaagctgaagaactgattaaaattaacgacggagataaaaacattacgattaagctgcctatgacattagctggcttggaagcgacgcgctaccttgcaaagaaaggcgtaaagacaaatgtaaccttgatctttacagtaaatcaagcgcttttagcagctcgtgctggagcgacgtatgtttctccatttttaggacgtcttgatgatatttcagaagacggagtacagctagtatctaaaattgctgagttattccgcgttcaaaacatcgactctcaaattattgcagcatctgtaagacacccggatcatgtaacgcgtgtagcacttgcaggagctcatattgccacaattccatacgctgttattgagcaattagcaaaacatccgttaactgaccaaggaatggaaaaatttgcagcagattgggaaaaagcagttaaagcttaacaaaaagtcatatcaataaaaaaagcttggggtaagcatagcttattccaagctttttatcgtttaactagctagtttctttttacgtaaacgctctaagcgtcgctgcacgctatttctcgagcggccgagcagctgcccaatttctcgctgattgcgcttttcctgataaaacatgcgccacaatctggcatcttcttctgctgtccactttttatgctcgtatttagggcgctttacatagtctagttttctctgtgcatctacccacgctggttctggaataagcgtatttttaggtattttaaaaaagttaaggcacgatttattttgttcaacccacttccaaaaagattgaatgtcaattcccataaatgttctggtcttggcgatgatcattttatacggtagattctctttatgaatccacttgtaaattgtatgaacatctacttcaaggcaggctgctagttcacacgctgtaatatgtcctacgtgtgctttggctccatacacttctaaacggttcaacctcgattctagcgcttgcacacttcgctgtaatttagctgatatgtgtgaaagaggttttactccgtaataccttagcaaatattcgtcttcttgcagcgtccatcttcgcatcgccgtttttcgtgttagtcccaaaacttttatgcgcgtagcaatagaagaaggacttctgcctaaggagtgtgctatttcacggttattcatgatatcaatgttctcctgcaaaaaagcatcttgttcaagcgtccattttttacgtaaagctgtatccgaagcacgaaggtttaatcgagtaagtcgtttattaaccgattccttgcttctatgtaaatacttacccatctcttgaagcgtcatagcgccatagtgttggataagaaatctatcttcttcttttgtccatcgtttttgatttttactcactgttgtctcactccaattcacacggaaagctcaagatgaaaagttgctagcaatctattttacgaatgagcagtgcctattcagactgatactcactgcgttttagcctatatatattttatcatatttttagagaaaaccaaaacatgtgttcctattttgttttagtcatcataaaaggaattagaaaaatagttggctcctttaatagaagcgaattatggtaaaattgactataatctctaaaggatttacataactgacagctcagcatcattacgttgagaaaggggaattgatatgaattttaatttaaaagaagcgattgaaatacttgagcatacgccacaaacgcttgaaaaacttttgtctggtctatctgcagggtggctgcaatgcaatgaaggagaaggaacgtgggatacctccgaagtcatagaacatttaatagaagcagaaaaaaacaattggataccaaggctagaatttatccttcaaaaaggaaaagagggagcttttcctccttttgaccgctatgcccatttaaacaaggaatctgctaattctattgaagagaagcttcttgaattcaaaaaggtaagaatacagaatttacatcaactaaagctgctagttaagcatgaaaagcaccttgaaatgagaggagaacaccctgagtttggggaagtaaaagtcagagagttgctctcgacttgggttgctcatgatttaacccatattgcgcaaattgttcgagtaatggcagaacgatatagagaagatgtaggaccttgggaagaatacttaggaatactaaagaaatagcaatgacacacagtggccagcctttatcattcaagcttgaattaagaaatgtacacgattacaataaaatgagaataatgaagattcaggaagaattgcggagggaactatgacaacatatccgatgtttataacatgtagggtccgttaagcaatttacgaataaaaagaggattggactgattaaaagtgaaagtaaactcagagaaatttggagaactaaacaatcaagctgtacatgcttataccttactaaatgatgaagggcttaaaattacctgccttgactatggatgtgtgatatcaaatattgaaatgcgggattctgaagggaagagtgaaagtgttgtattgggatttgattcaatagaagaatatcagaaatattcgccttatttcggagctgtggtcggacgcgtagcagggcgtataggtggagcatcgtttgagcttaataatgaaacctatcgtctagagaaaaatgaaggaaacaaccatttgcatggcggaaaagaaggattcagccacaaaatatggaatgccgaaataattgaagcaagtgatcatgtaggtgttgaatttacatatgtaagtaaagacggagaagaagggtatcccggcagccttgaagtgaaagttacgtatacattaacgaataaaaatgagttccatatttcttatgaaggaacaacagatcaagacactcttatcaatttaacaaatcatacgtatttcaatttaagcggaaatctaaaagaaacggtcttggatcatgttttgaagatgaaaagtaacgaattcttagaattgaatgatgatcttttacctactggggaaacgctaaatgtcacatgtaccccatttgattttagagaaggacatagtctcaaggaaggtgtggactctacacatccgcaaaatatattagtgggtaaagggtacgatcatccatttcttttagaagcagaagctgaaaatcagatgtcattatttgatcctgcaagcggccgcaaaatagaagtcaaaacggatcagccttcagttgttctctatactggaaatcatctagacgaagaattcgaaatcagaggcgttcactcagagaaatatctcggtgtttgcctagaaacacaaggtttaccggacgctattcatcataagcattttccttcttgtgtattaaagcccggtgagaagtatgaagcatatactcactacacatttataactgatcgcagcctgtaacaaaacgggatgataaaaaggattacaaacgagcctctgccgattgtaatccttttttattgttactttttcttttggctttttgcacgattagcgtcaagctcagccgcatattcctcttgagactttccttgcttttgactctcagactgaatctttttaaatttgttatcgtttaaatttggcatgttagcacctccttgcagacagggttattttgtgcaagcattaaggatttatatgctgaaaagttttaatgaacttgattagaaatttcgcttaatgctgcaccggcttcatcaacatatacgttcactgtcgcaaggtcgccgattgcacagattccaaccatattattattctccactacaataatgcggcgaatttgatggtcagccatcatacgtgcacactcgtgaatatccgtatccggagaacacgtaattacatctttagtcatacaatcatggcaatgcacagtgttgcaatcttttccatctgccacgcagtttaacacgatatcacggtctgtgatcattcccattactcgattttcttgacacaccggcacagaaccacaattaatatcacgcattaattttgcggctgctgttactgggtcgtgcggtgcacaagctttcacatctttagtcataacttcacgtactgtagtcatttttaattcctccttttaaacattcacctccgtattttctccatgcacatgcagaatatgagaatcaataatttcctaaaagcaaaaaagtacaggattaaaataaagaaaggaaaaaattttgtaataaaaggcgaataaaagaactaacgcagtgtaataagcacataaaaaagagcctattacacaaactaaagaggatatgatctagcttacattttcgtaacggcaggagtcgggtacatactgaaaggaaagttaacgcttttggcagtacttttattgccttggctgtctatagtaaaagttgataaatttgtctttaaaagatacctacctgttttaacgtttagttcattggttattgcttttatcagtgagttatctaaaagctttacttggtggaaagtgagaaaacctctttttcctaaacttgcaagcgatatatcttttatctttggaccattttttgcagctaatttttgggtattcaagctgacctatggaaatttcaaaaaatatttgctgattaacgttctatttgattatctatttgcttatcctttgacgagtctggcagaaaaactaaaggtatacaaaatggtcaacatgacgcgttttcaactttttgttatctcgattgcgactgctcttattaattatttgtatcagcattttatagaagatgtattaaggcagagaaggcaatagcttatatgttaccgtacaaggcttaataacaaagatttattaagcacacggaaacaaattaactttttgaggtccattttatgatggactatttcttatgtctaaaataatttacaaattttcaaaagcaaagataataaacaaatctgctattttcaaacaaagaggt

SEQ ID NO: 67 - DNA, 19280 bp, Priestia aryabhattai
  source 1..19280: mol_type = genomic DNA
acagttgcgaatttagaaatttggattattaatagaaagaaggactatctaataattccttcactaattaattatgaaggagtgaatttatatgcctattattaaaccggtttttacagctactagcactattaccggagatgttacagttgccactgcaaccagtgttgctcctacacctgctagatttactgcaatcgttacagctccaatggttgttggcctaacaacaaccgtacctgctggaagttttattgatgaaaatggaactgctcttacagccttacctacgcttacctctaattcttatgctactgtttatgttaatggtgtagttcaaccaactagtgcgtacattttgtcaccaactgatctagcacttgatgatgatgtcacggttggagcacctgttactttagaaatagtgactcacacagcaacctccacttcaacaccaacgagtactttagcagttactactgttattagtacgtaataccgttaatttcatgattatattaactattgtttgtataaatctagaaacttttatctattaaggtcaagatctatattggttaagaagaagatcacaaatgtgatcttctctttttatttatgcatttccgaaattacattaactgagtatataatttatccccttttattcggtatgagaatacattaaaacaaaattaactgaaaggaggaggtaaaagtgggatgaatataaagcacaaagatcattattatgaaaaattacgttatcaaaagaagaaatgtaaaaaacgttactctaaaaagatttacagtgagtacaaacttccggaatccctttctagaagggatctctcatgtattaataaattttgttcttacggtaaacctcattcttgctgttgtctaaaaccaggaccaccaggacctcaaggagccacaggacctcgaggagtcacgggacctcaaggagccacaggacctcgaggagtcacgggacctcgaggagccacaggacctcgaggagctacaggaccccaaggaccaccaggccctcaaggaaccacggggccaccaggaccactacttcagggagtaataccaacaactagtttattatattttactttttcagatggacagaaacttgaatatttaaacagtgatggtgtaccacaatacggagatgtccaaatactgtcaccaaataaagtttcctatattaacttatttataaatggtattctgcagcctcaaagtacttacacagttgaagaaggaaaattaactttagaagaagctcctttaaaagatgtaccaattactctacaatttataattatcaattcataaatataaattgtatatactatggatggtttctttactaattaagataacagatattagggaataaaacttcactttacgtcctatagaatatatataatgaaattttcaaaacatgggctagcttacttgtttccagttttaccctttattacttcctaccctcgatttaactagctagtatcttcaaaaattatacttaaaccctagctattttacatttgtgcccgagggaaccctgtcttcctctaagtcaaaaaagttacaacaattataaaaagcctactcttaaaatttgagtaggctaagttatttttacgtatccattaatatcattaagttttttcacctgcgattatgttaactatgcaagcgatccattgtgcgaccataggtatgtctctattgtatttttaataatagaaaaagggtagagaagctattccttttagtaccggtttgtagtgaaaaggaaaatataaggttttaaatgaatataaagaaattttttatattttattttgccttcttataaacccttgggattatccaatttatggagagaggaataaataatgaagttagctgaagcatagtcgttggaactaatgatgccagtgactctccctatataaaaatatttataaattttctgtgtcctaggacaagcagaaaaacaattcattaatcaatgattaatatagaattatgcaatcaaacctcttaccgaacctcttaccgaacctcatactaatacaactaagaagcatgttcttttacataattatcaccattaaggatagagcagattagaactaatgattataatcatttttatttgtatctgcacatgtatattttttgttagtataaatattcgtctcagaatttttccctctagttaagttttccttcagttatcaaggtgtatttttagaaagacagatgactttaagaatacaaattactttatggtcataggcctgttttaggtggattctctatatgaaaaacatctaacagcatcgtatttactatacatatattgcttcactagcttgaaaacaaaaaagaaaaaagctgacacagtgttcttcctttttgttccccttatttcatgaatttcaaaaaacaacttgtggttatcttatatgctcattctaatgtataaaactttactttaaatgtttctcgaaccaaatctgtgaaccctaccgtagaacttatagaagggtttgcgatgtaccatcccttactttgtctaatcagatctggcattctaagaattgaaccatttcccacattatgccagatggcatgatctgtactgtttagatcatcactcataatatcaaaagtaaatgatataccctgatacttcctttcaactacaaccctaacttttttattcataggtaaatgaaaaagtgaaaagttacgactcgatctgcttttttgaccagggattggtgtacataaagagtttatctctgcctccattttcagccttcccttctatatggaacataaggaaataatataaaagaaagtaaaaatatatgattatttttacaattttatcctatttaaaaataatcatatataaagatagtaattttataggtaattataaagtgaaatgagaaatttaaaatacagttaagaactgcagtcctgatccctctttgagtaaaaacaatctgtcttctacggattgtttttgctttttttataaatcactatgtatcctcattttagttaatgttaataatttttaagcatataatttagtaatgaaatctttagggatttcataaacctttgggaggtgtaaccgtgaaaataaggggtaatttaaatgcattaattgggatctggtttattatcgcaccttgggctattggtttttcagatcaatcaggagctttatggtcaagtattatttttggaattattcaagttattgtatcattgtggggctatgacaagcctggttggaattcttggcaaaattgggtttcaacaattactggtgtctggtttgtaattttcccattcatctattcattaacaaatggagaagtttggtcaagtgtaattcttggtttaatcacgattatatttagtttatggagcttgggatctaattcgggctcaaaggctgtgggttaaggataaaatggataggagccaactactttagcaagctacttaacaacgatgaagtggttaaggatccaaaaagcgaaaatcaaaaaacagggagctatttcctaaggggaatagctccctgttttttgatctggttgtacatgtttaagatccccatttccttatgcaacaagttgctcgttacgataatttactggggattgtcgatttagttatttttgtctctttatataaatatcttacttttttaatacttctggtacgtaaatccttgccttttccctccctcattaagattccatggaaattcttaaaacaacattccccatttcccatcttttgatgtaacactcttgatcagtatatcctttttttgcacgcctctattatctaaaaaaagcttgaccctcctttccatccaaggtcgactaactgtgattttttcaacatccgctctaagggtgcagcctagaggttcagcgttcttttctattctaaacgtatacagtaagtaaagattatccagttaaaataatcattattattaagaaattggaactctcaattttaatggcttcctatctatcttcacatgtccaaacttttttcattcaagtgaatattctactagtacaaatatcttttatgaaaggagaacatctctttgccaatcaatattcaactgatcctcatcagtatggaacttattctacaggatgttttaaaaacaaatttagttacgccacagtaccccgctgcattcagagaaatagcaatacctgtccctacacctccgggagttaccaatttaccctcctttatttattttgaccttgataatcaatttaccctaacacaagaacaaggtattaaagatgccatttcacttgtactatttaattggttccatcatctgaggcaaaaatggaatggtggagctaataatggtatttctaatttagctgcttgcaataatgtgtatgcaatacggaatttacaacctgcttggtatactggaccacgtattcccaatgggttagtggctacgaacatagctatggatcaattcacccgacttatacgtgacaacggtttgcgtctcgctcccaaagcgaagatctttgctggctcccttgataatgattcccttactttggctttaacagctttaaaccgaaccaaagtacctttatcatttattgttgatctatcgaaggtaggcaatattggcatagatgcaggatccattatgcatgcttggttacatcgggcaggattttataatcctaatacaactagttattttattacggagtgttcaatgtgtattatgcgggattatgaacttaaaaacctctttctacccgatagtgctttctataaattttttagccaatgatgaagaagttaaaagtgtaagggatatacaaagttagtttttaaaagaactaatcgaatctaatatcttgagcaaactacccaggatgctctaaagcgtccatttggaaatccacattgttttgagttgacaacatgtatcatgaaaagctactgagacctgttcagtgcttttccttgtctttttaatgtatatcatatacagatctacttaacataatgaacttcctaggaatcagacacaaaaatagtaaaaaacttagatacactgagcgcctgtccaaacgcttttcattactttgcatactataatattgagcaacctccttgctcttccaatagatttcggttcttacattgctattaggcgagaggaaaaactacttctggggcaaacagtagttttttctgtttttaggatgtatataatttacataaaagtaattgtccaagcaaatttgctcaactaagcatcttatataggagagtttcaaaagaaaagtaggagaatgactaatatgaacttatatgatatcaaaggatcctatgatgctgtgtttagtttgggaagtgcttgtaatccagctcttcaatttcaacgccttaatttaaaaagatttacatcaagtccacttgattggaattactccccattcctttccgatgtaaatagattgttaaaaaataaatttaatggatttatggaacttaaaaacatgcgtgtaataaatgataagggagtttctatatacgctgatgaaggagtttttgtttttcctgataaagggcttcataaacccataaaatcctatctagtactagatactgtttataatattttttctgctcatgatttccctattattccgaatcaacattggtttttggcttatcctccctttaaaaaaacacttaactatcggatagatagatttttagataaggttaagaatagttcatcgattctatttgttaggtgggtagctagttatcaagaatcagttgaattagagtctactctatctcggataacgaaggggaactttaaagtccttatccttaatccagtagaaggtctgcagggaattagtgaagttgattggggattaagtagaacttgtgtagttaacgttcctaacgatccaaatagtaatgtaacatgggattacgttttaaatggagtaacattaactaattaagggctttttttagaccactaaatcgtttaatttataacaatttttttatcaagaataagatttaatactttgagaaaactactcaagatggtgtaaatcatcgctctgtataaaaccaagtataagcagaaaaacctactgttcagggggtcagtctcgaggagcagtaggtttttccattttaagctgtctatgctatacaacattagttaacataatggattaaatcggtatctaaaaaatcttttaaatgggcattttttcctctagagcttatttttataattgacctttttacagcttgtccaatcaaatttatccaattaatcatcttatatagtaagtcataaaaaaaggagaattctgttgaagctaaaagaaattaagggattatatgatgtaattgttagtttaggtagcgcttgtaatccggcaatggaattaaaacggttaaatttaagaacattcgttggaccactagattggagtgtagctctatcactttctgatgttaatagactacttaaaaataaattcaatggctttatggaacttgaaaatatgcaattgatagatggagcatttgcatttagtaatgacggagtcctgattgaaggtgtcgaatcttatttgatagaagatacccattacaatgttatttcagtacatgatttcccaataattccaaatcaacattggagtgcaacatatgtttcctataaagagaaacttacccatcgaatcgatcgatttttcgaaaaaatcataagttctcaatctattttatttattagatgggcggctacctatgaacaagctgtagaattacaatcgactttggagggaattgttaaaggtcagttcaatattcttattctttgcccagaagaaggcttcaagggtgtaagtgaaattgattggggacttgataaagtatgtgcagttaaagtacctagaatcccaaatgaccctgagacttggaattatgttttagaaggtataacattgacccctagaaaacaatagtatccatcgatttatatagtttcctaccttcctgtctacacaagtgacaaggagcttaccaagttccgcatcttatagataagacgaggttagctgggttctttacttcgggcaagatttggggcacatcccagcattattatgattatgaatcttcttttcctcttgccaatacctaagcaaatcagtatacactcctgagctaacccttacgaagattacaggcctccactgatgttcaccataatgaagcttatcggtaatcatagatatataatatataacactataggcaagtacttaagtattgaattgaaggcttacttacagcggtagctctttcggataatagaagttgttaattcttatttctgattatcttttcctaaatcacatagaaattgttaaaaaaaagatgaatttgaatttcttaacattttaatctggaacaataattttttagatgaggttcataaaagtattattacttcaattaataatactttattctttactcaattcctcaacattcataactcattttttgtattgtacaggcatttttcaaccaattgaatattataaaaaaaaggaaaggatgattaaaatagattcttatggtcattattacaaccctcaagatggaaaaaattacaaaaagggaaaatattatagaaaaaagggagaaaataaacaaaacaaattaagagaaaccaaaagtgaaattaatcaatcctctaatttagacaacagcttatataagatgagtataaaaaataatcataaccatccaattaaagttagtataattatgcctacctataataaatataatcaaatctccctttccctttacggcctctcaaaacaaacgtttcctgactctgattatgagattatcttagtagatgatgcttcttctgataaaactcgtgatattttaaaagaaattgacgtcccatttaaatttaaatatatacgtatgaaaaaaaataaaggacgttcctttgtacgcaatataggaattaagcattctgaaggagatgttttaatctttttggatggagaaatgttagtgactcctcattttattcaaaaccactataaacatcacttgcaagaaacaaaccttgtagtcacgggagccatgcattatgaaggagtctatacttttattatgcctgattataatgaagatcaattggcacacctaaaagatctagtgagaaaagatcctaagtatatggaaatatacgaaagttacgaacgtactagacataaatcaaagaaaccttatccgcttgtaacaatagaagatattgatacagaacgttttcaaagtttatcattttctaaccgatattttcttaatagtgggttaaaacatttcggggagaggcttaagggatttacacttccctatatcgcatttttaagtggaaatgtatcagtgaggaaagaagaattaaccaaatctggatattttgatgaaacctttgttggttatggggcagaagattgggaaattggatatcgtttatataaaaatggagcgcaatttgttttagatccctctacagttgcttatcatcaagagcatccaatatctaagaaaaaacttaaagaacaatggggtaatcattatcgtttcgttaaaaaacatccaaatatcgacgttcttatcttatctcttgaatggaaagaactatcatttatgcatatgcatcagacattagttgaatataatgcactagatgagcgttttccaaatgaatataatgaactaaaaaaagcttttcgggtaatgctttttagaattattgaatgtttaaataacgaacagcctgttacagaactttacaaactgcctggcggatcagaggaaagactaaaaattcatcaacaatttgaaacactacgtcctcgcggatttgattatcttgcaagttctttcgaacaaatatatcacttgtagtctttataaagccaggattaaaattaaaaacaaatgatgtgacagaaagaaattactttcaaacagtaggtttttctgtatttaaaatgtgtagaacataaaattttagttaccataatgaattttacagacatggaaggcttattcgatgattaactgaagaggcttttgatgtgaggaaaatgtatataggaatgaattaaagtaaggttgtattaactagtaaataaacactattcattaactcacttcaagtgaattgtccaatcaataaagtggactatatctagagtcttgttagttaaaagaaaaactccctaccgtttaagggagttttttcagtttagagtgtatacggtatataaagttagttttagaatcccactcaaaagaactcttggggaagtagccgtccaacaaggattgtttttccagaatatgtacgttttgatacatcgttatcaatagaatttcaatgttccttcagtaggtgaaattggaagtaatcaataaaacacgtaccttttatatatgtgttatgacctgtgaaaaatagcatgaaaggtataactacaaaaaagtctttacctctttcaatcaaatttttttagatatttaatacttagaatatggttaatattaaaatacatatgctcaaattttctttgtttatctaagggtggtttgccaggtgcaactgacaggaatctacctaaatgtaactccttgttaccaattaattgctcctctatgtcatatatagattgtttatctttaattgtgtaatttctcccgtctattattttaatttcaatggaaagtacatcttttgttttgtctcccactttttatctctcctttaacctagagaacatcatattttataatcattaatcctaattaacggtaaggtcgggcataaaaatctatttttactaatgaactatttaagtgtttaacaattttacaattttacaattttactattcatcgtaaagctatagcccaaactttgaaaaaggtgatcggaataactacatttatttagagtgcgtgacagcaattttggctatcacgtttttaactaacctcttttagttaatatagatatccttggtgtaaacgtatttaagatcatcttgtaatggggccctttgttgaatgtatatatgaggtttcgaaaaacatagtaaattaaacttctatctatcgtgattgaaaaaattactgattggagttttgtagtttttttattgtataagttatatcaatggattttagctttgaaaatttttattttatcacttatcactgttagtggataagcatacaagcgaatcagccgtagtttcatagcttatattaacgatataaaaggaagtgcatcaattgaataatagaaagtctaaaaaaaaaacaaatatggtttcttggactaatcaaatattaaaaattagacccgatcaacaatatcaaaataaccttcaagttaatgtttatggtatctttaccgcaggctctaagcctagtgatttcaatggaaggcaaaaaagatttaatcgagacatcaatttggcaaatcagatatggaatggcggaggaatgtgtaatataaattttattccacaacctgtatttgaaatgaaaacaataatagacgcgaccaatttaggttttcaagcagcaatggaaggtcctgttaaaggtttaattaagaaaattaaacataagattggcaatccaattgggatatacgttgtttatacgagtgggaatgattttgcattttcttcggatagtacttgccctataggtgcaggaggagtcataattgaggattttagaattagagatggtatacctaaatttaagctctttggctctattgcattgagcaacagagctttaaatgcaccttttacatttgcacatgaagcaggacatgttctattgactgaacttgataaacaaccttttaataatatatttagatttaatgctatagaccctacgggtccttttattaaccctgtaacggggaagagtgatatagctcacagtaatcttgtaggtaatctcatggcccctgtacttcctaacattatcccaactattgatcccttacaactgcaaaaagctagaatgagtaagatatttcagaatgcaataataaaatgataaatagattatcattcatttgaaaattccattggataatggtattaaagccaatggggatactaaaatgattcacaaaaccccagaatgctattaataggatagcttctaatcttaagagagaacaggaaaagcaatagatagtggatttaatagctcgtcttcaaatgaattcttcatcatatatattatccaagagtttgagcaagttacttcagacaccctaaaggctcgctcctattaggtgattttatataatagaaaaaactactgattaggcggcaccagtagtttttctattttttagctgcaggccggctgtatagttagttcgtgccatgatctgtattgatagtaattaaaaccctcaagataaacaaaataatttatagcttcttagaattggataacaaaatagctcttgaattaaagtaacaattcataaaaaccaagttgtttctcatagtactatgcaaaataactttcattaaattaatggttacattaatcaattcttcaacttcctctctatattcccaggggtaaaacgataataatttgatttacttctacttttactttatatgattacttcatctttttattcataaaacattcaaataaaaaccttaactattagattctgaaatggctttttagtttcttaaaacttaaaagttcattccttaattaatacaaagttggtttacacaacaacaattatcagaaataacatggggaaattataaactttagacatcgctaaaatgcaaataatcattttcaggtttattgtttatatattatggattcaccacattttagcgacgattaagcctggattttttgtataaaaaccagattcttatgctctcaaatcatactaaataaaggaaatacacaagttctatcgaatttgtgtagataaaattttattatatggaaagcacaaagataacatattagaatcggaggccaaccatggatatcaagcaggatgcaataaatgctgaagaaatggctaagcgcttaaatacaacttccagcaatattagaaaatggtgtatcgaattagaaaagcatggttataagtttgtaaaagataacagaaagaagcgttactattctgttactgatcaaactttactgtcaaacttaaagtatgctattcaagaaaaaaaacttcctttagaaatagctgcgatgactgttataaaagggttcgatagaaaccattcctcgtcaagcacacaagaagaacacttgtttaatgaggagaataaccgtgagctaaatattccccaagaacatgaaaattacacaaaagatgttgtattagatacattaaaacaacaacaatctgttaataataagttactagaaatgctagatcattataaaaatgctttaaaaatatcagaaaggagaagacaaacagaacaggaacagacaagcaaacagttaaaagaattagaagaacgcttggcccaaagaataagtcaacagattaataatagggataaagaaatgatggactacatacgccagtcacaaagacaaaaccaacaacaattattagacattgtagctataaaagaaaaaaaacagcaaaaaagcttttttgcccgcttatttggcaagtaacattttaattgcaaaaattaagtgttcctcgttaagcacacaagaggagctatccctaatagtaagattttggctgccttaaggcggccacttagtctttatagctattttaattttttatatctccgaacgatatctacaatggcatttctaggaaagagatagcttctttttcgcatatgttcttgaagatattcatcagcttcttcaattagggaaatcattcctctgtgtttgcctggtgtcaatattcttcatcctcgcctgtgattttatgagaaatacaattcagatttgttattggacctgaacacttttccattgcctttatagttcaattatataaattatcaatagcttgccctctctctgtttcctcttcaacaattgatagtgtttcaggtttttctttcaaaaaagcttgtctagaaagatctttcccttttgctaaatcatctaaattctttacagcaaccggacacacatttctcactttaatctctatctttattctccttttcagtgtttttctacttcaatataaaaaaagtaaaaaacatcttgaagagcataaggagtttttgcccccaccataggtgtggggctaggcaaagcctagcaaaaccgtgggtacaaagaaaatcgttaaatgtcccctatacggcccttttttttggcgtacgtccctttcacgtccccttttgaaatcccaatgtcccctttatgtccccctgttttgaagtaatgtcccctttgcgtccccctcgcaggtgacttagtgtatataatctgttgatgttaagacctttcaaaggtcacacgagtttatcaaggttgaagaagttttcttggtgattcgtactctaaatgttgaaatttcccaaaggattcctacatggaggatacacctaatttgcgtatgatatgttgtctttgtgatctaattgtggtttcttctttagacagtatcaactgcatatctcgtcctgaatatctatctaaagcaaactcaaaaacttgcgattcggcgattgtaaattgatttagaaatacttttcctttaagaattttgcatttctcttctacattttttactcaagaaaccctaacaatgtattcaattctcattgaagtttttcattttgatccacaataagatccttctattttttgagggcaaccgctgttataataaagtctatcaatactttaatttctacatagggtgcttcctatccagaggaagtaccctttctttgtttacttttcttactttctttacatgtttttttaaaatcgctttcacgtataccataatgcttgtgttgttctcaagagttaaaaaatgtaagtccttatgtagctcttctaaaatgtcaaaagtaagacgacgatttcctttcctaatcatatgcttttcctttcagacaacgtatttaatttgcaacgttacttataattttgtctaaaaggatataatttctattctagaaagtaaaaaaaatccagggtctaaaaaaagaacctggctaaagaaaatgaaaaggtggtaacacatcatataggctttataaaaaatatcgtattcgaaaataatctaactgtaataaataaagttagatttctagagcaaactattcaaggtgcagcaacgcatcaacctatgggataattcttgtagcagaaaagctccctgcggaaatagggaatctccctgttttttattcctgcatatccaaataaatatatgtgaatttatttttaaagatctttcaattgcctaataaaattagattttatatatttaaatagttctatatctaactcattatttttttctattttctttattattgcagttgatacttcactgagtcgagggcgggattttgtaacattcttcttcacgtattcaatattagtccaattaaatttattctttagcaatagaagtgattcattaaacaactctgttattccaactaattcaaatactcctagattttcttttgctttttctaaacttagttgagagtttaacccacaaatttgatgaatttgtccattcttagcttgtggatcccaatcaatgtattcttcaaaggacatatttttcatattctcctcataataacccggatatgtttttaaaaaataatataacgatatcacacgttcaataggattacgcatcatagtaaagtaagtatagggtttagcaaaaaggtcatgtattccataaaaatggtgaccagatattgctttgattacttttttattttcttcttttaactgactaaaatgctcgttcattgcttccacggggatatgatcatatatctcattctcagcataagatcttttgaaaatttcatttaacgtggttcctccagttttaggaatgtgtataaagataataagctttttccccattcgaaaatttacctcctctcttaaaaatcctttaattcgtattttccaaatgcaaagagaaaaattcccttttagaaattatgtaacaagcatagccataaattaatagaatcaaaagtccttgcaaacaatgatttcaagggtttttaattaagtgttgaaagtaacacataccatttccacatgattttcttaatttttagtgtattccccttttttcctttttggaacttgaaaacttaaagaataaattctaacaccttgagcaaactactcaaggcgccgtaagatgttaagtacaactgtttatggtatttacaagaaaaattgccttactgctacatgtgggagtttttacttctaaactagtagcatgagccgcaccatataaaggagacttcttttcgcaccataatcaacatcataggaagttactgtatatataacatgttccgttaataaatattgctaattcttgctaatttacaaattaaatctaaatagttataaaatggtaaataaaaaagatagacttaaaatttaggacgtatactttgtggaaaacgaaatacattttcaggatcatatttcgcctttatttttcgtagcctttcatagtttgagccatagtatgctttcccatattttttgatattttgatctggaacattcacatatgagcctgttacatatggtttcaactgttggcgtactttttcaactgacgcaagattcgcatctttttgtgatttattttcccaactagcagtccattccgtataaaacaatggactgcgccaaaagaaggctgtttcgttgcttggtactctgcttagagcaccgccccaatttataaaaaagaaattggcttctgtcccagtagcctcttccaaaaattgtttcattattgaaataggttctttcgaccaaagatccaatacccaggccgaagagaatttaacactctgatcagatctaccagggatcggttcgtcagggtctaagaaatctatagcatctggataagctaatgtctctataattgtttcttttggggttccagcacttagcaaaggctttaataatctcgttagctcactttctgaacctaagaagattccctctgcatggcacagtccatttactttgctgtaaatctcaagtaaacatcctaatcgttcgtctacaaacggagcccattgttgccaagctctaaatacagtttctagttgttcccatggccagataatattgaagacagttgctgtcttaggggcctgatgaactttaaatgtgtattctgtattatatccaaaattaccaccgccgccacctttagaggcccatagtaaatcctcattactagattgatctgcttgaataattttgcctttcgcatctaccattttcaatccgataaggttatcgcttacaagaccaatcgatcgtgacagtactccaaatccaccacccatcgtaattcctccaattccaacggttgggctatctccaaatggagccataaaaccttctcgagctaatccttttacaagtgggccgacgtgaattcctgtttggactgttgcaatcgcatttttcctatctaaggaaaccttttgcatttcactcacatcaataacaacgccaccttttactactgaaaggttcctatctagagcatggcgtccacttctgacgcgcataggcacttcattctcacgcgcccatttaatagcgttgcttacatcttgagaattctgtgcgaaaacaaagacaaggggagagacatcaacataagggttccaattcttaatggcttcttcatagccagggtctcctctgaagattactagtcctgttagctgtattgatcccatctactcaactcctaattttaataataaaaatgtaattataaattttatgtaatataaataataaaatatgcaatttaacttgatgataatggaagatatattaataaaagctaatgttttgagtaaactactcaaggcaattagagttatcaataaacacatagttttttctgttttagactgtatatgatatacaaacttagttaacacggaagtctacgaaaaagagaaccttgatataccaaaggttctctgtgtgtcactttttttcaatatgcagctttctacacagccttgatataacaatgatttctctacaagtgaatgaaaataaggtgtataaaaagcgcacattttatacatatgcagctaaggtacaatgtagtattggtggtaaaaatacggtttcgttaattcgaagttatcttttcattgcttgttatacgtgtgaaacctgataaaaagatacctcagtctagagtgacttcaattagaatcaacttaaagtcacttttttatgaatagatagaaaactattacttttacaccattaaaaattcaataacaggacgtgtttgtaattcttttttcattactcttgtaggtttaatggcccgtaattctacaaccatttcacttacaacatttcgctttctcatcacgtcctcgtatatttcgtgaaatgattttttcttatatactgcttgactaacaaataaagagattttttctgttttccaatcacccttgtatccataatcagttctccaataataaggttgtgaaaaacaagcaaaagaatctataaagtatggttttaccacatatttatcatcactcaatccatattgaaggcgaaaaaccgcttttgaatcattctttgctattctgtgaagttcctgcattagagggagcgtaaagtggatatgttcaattagatgacttgcataaaattcatctatgctattgtcttcaaaaggaagagggatctctgaacacatttctaggtcagctacaatgtctactccttgtcctttcatgatatctagatttatccactcttttagaatagttttcccacaacccagatgaagtttttccttcattaatatctcctccttttttgagtgagtgccttcttaagcattgtctatttttctttataaatgtttctcttgttgaggttacaaaaggagccagtctcagtttaatagaatgtcacttgaaaataataagaataattaattgataaaatcaaaatcttttattgtaacactacataagggcttcttcaggaaataggcatcttatatggaatcagcactcgtccatacccttcttactactttacatattgtcaattaagcaattctattttagtatccttctaactttttaacagaaggtttgaatatctgtctgttcaagaaaaaactaccttaatttccccataagatagtttttcttttcgtataatcacaattattaaaaaagcccttagaagtgtttgttctagggactttttgatttataaagatcagaatgatgtaaaaatatgaacgttaaaagttaatgattccatcaccaaaataaactattcttaatacactatatgttttcattctcaatcaggtgacttgcctaagctgaatattttctatcattggagaaaagtaatcgagatgttcacattattactctgtataaacctgcttctaaacagaaataaacactgttcaggagcattagttttttgttttaagctgtatagtttattcatttttagttatctgggttttgtcggaggaataaaaagggaaatcactgctcggttcatgaaagtaataatatttctctagacttaacttagtaaatttattacatgaaaaataattatctttttaagttgtccaatcacttttaattaattgatcattttatataataaggacgaaaaaagggagggaataaccatcatgcatcctgataacgaaaatttacatgaagtattaggttatgttgacaaggccc

SEQ ID NO: 68 - DNA, 19027 bp, Priestia aryabhattai
  source 1..19027: mol_type = genomic DNA
ttaaatcgtgttgctagcgaactcatacgcaaaattaaaagtcttttcatgagtagttgtattagtaatttcctcatactacctcttattttatcttcaaattttcaaataatacgtctaggaggtgtttttatgccagaatacggttcaacacataataacaaccatagcaatagttatgatactaatggtggaaatatccaaccagtagatgtaccgaaatcaaatagtaaaaagattcctgctaataatgatggtctaagtggaaaagtaaatgcaaacctcggctaccatccagaaaaatagcacgaaaaaaccaccctacacaagtaaggtggttctccgataagttttatcttacaaaactaaaaccatgtagaatctttttttattttgtatattataccatttaatgaaaaagagagcaaccctaaagttactctctctccaacaaaaataaacccaaaatgtgtggtgatgtttagtacaccatctttgtacatttgatagaacaccttctatctatatcatgccatcatatagaaggtcattcacaatagtgtattacgtgcatctagtcaccttacctattcaacagctcgttaccgaaatggtcttatgggtggtcataaagcttaaggagaaaaaagatatggaacctagaggaatgaaaaaatggcacccttttgctacaatgccagagcaatacataggattacaggaagtcataaagaggcaactagaagtacctcaacctgttttaacaaaagagcaaaatgaagcatttgaattaaagaacaaaatgaggttaagtgaactaattgatgttcgttttatgtaaggaaaaaataaaaacgtatttaaaataagcactaattaaaatagcaaatagtcagtgcttatttagataaagtattagttaccaacctccacattattacattttagaatttttgaatgataataactccaacaatgattaaaactattcctatagttctagggatgcttaaagagtgcacatgcactcctattaacccaaaatggtcaattaaagtagaagcaaccatttgacctgcaagaatataagcaactgtagcagtagctcctagacgaggtataagtacaatagaagcaactacataaaaagctcctaacaggcctccggtccatacccaccacggtgctgcgaaccattctttatttacactcataccttttccaaacaaagatataataagcaaaacaattgcaccaactataaaagaaatagtcgaagcaatgataggggaatgtacgacagatctcaattgagcattgacactaaattgagtaggtaaagccatgccagctaatattgcaaatataattaaaaaaattatcattatattcctcccacacctcttttatattcaacagagctgattgctactgagaattgttactatttctcctatgtttaatctgtaaataaacgtaaattattaatgtctatttcagtatttcagacatctcttcattaagaattttatttactccttaataattttaaaataggatggttagctgtacctcattacttgtctggcaatgttcatttattcaacaaataaggtatatggttactatttcaacaaacaaaaagcgcattcctatattgatttatagaaatgcagctttttaagttgttattttatgttttaaatatgaacacccaccagattatctattaaggtgtgaaacgttttgcttcactcattatcaaaatatcagcactttattatttgctgtatcgtacttcaaacattatacaaccatccgttgacttccatggaccatgttgcattccaggagggcgtgaagccaccattcccgcagtgaatatcttatttaaggttaaatcaatgatagaccctttaacgatatatagctcttcccaataattatgcacttgaaccccattaggcgtcgtgtctgtacccggtgcgaactccaaaatgcgaaccatttcttgtgttgacgccccctctgaaataaccctttgagagagtcctacgaccttcccatcaattggtgcaagttcaaaattactatagtctgtaaattcaatttcaggtctcggcattttctccacttcctccaagaaagattttgggttgaatttataaagtaatggcacacgactactaaagattggcacatcttttctgacttgcggtactgcttctaaatctaaagttgcttttaattcaccgacttcttgatctaatttctgaacaacgcctccccaaggatctacaatttgtgagcaaccagcgaattccactcctaactttgcccccgtcacatttgatgcaacaacatacatttgattctcaattgcgcgtgcacgaagcaacgtattccaatgtgtttctcttgccagtggccattctgctacgatgtgtagtacttgaataccttctaatgctaagtcacgaataatttctgggaaacgtaaatcgtaacaaataataactcccatcttcacaccctcaagttcaaatacttcaacttgattaagaccgcccgttaaaaacttttgctcatctaacattggaacaaggtggattttgtcatatgtatgaacaatttcacccattcgatttacaataaccgcccgattaaagatatcttgaccttctaatacggcaaccgagccacccactaagtttacgttaaacttcttagccaatgattgcagaaattcaatggattgattaccgtctactttgcagatttcttttaattctttcaatgcatagcctgtagaccacatttcaggaagaactacaacatctaaattatcattgtagttagcttctaaccagcgctcaatgatttttctattctcttctgggttcccaacttctaaatccatttgaaatactaaataattcactctggtcactccttaattgtacttattaatgagttatctggtttcacaagtaatcataatatagctacaacaaatccagggattatagttactcctaatgtaatattccatccaaaattctttgattctctccttcctaagaaccttaaaaacattatcttgatagaaaacatggagtcatcccgtcatccaatctcttctggcaaaaactccaatttatattgatgggtaattactcgatttagtaccggatcattcatttcgattacgtattcatctccatacgctagtgaatttccgactgttccgattgttcctgaataaaaaacatgtccatcctgaccaattttcatttctttaaagttttcaattaacttttccggggacataagctcaccgcaagtacccttttgataaagttgttcttcaccatttgatcgtatccaacaagttaattctatttgattccaatgatcctttacttcttcaaacttccaaacttctcgggctaaaatatttgggcaagcttgcttagacatggggacactgaaggtttctagtttacgatcggtatggtcgctgccaactgtgacgtacatttcgttatcagaccataataatacatattcgatttcgccacttgtttcattatgttgtacttgaaaagatccagaatacgtagccagctgattagctacaggatataaagtaggaatcgtattaggtgtttcaacgcctaatttagctagttcgtcgatatgctcttgtactttttcctgattcaccccagcataacccgcattaaatatatttttcacacaaaattctagtttttgattgatgccttgaatattcaaactcaatttattctccatttcttttcacacctttatcaatttaatataattctggtatttcccttgaaaaactaggacatctttacgtacttttctagctgagtccaacgaaaaattatttcctaaagtttcctcactttgaacggatcaaattgacagccaaatcgtggcatgtggcatgccagttgaattaaaaataaattattatgttagcgatcgatctggacgaacaccaaaccaaaggagactagcaaatagaatgggaacaatgcttactaacaaagttgattcccaaccaatattttctgctaaccatccacataataagggcgatacaaaagcacctagatttccccaaagattcatccaacctgatacagaaccggaatattcattccctaaatctgtaactgctgcccatgaagtcactaccggaaatcctaatgaacctaaagaaatggttaaccacactacattcatccatggactcgaagcatatgcggctaaatacatagcgccggcaaagatgagcaatcctgaaatcgccaatgaacctctagcaatcatttttgatttccctttcttaactaaccaatctgaaatcattccacccgtcataactgtaataaatatacctaaccacggcaaactagctgcaaatcccatgctacttaacgaaaaactccttgcttccaacaaataagttggcagccatacaagaaaaaaagtaataatatataaaacaacaaaatattgaagacccagcgcccagaatcggccattttttaaaaattgcttccatggagctactgattttttctctgctttaaccgttctattttgtattatcatttttaattcttgtctgtttacaaaaggatgatcctccggtttatctcggccaatcacataccagatcaatgcagctattaaacccagtccggcaaagatataaaaaacggcttcccatccccaagtttgaaaaatagccacggttaatactggcgcaatcactggtccaaaataagatcctgccaaaagcgcactggcggcacgacctttttcttgttttggaaaccaatacgtattaaacaccgcattacctggatacatcggtccttcccctactccaaataaaaaacgtacaagccccattaatccatgagattttacaatcgctgttaaccctgtgaaaatcgaccaccaaattaatgcaaataacactatcttccttgcaccaattcgctccgcaataattcccgcaggaatttgagtgagcgcatatcctaaagagaataacgatgccaacataccgaattgaaccttattcatattcaaatcttccatcattggcttcgcaataatcgaaatgtttgatcgatccatataggcgatcaatccaataaggaaaaagagaaaagctaaccaccatcgaacacgtgatggtttttcaaattcttcactttctactttcaaattctttgataacatttcggacatatgcattcctccccttcgaatgtaaaggcttacaatatgatcaactcatatccttattacataataagaatagaggttattatttaatcttctaaactgaggctcgataaaatagcaactcgagtatgctcgatatgctctaacacagcctctttcgctttttcaacatctttattttttaaacacttaatcaacgaggcatgctctttcaatgtttgttctgtccgattcggtaaattcagtgcactgacaccaaaccacctaatttgatcacttatagtgctcattagatttacaagacgacgattttcactcaactcggctaagtaaatatggaaatctttatctactgagataaattgtccactgtcttctatatgctcaagctgttttacataaatttcatcgagttcttcaatgtttcgctctgtaattttgggaataagcagttcaataactagaatctcaagtcctctccgaatttgaatcacttcttcaacatccacagccgttatttgactaacaaaggttccttttcttggtatggatttcacccatccttccatttccaatagtggaatcgcttctcttacgggggttcggctaattcctaagctttcgctcaaatccctttcaaacaaagtactgccaggaggaatcttatgtacaatgattgcatttttgattccttcataagcttgctgcttgagagaaagaggctgttgtactttaaaaagactcattctttattctcctccttttccgtggtatgtggcatgccagttatcttatttttcagtatattcactctctttttatttgtcaataattttttcaactgatactatacccactgtaactgctagattatcattaataaccttcgtttttagttaaatgccgacgttctgaaatcccttttatttatttcatgaaagggcaagcaactaggacaacctatagcatataaaaactccgcacttcttacatcaccatctactgatcctctactgcggtaagtttagattgtattacagatcttacttactattagctagagtgagtcaccaagagtgaataattgtacgtttagacacattttagccggttacctgtgtgttaaggaaccggctattgttattctcttattttttgacctgtatttagaaaattaaaaatctgaaaataagcaaaaatgaataaaaacttgcatagtgaatatttactatcatcttcaagcaataatattattttttatttttttctaatgacttcaatgcgtttcgatactcatcatcattcatttcctgtttctctttattactgcctttagctaaattagacactgcttgacgaaacattccatctttttctcctatatggtgacttttcctttgctcgtgagtagttggttcatgaggaagttcatttcccacttctacttcaattttctttccgctttcatcaacaactgcttctttatattttttagtaagattaatgaatgcaataagaatcgctaatgtcaaaataaaatagatggagagtgccactaaggctggtccaagtcctgctcccaatcttccgtcataataaagtaatgcccttattccgtccacaatatatcttgtaggtagaatataactgaacagtcgatggacggtaggtaatgttgatagaggaaatgccccaccactggaaaatatccccataaaatttaccgggaacattactaacattccccatccacctaaaaatactgctatcgttttaaataacaaaaacatggtcgtacaactaaagaaagtaaacaggaatatcgtccaaatgtttgaagcatgtgcactcccaaaaattccaaatacccctagttgaataaaaattgaaacacagaaagttaaaatgataccaaaaattatttctgatgtaaggacttcagattcacttaatgcagatccccttttcttcaaaataccattacttcgcaaaagatatccatgtatcatatttgctcccaacattccagtaatagatgatataagggccatgacaaacggtgtcattcctttattaagattaaccggcagcttcagtacatttttggaaacaacctgtacgggattgtctaataatgaagcattctctggtgctactctcattcctttttgcagtaattcgttttttagttgactactaattcctttagaagcagttaaagcgactgtctgaagggtattactcgcaatcatggatgcagtttgcccaatcccttcgttcaataaaacttctaaatcagcaggtttaccatttgtaagatcggaaataagcgtatcatgaactcgaccaagactttttgaatagtctgaagggataattaatgcgccatatgctttgttatttcttatatctgtgaatgcttgtttcctacttttatcaacttcccatttaaaggaatttccattttgcttttcgataagatttaataatatggcatcgccaacttttcccttatcttcatttacaacaattagaggaacatcagacatgttttgttttgcacctttaaatataggcagatatacaaataccatgactaacattaataatgatattaaccaaattggaaaccatgaggagcttaatttaaacaattgattcacgattcaattcccctaacaatggatattttttatctattttattatgtccagtttggtatcgattattaggttatcaaaagatatctttcatagttaaaggaacgtttcttttgttggggaaaattgatatttcttcagtcttttattttcataaagactttctgagttgtcgcatttgaaacagcgtagaagaacagaggagaatactaacgaattgtccatataaatggcactctaggtgttcccttttactatttttatattcatcaatttcaaagaatgacttccacgttttaaacaaaatctcaatctgccaacgaagtgaatacaatgcatacacgaaattcgtaggtacttcttctagcgaagtgtttgtaatatatacattcatgtctatcaaaagtttacttttatcctttatgacatgataggttttttttctatgtaatctttttaaattatggacctattagcaataaatatgttacctttcccacagggtataatgacatttcaatcacataaatgaccttctacttaacgggagtagaaggttttttgatatcaattatttatcaagattaacattgttttatcatctaattcatcacgtaaaaatgagttaagtgtagcttcgcatgtctatcgtctcgaattattatttcagttttattaatcagggttacatgttatttttccatatctcaatgcatcataaatagcacgtccatcgcttgaatttgtttctgtatatttgatcggcagtagcgagaagacaatataataaacagaaaaatagacaaactggtaagaaaagagacttgctgaaaggatgtcatccataactaaaccatttataaggaaaatagaagctaaattagcaatggcacctcccgcatagacacaagcatgggtaaatcgattgtcgtattttagtttttcatatacacaaaaagaatccaaaaagtaaacagattttattttaattttcttccatttaaaaatcgtttttccttttccaatggtaaaatccactctccctccaaaaaagatcgccatgatagaatgacctaattgatgaacaagagacacaagtggtagtacaagtaagaaagaaaacaagaacttaggcatatcactgaatccaaacacacttccatctcctttatcatgaaatgatttaataaatcgttcgcttattaagctagataaaatctatttaataatggacagacttttctcaacagaggttgtgccttttttaatcatatgtacaatcatccgtttggcaccctgaaagacctttagtcggaggctaggaccaattaatttttaataaagtagtagttaaagttattaataatctttgagcattgcttatagagaagaatattttcactttatttttaaacattcttcataacaataaacgaccctatgtatcgtaaccaaagttactaaggtcgcttatgctatattctgatttattatttttttgtctttttctttataatgaaatatctggtttctcattaggtttctgacagaacttcgctaacatgattaatttgatcgaacaaataagtaaggtaagaatctaattcgaattgatcttcttcaacaaaatcatctaacataggcttactttcttctcccatttttaatcactccaacttaattttttttcggtttatttcgcatggtgaccatgattatttttttgtcccatctttcttagaacaaagcttacaattaacaccagaatgattgctccaataatggctggaatgatggcaaaaccaccaataactggtccccaacttcccaggatcagaccacctaaccaagaaccaataaaaccagcaataatattaccaataatgcctccaggaacgtcacgtcctgtaagtaaaccggcaagccaaccgataattccacctacaattagcatccatagaatttccataaatcactctctccttttgaaatagttatctgaaatagttagttgactttacccccgactaaaactcattaatcctgttatttttttccttaataaattttttctcctgatgtactaaaatcatatagctttgcttgcaatctatttttgttcttttggacaccttctaatgtctcgtccattttatgaaaaatataagtgactagtccaatacccaacatataaagaagagtacatactctataatcatctactcatcacctattgtgagattatttagtcttactttgtgattttgtgtaagtttaaaggaagttttgtagaaagtatttcattaatcaaaaaaggatatcataatatacctaatgttagtttttatagggagttattgcagtgaaaaatgaatacaatcttttgtgttttagaatcgcttgagagaagaatccaaggactgtgaaaaggaacttcttaaaagtgaaagtcatagggacattttttattatgggtcgatgcgataaacaactaactttaaagtaaatagataggacacatatatacttatctaatcgaatttacttatttattacattagttttacttcattttcattttcttgtaactagcgagctttataatgaattaaagtagtttgacaatcataccaaagaccattctaaaattaggcggtgggataatgagtgaacaaatctactctgatatacaacgtaaaaaaacctcgattatagactctttaatccatttaggaatctacaaaaaaggaaacaaacagctttatgaattaaccttacatgagttagaaacagtgtatcaaatagttaatccggcaatccgggatctatctttttagatttttgctaattgcaattcatttgttaaaaggagggttaatctatgtttttgaaaaaattaatcaaaaatggggcagttacggttcattattatgaaaatgggtcactacaaacgtgtaaaggtcgtgtttataatcttaatcttcatgaacagaccctgtctttaaaagatgaaaaacaaaatattctttttattaacttgtccggtattgaagatatttattgatttcaatttagtaaagagttttctagatttttttacaaatggtcactttgtacgtgcaaaagattgctagctagaaaaccttaaagataaagaaatgaaataaaaaggagaaggaataatgggtgaagacaaacaaatatggtctgcctttattcaaaaggaccgatttgaactgcattcgtaccttacttatttatttaatcaatgtcatgatgagagtccaaggcagttagaagatgaaaatatagaagaataaatctattgataaaacaaactgaaaggataaaaaatgaatatgaaaataatgtaggcgacctcacgattctaattcaaatgaataggtcgtctattgctgttataaacattttttaatatatagtagatacatcaattatgtttatgatcttatacaagtaagcttatgtaaaattcattttttactcgtataaagcttagaagggacgagagcttgtgaatacaactgttaacgagttgtatgattttggaatggttttaagggaaaagctattaaataataatctttatgcttattatttaattgatgcaatgagaagagaaaatcattttgattttttatattattttttgacagcaactgtagatagtcaaacacctatacctgaacatgtctccaatgtttttttggaaatccttaacgataaagaaaaattgagtgaccttaatccatttgtcatgggtctggttgaaaaataagtagaattgaagatatatatacatttcctcagatatctaaatccctttattaaatgcagtcattgtttttgatgctagacataagtattggctttggtgcgaaacaagtcagcttgtttattaaatattatttttgcgcggtatagattatatatttttgtttgtagtttaataaaatttgagatatacacccaaaccatatgaattaaaactccaactaaaattcctttcaagctacctgcaatagttgtgatatgaactgaaaatgaagagattgtacaatataactatataaatgaacaaactaagggaggctatctatcttgaaagcaacaagcattaaattttatgaattcggagaacctcaacaagttctacaaatagaaaataaacaagtgaaagatcctggggttggtgaagtgctagtacgaatgaaaactcgaccaatcaatccatctgatttaattcctattagaggggcctattcaaatcggatttctttacctgccattccgggatatgaaggagttggtaccgtagaagaagtaggtccatctgtttctaaatggtttcttggcaaacgagtattaccattacgaggtgaaggtacatggcaggagtttgtaaaaacatcagctgaactagccattatagttccagattatctagaggattacatagctgcacagctttatatcaaccctatcacagcatgggtgatttgtacggaagtattggcgttaaaaccaggggatgacctaatagtaaatgcctgcggttcttctattggccgtattttagctcaattatctcgtattttagggtttcgtttgattgcagtaacgcgaaataatatctacacagaggaattaactcaacttggtgcttcatatgtaattaatacagagatgactccactctacgatacggttatggaattgacgaatggtcgtggagctaaagcagcaattgactctattgggggaccatctggtacaaacttagcctattgtgtcagtccaaatggaatatttttgacgataggtcttttatcaggaatacctgtcaattgggcagaaattatgaataacaataaaataaatacaaacatgtttcatttacgtcattggaaccaaaaagtctctacacgtaaatggcacgaaacattttatcagcttatacaatttgttcatgagaaacagttaacattaacaaaaccccaagttcaatatcatctttcagatgtaaaaaaagctcttactactaaaattaagggaaaaatacttttaaccagttaaaagttagggatattattaataaaatgtaaaataataacattatggttgtctctttaaacagccaaaaaatgtttatatccttggctgttcagcaattttcagatttattttttgaatggacagcaagcttactgcagtagctacatagtatctaaagaattactacttcattacctaatcagtagctaattcagtaacgttaccgcgttgttagaaaagatagattttcacgaatgagttgttaactgtcgtaaatttcgaagagcaacaaaacctgctttagttccattaccaaatagaactaaagcagtacatactccaaatgttgctagatttgaatgagcaatcaattgggcagaacaaaaacgaatattacttcttgcaagttcaacgacttttacctcatatttgaaatcactaactttataattaccatacgagtgtcctgttctaggtaacccctctccgttatctaaaaacatgttagttgaactagaataagatttcatatgcaaatttataagtttgtccaaatcttgactacagttaattgttttttcgtctaaaagtccataattgctacctaaatcaattaattctttccttttttttacaatacacttttgtaagtcttttatttgacctactggattgactaccattaacatagctttttctcacctcatcggaatttttcatctctaggaaatttagtaggtccataataaaaaaatagagccaacaaaaaatattatgagcaatataagatagaatgaaaacgttttctacaaaacatatcaaaaaattacaataaaacacaaaaactgtagacattaatgaggtagtccagtcgaaaaattatatatttttagttagcataatgtaatttatagaataggtcccctaatattaaaagaaagcgtatcagcaaatataagtgagatttttcaaaggaaggagttacaaaataagaaaaaggaaataattatcaattattagggaaataaagataaatagtttagctcctttttaacgtggaagataaaaaatatattgaaaattattaggaggaatgtaaaatgacaactaataaaaataatgacaaaatgagccgtgaagaagctggaagaatgggtggcgaagctacagctaaaaatcatgataaggaattttaccaggaaatcggtgaaaagggtggcaattccaacaacaaacgtaataatgactaattgtttgtaaaattgaatttttctatttttacgcggtatatgatatacatttttagttcgcatcatcaacattaatagaagccaaattctttatatataaagaacttggcttctatttttatcaaaaaaatgattaatatgtttatttaataataaaaatcaaattaattcggtttggttagttaaataagaatatgcagtaatcattatcccgttagtaggatatcatttaataaagctagttctactttaaaaggatcgttaacttttctaagctcacaataaccagaactataaatatgaataatcttaaatcgtttaccgcgatagaaaacttctttattaattgacataccttccctccagattcattattacagttttttcaacatattaaccctttttcttatttgaaatttatctggaataaaattaagttactgttcccttttttatatgttttaaaacataaattcaaataaattttaaaatatactcatttatggacatactttttacccctttgaacaaactactcaagacgccgtgaggcatcacaccaaatttcctattctaaacagggaaaactactgaacaggagcagtagttttttctttttgttctatccaactatgctatcgccttgaaagagaggaataaaatttaaaattactcttgtttagcagacagaaggttcactcattggatattttgtgcaaaattagttatgacttttaatattgtttaatttataataaaaaggaaaaaaatatggattatttgttccgagaaggcgccttcttaggaacaaactaatacgtagattatacaaaattagttttcttggggagaaacaacgatgaatcttacacataataattcagaaggtataaaaagagaagaaggacaaaagcagttgcttgaaagaaaccttgaagttcatagaagtagaaaatggataatcaattttatttgtgctatatccctacttgtaactatactttgtttctgctttcacgtaccgcgatctgtaattataactgtaactttactgtttatatgtacaatcatcaaaatcgtacataaaacgttagataaaaaaatagagttgcgcttaaaacgcgttaaacaggagcaaagaaagagcattttcaaggtgaataaaccctaaaatcttttctataagcttctaatgattaacattgaattatctcgaagaccatctattttgttagagttggacttaaggtgatctaaataatgtttttactattgtactttagtatcaggataaaggaatttgatctataataagagataacgtggttttctgacatgaactcgtcacttctttaagagcatctatttttataataggtgtttagaaatatcaacgtagcaaaaggcacttgcatatagcaagtgccttttataatgtaagtaaaaccataaagctaaaattcgcttaaaagtgtagttgtttttatgaattatatcgctttgtctaaaagagattcacgtcattttttatgagtttttttaacagaagtactgtagagcttttatttttaaactttttgtctttataaataataaaggacaaaagatgccaggtggccaatttattacgctataaagcgagcaataggaagacccatacagccatggtatactaataacaaacatggagatgatggaggatattatgacaaaacgattagatttacgtgtggactttgcttttaaatcactatttggcacacatggaaatgaatctattttagctgcctttttaaacgcagcactccgttttccagatgagaagaaaattcaaacggttcaattattagatcctcattttaataaagaaaaccaagaagataaacgttctattttggatgtacacgcgcagctagaagatggaagtcgtgtcaatattgaaattcagcttaataataaacatgacatggaaaaacgaacgctctattactggtccaaaatgtatagtagtcaaatgaaagaaggcagggactatggagaactttgtaaaacaatcaccattaacattgttaacttccgttatttatctcatattcatgagtatcactccacctttcagttatatgagcgagaacagaagttactcttaactgatatgctcaaaattcattttatggagctacctaagttattaactaaatggcgtaacagagaggtagatcctcgagaagatcaactcgtacgatggttattattacttgaagaatccgaagatgaagaaatcactcaggtattggaggagattgcgatgcaagaagatcaagtattaaagaaagcgatggacgaatgggaacgtgtgagtcaagatccagaagtattattagcttatgaagcacgaagaaaagcgttattagatgaaaagtctgctttaaaaagagctgaaaaaaaagggaaagaagaagctataaaagcgatggctattggaatgattcaagaaggtatagctaacaacgtaataagtaaattgacaggcctttctatagaagaaattgaaatgcttcgtcatcaaggaattaaaaagaagcagtgtcttatgtacactgcttctttttaatagataatttttaaacaatgaattttgttgaagtaaacgcttcatatgcttttgtgggattggcaaaccattcagcaatttcatttgcttttacttggtcctgtgcaccctgaagtagcaattgaatgacatgctcaggtaatggtttcgtcatagcatttgtccattcagttacctcttttacatactgtttcattcgattccaataagactctcctgtttctacgtcccacttagaatttttgtaatccataagagtttcatacaattgttccgcacaataggaagagagattacaaccttgacctgtaataggatcgtttagaaatacactatcgccacagcccactaccagcttgtttttaaccataagatatggctttcgaataataggtgttaaggcagtttgaagaaagctattttcatcacataaagcaaaatttttttcatcaattcgattataaatttcagggaaaaactgttgagctgtgcttctcattttaagagtaaactcttctgcattttttattcctttaaatacgtctaaatcactgtttggtattgccataatgaacattatagtagcaggaccgtgttctgttactgcaggtatttcaaacacttcacccaactcaggaagaaccgttacgcctactcccagaggagtatttgcttttatacctttaaaataaccaacgatacattttcgctgaggagttttaaaaggagaaagatcctcttcgatcgaaaacggaaaaagagagccatttttccctgtacaatcaataactaaatcaaactcatttattagtacttccacactctctctatctaccttttctaaacggaataaaactcctttttctataaggtcattaatagaatacgagtaatataaacgttgatcaacagatgatgcaggctctttcaactttcctacaaatagtttctgatttccaattgtaatatgaatactttcaataaggggttgttctccccatttcggcacattaaagcgtgtttcacgattccttgtgggtccgaaatgtacctgggtggacatgattctgcctcttctaatctgatctggtgattgacgttcaatgaccgtaatatcaaaatcgttccttaaagcataggctaggtgcagtccggctaccccactaccaataatacagattctctttttcaacaatctcactccctcgttaaaaaatttcggcattcactaatggactgacgtaaatgccctacctagttactttatatgtactagttctatgaagttctttgctaatatcttcctgtaaatataactactatttattttattggaagctaatttttatgtaaatggttccttagggatagggattatagactgtaaagtgaatttgaggtaaaaggtccttactggttctagtgcaaaaaatactttatagaaatataaattggcagcttcctttaaactactagcttatgatgataatccaaacaattgaccgatgaattctttttgattttgaatagacgagcccataagataagttgtcttttttcaaaaaatagatcttgataaagtgtatgactacgctgaatttccggataaagttagtggccggtgcgataattgtaattcgcttaattcaaacattccgtaaaaaatggcgtttttttacgtgagtatagagaatacggtataaaaaaagtccctaagcataaaaggtaaataaaaaaagagaaggtttttctacccttctcttttttatttacctttgtttccttctttttagggtctgaaatatacgatttatcatgcacacgatgatcttcattatgttctaatttagatgttggggaattttttgagcttttctccatttcataaaaaagataagccactaggccacctcccagcatatagaaaccgagcacatcttacatcactccttcctccttacctactgcagtaaggatttttatatttttcgagtggacaggcaagcttactgcagtagctacatagtatctaacgaattacgacttcgttcataaaattgtatgtaatatctagttttttcttgtagagataattcccttttttatgactagtccaactaataaaccaattg

SEQ ID NO: 69 - DNA, 18746 bp, Priestia aryabhattai
  source 1..18746: mol_type = genomic DNA
ttgctctggagcaactttattagtataacattctatctttttgatgtcaacatctttttttaagatgtttctctcaactgcgctgttcatcagcgacatttaataatttaccatatataatatatagagtcaatcgtttttctaaaaaactttataaataaaaaagttaatgaagtaaaccttcagtaaaatgattgaatactctctattacaatagcaacctagccgctatgcagttttcttatcttaccataaaaaaaaagcccagtcattaaactgagcctttttatttaaactattctgctaagaacgcaaaatagagtatgaagatgatacagagagcatacataattggatgaacttcttttccacgcttgctgcataacattgtaataggataaaagataaagccaaccgcaatacctgttgcaatactgtatgttaatggcatcataattaccgtgaagaatgcaggaactgctacttcgaactctttccaattaatttctcctaaatttgacaccatcagagctcctaccgtaattaaagctggcgcagtaacagctggtgttacgaccgctaataatggagaaaagaacagtgcaactaagaagaacgctgccgttacgactgcagtaaatcctgagcgtccaccagctgctactccagcggtagactctacataagctgttgttgacgatgtaccaagaacggcaccaactacgatcgcactagaatccgccaataaagctctgcccgctcgcggaagcttattatctttcataagcccagcttgacttgctacagcaaccatcgtgcctgctgtatcgaagaagtcaacgaataagaacgttaaaataacgactagcatctttacagtaaagatatccccgatattttgaaaagctgcgccaaacgtcgggtcaagactaggaactgatgaaacaactgctttaggtgtatcaattaaaccaaaagccatacccgctacagccgttacaatcataccgataaatacagctgcatttactcgaagcaccattaatacaatagtaatgacaattccaaaaaccgctagtaacgttgttgggttcgttaaatcaccaagtccaacaaatgtggcatcatctttgacaatgattccggcgcctttcataccaataaaactaataaataaaccaatacctgctccaacagccatttttaattcaataggaattgaattaataattttttctcgcaggcttgttaatgttaaaagaataaaaataacacctgatatcataacacccgttaaagccgtctgccagggaattcccattgtcagaacaactgtataggcgaaaaatgcgtttaatcccatacctggagctaatgaaattggatatctaccaagcactcccataacaatcgatcccatagctgccgccaaagcagtcgctgtaaacacagcaccttggtccattctcatactatcaggtaaatcttttatatcacttagtgatagcacggatggattaacaaataaaatgtaagccatagatagaaaagttgtaagtccagctataaactcttttcggtagctagtacccagctcttcaaaacgaaaatacttcttcacgttttttcctccctttatagaagccgcatgcacttaggcaagccataaaaaatgcctctacactatggcgcgtaaaggcataaaatcgactaaaagagaaatgtatgagcaaaaaaaacaaaagatttttatacatacatgtattactttctcgtagtcaagccatttacggtagctcggtagaaacttttgggccttatccccaagattatacgacattaaagctatatctcgctgttttatgttactatcctaccattaactttttaaaaaagtcaacaaaaaacgaacattcttataaaagaatgttcgtttgttcggttttcttacatgttattcccattcaattgttgcaggtggcttacttgtaatatcatacactacgcggttaatatgcttaacttcgtttacaatgcgcgtggagataacttcaagcacatcccaaggaatacgcgcccagtcagaagtcataccatcaatcgatgtaacagcacgaataccgattgtgtaatcatacgtacgagcatctcccattacacctacactgcggatgtcaggaagaaccgtaaagtattgccagatatcgcgctctaagtcagcttttgcaatctcttcacgtaaaatagcatccgactcacgtacaatttctaacttctcttccgtaattgcaccaagtacacgaatacctagacctggtcctgggaaaggttgacgccaaacgatgttatcaggaatacctaattcagaacctaatgcacgtacttcatctttgaatagcgtgtttaacggttcgattagtttaaactgcatatcttccggtaatccacctacgttgtggtgagatttgatcgtttgagctgtagctgtcccactctcgataatatctgtgtatagcgtaccttgagctaggaaatcaaacccttttaatttagcagcttcgtcatcgaatacataaataaattcattaccgatgattttacgcttttgttcaggatctgatacgccgtttaatttttctaagaagcgatcttttgcatcgattttaattacgttcatattaaagccttcgctaaatgtttccattacgctttccgcttcacctttacgtaataaaccgtgatctacgaacatacatgttaactgatcaccaattgctttgtgaattaatacagctacgactgaagagtctactccgccgctaagtgcgcaaagtacttttctatctccaactgtttcacggattttatccatttcaacttcaatgaagttctcgattgaccagtttgcttcagcatgacatacttcaaacacgaagttctttaagatatggttaccgtgcactgaatggcgaacttctggatggaactgcacgccgtacatattcttttctttgttactcattgcggcaattggacaagatgggctagttgcgtccacttcaaaaccagctggtgtttctacaactaaatcaccgtgactcatccaaacaacttgttcttttggcaactcatggtacattaatgaatcgttttgtacgttaatcgctgctttaccatattcacgatggctagcaccttccaccttcccgccaaaatgatgagtcattaattgcattccataacaaatacctaaaacaggaatacctaattcaaaaatgttttcatcgcagtgaaatgcgttttcaccgtacacactgtttgggcctccagagaaaataattccctttggatttaacgctttaatctcttctgctgtaattgtgtgcggatgcaattcactatatactccgaactcgcgaatgcgacgcgtaatcagttggttatattgactaccaaaatctaatacaacaatcatgccttccatcttgttcacctctccgaatgtgtaaataatcacttgttattatgccctaaaatataaaaaaactagacttctccctcaaaaaacaaaggcagaagtctagttgagcacgacgtttatcgtcaaatagactgttctgccttcatagtcagatcgtttaaggtgacccggtagagactctcgaaccatattatcgaggatatatgaaggtatacgaaacatttatagtaagttcgagaatattctatcaatccgcgaaacaatggtcaagaactcgtttttttgattaaattttcccacaattcaatcgactctttccattcttttatggaatctgcatttcgatacaaaacccgctcatatttttccgttaattttagcatatttaccgtatttaatttttcgtctacttctcctgcaaagtcgcgcagcgtttgactttcttgccgctttagtccatttgcagcgagtcttttaagtaaaaaagcatacgctgattcaaaggtttccactctctctttctttttataaaaagagatataaaaaggtaaaaaccatttaaatcgattgagatatattactattaacataactacaatcagtccgtagaaaagcactttccacttcatagacaacttaacgttttgaagagaagctgttttttctttcgctctttcttcttgtgccggaagctctcttttcttaggctgctccttcacttgcatttcttgtttctcttcttccctttgaatattttcactagagttgttaggttggctatctacaaaatcataaggattagaaaaactttttgttggttcaaaaggtacccaaccccctcctggaaaatagacttcgacccaagaatgagcattattttgtgtgatttcataggttgtccacttactacttcctgaaatgacggtggcatcaccttctgtatagccctttacccaccgagcaggaatatctaatgaacgaagcagcacgaccatagaggtagagaagttatcacagtaccctctttttgtatcaaataaaaattgatccacataatctttatttttcgtaggaattggaacattttcagtatcatatacatatggatttgatcggaagtattcttcaacggctttcgctttttcataacgattgttcttattttttgttacctcacgagctaaatcctttactcgtttcggcaagttagcaggaagttgtgtataccttgctataaattcgttattattctctagactctctgcctttttttcctctgcttgctgaagaagtccaatatcaaatacaggatatttatacgtcagctcatacgattgaacagtaacaagcttgtcattttgataaggatataatttttcatttgtcggtgtaatatcggtttgaatgccattttttaaggttagcgacagcagttgaggaacatgcataagatgtacagaaggctgcgaataggtaacttctgcttttcttacttgtcctgctacacttgagtcatattgagggagtaagttttcatttcctttaaagggcactttttcttcctctttagacagctcccaccccttacctgtataaacatccttcgtttcaatacgccaatagtgctcatcctctactttggctgtaaacacaaccgtattatcattgacaaacgatccccccaatttagaatcgtccatatcatagccaattcgttgaccgcttgcagattctccctgtccttgatttgttgtatgcgctgtgataaaaggtacgggatctggccactgcggccctggtttaggagcgagataagccagcacaatgacgatagctaaaaagctccccagaaaaagaaacgatcgttttctattttctaaacgctcagtgctcgcagcttttatacgttcaggatttatgcgaagcatggctactaataaaaatccgataatcgtcacgcgaataatagcagcttccgcatcgtaagtagaaaaggtatccaacacggtaatatacaaaatggttaagaagaaaaagaagaaaattcttttttgataaaagatccaatatcgaattaaataagccataatccaaagcagtacaaaaaataaagtgctcctcatttcaaatgataaattcgctatattccactccatgatactttgtgcgtctgactgaagaatctccaaaagtctcggaagccagtctgaagaaaagaaggctccttggaaatagagattgtgaagcgaaaacaaaataaacaatatactccctaacgtcatcacgataaacggcaagcgaaacgttaaacacaaaaaacagtaagcaacaaacaagataaagtactgaatttgattggtatccgtcacttcatttaaaggaagaagccattccactaataaaaagaatgctcccgcgtacaataagatgttttttacatacaaagctgatttattcacttatttccgccctcacttcctttaaatggtagaggaagaagaatattaacgacttcaatcgttaaagcagaagattgtattccatttacaataaccgtctcttcgtcactaagccctgctccttcatctttaacgacaattattgatgccttagcatgcagactcagcttagattgaacctgcccaatgagagttcctgtaacttgactgacaatgaccataaaagaatgctgcttttgaatggcaatactcttaaattctgtttcgaatgctcggttgttaacaggctgtgcacgcgctaagtgatacaacaggttatcagtctcactttgttcaaaggttttttgtaaaaaaagtgcatctccagctaaaagaaaatcgagttttttacgcttggtttcttcatgaatgagcatggatgccagaaagctcattcgttcttcaaagtatagagagcttataacatctgcaatgataatcatactccgttcatgataatgaccgaactctttagaaatcaacgtagctttacgagccgtcgccttccaatcaatagaccctaatcggtcacccggctggtattctctaatgcctgtcactaacgtagtagattgattccccgtcgaaacttcattttttccttcttctattcccgctaaaagaaacgggatatctatcttatgaatctgaggatacacgataaaccgctgctgcagcggataatatgccttcttttttacaattcctaataaatcactcatttcaatcgaaatcgtaaaaaattcatattctcctctttctacaaacgatctttcatacggaataacggcgtttcgttgaaaaagcggataaattgttctttcttcttgatctaaaaggttattctcctctttcactgctgccatataaacaggaaaagccgaggagcgtgtaatgtgaatgtcatacgaaagatgatctccagcgaatcgaggctgtagcttcacatcacgagtaacattccacttctttaacggataaagcaaaacgactaccgcatataacccaaaaggtaagaagctataaaataaaaaccagctgacaaagcccccttgaaacatggcgtaagaaaacgtagcagcaaagatgcaaaataaaacgaaccagtctctacatttattccatatcacttttatatactgtttcataaagtaccctcttaccttttaacaggtactttcgtatcagccataatttgcttcatcacatcactcgctgttaagccgctgtactgggtatcaggtcttagcgttaatcgatgtgcacacacatacgaagcaagctcttgaacatcatcaggaagacagtaatctcttcccttcactaaagcatatgcttgaatggccttcataaatgaaaccgttccacgaggactgatacctaacgaaacatgtggatgagagcgcgttttgcgaatgatttcaatgatatagtgcttgatcgcattatctacataaatactgcttacagctttttgagcctgtactaattctggaatgctcatgacgggtttgacatcttcaagattgatctgggtggatacgccatttaaaatttgaagctcctcttcttgcgtaggataccccatgcttaatttgaataaaaaacgatccagctgcgcttccggcaaatgataggtcccatcaaaatcaacaggattttgagtagccatcacaaaaaaaggcgctggaatttcccgggtgataccatcggttgttacatgatgctcagccattgcttctaaaagcgccgattgtgttttaggagaagtcctgttaatctcatcagcgagtacaatgtggctcataataggacctggacgaaaatgaaattccatgtcttttggactgtaaatagaaacacctgttacgtcggatggcagcaaatcgggcgtgaattgaattcgtttaaattctgcatcaattgatttggccagtgccttcacgagcatcgttttccctacacccggcacatcttcaagtaaaatatgcccctctgcaagcaaagccaccaaactcaacgtagatacctgacgttttccaatcacaatttgatcaatgttttctaatacttggtttaatttactattaatatgatccagctgaatcaataaagctcccccttaaaactcagttaaaccttgagtttaataagtttcccaataaacatagtactatcttaacaaattttaaaaaaatctgaaaatattaacgcacgcaaaaaagcgaccaagtgagtacttggtcgctttttcagagagggcagtgattacatcatgccgcccattccacccatgccacccatgtcaggcattgcaggtgctccgccttcttctggcttgtcagcaacaactgcttcagttgttaagaacatagccgctacagaagaagcattttgaagagctgaacgcgttacttttgttgggtcaacgataccagtgtctagcatatttacccactcgccagttgcagcgttaaatccagttccaactgcttcgccttttagacgctcaacgattactgatccttctaaaccagcgttgtgagcgatttgacgtacaggctcttcaatcgcacgtaatacgatgttgatacctgtagcagtgtcaccgtcagcttcaatgcttgctactttattatagatatttactaatgcagtaccaccaccagctacgataccttcttcaaccgcagcacgcgtagagtttaatgcatcttcaatacgtaatttacgttcttttaactcagtttcagttgccgcaccaactttaattacagctacgccgccagcaagttttgctaagcgctcttgtaatttttcacggtcaaactctgaagttgtttcttcaagctgagctttgatttggtttacgcgtgctaggatatcttctgcgtttcctgcaccgtttacaactgttgtattttcttttgttacaacaattttagaagcgcgacctaattgatcgatgcttgctgtttttaagtcaagaccaagctcttcagtgattacttctccgcctgttaagatcgcaacgtcttgtagcattgctttacgacgatcaccaaaaccaggagctttaacggctacagctgtgaatgtaccacgaagtttgttcacaactaatgttgctaaagcttcgccttctacgtcttcagcgatgattaatagcggcttgccctgttgaacaacttgctctaataccggtaagatttcttgaatgttaccgatttttttgtctgtgattaagatgtatggatcatctaatacagcttccattttatctgaatcagttaccatgtaaggagatgcatatccacggtcaaactgcataccttccaccacttctaattcagttgtgaaaccttttgattcttcaagtgtgataacaccgtcgttaccaacgcgctccattgcttcagcaattaattgacctacttcttcgtcagctgctgagatagccgctacttgagcaattgaatctttaccttgaattggcttagagattgcttttagttcttcaaccgctacagttactgctttttccatacctttacggatacccattgggttagcaccagccgttacgtttttaagaccttctctgatcattgcttgcgctaaaactgttgcagtagttgtaccgtcaccagcaacgtcgtttgttttgctagcaacttcggctactaatttagcacccatattttcaaatgcgtcttctaattcgatttcttttgcaattgttacaccgtcatttgtaataagcggtgaaccgaatttcttttctaatacaacgttacgaccttttggtccaagcgttacttttacagcatttgccaatgtatctacaccacgtagcattgcgcgacgtgcttcttcgctaaatttaatgtcttttgccatgttctttgacctcctcaagatgttcttaataatctattttttacgtatgataagtttgtggttaaaattagccgattacagctaaaatatcgctttcgcgtaaaattaagtattcagtaccttcgtatttcacttcagtacccgcatattttgagaagatgatacgatcgcccgcagctacttctaaagctacacgctcaccgctttctaatactcggcctgtaccaacagcaacaattttaccctcttgtggcttttcttttgcactatccggtaacacgataccgcttgctgttttttcctcagattttacaagttcaatcactacgcgatcacctaatggctttaacaagtgaaacaacctcctcaaataatatgtttgcatttttattagcactcaacctcaacgagtgctaacacaattattatattaaaacaaagtgggttttttttgcaagtattaaacaaaaaaaaatttaaaatttacgacaactacatataatagtcttagatttcgacgatttcgagaaataaagcattcttttctctgttcaataatatgtatgttacaatacgagcaagaagaaattactaactttacagtacttcttcgacatatatacataaaaaccttttaaaggagtatagaagattggaaaaacgttattggtatgttatcctcacctacatccttatgcagttttcaggagttgttggtataccgctgttaaaattaacgggaatgtttgatcactatccagttcgaacagcgaatgtcatgcttttgacttattggaccatcatcagctttatccttggtttacttattgtcttactgctgctgcgccgtgacatgtccatgcgtatagaacatgcgggaacaacggtaactgttgtctggtcagttcttggggtgttcctggctatggctggtcaagctgtagcaggtatgattgagcacgctcttggcattacccaagtatctgaaaacacacaaaatattgttaatcttgttaaagcaacgccgttcctcattgtcgttacgtctgttattggaccaattctagaagagattatttttcgaaagattattttcggctctcttcacaaacgatacaatttctttatctctgcatttattagttcccttattttcgctgccgtacactgggattttaaacatttgctcgtgtatacagccatgggatttgtatttgcattcctttatgcaagaacaaaactaattattgtacccatcattgcacacgtgttgatgaatacaatcgttattttatctcaaactatttttgcagataaaattatagaaatgcaaaagcaagcagaacaaatgcagtttatttttggaggcatgtttttatgaagaatatccctttaacacgagggtttatttatattattatggggattttatttacctacctggctattcaaaatgctcaggaaaccgtgtggaacttccctacgatcttatttgcactcgtagccgcattcgatttcagatttgcggttcgcatctttatcttgcactataaaattaaaaagttgcagcagcaatataaaaatcaagatgattcatctaaataaaaaaaccactgtttcagtggtttttttacatactaacatcttctctttcttgctctgcccttgcctttaacactttgcgatacgaaatgcgggaaataatgatgctgatttcatacaaaattaagagcggcactgtcaccatcatgtgcgagagcaattccggtggtgtaataagtgcggcaataactagcagtacgaaataggcatattttcgaatttgagataaaaacataggcgttataattcctaatcgcgtcaaaaacatgacgacgacaggaagctgaaacaacaggccaaaaggcagtgtgagctgcattaaaaaagaaaagtattcattaatgccaatcacttggtttacattcagctcatcagaaacgcgtgtcataaaatcgacgacaaatggaaacaacacaaaataagaaaaagagacaccgccgataaagagaaaaatggaaacaggaatatatccaagcgttaccttacgctctttttcatataaaccaggactaataaatgcccaaagttgatacagtgcaacaggagctgcaagtacaccgccgataataacagcaaactgcatataaatcttaactggatctgttaacctaaatgcattcatcgttaaattttttgcctcatcagcatgctgtaaatagacaataaccttatccgctataaaaaagccgccaattgtggcaatgacaaagaaaaataaaacaattaaaatgcgctttcgcagctctcctatatgatcatatattgacatttcttgttcggtcatactatgatcacccttttactctttgtcatctacttgacgctgtttatctttttcacgatcttctgatacgccgctagcggcatgcttaaactctctaagcgtttgcccgactgaccttcctagctccggtaaccgtttcggtccaaaaataagcagtgctacaatcgcaataataatccaactgcctgctccaatccccatattcccactctccttattaatttagacttaaggaaatcgtaacacagtccaccttattcaacaggataatttttcaaaaaatagacaagcgactgtaattctacagccagatcaatatgatgcagtcgaatctcatccggtacgtttaagcgtgcaggagtgaagtttagaatccctttaattccgcaattcactaaacgatcggtaatttgctgagcaacagtggcaggaacggttaaaatcgccactgagatatcatcactcatataatcttccaattggtcaaggtgataaaccggcacgtcacctacttttgtaccgactttatcttctatcacatcaaaagcgcactcaattttggtgttattatttttaataaaattataatttaaaaaggccgttcccagattccctacgccaatcagtgctactttcgttacttcatcttggtctaacgttttacggaaaaatgtaagtaaataattcacattgtagccgtatccctttttccctaatgctccaaagtaagaaaagtcccgacgaatagtagcagaatcaactttcactgcctcacttaactctgctgacgaaacacgctgtttaccagaagcatgcaagttttttaaaaaacgataataaagcggcaatcgtttagccgttgcttgtggtatttttaattgttcagtgttcacgttgtaccccctcagttcatgtatgtcattactaacattttcaagtcatattgcattacctttcacaaagcattaaccgctttgaggtagcgcttccaattctctctcttttctcttgttttatatatactccgcttcacaccccgacggcttttgtctatccagcactacttaaagtcggtagctagaacgaagcaattagcccttcaaaggatccgtttgttagtcatgacggattttctacatccatcatatataagttcagagatgcacttatctcttattttaacatagtatcctgtataaaatgtgcaggtaaaatcattttatttcatgaatcaaaacattcgcttcatcatttgtccttgtccctctacaaattacaaacgcttgtaggaagaacttgtagttgaaaatatgttaaaatacactatggatatactactagaggtgaaaaaatgattattctacaattgaacggtattacaaaatactatggggcagaacccattttatcgaatataaagttagaagtacaatcaaaagaccgcattgccctagtgggacgaaacggtgctggtaaatcaactttattaaaaattattgctgagcagctttcttatgacagcggagaaattattaaacctaaaggtgtttccattgattatatgggacaagatacagttcttgagtcaacactctccatatgggaagaaatgatgacggtctttgctccgttaaagaagatggaaaaagaattacgtacgcttgaaacgaagatgggcgatccagacatttttaatgattcagttcaatacgaaaaactaaccaaagagtacgatcagcttcaagtaacgttcaaagatttaggcggctatcaatatgaagcggatacacggtctattcttcacggtttccgtttttcaaactttgactatagcaccgctatttcctccttgagcggtggacaaaaaacgcgcttggctcttgcaaaactgcttttaacaaagccagacttgcttattctcgatgagcctaccaaccacttagatattgaaactttagcatggctggaacagtttctgcaagggtatgaaggagctattttaattgtttcacacgatcgttacttccttgataaagtcgtaaatcaagtgtatgaagtcacacaaaaaacaacggtgaagtacacgggcaactattctaaataccttgtacaaaaagcagagcgatatgaaaaagagttgcgtcagtacgaaaagcagcaagatgaagttgcaaaactgaatgattttattcagcgaaacatcgcccgcgcatcgactacaaaacgtgcgcaaagcagacgtaaacagctcgatcgaatggagttaataaatcgacctaacgaaggcgaaaaatcagctagtttttcgtttgaaattgagcgtcaaagcggaaatgaagtcttaaatcttgaaaacgtgtctatcggatatgatgaacacaaatatatcgttcagcaggcaaaccttcggattaaaaaaggggaaagccttgcgttggttggccctaatggagttgggaaatctactttattaaaaggtattgtggataaactaagcttcaagactggaatcatttcctttggctcaaacgtaatggttggttattacgaccaagagcaagccaatttaacgtctaataaaaccgttttaaatgagctttgggatgaatacccatccaaacctgaaaaagaaattcgtacagcgcttggaaattttctgttttcaggtgatgatgtactgaaaatcgtttcgacgcttagcggtggtgaaaaagcacgtttggctcttgcgaagcttatgcttcaaaaagctaatttcttaattttggatgaacctactaaccatcttgatttagatagcaaacaagtactcgagaatgcgttaattgattacccagggactctattatttgtttcacatgaccgttattttattaatcgtattgcaaacaaaatagcagagctatctcctgaaggggtagaagaatttcttggagattatgactattatgtagaaaagaaggcagaaatagaggaaatcaaagaattagaaaatataaaagcaaacgaagaacgtacggtaaaagtagataaacagtcctataaacaagataaagaacaaaagaaattgatgaggcagcgaacgcgccgaattgaagaaattgaaactgaagtaaacaaattagaagccgcacaagcggagaatgaagaacttctttgtgaccctgaaatttatcaaaaccacgaagaagtatcaagattaaacggtgaaaatgaaaaaatttcttcacagttatccacattaatggaagagtgggaagaattacagctgcttctagaagaatagcttatattttttcgtatttattcgccctatttacttgttcgtgcgctttaggacaagctttatccactctgtgaataaatagtggatatctgtctgattttcataattaaaacttgttgataacaggtccgtgtactgagtgcacggacttttccacataattatccacagttaattctaaatttattgaatattgttgataaattttttttatccacaaaaaagacgaatgagaactaaatctcattcgtctcttactcttccaagtctaaaccggggtttgcgtttaatgacatatctgagcgttttccttgagcaaatcgtacacttgctgctgctccaatcattgcggcattatccgtgcatagagatagcggcgggataataagttcaatgtttgataatggtgcaaatgcgtcttctagcgctgctctaagccctttattagcagcaactcctcctgctaataaaacttgcttaacgttatattcctttgcagctttaacggttttagttactaacacatcaataacactcgcttgaaagctagcagcaagcgtttgtggaagaatttcttcacctttttgcttcgcgttgtggacagtgttaataactgctgattttaatccactgaaactaaaatcataggatccttcttctagccaagcacgcggcaaatcaattaatggctctccttcatgtgcaaggcggtcaatatgaggtccgcctggatatggaaggtttaacgtgcgggctactttatcataggcttctcctgctgcatcatctctcgtttcaccaatcactttaaactgaccgtgactttccatgtatacaagctccgtatgccctccagatacaactagcgataaaagcgggaattctaattttttgattaactgatttgcataaatatgtcctgcaatatgatgaataccaattaatggcttttgatgtgcaaatgctagcgctttggctgcatttacgccaataagaagtgctcccacaagcccaggtccttccgttacagctattgcatcaatatctgcaaacgtcaagttcgcttgatttaaagtttcttcaactactaacgtaatttgttccacatgatggcgagatgcaatctccggtacgacaccgccaaatcgtttatggctttctatttgtgatgccaccacattggctacaatttcatgaccgtttcgaatcacggctgctgctgtctcatcacagcttgtttctaatgctaaaattaattgattttcactcataaattcacccacataactaatgcatcctcattgttatcagaataataattcttacgaatacctccaggtttaaaacctagcttttgatacaatgattgtgcaatatgattagataccctaacttctaatgtcattgacgtagcacctagttttcgaagaacgtccatcacattgcgcaacagcaattcaccgagtcccttgcctcggtagtctggcaatagcgcaatgttggttacatgtgcttcgtcaataacaatccacgttccgcaatacccaataatattttctccttcttccatcacaatgtaagttgaaaattgattattggttaactcattttgaaacgcttctgaactccaaggtgtcgtaaaagacttctcttcgattttcactacttgatcaatatctttaacttccattaaacgaaacttaattgttagtttcatgttataccttcttttattctttttgctgtgaagcaagccagttggcttcggcttcagctaaacgaatgtagttcggaacaaaagtatgcacagactgcggctctttctgcattcctaaaaaagacaattcacttggtcttggattaaactgctgaacatgggcaaatacagcttgttcacccaacacttcttttaacgcctcttcatgcatgggaagatcattgcctatgaataaaatagatttgttgtatgactttaaatgttccgcccagtccttattaataacaagtcgatcactttcaacttctagaagacctcgttcgttattccattcatatagtcctgtataaagctgttgacggcgtgcatcaaataacggagcaatatatccatcaaaatagcgaccgtttgctgctagcgcctcaaggctagatacacctattaaaggaatatttaaagtccaagcaagtgtcttggcaatggtaacgccaatgcgtacacctgtataagacccaggaccgtgcgccactacaatgcggtctagctcgcttggcgcaatatcacaatcttttaacaaagattccacagcgttcatcacacgaacggagtgattcttttttagattcgtaataatttctccaattactttgttttcttcaacgacagcaacacccatgacaaaattggatgtatcaatggctaacattttcatcttttaaaaagctccttacatatttcaacgtaccgactgcctatcgcttttacaaggattttacgagtcgtttcgttttcatggtaaatattgatttgaatatattcattaggaagctgctcttcaatcagatgagcccactccacgaccgtcacgccatctccttcaaaatactcatcgaaccctaggtcttcaaattcatcccctagacggtacacatccatatgataaagaggaaggcgaccgcttttgtattctttaatgatagtaaatgtcgggctattcacattgcgttcaattcctaatcctttagctaaactttttgtgaatgttgtctttccagcccccaaatcgccttcaagcagcagcacgtcaccaacttctaataaagttgctagacgaacagccagctgattagtttcatcaggagacgtagacataaacgtaaattcgttaatctctgtcattcattcagaacctcatttcaatctgtatatatatattgtaaacgttgtggactatacatatccagtaagaaatccaacaatctttaacatcgccattctataaagaaatttctttgcatataaaaaattccttaggattgctcctaaggacggtaaagttttatataaaaatggttcaaacaataaaaaagacgaaacacattgtttcgtttctaaaacatggcggtcccgacgggaatcgaacccgcgatctcctgcgtgacaggcaggcatgttaaccgctacaccacgggaccatg

SEQ ID NO: 70 - DNA, 18660 bp, Priestia aryabhattai
  source 1..18660: mol_type = genomic DNA
tagtaagtacaggaacaatctttttaattttaactttaacattacatatagctggattattatatggtgttatcataggtagcagcatattattaaatgttttaggttcaggcatccttatgaaatttgtagctgatcaaaagcttgctaacttgtagagaccttataaatcaaggtctcttttttattgctagaacgcacattatggtaactatatttgtgtatcctatatagatttaaaataaagttgtagtgttttagccctttttattgcataatttcatttttgtaattaatcctcgtctaaaacccattattttgtatgagtgatgtagaatgaaatgtaagtgttatgaggaggagtgttatgatagatctttcctacagggagaagattaaggatttttatagtaaaatgaatcatcaatttggttccgaaatattaaatattttaaatggacaggtaatgtacgaggtgtttcaaacaaataaacttttggaaaaaggtgagtatattccttttaacgaggccatgtgctcacatgaaacaagtgttgcaatattcagtgacgaatttataaatttaagggctttaggacataaggtatctatacaagaatacagaaatctcactacgacacccctgaaaccactgtttgaaaaagagtataaatgtaccgtcttgtggtttggtgatgatatgttttgtcaaataaatatgctaacggtactagcatatttagaacaagtggcgtataaggggaaagtatttttcaatatggttaatgaaatgacttatgagattgaaacaactgaaatatttttaagcagttataaaaaggtttatcaacaagtattgatagatcatcaatttcctaatataaaagtaatacctagcatgtttcaaggaattaggttatacatggaatatataaaggccgataatgaaatcataacgtatataagaaaaaatcaaggtcaatcacaaaatgaattgttagaaaatttattccagtcatttcctcagtatggtctaggagatgtgcaatatttaaaaattattgagactataagcaaagtttagcactttgcttatagtcttttttatagagaaattgataacttttctacatgttataagcttccctataaaaccttggtattactcaatttatagagggagctctgtatatcatatacagcttaaaaacagaaaaaaacaactggtccattcagttgttttttctgtttcatgaatgataatcaatgtttggccgacgttgcagaacgtcttaagtagtttgcttaaagtttcaataataattccttaaatttactttcttctacattaaattctaattagttatataaaaatacttttattgcaggaaattataagaaatatgttgaataaatagtatcgatttccgtatttcggtattaaatgttggatccaaattaattccgattaggaatggataagtcttatgaaggaagcatatcaattaggactctccatcgtagaagtaaaagaatttatatatttaaaccaaaaagagcctgtttctaaatgattcaggctctttttggttctgataattcacattatgttaactaaaaatgtatacttttacggaagtcgtatttgattctgttttaaaatgtacatttaaacaacagtttaaatgtatatttcctttttatgtatatacatatttctaatgctttgtgcacaatacccatggtagataaatcatcactttacgactaactttcaataaacagaaaatccactgattaggtccagtggactttctgtttttaagctatataggtactccctattgatagttaaaatcacagctatctaagtatgagccttttctagagcgagttttataccaaatcctatcaatatagtacctgttattccctcgataaccttttgtgtcttaggcttcttcataaaagcactaatctggttaagtaaataaatataaaataaataccacacgacagttaatacaatataagttatcccaagtataagaaacggcataaacgtatggcttccaggattcacaaattgaggtagaaaagttaagaaaaaaacagctatttttgggtttagtaaattggtaaggaaaccttgtttaaaagaagacttattcttatatttatttttagcaatcgtttcagttgtttctgctttttctttatttctcaatgtccataatgacttaacacctaaataaattaagtacactgcaccaacatatttaaagatagaaaataacaaagctgattttgcaataatcgccgaaatccctacaatagcagttaatgtatgaatagataacgcacaacaaattccaagcatcgttttaaaacctccctgtttcccaacagtaagagtgtttttggtcatgatagcagtatctggaccaggtaaaataactaaaaagacgcatgtaattacaaacaaataaaagttttccattttgttatcaccttctgattaaggataccctcttacaaatttctatgtagattaaataagtgggcagccataattatcatttttactatttgttttacttagttaagcttttaatttatctggaatttagatattaaataacttttctgggcctgctatttctttcatgctagttggttctctaaataaacattctgtggaagtaggttgggataaatccttccacagaagttcgcctcccttttaaatatttcttcttaaaataacagatatctccgaatatattttagatttgtagaataaaaacataaattaaagcgctatcatttgtggcgcacatatttaacaagagttcaatttgaattgatcaacttgttttactaatctcgttttcactctgcctgttagtattgatttttctgttgatttttgcgtaataaaaaacataacaaccaataattaatgggaccccgcagtagatccctaatctctgttctggaataaagaagagacttatgataatgatgccgtatataacaaatccggcaattggaacaaacggatagaggggagttctaaactttaaatcctctagcttcccgcctttattaaggtaatgtttacgaaaaaaatactgagaagcacaaattgacatccacacagtaattgtaataaatccagagattgaaattaaccaaaggtaaacagtttcagctgcaaaaacacttgttaaaagcgaaagagcagaaacagatatcgtcataattaatgcatatagagggattccacgtgatgataatttttttagaaaagctggagccatatcatttttagacaaggaccaaagcattctagttccagcgtataaccctgagttagctacggaaagaagagctgtaaggataacgaaattcataatatcagctgcataaggaattcctaagttatctagcactacaacgaatggactctttcctaatcctgcctgttcccaagggattaaggctgaaagaacaaatatggctaaaacaaagaaaaccatcgttctccaaataatatttctaattgaacccggtaaagtttttgctggatcttcactttctccagaagcaattccgaccagctcggtgccttgaaacgaataattaactgtgactagagttaacagtactgcaccaagaccgttgggaaatagacccccgttatttgtaaagttagataaaaatggagcagactctcctccttttaagtcaattaatccaaacatagctgcgcctccaagaatgataaaagcaacaatagctgatacttttatacttgaaaaccaaaattctgtttctgcataacttcttgcggataatgcattaatgacaaagatggtaactccaaaagttaaacaccaaacccagacaggaactccaggaagccaacgttgcatggtcatacctgcagttgtaaattcgagccctacactgttggcccaactaaaccaatacaaccacccaatcgtaaatccggtagcaggattaataaacttcgtagcatattcctgaaatgatcctgaactaggcatagctacagcaagctcaccaagacataacataacaaagtacattaataatccgcctatcataaaagcaagtacagatccacctggtccagcttggccaataatgaatccagagccattaaatagtcctgttcctattacaccgccaagtgcaatcataaacaaatgtctactcttcatagtccgccttaactcagtatttttatcatcaaaatttgtcatcgtgctcctcactttcatgcataatgttttccgcatagtggaattagttccacaatacggaattatatataattttcagataactaaacaaaaaagtcaatatcttgttttatttatttttttattcggaaaatttagttgatttgatcgagaaactttgttaaattcatatttaatcaaatatttaaaattaaaattaaagttgaggtaagttatggtacaatccatcgatcgagctgtagacatcattcaaatactagactcttgtgacaaaaaagattattggtcgatctctgagataacggatcgaacttctctccccattagtacagttcatcggctacttaattctttaatgaaaaatggtcttgtctcgcaaattccggaaacaaaacactacacattaggtccaatctggatggaaataggcttgagacaattagaaagagtagactttagaattgttgcaaaagaaagtatggaacgattagcttatgaagttgaagagagcgtttacttaagtgttttaaatggtacgtattctaccattatcgaaagaattgatagtccattaaaagttcgggttattgataatctaggagagcgaattcctcttcatataggagctcctaataaaattatgttggctcagatgaagtcagatgaaagccatcaacttattaatgggtatccttttttaacaccagagcaaaagcaaattttttcagaacaactagtaaccattagaaatcaagggtatgcggtgagttatgaagagaaaacagagggaactgcatccattgccgcccctattatagggtttaacaataaagtagtaggagccttaagtgtaggtgtaactagcaatagtattaatcaagacagattagatattcttattgatagagtgaaagatgcagctagcgaaatatctactaaaattggcagaacgtcgacagtttaaaatcgacaatctgctttaatttttattcatatagtggaaagtgttttcataatacggaaaaacaagggggatatttatggggaagtggcaaactaaagaacaattaactaaattattatgtaatctcgttcgaattccgagtattacgggttcacaagcagaagagatctttccagactttgtggtgcaacaattatcagacttatcttattttcaacaatatccagatcatctacagaaaaacccaacaggagatgatcgatattttgtcaccgcactagtaaaaaaagcagctgacgtaaaaaatacagttatacttgttagccactttgatgtcgtagacataaaagattatggaagatggaaagaggatgcctttaacccagaaaaattaacatcaatgttctactcacatataaatgagttgccaattccagttcgccaggacatggaaaaaggcaattggttatttggaagaggaacaatggatatgaagtgcggactctctttacatatgtctatgattgaacaagcttgcgaaggaaaatttgatggaaatatccttctattggcagtcccagatgaagaagtaaattccgttggaatgcgggctgctgttcctaagttattggatatagcaaaacaattcgaccttgaatatacaaccgttttgaactcagaacctatgtttacgcgctatcctggagatgaaagtaagtatatctatacaggctccgttggaaaggtgttacctggattcctttgctatgggaaggaatcccatgtgggagaaccatttgcaggtttaaatgcaaattatatggcttcattattaactgcagaaatagaactaaacacagagttttgcgaagttatcgaaggagaagcaactcctcctcctacaaatttaattcaaagagatttaaaagacgaatactctactcaaattccacatcgtgcagtaacgttatttaatctatttttgttagataaacaaatgggagatgtagttttatcattacgtgaaaaagcaataaaagtggcagctcaaatagaggataactatatgaaacaagcgaatcatttctctacctataattcatttacacccaagaacctcaaagttaacatactaacttacgaagaacttatagaatactgcgtccagaactatggtcaagaacagattaatgctcttcaaacttctgttttaaagaatagaaatggtaaagatgatcgtgacttaacaattgagtttgttgaccaattatctattttgtgcaaagagttagcgccaatgattgtcatcttttttgctcctccctattatccagctattagctcgcgtcataaccttttcatccaagatgtagtttataatatagagaaatatgcttatgacaaccataatgttacctttaagaaacagaactattttggaggaatttctgatcttagctacgtaggcttacaatatccagcagaatccatgaagccacttactactaatatgcccttatggaataacggttactccgtaccacttgatgaattagaaagatttaacgtaccagttctaaatgtgggtcctgtaggaagggatgctcatcaatggacagaacgtttggatatagattatgcgtttgaaacactattagatatgcttcctgtatgtattcataaattactaaatccagttttagaacgaaaataatttatgtaaagctatacgtcctatttattcaataaaacattagagaatgtgagatatagaaatgtttataaagaacaattcccctataaacggggaattgttctttaatagattgcctactgaattcttgcttaacataatagatcttatcatctgaagtaaaaaaagcgtaaaaccattgataacaaaagctttacgctttttctttcccctgagttataattttacgaacgatttgtttgactctttatgtttcaatgactaggatgctttataatgagattatctcttattatcaagaaggatgatttttatgatgaccgtaaaggacttatttcaactgtcccttactaagaatttttcagttgtagctggctacaatgcattacataaaataattataagtgtcggaattttggattttgaatttactgaggggattcagccaatgagagaggaagcttttgaacctcatagtcttgtactcagcagcttattatttgctaaccaaaagcccgaacttttaattgagacaattaaagagctgattaagttaaaggtaagtgccttagcctataagccggctatttatgaggatttaccggacgaggtcttacagtttgcaaatgagcaagattttccgattttacgttttggtggagatgaatattttgaagaggtcatttttgaagtgatgacttatattaaaggtagagaaaatgacctctttttacaaaatatcatgcggtgtttaatcgaagatgaggtatcagagccacaactacagtcctttttacaacagatgaataaaccgtttgaggaatacgtatttactgccaatattcgaatgatacaatcacagagctctaaatggatggactctttccttaaatttcaatcatttttaaagtcaggtattgtctgcatatataaaaacagtattctaatcctgttgaccgacaaatctgggaagctccaattttccaaattactaaaggaatggatggacctatatggaatttcaactgatgggctgacaattggttacggtgaagtgcaccagacacatacagaactccatcgagctgtcagagaagcgtactatgcccggattatagctgacatggaaacgaagtctatttgtaactatgcggatctagcatcagaacgactacttatagaactctatcgaaaggatgcaaaattcgcgagcaggtatgtgaaagaatatttgggacctcttctgactgaaaaaacagataagaatttactatataccgcagttacatttgtgttaaagaaaagcaatgtgaaggaagtagccgatgctcattattgtcatcccaatacgatccgttatcgtatggcgaaaatacgtcaactactcgagccttttggtaatgagtttgttttttatgagaatctatctgcagcaataaagttgtacttactccataaagaaattgaaggcacccttttggattaattccaaaaataagctagaaattttagaatcactatcaaattattgctttccctcttatggtattcttagttttagtcaaggagggaaagagatgaaacaatatttaggtgatggaatgctgttggttacagcgattgtttggggaagtggatttgttgtaaccgatattgcattagaatatttaacaccatatcaggtaatggcaggaaggtttgttttagctacactgctactaataatactatttggagccaaactcaaaacgctcactaattccgtcatgtggaaaggaactatacttggtacctttttatttttagcattcgtcttacaaactgttggtttgcaacatacgacaccttctaagaatgcatttttaactgcagtcaatgttgtgattgtacctgtcattgcttacctactgtataagcgaagaattgatcgatatgaaatggttggctcagtcattaccattgtaggtattggcttattatctatacagagttctatgacaataaatataggtgatgtattatcgcttgcatgtgcagtagcttttgctttcgatattttttatacaaatctttttgtcaaaaaggaggatgcaatatcactgactattgtacaattcataacggcttccatattaagtgtagttgctgtcctaattaaaggagatatcccaacatcgttggaaagtgaaggagtttattcgattttgtatttagcagtcttttcaacgacgcttgcctatctttttcaaaataaagcccatcaatataccacggctacaaaagcagccattattttatctacagaatcattttttgggatgttgttctccgttttgtttttacatgaagtattgaccgggcgtatggttacgggggcagtattaattatcatggccatcttaattgctgagttgaagccatctttcattaaaaaacaatctgttaagaagacctatgagaaataaatcatattaagaatagtgcttacattttgatcattacctgagcatattttaaaatattgcacctataccaatggatgggcacgttaccacgataatattttgtttgtagtagtaactgatgttttttgttgtaaaaaaggatagatagagcatattttcattgctcatatatcctttttcatttccgataaaatccattatgttaaccatggatgtataaagtatatagtttaaaactagctaactttagattttttgttgagctttttttttgataaataaaagcagactaatccagtacctagtactttacaaaaagtagtaaatgcataagacggtgcgattaaaacaataacaaacaaatatgcacttatagcaaatataagccaacttgttataagtagaaagctagataagaactccttcatagacttcatcctttagaaaagattaaaaactttattgttttatcatagtagatatacttttttacaagttcatttatttccgataatacgttttatgttaactaaggatgtgtatcatatacatctaaaaaagaaaaacccacctgatttgtcaaaggtgggcttttcttttagctaaatattaagggtgtaattgcttgttacttacatatcatttaatatttttgtagatatctattataacctatcaaatcattttgagaaagcagaaaatgaaaacgattacttaacattaaaactaaaaaatgtctttcctatttcataccgataaaatccattatggtaactgaacaagtataggttatacagtctaaacacagaaggaactactgtccctcaacagtagttccttgctgtaatataaatgtattttggatgatctaatttatctgaagtagtttatacagaaagaatgattgacgaataactcacagagacagattcttttttagttatttactaacttccactacgaatggaacgataaagactttgttactacgctgaaactctccccaaattttatagacgccaggtgaaggaaatgttgtatggaacatagcattagatccttttatcctttcatccatcggatgtacgtgcagatattttgttgcgtcttgatttagaatgacaacgtgtcctacagctccaaggtatggttgtaaatcctgaataggctggttggtttgagcgtcttcaaaatgaaaatttagcatagtttcctgattcgcttttagctggctatctattttaagagacacttgattcccattaacagtttttactaatttcttatcaggtgtaaggctaacaggagctggtgtattccccttaacagaaaccgtatgcatttgaactgtatccgattgtcctttcggtacaaagtcagcaattagctgaaatgatcctccctgagtaaacgtaacaggtactgtgaacacaccttttcccttataagtaggatggacgtgttgatattttgacaagtctttgcttgcaacaatcagatgcattttcttttcgtgattcacctcaaattcggaaataggcttccctttattatctttgattgtgattgttaactggttggttgtattagtctgaggagactgtttaaacttccaatcggtttgtactgcgacttgttgtttttcttttgaagaatcattatggttcatgtttgccatgtcttgttttatctgcttatattcagattccttattacatgcaaacaaagcaatcatagttaagagacataccacgacaaatagtaactttttcatatctacaccctttcattgtaataagtactgctgtccactatttatatcaaatagatgtggagaaactatgcagacttatccatacaagtatagcctctatactcaaacacagaattaagtaacattatgttaactacgtttgtatatgatatatatagcttaaaaacagaaaaaagctactgtcctcaacagtagctttttctgttctcgtaaggaaacgggagaattagcatgatgatgcttcctggcccgcctaccattgaaaattgtgtagttcctaatttgaagataaatcttctctatccgcagcttcgggtggtgtttccatccatccattttctatcataatatcggctgcatcattaacaaatcctgatatatcctttaaaaaattagcatacattagcgctaaatcgcgtcttccgtttacagctaatgaatttccaaaatttcttactctcattgaaaacatatccattttatgaaataccattaatttatcagaaaaaggagaagatgttgaagttgttactaaatgatcaattaattccggagaaggcaagttatcatcgtgaagtttttttatataaccttcaatcgctttataagtaatttcttctccttttataaatagctctcgaatctttttcgtttttgtaacttgactaaacgccattactagggctttacttgccacgttagtctctaaattgtcgtataaatgggcaatttctaatgcatgtaagggtcgtacatctccaataaaaccttttaaataatttttgtgtgctatatttactttttgtggtgtcggaataataggcgatttaataacccaccctttatttattgaaatatttttgatatgttcccccaattttatagttgattccatacaataaagagaaaatttccttatatcctctctatacattaacggtattcctacactgtaaagactaagccctactttagttacataccttaaataatgtacatagaactcatcttcaaataatcttggagcagcaagattaacatcgtcttttgtgaaaccatttggaatgggaatgttttcttttatgaaagtatcttttatagtactctgaaattctttactcaagtttaatgcattttctaataacttctttacatcttggtcttcaacatggtgaagaaaataacttagaatacatgtagccatgctattacccatatatgtagcccaaagtttacctatttccgcagaatttaatttttccatataaaatctcctaaatcgatttttttcttagatttaccattagaagaatatatattcttctaatccctacactataatttttctagaaaaaatcatttaaataaatctcaatgtgtggattggtaaagtaaggtgctcgattaacgtcctgatgtctttttctaaactttaattatgaggcaattcatttcgatcatttgcttgaggaggtttctctatccatcctctttcaatcataatgtttccccaacttgtagtaagttttaaatcccttagaatagatgcttcacaatgtgttattacatctaccctcatacttgcagccatagaattggaataatataccatcgctaaattaaacataaacccggcatgaaataacattaatttatccgagaaaggagctactttcgaatttgtaacttgggtgtctaataaccctggagaatgaaggttgtcttcatgtaatatcgaagagaaaataccaatatgtttgttgcacaaatttaaagcatcacccataaatttatatgcttttttgtccttagttacttgctgaaaaccaagaataatcccctttgctacaacactctttctcaaattaaagtatatatttgaagcctccatcgtatttaaaggtcttttcttccctaatatatccattgcatatcctaagtccgtaatgaattcactattttgtggcgtagaataataaggatctctttcatatattcctttagataagagaatatcaattgatttattataaacgtccatcgcatcaatattacattgatagtaatgatcccgtatatcttttcgaactgagccactaaacgacataccatgtcctgataatccatgaattgtcatatcatgtatgtactgtagccaaaaggaatctgtaaataaagaaggcgcttgcaggtttacatctttacccgtgaagccgtttggtagagggaaattctcgttatttaaaatcttcgttaacactttaagatgcttttcagataaccctaaacaaaattcaaaaagggatcgaatttgggagtctttaacggttgctaatacgtatttgctaatacaaatcgccattgtttcccgaatatattgtacccacaggcttgtaatttctgaggaagttaatctactgtcgtttcttctcaaatttgttacctccaataggatataaatgctacacaatagattatcctgatattttacacttatgcattgtggcaacaaatcgcattcatagtaaaaaccacacactattgaatcccccatagatagacataaaagtctaatgaatgtctaaaaagatgcacaatccataatagagacccttatgaaatcccttgtggctgaacaagggtgtttttctacttggttcctttaacgttgattatgttaactgaaaatgtatggacaatgaaatagcagatcaccttcaagatatatttaaagaagctgggcttacagatataaaaacaactcagcaaaatgaaaagacaaaaaaagatgatcacgattttcataatcatattacaatttgggctaatgtagctcaaattaaaggaaaacaaatgatagaggatggagcaatcacggaggataagttagaacaagctcagagagatttttcggaatggataaaagggtgtgcaaaatctcaaacaatgtacttattaggaatagagggtactgcgaatagagaacttaactagagaatcttttaaaaagcctttgtagattacaaaggctttttgttaattcccagaattcacattatggtaactaaatttgtataggttatacctttagagaatacacatgagatataacgttgtaggaggaatgtaatgaagggacaaggaagagtaagcttaagtatcgggtggattaccttattcttaatggggactgatttatttgttgtatccccattattaccattcatttctcaagcatataaaattagttcagcgacggctggatggatggtaactgtctttgcgattacgtatgctttttcagctccattcttgggatggctctcagataaaaaaggcagaagatctttgattacattggggttattactatttgctgcttccaatatcctaacggcctgtgccccatcctttttgtggttgattgttagccgtattttagctggtttttcagtagcttccattacccctttaatatacgctatcattggagatatcgcaccaccaagtcgaaggggaacatggctttcaattgttgtttctggtcacttaacagccctttgggctggaacaccacttggtacattattggaacactttctaggttggcgttctgtatttattgtaatggccacaataggggttatattgatgtttgtaaactttaaggcatggaagtctgttcctagtaatgaattaacaacaaatctattaaaaggaaatctagcgagaatacttggttccgtaagcgttactgcaatttgggcgatttcaatgtacaccctgtatgtttatttaggtgtagctctacactttaataatggattttcatcggcagaaattgcactggctgttaccttttatggtattggtgcggttttaggaagcctttcaagtgggcaattaactgataagtttggggaaagaaaaatatctataaatacattgattgtattgatcctaatactcctctgcctaggcgtatttttctcatccggtgattggttgtatttctttatgtttatatgggctttagttggatatgcagggttcacatcttatcaagctcgattagctgttgaatatcctttagaacggggaattgtaatggcatggaacaatacggctctatatattggcattaccctcgggtcaatgcttggcggttacgtgatatcgaattgggggtattctactcttccatatgcttgtagtattgctgctgttttaagttttataattagcacccaaaaaagaaaggtgttaaaggaaaaaacaacttttatgagtagataaaatacctcatatatttaatagcaatatatttttttataagtttaatttaatgaaaaaaaatatagttctttatataaagaagtaaatactaaaactctattataaaaaatagagttttagtatttactctaattgacgacaaatatgaactatttcagaactccaaaatagatagaagaagggcgcacatttaaattgctacccttttatctttcctaaacagcagtgtctctatgaatgacataatctttattctttttataatcaaattgtttttcccattttgtaataattacagctgccaaggcatttccaaatacgttaatagtagcgcgtcccatatttaagagaaagtctattcctgcgataaaagctaaaccttcaagtggaagaccagcagctgctagagaagaaaggagtactaccaatgctcctccagctacgccggagatacctttagacgtaatcataagaattaacatcagcgttatttgtgcacttagtgacatatcaattccataaagctgagcaataaaaacggaagcgagggccatatatatacatgagccgtccgtgttgaaagcatatccgattggaacgacaaaggatacaattgatttaggacacccatatttctctagcttattcatcacttgtggtaaagcagattccgcgcttgctgtagaaaaaacaagaattaattcatcctttaaaagttttataaactcgataaaattgactttaaatagtttagctactaacccaaagaagataataaaaaagattaggtatgctgcataagtagtaattattaattttcccaaagggattagtgaggctgcgccaaacttagaaatagttacaccaattaatccaaaaactccaaacggcgcgactttaagaacatatttaaccatatagaacatagcacccgaaaagcttttaaaaaaattcagtactggttgtcccttttcacccatagctgcaatacttaaacccaacagaacggagaagaaaataactggtaaaagctctcctttactcatcgattcaactatattggtcggaacaatgttaataataaaatcgatatgacttcctttatccatctcctgctctgaggctacgtattttgatatatcaccttgagaaaggttattcatattaactcctgttccaggttggaaagcgtttgcaaaaaataatccaactataatcgctatagttgtagcgatttcaaaatatagaatggtcctaaatcctagttttccaagtttcttggcattgcctaacccagcaatgccaaccacaatacttgaaaaaacaatgggaactacaaccattttaataaggctcataaaaatgtcgcccaatggctttagataagtctcaacgccaggatttttatagaacactattccaacaagaataccgaagatcagacccaataaaatctggataggtagtcccagttttttcatttacattatcctcctcttgttctttaagattgttatattatctttctattgttctatacttagcaatctcctgttcataaagatcatccccatgtgcatcatagacgactaaaacgggaaaatccttgaccacaatctcacgaattgcctccggacccaaatcttcgtaggctactacctcggcagattgtatcttatcgcttaaaagagcagataaacctccaatagcagaaaaacaaatagaattatacgttttacacgcatctttaactgattggcttcgaggtcctttcccaatcacacccttgaccccatatttgaacatggctggtgtataaggatccatacgagcagctgttgtaggagcaatggatccaataacttgtcctggctttggcggagttggcccagcataaaagatgatatgatttttcaaatcaataggaagttgtgatttttcctcaaaaagtgctaagaaacgcttatgagcagcgtccctcgccacataaatgactccgttcaaaaagacttcatcccctgcatgtaattttaaaacgtcttcattagtaagtggcgtttgtagatatactttagccattattatgcaccttctttttataaatttagattacacatgattttttgcgtgcagcatgacactggatattcacggctactggaagagcagtgatatgacagccataggtttcaacggctacccacaatgcagtatttgtgccccctagtccctgaggtccaatgccagttttattaatatcctcgattaattctttttctaattgagcaatatgctcttcatgatgatggtcaccaatctcacgtaagattgcctccttagcaatctccgttactttatcaaagttcccaccgataccaactcccacaacgattggaggacatgcccttccacctgcagcttcaatagtgtctagcacaaaattcttaaccccttctactccttctccaggaagtaagaatttcatggcactcatattttcacttccaccacccttaggtagtacagttaatttaatttgatcaccagaaacgattttagtgtgtatgacacctggtgtgttatcgtttgtattctttcggagtaatgggtctcctacaattgaattacggagatacccttccttataaccctttcggataccctcatgaatagcagcttcaaagtctccaccctcaatgtaaacctcttggcccacttcagcaaaaacaacagtaagtcctgtgtcatgacagtaaggtctatcttctttggccgccaattgagcattttcaataagctggtcaagaattgattgtcctaaaggggactgttctgtctccctagctttatgaaatccttctacaatgtcttccggaagtttatagcaagcctcccagcaaagtaccgcgacggcattgcgaatttgttctacagaaatctttctcatttttcatccaccctttatgatatttggttttcatttatattaactttgcaagattcgtgccaaaaaggagatgacgattgaaaaataaataatagatggtttacgaagtaagggaatttcttttagaaaggcagtcaaatcgaccattcgaagagtttttctcgcattaataaagtttttttattctactgttaaaataaaggtccac

SEQ ID NO: 71 - DNA, 18461 bp, Priestia aryabhattai
  source 1..18461: mol_type = genomic DNA
gactatatatcattaaatgatatatattaattaacgatatatcgtttaatgatataaggaggttgaatatgccgcgaaacgattcattagagacaggggaacttaccgatacgtcctactacatcttagtgtccctcatagaagcaaaacacgggtatcttattatgaaaacgattgaagacatgaccaatcaacagttttcaattggacctgcatccatgtacaccacgattaaaaagcttcttgcagctgagttaattatgctttttagcgaaagcaaagacaaaaagaaaacgtatgttgcaacggaaaaaggaattcagtttttaaaaaaagaaattcagcgccgtaaagaaatgattaaacacgctgaagatgctttaggaggtttataaatgaaaaagacaaaatacataatgagcgggggaacggcttttgcagagcaagaagatttacaaaagctcagcgactatgctaaaaaaggctggctcttagatcgtttcgcatttctaggatataccttaaaaaaaggagagcctcaagaccttcaatattcactggattttcaggaaaatgcagatgatgaatattttctcctttttaaagatgctggatggcagcacgtttgttcagaggggcatgccatgcacattttcagcgcatctccgggaacaaaacctatctattccgatatagagactattattgacagatacaaacgagaaaagcatttcgtagggaaagcagcgctatctattcttgccattatgatgtttcttctgctttttaacgctatgagctcatacggttggttgccagaagcagtgggaatgattagcggcattttattaataatttcaacagtgcttctagtatttccaggacttccttacttagcgtatcagcgtaagttgaaaaagcttcgtaatatttaaaaattcccttttcattgaccttccgtgtaaaaccctttataatccttattaactcgataaggtttaaaggttttagtacaggagtgatgaaaagtgaaatggcttcatttgctgtttaatgaacgatgccctaaatgcaagcaagtgttgaatacatcaaaatccaatgcgcttcgctctactgttgtaaaagtatgtccgtctaaccactatcaaaaagaatttcatcctgcgcttgaaatgtttgtggaaagtgatgaagtactataaaaaaagctaacgctatggattcccatagcgttagctttttttatagcagcccccaccaaatcttaattgccgttgctaaaattaaaccggcaaggatccactgaagcacttttgtattcattttctgccccacttttgcaccgattggagaggcaattaggcttgcagcaactaaaataagtgcaggtataaatgggacttgatgcgtgattagctttccaaccgtcgaaccaatggaagaaataaaggtaacggctagtgaagttgcgatggtaattcgagttggaattttaagtaccacgagcatcacaggaactaaaataaaggctcctcctgctcctaacacgcctgctacggctccgataagcagtgataaaatagaagctagccctttattgaattgaagttcgccttcttttatctcatctaaatttttctttggaataaacatcataataaccgcaataagagctaaaattccatatataacatttaatccttgttcactcatataatgtgagctatagcttccaagcatgctgccgattagaatattgctgcccatatataaaattaatgatttgtttaaaaatccgctttttcgatacgcccatacgccgcctattgtcgcaaagaacacttgaacagctcctgcacctgagacttgatgagccgttaatgctcctactcctactaatggaggaatatataacagcatcggataattaataacagacccgccaataccgaccataccggaaataaacgacccaataaatccaataagaaaaagcgtgatgataaatgtaagatccatctatagtcgctccgtttcatataaggaaagggtaccttttacaagagatacccttttcgtccattatttcttatccttttttaatccaaaatttaagaacgtcgccttcttccgtctgaagaagctcatgaccgccagattttgcccaagctgcaaggtcatttttcgcccctttatctgttacgtgaatttctaacacttgacctgcttctagttcattcattgctttttttgttttaacaatcggcattggacaggccagcccttttgcatctagtactttagttgattccatttctctctctcctttgtttaagttgaattttttacttagcgaatcgcacagcggtttggtccgatttccatttcacgctgtttttcttcatctggacttacttttcccatattggtttcacggatttcttgatatgcatttggctgcggcggtaagttatctgttactaagtgtctgaactctgcttcgtctttaatgtttaatccatgatttttcgcaaacaaagtacctaacttttcagccacgctgccgttgtcatttagctcatcaataatcataaaatgagctggcaatacgattaactcatctgataatgctttatagcgtgtataaagcgtctcgcgcagatcgcctacccagtcttcagccataccagctaaatcaggacgtccaattgaatcgatgaacaaaatatcacctgaaagcaagtattgatcgtctacgataaaagaagttgatccaatcgtatgacccggtgaataaagaggctgaattgtaatcgttgtgtgaccaatcacgacatcactgccttcttctaacgccttgtagtcaaaaatcacttcttctgcatcttttggaggcagccagtaagctgcatttgttgcttcagcaataactcttcctcctgaaatgtgatctgcatgaaggtgcgtatcaaacacatgcttaactgtgacaccaagctctttggcgaagttgatatacacatctgccatacgcgtcgcatcaataatagccgcttcaccgtttgatacgatcatataagataagcatcctttaccgatacgaacaaactgataaatttctccgccatctttcaaatcgccgactttaacaggctctaaatattcactccacgctttcataccgccttttaggtacgatacggtgagacccgcttctgaaagcatgtcagctaccatcacggatgaaccttctttggcgcagacaactaacacttctttatcagaagggattttttctaagatttcttctactccgtctaaaagatcgaagtacggaacgtttaaatgctggaattgatgaccttcaattttccaatcactaaaatcactttcattacgaacgtccaagataaatagtggttctttattgataattttagatgtaacttcttttgcagtaagaacatgcactgtcatattaaaatacctccttaggtatataaaatatcaaatttttttaattcactatgattcattagttattctactttacctgtccagtcacgcataccaggaaccacgttaactaagtttttaaatccttgctttttcatcgtttgccctgccatttcacttcgtcttccagagcggcaaataatataaatttcattctctttatttagctcattcgaacgtttttctacttcaccaagaggaatatgaactacgcctggaatatgagctgcatcgtattcttctacttcacgaacgtctaaaatatgaagatgttcatcattttctacttttttcgcaaattcttctaatgaaatttcaggaattggcgttacgttttctttggcaccgcctttacgaagaaagtggtgaagaacgtcaccttctgtctcggtacctaaatactcatgacctgtgctttttgcccacgcttgtaagtcagccgtagagcctttatccgttgcttgaatttctagtacttgacctgcttctaattcattcattttcttctttgttcttacgattggcattggacatgctaacccttttgcatctaatacgaagtttgcttgcatcatttctttttcctccttggtttaaatactagtaggggtatattttcctctaaaaaaattagaccgtttcctctttccactccatcattccgccggtcatattcgttacactgtagccttgctgctcaagaaaaagagctgccattccgcttctgcctccagaacgacagacgacaatgtagttctttgctttgtctaactcatgcatacggaattccaataaaggaagcgggatatttaacgcgtctggaattttacctgtttttacttcctctacttcacgcacgtctaaaatgtgaatttgttcttgtttttttactaattgttctacttcttgtgctgctattgccttcacgctacgtctcctccttcttgatttatctccacgtattcattccggtgatggatgtaaaaccttgctttttcaaaagcttacttgctttcatacttctcattccgctttggcaaataacgactacttctttgccttttgaaagctggcctgtttgcgccggcagctctgataaaggaatgtttcgaaatcctttaatgtgtttagtccgaaattcatgtggtgttcgcacatcgataaactgtttatgtttattttttaactctgcttttaattccatcgtcgatatttgctgtattccttttactggtgcaaaacgttgatatagaaaccacaacagaaagacgataataagcgcattgataatcatattaaccctcgcttcatgagttatcttttagataaataagtttacgtttccgtcttctgcgtcggctaaatacgccgctacgcctgcatattcaatattatctagcagttctttttcctgtaaccctagaagatccatcgtcatcgtacaagccactagcttcacatcttgttcttgtgccatttcgataagctgcggcagcgttaaagcattatgctttgtcattacgtttttaatcattttaggtcctatacctgcaaagttcattttagataagcccattttatccgcaccgcgcggcatcatttttccgaacatcttttctaaaaacccttttttcaccggcaccatttcttctttacgaagcgtatttaacccccaaaacgtatggaatatcgtcacttcatggtcataagcagccgctccgttggcaataatataagctgccattgctttgtcataatcaccgctaaataatacaattgttgttcgtttcttttgttcagtcatgttgttcctcctattaccctatggggtatatttaattctaaaaaaattagctcttttgaatgtaaaagataaatgtgctgccttcttctttgcaatcaataagctcgtgtccagttgcttttgcccacgctgtcaaatcacttttagtatccgtggtttgcatttctaatactttacctgccctaaagtgtccattgtttttttgaatgatgttgtttacaggattcatattatacccctataggtataatgtcaagtggaataatctcatttaatttttcttgtctatacgaatgcatgactatgaactgctcccctttatagcgactagagatcacgcatgctttaacttgctttaattcgtgtaccccctcccctatcaagcaaaaaacttaacatactttttctattctaatgaaccattgggggtaatatatcacgctggagaataatcttgctgtgtcattcacgtctacacacaaaaggtccagttcccaaggagaaccggaccttttatggtgaaaagctgattagctttgatgataaatattatgccattgattccatgaactgtgtggatgctgctggtgccactgattccatggcacatatggattttgctgatgccactgattccacgtgccgtgcggatactgctgatgccactgattccaaggtgtgtatggatgttgctgatgccattgattccacgtgccgtgcggatactgtttatgccactgctcccaaggtacatggggatgttgctgatgccattgattccacgtgccgtgcgggtgctggtgatgccattgttcccatggaacataatgctgctgtccttgatgcatgtttcttcaactccttttcctttgccacatcatatgttcgttctttgatttagagcttatctttttttaaatatgggcgttttgatttcttatgtattcatattgacagttataaaagaatgtacgctttatagctatatagtgcgtttgtgaataaaaaaatctgatcattgtaatagagtaaaaggcattaaatttctgaactcggcgcaaaaaaacaccttctcatttgagaaggtgtttacttattaacctacaatattgtaaccagcgtctacgtgtacaatttctcccgttacgccgcgtgaaagatggctcagtaatacaaccgtcatgtcgccaacttctgcttgcgttacgttacgcttaagaggtgctttttcttcaactttgtgaagaatttggttaaagtcagaaatgcctttcgctgcaagcgtacgaattgggcctgctgaaatcgcatttacgcggatattatcttttcctaagtctaatgctaaatattttactgaagactcaagtgctgcttttgctacacccattacgttatagccttcaaccgcacgctctgcaccaagatagctcatcgctataagagaaccgccttctgtcataagaggttttgctgctttcgctaccgcgataaatgaataagcgcttgtatcttgagcaaatgcatatccgcttcttgatgtattaatgaactcaccgtttaaatcttctgaatgagcaaatgcaacagagtggatgactccgtgaactgtgcctgcttcttctccgatttttttgaacgctgcttcaatgctttcgtcactgtttacgtcacattcagcaattaatgtcgcttgaatttcatttttttctaacagcttgtttaattttcctagtgaacgttctttacggtatgtaaaaattaagtttgctcctacttgatgaagggcttttgcaacaccccaagcaatacttctgtcgtttgcaactcccataatcacaatgttcttgttctttaattgtaataaatcttccatattatcctccaaaaaaaattagtcatcaatgatgactaataggtaattgtatagctttattatagcacaaagatgcgcttagttcctaagagtcttatgaaatatccgtttttgattttataaataactttttacttgtccgaattttgcagccatgcttgcgttgtttcagcaaattttttggctgcaggtgaaagatgataacgagtagctagaccaattgaacggtagctgtctacttgaaacggaatcgcacgcagctcctgcgggatcgaatctaaaagcatttcaggtaaaatactaatacctaagtgatgcgtaaccattgataaaatagcactttcatccattaattcaaaacggatgtcaggctgaatgccatgttcttcaaacaattgcttaatatcatgataaccgccgtacgtcggcataataaacggttctttctctaaatcttcaaaagaaacggttttctgatgatatagagcactttgacccgatacgacacacagcagtcgatctttttttaaagaaataatatgaaattgacttgaatgcgtaatgttgataaagccgcagtctatttctccgctcagcagccactgttcaatttcaaggtagtcgccttccttgagctgaatttgaatctcagggtagtttttctccatcagctgaataatttcaggaagccacttggtcgacacgcttttaaaaataccgattttaatggttccttttgcaagacccaataggctggctgcttcttgatgaactttttcattttcttgcagcactttccgaatggcaagaagcatcgtttcgccttctgttgttagggtaatacctgatctgtttcgatttacaagcggaaatccaaattccgattcaagatttgtaatggcatgactgaccgctgactgcgtgagcgccgtcgcatctgccgcttttgtaaagctttgcaattccgctactttgtttaaaatttcatattttactaagctcattttaccccgcctcaacatgaatttaattcacattcattattataaagattcattttattaatatcaaattcctttgtatactgtgagtacatgataaacactggagggttgaacgtgagttaccgcacgcgagcaaatatgatgatgattggggtaaacgtattttggggcatgtcgtacgtgtttatgaaaatggggctgagttcgctcggatcatttaccattattgcgcttagatgtttgattgcttttttcattgccgggctgttttttcataagcctttacgacaaatcacgcgcaaaacgattttatcatccgctattttaggttttttactgttttccgtttttgcatttgtcacgtttggggttagcatgacgtctgcttcaaacgccggatttcttgtcagtttaacggtcatttttgttccgttgctcaactgcttgttagtgaagaagcttccttcttggccgattgggcttggcgttatcactaccctaaccggtataggtgttttaactttaaagcactcctttcatatgaatgctggtgatttactttgcattggaaccgcactatgttatgccattcatattacgttaaccggcacgtttacaaaaaatgaaaatccaattgctcttggcattttacagcttgggtttgctggactatttgcactgctttgcagctttttctttgaacacccaagcatcccaactactttatcatcatggattgcgattttaggtcttggcgttctttgcagcgcgattggcttcatttgtcaagccattgcgcagcgctatacaactccgactcacacaggacttatttttgcaacagaaccgatttttgctgcgttgtttgccgttctttttttgcatgagctgtttacgcttaaagaattgattggttttgttattgtggtcgcggggattttaattgctcagttagacggtttattattgaaaaaaagagttcgctatcaagagacattgccaaagtaaaagccgctagatttatgaatctagcggctcactttataccttatatgtataaaactttttatctacgttcatcaccgggaaattcgcaggcagcttttctttctctatatgttgaaatccatttttctcataaaagcgatgagcagccctatattgcaaggtggttcctaagtatattctttccacttctctctcttttgcccacgcgatggctgtatgcaataaccggtgagcagttttgaagtttgctcctctatatggctttgctacaaacattttccgtaacgctatttgacgactgccaatgtctattaaagctacgcttcctactactctttcgttgcaaacagccacccaaaagtttccgtttccctgttgataaaagctttcgattttaaataaatcgggctgatctttctcagttattggaatttgatattcttgctgctgaatatgaagaattaaatccactacttcttgttgatacttgctagcatatggcttaataatgatactttcactcaaaatactccaccgccccgaataagattactccaattcatttttaactaactttgatattgtacagcctatgttaactgcaaaaccaatcacagcacctgcaagaatggatatcacgcctacaccaataaaatctcctttagtcggctgaaataaattcatagaaagcaaaccaaacataaaaaacatcggaataagataactcagcatctttttcaacttagcacctcttttccctatctcgataaaccttgtaaccattttatcgtatattaatttcctatttattacaatgtttatctttttcacatttccattcgaaaaatgaagaaaaagtgcctgcctctcgttcctgactaattgagagacggacgctttttttataaaacgtgacttgttgcttgtaaaaagaactgagactgctcgtagttgtacgttacttttgaaaagtcaaacggctgtccattagctaagtggaaaagcgtttcaataaataacttaggatcgccttcttttaaccctaggtactttgcttcttctacgttcagcttgtcgatgtgaagatatagatcagaaaacccgatttttaagccaagcgcttctttaatataatgaaaaatagactctgaaacaatttcgttatttaagtatgtaacgatagatttattataaaatgattcttctagacaaagcgtctggccgttaatataccgtactctttttacataatagatgtcactattttcttctatgtttaaatttaacgcggcttcttgcgtcggctttcgtacatctaactcaatcacttccgacgttaactgaaaatcttcaagttcactcgtaaatccttgattagaaagcaagccaatatagcctgttcgtttatggcgacggacaaaaatgccgcttcctctcacttgaaaaaccacgccttttttctctagcagatctaaggcttttgttacggtacttttgcttgccttaaactgcgccatcagggtttccaatacaggcagcttttctccttgctgaagcttgtgttcttcaatataggtttcaatttcaattgcaatttgttggtatttgatcatagctatacctctttactgaatttgtctcaagaataacacgattataccataatctaactccatgccataaacttaaattatttaatgattattattttatttgggtattgataaattgtatcggtacaattatactgaaagcgtatactcaacaagggggttgaacatatgggagggaaaatcagagattatcacaaacttgcagcagacattttagatgcggtaggcggcgaagaaaatatcgtaagcgctacacgctgcgctacgagactgcgaattgtgttaaagcgctcaaagccagaagccaaacgcaaggtggcttctatgcctggtgttattacagttgttgaaaacagcggacagtttcaagttgttattggacagcatgtaggagacgtttatgaagagtttgctagtttagtaaacttggataccactgaggagcaaactgaaaacaaaggcacgattttaaaccgtgtgattgctacgatgtcagcggtgtttgcgccgtttgtatacatcctggcagcagcaggaattttacagggttcgttaatactaattaatttgttttcggatagctttgcaaaaacgggcacatatcaagtattaagctttatttcatgggcaccgtttgtttttttacctatatttatcgccatcacagcatccaagcattttaaaactaacacctacatcgcagtggcttgctgtgctgcattagtgagtccaacatgggcagaaatggcagccaaaattgccgacggaagcagcattacgtttttaggtcttcccttatccgaaacggtctatacttcttctgttttaccgcctttatttttagtatggattttgtcttatcttgaaaggttcctaaataagagcattcatgaagtagttagaccgctgtttattccgtttttatgtatggtaattatggttccagtaacaattttgcttattggtcctgttaccacgatgggcgctaatggaatcgctcatggctataactttttagctgaaaacgtacctgctttggccggagcaatcattggcgggttctggcaaattgttgttatcttcggggtacactggggaattacgccgatggtacttgctaattttgacttaaacggcagagattcgtttcaagcgtatcaaacaattgccgtggtagctcaagtcggagcggtacttggagttattttaaaagcaaaaagccaagaagcacgcaaagtgagcgtttccgctgggataacaggattattcggtattaccgaaccagccatttacggcgtaaacttacgttttaaaaagccgtttatctttggatgcatttcaggtgctattggtgctgttgtagcaagcttctttcatccttactactttgcttacgcaggattgcccggacctctgaccattgtaaacgggatcagtcaagactacccgatgtcgatctggggcattttaattggatgtgccattgcaatcattcttcccgttgtgcttattcaagtatttggttacggagaagatgcagcaaaagaagcagcgacttcccctttaaacgaagtcgctgtaagcaatccgaccgaaaatgaagaaaccatcagcgcgccgtttagcgggaaagttatccctctttctagcgtaccagacgaagtattcagctcgggtgcgatgggacaaggattagcaattgatccttcggataataagctttatgcaccttttgacggaacggtagtcatggtagcaccaacgaagcacgccatcggccttcgttcagaatatggcgttgagctgcttgttcatattggattagataccgttacattagacggcaagccgtttacactgcacgtagaagacggtgtaaagtttaaaaaaggtgatttactgattgaatttgataaagaatttattgaaacacagggattacaaacgatcacgccggttattatcaccaattcaagcgcttatcgagaagtgatcgttgaagatgttgaaaatagcgggctgaatcaaacattatttaccgtagtgaaataagggggaactaacaatgacaaaaataccaaagaatttcttatggggcggcgcattagcagctcatcaatttgaaggtggatggaaccaaggcggaaaaggaccgagcgtagtagacgttatgactgcaggtgcgcacggtgtaccgcgacaaatcactgaaacagtggaagatgataaattttatccgaatcacgaagcaattgatttttatcaccgctacaaagaagatatcgcgctgtttgcagaaatgggcttaaaatgcttgcgaacttctattggctggagccgtattttccctaaaggcgatgaagctgagccaaacgaagaaggactaaaattctacgacgatgtatttgatgaactgttaaagcacggaatcgaaccggttattacgctgtctcactttgaaatgcctctgcatttagctcgagaatacggcggatttagaagccgaaaaacggtagattgctttgtgaagttcgctgaggtttgtttcgaccgctataaagacaaagtgacgtactggatgacgtttaatgaaattaacaacaaaatggacgtgaacaaccctctattcttatggacgaactccggcgtttctgtaaaaccgggtgaaaatgcaaaagaagtgatgtatcaagcgggacatcatgaactgcttgcaagcgctcttgccgtatcaaaaggaaaagaaattaatccaaatttccaaatcggagcaatggtgtcacacgtgccaatttatccgtattcttcaaatcctgaagatgtgatgttagcagaagaaacaatgagacagcgctacttcttccctgacgttcaagttcgcggctattatccaagctatgcgttaaaagaattcgaacgagaaggctattatattccgtttgaagaaggcgacgaagaaattttacgaaacggaaaagttgattatttaggcttcagctattacatgtctacaacggttaaaagcgacgttgaagctgacaacacgggcgatatcgtaaacggcggattgccaaacggcgtagcaaacccttatatcaaatcaagcgattggggatggtctattgatccaacgggcttgcgctatacgttaaaccgcttctacgaccgctatcaaattccgctgttcatcgtagaaaacggatttggcgctatcgatacagttgaagaagacggatccattcatgacgcatcacgaattgaatatttaaaatcgcacatcgaagcgttagaaaaagctgtgacgtacgatggtgttgatttaatgggctacacgccgtggggaattattgatattgtttcctttacaacaggcgaaatgaaaaagcgatacggcatgatttatgtcgaccgtgacaacgaaggaaacggatcaatgaagcgctataaaaaagattcctttaactggtataaacatgtaattgaaacaaatggtgaagaactataagaaattagaaaaagccggactcctgcgtaaagacataggaatccggcttttttaaaacgtgtaaaaataaaggcaaatacgttatctcggtttatctactagctgcgtttgagcaatttctgtttgcttaattcccgctcgttgaatttcatccgcaaacgattcatgtttcagcgttttgattaccttttcgcttccatctcgaagagtatacactctaaattcatacatactctgccctctcctttaaaataagattgatgcgatacattagatgcgctcctattaaaagccactcataatagaggtaacttttttctcttctttactttacccacttcttttgggaactagacaaagagttttaatctgacgcgatagaaaacaaacaagaagcctttgcggcaagcaaaggctttgatctatttaatattattgttcaaagatggttccttttttaaattttgactgtttaaaagcaaatttcgttaaaagaatataagagattcctgcgaccacaactcctataatccagcctaaatcgacttcgataaacgcagcacctgcaccgatgagcatcgcaagcatggcgcacggattgtagccggaaaacggtcctttttcttgatacaattcttctacgtttactctttgtttccgtaaaatatagtaatcgaccaataaaatagaaacaatcggccctaaaaaagcagagtaaatcaaaatgaacagcccaagtcctgcagctgacgaatcttgaacaagcacccaagggaatgaacagaaagcaagcagtccggtaatggtaacggctactttataatttgcttttgtcagcagggtaatgacatacgtaggcggaataatatttgccaccatgtttactgcaatcacgccaatcacaataaaagctgatacagcgacggtaatatatgaattatccactacaaccgcgaacgctttgacaggattggatatgcccgtagcagaagcaagcattgctccgattgtaagaacgaatccgtaggctactagaattggtgtaaagtataagaacccacgctttgtgtcgctaattcctagcttcagttctctagagtaatcggctgcgcttagaaaaatcgccgcataatttcccataaacatcataatgaaagaaaagaacggaagtccccatgaaccttttgtatgtacccacttctcccctactatctcactatgagaagctaaaagaacaccaaatacgtaaacgaggccaagcaatatgatgattgaagcaagcatctctacccatttgaccgcgtggaagctgtacagagacagcacaatttgcagcagctgaatgataataaaacaaagaacaagattatcaaaagaccctttgctcacaattttcccgatttcgtttaaagcggtaccgcctgtccagctttggaaaccataccaaatgatagctggaatacctcgtaaaagagacgatatgacggaaccttttattccaaaagacattcgaagctgcatcacatacggtatacccgtcttatagccaattcgatcatttaacacaaaaaaagtagaaataataccaatggcaataatcgctgccacaaacgtttgaaaaagatttaataccgcagtacctgctactactaggcttgcgccaagcgtcatatttcctaaattaacgccgtctccaatccacataaacatataggacatcggagttagctttcgatcactttccgcttttggcttcagtgacggatcaagacctgcatcttgatgagaatgcacctcttctataacagtacttgttgcatttgtagacattatacaatcaactccttttttataatattcccactcttatttctaacattagatgtaagttaacttaacatgtacatagtgtatatgaatttcgccgtaagttcattattatttatgtgaattttctgatatttttttgtgcgatttgactaatttttgacctcggctcgcaatatacagaagttgatagtaataaaaaatccaagcgcttactataagcgcttggatgagtcagctagtatttatttttcacaggcgatatagtctttatctcgatctagctttgtattggcatcatacagtgattttgacacatacggtttgtactttgtattgccgcctttatttttcacattagccgcacgagctacgccgcctttgtagtctttgtttaattccgtgcagtttttgtaagatttagctgccgcatctacgtttgaaactgtgctaaaagatacgctcgttaataaaccgaaagatagaacaactggaaaaatttttttcataatggatacttccttcctatattttttctaattaataatagaatgttctatcaatcttttcaatcttttttttacatttaaactactattatccaattttatttgcgagtaactttaagagtcttcaccgcttgtttagccgcttctgcaatcagtttatcattatactccgcatctttttccgtacgattggagaggatcgcaagaataattggatctccttttggcggccaaaggatagcaatatcatttcgcgtcgcgtatgagcctgcgcctgtcttatcggctacttcccagcttttcggcacgcccgctcgtattaacgcatcccctgttgtgtttcgcttcatccaatctgttaaaagtgcacgtttgttttcaggaagtgcctgtccaagtacatacgtttgaagacttgtagcgagcgctctcggtgtacttgtatcgtgggtttctcctggattcacttcatttaaatccggttcaaagcgctcaggcagcgtcacatcgtctcctattttttctaaagcttctttaaatccatccggtccgcccagctgctgcagaattaagttccctgccgtattgtcgctgtagcgaagcgatgcatccgcgagttctcgaagagtcatgcctgtatccacgtgtttttctgtaatgggattatagtttacaaggtcatcgcgcgtataaaagattcgttcgttgagatcttcgattgacttctgctgtaaaagtgcaccgacagcaagagctttatgagtagacgcataagcaaaacgctcatccggatgatacgttaccgttttattggtacccgtatctaatgcaaaaacgccaagattcgcatcatatttttcttcaagcttagcaaactctcgatcactcttagtttcttgtctgtgacattttaccgtttcagcatgtacctcgctgcttgaaaagcttacagccgccgcgcacgacagagcgagtacaggcatcatttttttaagctttgaagtacgaaacatctctttccatgtcttcattacccttcaacacctttcaaaaaagtatttagtatgtattctcttaggtagagattaccaacaatgctattttatcaattatttatccccacaaacatgatagctttatcacatttatataataaaagtgtctaacactgaagatgagcagtatgaaaaccgtaagtattttaaaaaacaggcggcgtaactgagaataaaatcaccgctttctcctcaaacggattgtcccatttgtgcttcagatgcgaagggattttgacgctgtctcctttttctagcacgtatacttcctcttccaaagacaccttaatttttccttctaagacatatgccacttcctcccctttatgcgctaaaggagattctgatgaagacttcatgggcggtacttccatgatcgctgtagctagattccccgtaaagtctggtgatactagcgaatacgttaactcttttactttcatcgttttacgctcgttcgcccgcacgactaaatgagaggtgtttatttcttcaagtaaaaagctgaaagtaggaacatcgaggcatttagctaaaattttaagcgttgaaatggacggattagctaatccccgttcaatttgacttaacatagacggcgtaatctccgctaatttggctaattcccgactgcttagcccctttgcttttcgaaatttctctactttttttccaatatctatgttttccatgatgattcctccgtaaaagatgtttaatcacatttaattttattaaatt

SEQ ID NO: 72 - DNA, 17916 bp, Priestia aryabhattai
  source 1..17916: mol_type = genomic DNA
atctcaacaatatattcctaatttgaaacctgtgtctggaatgacagaaactctcagacttttaaaacaggagggctataaaataggatttacaacaagtaataatcaagttgtaatgaatgaatttttaataaataattctattaacatatttgattatagtcatttttcttttagtcctctctctaaatcaaaagatatttcttcatttttgaaaaagtatgatttaaagaaagaaaatgtggtttatataggtgacgaaataagagacatcaaagcagctaagaaaaatggccttttttgtatagcagtatcttggggattcgactcagtagagcttttaaacacaggacgtgcagataaggttataacacaacctaaagagattgtagatgttttatcaagattataatagtggtttttatatttcttaatctattccgataaatttgaaaaccctttgcttatatgggcaaagggttctttttttatgtaaatatttcttaaggcgcaaatccttgaaaactaatagtaagatatataccaaacgaaagagcacataaagaaacaaaatgtaatgctacaaaagggattttctgtttacctttgataaaaaaagaataaataaacccgaggattgtaactaaagttaaaatagggacagtaatcttaattacctcaccaaaaatattcgccgtaacaactgataaaagaaagaacccaattataactacatacaagattattgaagtaactaaagaggctattgaaacctttaaagcatttttaaagaatttcgtcatctaaattcctcctaatagattttatagaaaacaaaaagaagcaagcatgctgtactcacttcttttaactttcaccaaaattcattgcaaaaaatagcatacctaacatgataagtagtggaattacaacaaaagagcccaaactaaaatatttcattagccctttttcatgttttccaaaagctattactccacataaaaagcccataaggtaaaggaaaattcctatataaagaatatttgagctatatattggtgtgaaatattgccctatcccaataacaattccaagcaacgataaccacaatgagtattgactaaaacgtattttcaagttggtcctccaagaactaaatgcatggttaattataccattcatttatctgtcagttaacataaaatggattttctctgtttcaaatccttaaaattcaatatttatctactactgctcctaaactagctgctttaacatatggctcatttcgtaaggaaagcagctctttttctgttcccgtgacaactacacctataatcaatccgtttttctgtctattttttaggtttttcgactcccccggatctgttttttcgagttcattcaaaaagtctacttctgttttaattttagtagttgttagtttttctcctagttgtggtgatggtttagaaatacctaataaccatcgcccattttctggctcacctctgtaaccagtagactttgcatagttatctacccaataccacgtttggtgaacggatgtaggcagcatcttttgtacttctttcaatgtgtaatttttattgaaagatatggccatctccatgtatttatcatttggataatctttaatcatgtcaaagtcacttgcatacaacttatacttatatttaggtacatagaacagcatctcacgttgtccattaggaatatgatacatcgtagtgtcattaacaatcgtactgtgtgttgagaatgatgcattaaagtttccaagtaaatcatacgttatttcttctgtaccccaaggtatcactttatcttcaatcactttaaatacttcactcttaatagtcccctttaaaattcctgttgaaatggtatcggtgttagtaaatgtattcggagacatcctcacatggttttccttaatgaactgttcagcgagtttattcccttgtgtatttataaaataattgtttccttttattagtacagtaataacaaaacagactacaagtgctgatataaaaactgttcttaaaaatgctatgtattttgcttttttcaatgttctatgtaaagacttttcatcaaaaatggaatctaactcatcattcgtttttttcattacattctctcctatacatttctttaaacgtcttcctagcacgagctaaatacgttttgacagcttcaggtttcatatccacatattccgcaatttgtttataagaccagcccaactcgtactttaaaagaagtagctgcttaaaggtgggagacaccttttgaaggatgcttcttactagaagctgattttctttggcaatcattatgtcttcaattaattgctcattggtaataaggtactcttctactactgcgtactgagattttttgttttttcgacagtaatcgtaatataagtttatcgctactttaaaaagccacgatttatatttaccggtatcaatcgattcaagatgaataagtagtttacaaactgcttcttgaacaatatctttagctgtttcttggtttgcgccttgtttgattaaatataagtaaagttgattcatgacaatttttagctgatcgtttgataaccgatttttcaagtatttttcctccttcctgtcttataacgtatgaatagtgaaaaagtatacaattatttcacatttttctataaaaaagaaaagtaattgctttttgagtaattactttcttactacatgttccaagaaagaatgagttgattctatatttcaaacaatataattttgataataccttgtaataaaaggtattattttttataatttcataagaggtggataaattggaaattagtagagaaattttgaaaggacatattgatacgctaatcttatcgctactgcatcaacgggatatgtatggctacgaattagctaagattgttcgtgagaaaagtgaagaacaatttgaattaaaagaagggaccctttatttatctttaaagagattagaaaaaaataattggatttcttcttactggggagatgaacaaggccctggtggaagaagaaaatattataaagtcacagcattaggtaaccaaaactttgaagcaaagcgtttagaatggcaatttgtgaagaaaatgatggattcttttttatggggaggcactaagtgaagagaatagaaaaatttgtggattctatgtacctgaatgtagaaggagatcaacaagaaatcaatgagttaaaagcagaaatgacaaatcatctattggaagcagtccatgaattaaaagcgcaaggcagaacagaacaacaggctattacaatagcaattaaacgttttggggaagaaaaagaaatacgcgctgtcattggacaattgtttgacatacagaaagtatttgcaaagcgcgtcctgtacatagcaatagtttgtttaatcgtcacaatgtccagcttttattttctatggaaagtggaagaatcaacggcccaaggaatatctgacacacgttcactgatatcgtatgagttgaaagataaagatataataacgagagacatgaaaagaaaaatagaaacgctagttgaagaaacaaactatatatctgaggttactatttataaatcagaaaatgtaataagccgttctggagaaaattatgttgaatatcattggaagtcagtgcagccgaattttcaatatcaaagaactgtttgggctccaaaatggttaggagcagactttgatacatttgaaaatggggatgaacaatgggtcgtttcaataggtaataggagctttagtcgattagaagccgttgtcttatttgtgggaatgaccatttactggactctatttactatttgggcaattatcaatgcttatcatcaaaaaaggttacgaattggatggatttttatatttgtattctttaatattctaggctatttaatttattattttacaggaagacaaggtcttttccttaaaaaacatgatgaattctacgaggattatatttaggagtcacaatttatctggctggcttttgatttggaggaatagcttttgaaaaacatgagaaaggaccaatgaaatattttagtttgacctcttttgtttcacttccagtcctttttatgttaggtatgctattctttacgctgaattttggtgaaaattaagagaagcaagcatgccatgcttgcttctctttgtatctttcttgttaacataaaacaaaatataggaacccgtataaattacttaaacatattctagtcgtaaacctaccccaacttcctctatatcagcaactcgagaaagagctatcttagaatgtaaatccgtacaatgagaagcgtgtagcttattaggaccaagttcttctatatacattacggtattctctagttgaaagtctgatggatccaataaatgaaatcctcctataacatctactattctttcttcactacatacctcttttgcatactcaataatgttacatatccccgaatgagcacaacctaccataataactaacccttctgatgatttataaactaacgcagtatcatcaaaaataaaatcgtcaaattcttctttttcagtgttaacttttccaatagattctttgccctcaaaattaaattttcttttaatttcgcccaaaaacactaatttatcagtcagccaaaatggttgcttagataagttaatagggaaatgtttgtttaatttattgtaagataaaacacttcctatctcacttactgaatcaagtaatttgctttcaaaaactaacggatgcccaaggattgtaggtgtatgataagttaaagcctcacttttggcttccatatgtaggctaattaaatgtgtaagtccccatgtatgatcgacatgtccatgtgataaggctacccaatctaaatttcttaaatcaattctcatcttctctgcatttcttataaaagcatcggaatagccagtatcaaataaaattcgtttatcgtcttcctcaataaagaatgagagtgctggctctcctaagaaatagcgatcaatcaacgtattattatctacaagtactgataatttcatataaatatccaccttttttgtgatttccctatattataactaaattaaggaaattattgttaaccaacaaaagggaatctgtttttaagttgtataagacatacctattgagttcacataatgtactttctaagaaacgccaaataaagagccttaaataataaggctctttatttgtgatcatcttttactttatatatttctattatatttttttctggatcataaaaatgtgcaacacgagatccccagtcttttcgatcatggggtttattaataaactctatccctttattcaccaaatgcttataatacatgtcaacgtctgggacttcgaactgaattacaagtttcatttgtgaggatacttcatttggttgagattcctgaaaaagtgctttgaccattttctcttgggagaaaagagaaatgttcgctttctcaaaatatgcatattgttgttcatcatcatgccacccttgaaatccaagagtatctctatagaatccgagacattcctgaaagttggttacgcatagcctaattgcatgaaactccatctttaatccctccatagaataaattaaatgttcaattactctcataaactactaactagtaaggattttattcattgtttagttagtttagttataaatttttttggatttaagactatataacgaatctatttccatcatgaataaagtgtcatacattgagcaaactactcaagatacgttaggtatcacttttaataccttgatacgttactgaaaaaactcctgaccaaccacaggagttttttctctttttatgctatatatgatatacaaagttagttaacataatgtattattctcagaaccaatttgaatttataatcaaagttggcctacttatatagctattttataattgtaataattccaagggaattcttaatttaaatatgaatttcacattccgaattttcactatatttctagggaacctgtattaaattaaagttgaaatttgaattattaatccttttgtaatgcataaattcgagcttcataaggccgtagctttaacccatgtaaatcttctctctctacatcataattagaaatcaaaagtttagtatccagcatacttaactcttccggcatttcaaaaattggagttcgatcaaagaaattcaatataattaaaaatttttcttcacctaacgtacgagtatatacgtaaaggtctggatcaataggtaataagagattatattctccataaataaggacatcgtgtttctttctcaatgcaatcatctttcgataatagtgaaaaatagaactcttatcctgaagagcttcctgtacattaatttctttataatttgcgtttatcttaatccaaggtgtaccttgagtaaagcctgcagcatgtgtatcatcccattgcataggagtacgggaattatcgcgacttttcctccaaattgctttcatggtagaatccagcgaagctccactttctattgcttccttataatagttaagggtctcaatatctcgataatcctcaatggccgggaagttgggattcgtcataccaatttcctccccttggaatatgtaaggtgtcccttctaatgttagcaagaacgttgctaacattttggctgattcttttcgatattttccatcatttccgaaacgcgagactgaccgaggttgatcatggttacagagataattcgcattccaaccctgattatgaataatagtttgccatttgctcattacattctttaaatctagaaggttccaaggcttaaattcccatttaccagtccctccagcttttgaatctaatagcatatgttcaaaatgaaagaccatattcagttcatgacgtttatctccaatatagttcaatgcttgttcgggtcctaatcccgatgtttcccccactgtcacgatatcgtatttatacagtacttcctcatataaatttctaagtagagtatgaactttttccaaattagaaaatagcttataggctcttacatacggaaggccagttggattcggcgcatcgggaagattttcagctttaacaatatgagcaatagcatctaatctaaatccatctactcctttatctagccaccaagacaccatttcttcaacttctcttataacatctttattgtcccaattcagatctggctgttgcttagtgtagagatgaagatagtactcgtccgtcagttcatcatattcccaaacagatccaccaaaataagattcccagttattcggtggacctccatttttaccttttctccaaatgtagtagtccctctttgggttatctatagaagaacgggattcaataaaccaaggatgttcgtccgatgtatggttaacaactaagtccataataatcttcaaattacgtttatgtgcttgagttaatagttcatcaaagtcctccatcgttccaaactgtttcataatagctcgataatcactgatatcatagccattatcatgatttggtgattgataaatagggcatagccaaatcacctcaatacctaaatcctttaggtagtcaagctttgaaataataccttgtaaatccccaatgccatcaccattcgaatctttaaagctaatggggtatatctgataaacaacactttctttccaccacttcttttccattgggcaagaactcctttttatcattattaaccctaaagtttttgttataaggtctccgtagccagcgaaccctctagcaggaaagtatagatattagggtagtgttagaaactattcttatctgcacaagtatttaccccatgttttaacagagaaaacgtaatcattgaggaagaaataagcgatctcatataatcttttggcctaggaaagttaggttccgatagaaaaactaattcttataaactatatattttcgctaaatgttctttttatataaatttattttttcttggaaatatttatattcagttaattaaccaatcaaatttaaccattgtgtattctgtgagaatgaacaatttaaacaaccttttaaggcgatatgtatttagaatgagtggtattgtttaaccattttactagattgctagttaaaaaagttttattttatgtgtttagaggtaatctaacaagaagacaaaacttgttagttgttctaaaaggcgccgcagaagagagaatatatttctgcgggataggaggattttattatgtatacagatttaaaagataaagtagttgtaattacaggtggatcaacaggtttaggacgtgcaatggctgttcgtttcggtcaagaagaagcaaaagttgttattaactattacaacaatgaagaagaagctttagaagcgaaaaaagaagtagaagaagcaggcggacaagcaatcatcgttcaaggtgacgtaacaaaagaagaagacgttgtaaatcttgttcagacagctattaaagaattcggtacattagacgttatgattaacaacgctggtgttgaaaacccagttccttctcatgagttatctctagataactggaacaaagttatcgatacaaacttaacaggtgcattcttgggaagccgtgaagcaatcaaatattttgttgaaaacgacattaaaggaaacattattaacatgtctagtgttcacgaaatgattccttggccattatttgttcactatgcggcaagtaaaggcggtatgaagcaaatgacagaaacattagctctagaatatgcgccaaaaggtatccgcgtaaataacattggaccaggtgcgatgaatacaccaatcaacgctgaaaaattttccgattctgtacaacgtgcagaggtagaaagcatgattccaatgggttacatcggtaaaccagaagaagtagcagcagtagcagcattcttagcatcgtcacaagcaagctatgtaacaggtattacattatttgctgatggcggtatgaccaaatatccttctttccaagctgggagaggctaaaggatgtttttatttattttatgaaagaaagagtaaatatctttattgcctgtctaaatgaaaatagtgattcagaaggaaacaatatcggattcaagaagaaaaacagttggtttcaataaacttattgctttcagacaaaaaagtagaggggtgtttataaattgtatagaggtcgagacatgactaaattgtcaatgatttcaaaaaaagaatggaaagatgatgaacttacttactttcatcattcacttcaacagataactccctatttaaatgaagaaggtcagaaaattcatcgtcatattatagaggaaatcgaatctagaggtggactttcctgtattgattcaaactgtacacatgataaggatagtaaatctaaagggtaaacttaatacattgaaggatagggaaatccctaagtataaggtttatctgaaaatcggtaatatttgtaacgtgttaagagagccgtgtatatgatataaaaatacaatcaatgtaagtaatattatcggaaatataaataatttttgggctgggtgtgagtctccggttacttggtagaccatggtccagaagtcgtgaatagcccacgcagaatctgcaatagacatcccaacttaagtgagtaggattctggtaatctggttgttcgggtcggcgtagatagaggtgccacttcctccggcccagccaaattggccgatgggcgcatagtcaccgcggtaagttcacaccgtcattcccatatcccagccactgtaacgcccttgtccattggaaaaaggaagcttaggggtagtttgtttttttgaaaaaaacaagtcatagaactttaaagacaagcatataatctaaaaaaggacccaacaacgtccctatgaattgaactagaagataacccacgaatacatttattcgtgggttatctgctttttatatgaattaaaacatcataaccagagcaaactattaaagatgttttcaaaaagatatcgccttaaaaataatggtaagcacgacagaaaaactgtatataatatacaaagttagttaacataatgaattttatcggcagcaagaaagagcttagatctattgatccaagctctttaccagttataccaaataaaaatcccgactattatcaaaggcacacatgccattaaaactccataaagcgagaactcaaatttctctgggttgcccatgtaagacctcatccctgctctatctaggctaggcttttcaatttctgattcctttttctctttatcagacatgctaaccgactcctccatcaggtaatgatattactatcaattactattttaccagaaaataggtctaattagcgctttattccatgtttcattttcagttaacgtaatcacaattatcggaaatcaattactccaagtattctttagttaaatcaggatttatgtatcgtgccataccagttttcatcttactgaatcctactttacgataaaattcctcattacccgttgtagcaacaagatgaacacaagaaatgtccttaagttgagcaagtaagtcacctataatttgttgtccaattcctttatgttgataggtgtcttcaatcacaacatcatagatggcagcattaaatactccatctgacatggcccttccaaaccctacaattttatctttatcataagcgatagttactacattgcttaaagtgaatatctttttaattttttcttcattatgttttttccaccctacggaatgataaatttctttcattcgtgaccaatcaacattctctgtagtatttaaaattgaaatattcataggatctactccctttgtttttatatagccgatttagtactatttctgcttacaaaaacaaaactcctatattgtattctccatacatttttagtttacataacaactcttatcggaaattaaatgaatactccttataagctctataatttgattttaaggtcatttaaccagtctgatgaggagtagtgttaagggtgtatctataagaacttaaaagaggtgttaatacccttaaaataatcactaaatatacttttatattagattccaaatagtgaactcatgttatgattataatggatgaaataaaagagaaagttaccttttcaggagtgaaaaagcatgatttattgaacctaatggttccttttttagccccaacttttactaaaatccaatctaccaatgtaactaataagaagataagcttgctaattttggtcattaaatttcgtaaaaaggaagtttgttaaacaaaaataaatgttagagtccttgggaggaattaaatgactataacgattattacactagcgataattgcagtatttgttggggcgttaatgaggacaatatttggttttggggaagcaattgtgagcatgcctctgcttgcactgcttccaatccccctaaatacctctgtcgctttgattggattagcaggtcttaccgttgcagcactcaccgttgtcggtgggtggcatcatattgaacgccctgttctgatccgattagcaatttctacagtgtgtggaatccctgctggacttgttatacttcatctaactccttcaattataattacgactggactcggtatttttttaattgcttatgggggatactcaatgattaagaaacaacttttaaaagcaattgctcacccgttattaaattccagaggatgggtatggccgttcggttttgcttcaggagtgctgggcagtgcctataactttaatggtgtgccagttgttgtttatggaactttgcgacaatggaatccaaatcgtttccgtggtacactgcaagctcactttctcatatctggagttcttgttgtgattgggcatgcttttggaggattgtggacgattgactcactaatcctttatgcttactctattccagctattctcttagccacagcgataggtatatttttcaataaacgaattcctgctaagaaatttgaaacttacttattttctattatcattgttctcggagttctaatgttaatacctcactgacaatattaataagctcagtggctagacagacaaatcaaatctcctagtttaaaagaaaccaaatggatgagaagtcaaaaaaagaaaaatacataagacaagtttgtctaaaaataatggaagttcgtccatcaagtattttaaattactacataagaactcactctactatgaaactaaaggtctttttcaatcgaatacagtccttacatcagaagcgcagtctttaatgatatctccaatataaagttaagaaagcgtaatcactttcaaattgtttgcatacttgacagttaacatccttgaccagctataattatcaaagttgaagaattatttagtttatagagatatcttttaaaaaggaaaacaattggtgattcctttaccatctttttacaattcactagagtctattgataaggggagacgggaatatgtataaaattggagtagtaggtctaagaaattctatagaacgaatattagacttaacagaagaacataaacacgagttagaatttattccttttccctattcgaatatagaagagatagaaaaaattgcagaggatcataatcctcacttacatgcatggcttttttccggtccaattccatatggagtttttaaaaaaaagttaggtacagataaaataatggtccatgttcctgcaacagaatcaggtttttataacgctcttttagaaatgatttataaacaagggaaaattattgagcagttaagtgttgatactctgtcttcaaataatattgtcgaagaagctacacctcagctgaatgtaaaacctaaaaagatttatacgaaagtgtttgaggcggatgttgatacgaatgaattgtttcactttcacctaaacttatggaaaaaaggaaatacagaaggagctttatcttgttttccatccgtatgtgaagctttaagaaaaaatggagtcccagcttatcaaatgcctatcaataagatggaaatacgacaaacacttcggatactttctgaaaaagttagggcttctcattttaaagacacacaaattggagtcgaaatcattgaaattgaatattttaacagaatagcagaagagatgaaaactccgtatcgcctacagtacttggaacttcgtctaaaagaaatgttaattcaactttgtgaaaaattaagtggttcgttctcagagaaaggaaacgggagatacatgatttttagttctcgcggtgcaattgaaagagaactcattatgcttgaagataccattcaaaaattagcttttgaagccaatacaaccgttgctattggagttggatttggtgagactgcctattcggcagaaatcaatgcttttcatgctattcagcattcaaaagacatgaagaatcgggaaattgtgattgttcaagataatggcgagattatcgaatcaccgggaaaaaaaagcgagctacaatatactaaccgtactcacaatgaaatccttattaaaaaattaaaaaaaggaaatataagtgtgaaaacgtataaaaagatattggccctcattcaaagaatggcatggaacgattttacaacaaaggacttagcgacacatcttgagatgacagaacgcaatgcacgacgtattgttgcagatatgtgtgaagttgatttggcagagtgtgttggtgaagaggcccatgccactcgtggaaggcctagtaaaatttatcgattgttataagcatccataagtatggatgcttattttttatcctctaatttagagcgttaaaaaatttctactcttagtattaataactaaaaagtttttatttataattttctaaaaatattgaaattaggaatacgagctattatactctatttaaggaattaattccttaatataacctaaaataagtattgttattgatgttgattgaagaaggagctgtaataaatgtctaaagtaacaatgattcatgatttaatcgaggctgttaaagacgaagtaattggatggagaagatatttacataagtatccggagctatcttttcaggaagagaaaacagcacaatttgtttatgaaacgctacacacttttggtggcttggaaatttctcgccctaccaaaacaagtgttatggctcgcttaattggtcaacagcctgggagagttattgcactgcgagcagatatggatgcgcttccaattgaagaagagaatgactttgattttacttctcagaatttaggtgtgatgcatgcttgtggacatgacggacatacagcgatgctacttggtgcagcaaagattcttactaagttaaagaatcaaataaagggagaagtacgctttttatttcaacatgctgaggaattaccacctggtggtgctcaagagatgataacagccggtgtacttgatggagtggatatgattataggtactcatctcatgtcgaatcttcccataggaaaaattgggttaaattccggcccaattatggctggagccgatacttttaaaatttctattgtgggaaaagggggacatgcctcccaacctgatctaaccattgatcccattgtaattggatcacaggttgtaacaaacctccagcacattgtttcaaggaatagagatgcgcaggaaactcttgtgatctcagtgactcaatttcatggaggagatgcaattaatgttattccaagtaaggtaactattgggggttccgttcgaagttttaatcctgaattgagagaaaggatcccaaatattattgaacgtatagtaaaagggattacaggagcacatggagccacctatgaatttgattatcagtttggttatgctcccataatcaacgatgaaaaagtaacacaattaatggacgaaacggttcgtgaagtatttggagaagaaagcctagatataataaagccaattatggcaagtgaggacttctccacttatcaaaaagtagttaagggctcttatattgcaataggtgctggcaataaagagaaaggaattatttatcctcatcatcatccaaagttcactgtagatgaacaagctttacaatatggagtaaagttatttgtttacgggacatttaaattattaaatctaacatactcggaggtaggagaatgaaagcaatatattggcttggtattattccgtttcttggtcttgttgtaggagctttatttactaatatggtgactccatatgttctaggaatgcctttcttccacttttggattgtactctggtcttttttaaccacaggtattatgggagttatttatatgctagatcctgctaaccggaaggggaattcataatgaatatttccatactttttattatgttttttttcttgatttctatttttattagtatatgggccagaagggggaaagaaatggacttagaacagtggtctgttggaggacggggaatgggaaccctacttgttttcctcttgtctgcaggagaaatgtacactacctttacatttttaggcgccagtggttcggcatatggggatggaggttccatctttagtatagtaacttatggatgtctagctaccgtaatctcttattggacatttcctgctatttggaaatacgcgaagaagcataaattagtctcgcaatcagatttttttgtaaaaaagtaccaaagtccttatcttggagtgcttgttgcgattataggtattatagcttgtgtctgttacctagttttacaactaaaaggactaggatatatcgtcactgtaacgtcatacggggccatttcttctacaggtgctatttggatcggggccgttgctgtaaccgtttttgtgatggtttcaggtattcacggttctgcccagacatccattttgaaggatattttgattcttggcattgtagtatttttagggttttatttccctatccattactatggtggtttccactctatgtatgaggcaattgaacaggcaaaaccaggatttacgatactaccgaaacaaggaatgagcgtatcatggtatatatcaaccgttgttttaagcgctattggattctacatgtggccgcacggattttctcctatctttgctgcgtccagcgaaaaagccttacgaaaaaacgcaatcttaatgccaatgtatcaattaattttgttgtttgcctttttcgtaggatttgcagctattttacagactccaggtttaaaaggaagcgaagctgatactatcttgctgcagctttcaaaagaggcgttcgatccatggtttgtaggactaattggggggacaggtgtattagctgctttagtaccaagttctttgcttttgatgacaatatcaacactactcataaaaaatgtatatcgtgtatttaaaccatccacaaatgataaccaaactggaaaactggtaaaatacgtggttccttttatctctcttataggggtttacatgacctttagaggcggaaacacgctttttagtatatcgataattgcttataattttataacacaactttctcctgcctttttcgccagtttaatgagaaagaattttgttacaaaacatggagcattttcagggattttaactagcgggattttagtgtctattatggatctagggaacataaaaattggtcaaatcttcccttatctccctcaaacatttaaagacttgaaccatggaattattgccttaattgctaatattgtagtcctagtgattgttagcctaatgacaaaaaacattacttatacttatcaggataccgatgttttagagacaacatcattggatcaaaagttatgatacagaaagaataagaaaatccggtaagattaaaataaaagtgaatacagcaagagtatttttgacatatggggataataaaacgatgaaagagaattaacataataagggatttgtgcgtttaaattgaaaaaaatgatatgatttagaaatcgatatagattaacatcatcaaaggttactcaagtaagtcaacagctagattaccttcccaataaactcagttacttgaacagtcattcttatcctaataaaacaggatgagtgttatacgaaatccatccctttgctaaacaaggagatggatttttttatgaaagtattgttggattctattgaaacgatggttctggtgcaacgcttgacttgaaagtgttttatgaaagtagcaattctctatacaggtattgctactttcttttctttgtatccccttataattttatgaagtatgttcttctttcagcttaattcgctcacaaaagcgactaggaccccctctacatccatccactttggatgaatttattctacatttacttttttgaaaaacttttataatttcatcgtattttcatttttcttagttaaagtatagtttgtaaaaagaaaactgttcacacacttaggaaaataaggggtgataaaaaagatagtattattctattttatttgttttgatagtgtagtctaaaaatcgatattttcatatataaataatttagtctttgtagttttgattaagctcattttactaaaaagacagta

SEQ ID NO: 73 - DNA, 17632 bp, Priestia aryabhattai
  source 1..17632: mol_type = genomic DNA
atatcaatatcttttttggactggcgcagtataaaaagatttttcccggcttttatctttgtgtttttaataaattgtattgatgttcctattggaaagaaatttaaatggtggtctttttataataaaccacattcctttatttataatgaatttccttttttaattggtccaatgcttgcggtggctttatggtcattaaaatggacatacggaaatttcaaaaagtttattattctaaatgctcttttccatttatttttttcatttttagctaaaactttatttgcaaagataaaattatttaaattagttcaatttaatgcatttcaattcttcctttacttcttttacaaggcttttctcttatatggatttcaatatatttttgaaagtaaaagaagattaacataatccactaaaagttagaagtgtatatgtttattccagtcaaaaaggtgcgctctagctgagtgcaccttttgtttttatgaattatatatttctctgtttagattcacaacatcctgatgtgagaattcaacttccttttcttccacaaatttttctatcactttgtcgcgtagtaagggtgctttttctttattcgcctttttcaacgctttcgtgagttcatcttttgttagctcggtgcagtaagccggagttcctggctgctgtctccaagagtcacttaaagaaccactgtctactgtatcgaagcctagctcgtatactacgtccataactacttgtttttgtgatggatcattaccagcaactgccatcgaaattcgtacactagaatctgcggatgttccttcattttctaaagtataggctaataagttgttgaaagctttaatgacaggtctacctaattgatttgaaacccaaacactttcaaccattccgttctcgatttcttcaattttgtcgtctctgaaaggataataatttgaagtatctacaataattacttcctccccgacttgatcgataatgtttcgaatgcttggcattgctattgtaggaagagatattataagaatttcaatatttttaattgcatcctctacacgcaccggtgttccagcaagctcttttccttctaaatgttcgattccccttgcatccgcaattttgacatcatggccattcttaactaattttttggaaataattgacccaattgatcccgcacctataattccaaatctcactattgttcctcctcaagaatttgtatataaaagaattgctttacttaaagttgcataatgatatgtttatcaaaccgtacacatatattcattagatgttaaacgcgtattgagtatttctgttacatatactagaataaagtcatttctcatttttttaaagtaggcaataaaaattgccgtagtacatttttttgtacttaagagtagaaagcaggtgaaaagatgtctagaatatgtaaggatggatttgaaagagaatttatacaagaagaaagagaaaagtatggtattgcttatacacaaaacatactctccgggcgttggaaatatttaattctatggtttctaaaaactaatgaacgtcgttatagcgaaattaaagcttttttatgggacatttcacaaggatctcttacaaaacagttgagagagctagaagcagatggactaattaaacgggaggtttttcctgaggtacctccacgtgttgaatattctttaacaactaaggggcgagaatttatcccaatacttgatatgatggagaatttcggaaaaaaattcggggagaaacctgagtgaaataataagtagaaggctctattacatgtaatcaaggatgctaatttatataaaaatgttagaagaaagagcgtaacccctttggcgttcattgggtttacgctctttcttttcctttaggtatccttgtacagaaaatgaattatatttgtaaaaaatctattgctttaatgtgagtagttcctgatctatgcaacattaaaaagtaggcaacaataccggatttaatttattttttagcaaatccttgtttatttaaatactcaagcatgaagggttgttggcttctttcaagatggtcctcaatgtgatctttccatccctttactttcttcactgtgaatggcactttaacaggacggtcttcgtaatactcacgcatctgttggtcatacgttgctaatttttcctcatctagtggttgatactgattatcaaacatgaccattgattgaggtaaacgtggttttagtccaggtttctctccagcaggatggcctatgcatagccccactaaaggaatcacatgctttggtaaatttaatacctcagttaattctgtaatattacttcttactgcaccgatatatacaccaccgagtcccattgattcggctgcagttaaagcattttgagccattagcccagcatcgaatgaacctattaaaaggtattcaatatactcaaggtctaccttgggagcaatttgatgatttcggttaaagtctgcacaaaaaatccaaaactctgctgcttcttcaatatacggctgattgacagagagttgcatcacttgttttcgaagatctgggtctgtaaccctaatgatagaaacagcctgtagaagactgaaagatgaagtttgattagcagccttaaagattgcatctcgttgttcctctgtcaaaggttgatctgtaaaagaacgaatagaggtatgattagaaagtaattcaattgtattattcatattaacattcttcctttcttttctaaatgttgagttaataactaattttgtaataattaccaagttttattggaactatttgtaaaagttaatttcacttgcataaacaataataaaatcattactctcatttatgaagagggcaatttaaattgccctagtaccattttttgtacctaacagtaagaaaagggtttaaagacgtctttatgtaaagatgattttttaagagatttcataaacggatgacacgacgtatggtgatactggctaaatttaaaagagcgttatctatctctgttattggaatagcgtaaggaaaacctagatttatcacgttaggaaattcccataaaaaaaagcgcaatccctctgtattaaaagagagattgcgcttttttcgttatttcattaaaatgctccttcaatgaaaaggaaacgtaaattattatttttcaagggtattcattatttcattaattacttccgcgcatgtcttaatctcttttattccacctgcagcttcggataaacttatagtaccattgactaaatccccatctaacataccaactttaaaaccatttccgtaatatttataagcctcttctggttttccttgattgataagttcaaacgccttttttccagcttctgtaggaatggttcttaaatgtccgatacctgatttaaattcaataaattcctcactttttacatttagtattgcttgttttgtagcctcacttgctggattttcttttgtggctataaagcgtgtgcccatatatacaccttctgctcccatcgcaaaagcagctagagccccttttccatcaataataccacctgctgcaatgacagggatttctaccaaggaagttacttgaggtacaattgatagggtactgattttgtagtcactcatatggccaccagcttcataacctgttgcaataagagcatccacgcctgattttccagcttctactaacttttgtacagtagggctaagatctctataaataatattaatgttgtgcttttttagtctaattacttctttttgaattaccttttgaccgattgcaatcacattttttactttttcttctaccaaaatgtcaaaaatagcattcgtaaaaggatcttctgtgttgtcacccattgggaatatatagttaacggcaaaaggtttatcagttagctctttaactttttttatttcttttctaagtctttcagcagtatcttctggacttgaagacttttctgtttgcccagcgttgggccccaatactcccattcctcctgcgtttgaaactgcagctacaaattctgcagaagtaacccatgtcattgctgctgaaataattggatactctatatcaagtagttctgtaattcgatttttcatcttaaacaatctccttttaattaacgataatttttcttcatttatatctatgatgatttatgattctctcgtatttgctgacaaataaatgtgtatatactaattctctaattatttcttagttgatgtttcatatctgttttctgggtaaggtaaacccaaattaccacgtaaagtgtgtgattcatattccttacggaaaatccccttttcttgtaagatagggacaactaaatcaataaagtcatcaaatccggaaggatgctcctgccttagtaaaagcaagtccatagcacctgcctcgtaccaatgttgaatttgattagctaccttctcagccgaaccaaaaaatttcggttttggtattctgtattcgtatggcattaagctttctaactcctgaaatttttcttcagcttctctttctgttctgccgacaattgggttttgggtaggcataattaaaaaatcatctggtgaacgaccttctagggctacccttctttttagctccatgctaaaactcttagcgtattcaaaattgtcgccattcaccaatacgccttcagcatgtttcgatgcaatatccataaattctgatgaagtaccagcttggaaaatgacaggtctcccttgtctagaacgactaatatttaacggaccctccaccgagaaaaacttacctctataatttaggggatgcatttttcttgggataaagaatattccactttctttatcccgtataaaagtatcatcttcatatgaatcccatagcccttccacaatctccaaaaattcttttttcattgggtataagtctgatttagaaagatgtgttcggctataatttgctaatcctccagggttggaagtaatcgcattccatcctgctcgaccatcactaattttatcaagagaagccatctgtctcgctacggtgaatggatctgcataggaagtcgcaatggttgcagtaagaccaatatgagtagtagccatgctaagcgcagacagaatacttacgccttcaaacatactcaagtaatgtggaatcattccaggtccaatatggcttacatcagccaaaaagaccatatcaaacttaccttcttcagctctttgagctttttgtacataataatctacattctcactagcattggctggcatatcgggatgacgccatcccatgtaattccatcctacaccatctataatagctccaattttaagctgttttttatttgtcatttataccctcttctttctatttactgcaaaaaactaacctattttcatgttttgacgcaggtttttgtccatttggcgtacgttctgtacttatttagagctaagatcaaattcttcagcaagtagttggtatccttttagtcgactttcttgactagggtagaaatcagctatcatgatttcataaactagggctgcttttgccatctgcctcaattgggcagctacatcattcacacttccaatcacaaaacgatccttattagcatctcgagcttcctcttcctctggtgtatagatatgggactcggcttcttctagagtcggaaatgataaattaggggaaccagttctcattcttgcccacgttaactctactggacctgccaaatattttgcctcttcttctgtttctgctacaataacaccaatggctaatatacttttcggctccttcatatacaaagatggcgtaaagtctttgcgatatgatcgaagaattggaattgctaactgaggtgctaaatgggcagcaaatacaaaaccaagccctttttctacagcaaactgtaaaccaccttcactagatcccaacatgtacatatcaggcactaacgacgggtcacctgaaggtgtaatgttgctaaaagggtgagtccttggaaaatcccgcgaaaaaaatgaaagtaagtgatctaactgttctggaaattcattggcggcaagagcttcccgcgaacgctgtaaggcccatgctgtccatccatctgttcctgacgctcttcctattccaagatcaattcggccaggatgtaaagcttcaagtaaggtaaagttttctacgactttaaagggactatagttgggtaacataattcccccagaacctacacgtatttttttggtgtgtgaagctgcatgtacacttaacaaatcaggagatgtactaatttgactagtagtgttgtggtgctcagtaaaccagtatcgggtataccctaacctatcagctaaccgcaccatctctgttgaattctttagactttcagtcggattactgctctgataaacatgaacgaaatctaagatggataactttaacggatcatccggttgtttatttgacatgttgtaaaactcctttccattctattaatagttagccggctaactatcctgataaaaaaatatatagaattaatttgtaataattttagacactattagattgtaatgtgtgtttttgttacatacactagaataaaatcattgctcatcttttggaagagggcaatttaaattgccgtagtactattttttgtacttatgagtagatagaagaggtgtaaggatgacgagaatttgtaaagatggatttgaaagagaatttatacgagaagaaagagaaatgtatggaattgcttatacacaaaacatactctccgggcgttggaaatatttaatcctttggtttttaaaaactaaggaacgtcgatacagtgaaattaaagcctttttgggtggtatctctcaagggtcgcttacaaaacaacttcgagaactagaagcagacgatataattaagcgtgaagtttatcctgaggttcctccacgtgttgaatattcactgacatcaaaaggcacttcacttgttcctatcattgatttaatggaggagttcggaaaaaaattcggagaaaaagaataaaagtcaaaaaaatcgtgtaactagtatagtacctttggaattgaatattatttaagcaagaaaaagaaaaaataagtttgcacttactataactgcgtttttttatttatcatttgactaaaagataagaaaacaatatagttaggttgctaattaaattacaataaggaatgatctatatgattgaagatgaaattcgagaacttcttgataaaatatcagggcaaatgcgtcgaaactacaaccaattgttacaagatttaaatcttcatgctgggcaagataatttgttatgcaaactatgggcaaatgatggacttacgcaagttcaattatgtgaacacctaaaatgtgaaccccctactgtaacaaatatggtgaaagcccttgaacaaaaaggaatagtgtaccgtcaacgtgatgaaacagatggaagagtcagtagagtttatttaactcctgaaggtcgagatttggaggggccggtcaatgaaagatggagaaaacagcaagataagttgttagcaggtattgtacccgaggagcgtttgtttttaagaagacttatgaaacagatggaagagaatctgttttagtctctcctttgttagtttttagttagccgagttaaaacttgaaagtggacgtgaagaagttaaaacggtcagtgcagtgagatgacaattctatcttcttattatgaattggctcactaggtaccagctggtgtagcaaaaaagcataaactcgttgatttccaatgaatttatgctctttctcttctgttacttatacttttacggaggagatatttaaatctattacaagatgttacagtaattattatcgttaacaaaattaaaatccacctcagttaaagtgtaaccagcgactgtaaaatttaaatcattgttagcatatcttctcgattaatcgaaatttcctctctaacaattgctgtttcgatttattttttgtaccagtacgttaattataatattatctttgatataactgtgtcagtctatttttatactaataatacttgtttttattaactaggttttgacactagagataaattaaaggtaactaatataatattgagaattccatgtgataaaaagaagatcatatttataaacctatcttttacataacaatgcttgtgttatgtatcaaaagcagatcattttcttcaagttgatttaattcatgatagctgaaactacttcttgcatgtcctcagcaaatgaaatagttttatttttattttccttagcaccttctggataatccctatttaatcgaattaatgtcgcattttcatttacataagttaatctttcaaatggatatcgaatgatacctggtgtattaaacccgacccctaattcaatatatataactttctgtccttccgatttgttaagaaaatctttatatgatttatttaattcataccatctttcatcctgaacaaagtattcatcaattctaagattaacttccatctcaccaccgcatacaggacatttaggaacaagctgtgatggtattttacaatcaattgtcttttcaatcatttccttcacgttagactcattataataaagtttgtcatggcagccttttgcacactgtaaataggaatagtctccttgaatttcaaatactttatctgatgggaatccagctttattaaactggctttcaacgttagtcgagataacaaaatagttcttatctttaactaattgaaatatgtctctataaagcttggtggcaccaagctcataacgattcaaactaatatgttttgcccagtatgcccacttctcttcttgtgtcttaaagggatagaaaccggatgaatataagtcagtgaatccataccttttgataaaaggagaaaaattatctgtaaatcttttaccactatactctattcctgcagcagcagataaacctgctcctcctcctagcaaaatatattgcgcatccttaattgctttttttgcacgttcgatttgcataaagtacgtatcattcatagtgtagactccttactgtaataatttaaaaactaattatttgtaactaaagcagttacattcaatagatgtaattaccttttttacatttatcgatgtaaatcaattgaaaagataacattttaaaatttttttagaaaagaagcccttattaagggcttctttcgtagttgtgataataaaaaagtactttccaatgaaattattcttaactttaccttacttaataagtttttctttttttagataatcttttgccactttatcaggagattcccctcctacattgactttatagttcatttcccgcatttcattatcacttattttcccagccaatttattcaatgtactcttaagttctggatgtttgcttagtgtttcctttcttaataaaggagcaccttgataaggtggaaacaagtgtttatcatcttctaatacagtaagtttgtactccctcaactcactatcggtggagtaagcgtctactaaattgatgtctccacttttagtagcattatatcgaagctttggctccatagttgttagatgaggaaatgtaaggccgtataatttttgtatacctttatatccatcttcacggtcagcaaattccctagtaaagcctactttcatttgatcttgaacagcttttaagtctgatatattctttaagtgatacattttagccatttggtttggcacagctaaagtgtacgtattattatatgccataggttttagtaactctaagtcgaatttacgatccatacccttttgggcttgtttatagacttgctgttgatttgtacttataggtttttcctttaagaattctccaattgctgtacctgtaaactcagggtaaatatcaatacttcctgacttcaatgcattatacacgaacgaagttcctccaagaccaggttttaatgtaacatttagatctgtatcttgttcaattaacaatttatacatattaactaatatctctggctccgaaccaatcttaccccctataacgatattatcttctttatcattattgatggagggaacaaccattattagtaaggtagctattataaacactgctataatcgtcaacgattttttaaatgagacacgttctaactttctaagtaaaaaatcaaatataatagctaatatagcagcaggaactgccccaagaataataagctcagaatcatttcgatcgatacctaaagtaattaattctccaagacctccagctccaatgagtgcagctagcgtagctgtaccaattattaataccattgctgttctgatacctgccataataatgggcatagcaaggggaagctctactcttaataatctttgtttattagacatccccatcccttttgcagcctcaattaatgaaggatctacctcattaatgcctgtaaaagtgtttctgaggatagggagtaatgcatatacaataagtgcaataatggcagggatcttccctatgcctaataaagggattaatagtccaagaagagctaaagaaggaatggtttgtaatactgccgtgatcccaataattccttcagcaatttttggttttctggtaatataaactcctagtggaatggagattataaccgcaaaaaagagggcaataaaagatatctgaatatgctctattattgcactgacaagttggtcttgcctttcctgaaaaacgttgataagcctattcatatttataattcttctcctttagttactcgctagatattcaataattacctttctatttactgccccaataatatttccatctttctctactctaacttcttcatcatgagttaaagcagttaatacttcttttaaagagacggaagcagaaataatatttaaagatttaataggatgagtttcacttgagattggataaactatattctctagatttatcttttcatccatttcattcgtcttaacccctacaaaatctcttacaaattcattaataggattattaataatttcctggggtgttcctgtttgttcgattttaccttctctcataacgcaaatacgatctcccagctttaatgcttcttgcatgtcatgtgtaacgaatacgatagttttttttatacttcgttggaggttaaccaaatcatcttgtaacttttctctactaatagggtcaagggcactgaatggttcatccattaaaatgatatcgggatctgcagctagggcgcgaatgaccccaattctctgctgttgacctcccgaaagttcgttaggtttccgattacggtattgttcaggatctaagccaaccatctccaaaagctcatcaactcgttgttgaatcttctgacgactccatttccttaattccggaacgattgcaatattttccgcaatcgtcatatgtgggaaaagagcaatttgttgtagaacatatccaatattccaacgaagctcattaatgtcgtaatcagttattttcttatcattaatccacaatgttccttctgataaattgataagtcgattaatcatttttagggttgttgtttttccgcatccacttgggccaacaaggacaaaaaattccccattttttatttctaaatttaatgattttattatataagtgtcattcttaaacttttttgacacttgttcaaatcgaatcatagtttatttctccttatagttatgcattagatagctttctaaatcttcggttttttctccagttattaattgatagtcatctgttacttcatccattaaatttctttctgcagctacatatagcgagacaagaacttcaccaaaacccttgggttcatcgtaagtagaagcaaattcttctacagtcataggattatatttaatcgtagaatgactcacattacttaacactttagctagttctggcatagaataagccttttcacctgttagggtgtatcttccaccatgaagctcaggtttaatagcaagttgaataattgctcttgcaatatcctctcttgatatgaaggaaatcttaccttcaccgactgggtataataaacgtcctcgttctacgagttctggtaaatacggagcaagtggatctgcatacattgcattacggacaagcgtatagcttaaattgctagaagcaagtcttcgagaaacatatccaaaaaatgggctcattttaaaagggttgttttcttgatccgcgacaaaccctacaaaaattacatgtttgacgtttgctttttcagcagcttgcactgatttttcaaattctgcaattctaaccgtgcttggaaaagagatacttgggacataaattagtacgtctgttcctttaaatgcttcaatcatttcttctacaatattgtaatctgctttcttaactgcaactcctttttcttcatattgagctgctttttcaggatttcttaccgataatacaatattctctggtgatacacgttttaaagcttcctctgttaatttcattcctaaatgtcctgttgcaccagtgatgttaataatcatattttcctctcccttatttattattaattacgctatactcaggtgttcggttgtctaaatatgtgatagagccttctccttcttcaatatagaaaatttcgaaagttggattatctcctgttttataaatggaccttactaactcattagtatctacaattttttgtttaatagccaggtcgctatcgaacctaattgtcccctttattcttaaaataatgttatctgtcgttgcgagtgaaaactcaataaaaggggatttctgtagttgtctatatacttccttagtgtttgctgtacataagtaatatttaaatggactatctaaaaaaatttggatttcaaatggacgtattctcggtttattgtcttcaatagtagctagaaatccattcttttgttttagtagaacttgatcaagcttattcatctaggcctcctatatatttataagaataagtttttcacctaacctgtaactaacttggttacaactacagtatagggatatatttttggttcgtcaatagaacgattttgtaaataactgatattgtgaaggtgttactactttcgttttttgtagaaataaccgaatatatagtaaaaaacttttagacaatttctttatttaaaggtttgtctaaaagttaacatgtttttaaatgacttattatttattcctttattcctgtaacttttctaattctaactttcttgtaatatcatttaccacatcttcaattgtgacactccctaaagccttctctaatgccaactgtgcagtggtaaacaaaggaagaactgtgtcctgaatatttcgtcccaccggacaagatggattagggttatcgtgtacactaaataattctttatcttgtaccacattaaccgccttatatacgtctaatagtgtaatatctgataagttcctcgctaattcagctccagcgataccagaatgtacattaactaacccggcatttttaagcatccccataattcttcttattacaactggatttgtatttacacttgctgctatatattctgatgtgttgactccacctctatttattgaaataagagataatatatgaattgcgacagcaaatcggctactgatagacatatgcattcaccttccttaaacctttaacctaattagggatttctctctatattatcataacttaatttacagtataaactttaaaaaattcctcagaatgatattgacaacacccttagttgtaactaacattgttacaagtattaaattactttagaaacaggaggaagaaacacaatgactcaattatctttaaaggattatttttcacttatctccttgaaagaaaaatataagccatctaagctttatctatatgattaccaagaggttatcaatgatttactatacattctcttacaagaagatgaagatattaaagattttcgaattccaactaactatcgagagaaaagacatttattaagaggactattaaatcgtagaggacctcgtccccttcctcaagaatttttaaccaaaatggactcgctcttacaagcagagttaaaaaataaaaagatcgttaagattaatgagctagatgctgtttcagaattagttcctgccacttcttttagcaaagctcataagtttgtactttggcaaggagatattacagtactagaaactgatgctattgtaaatgctgcaaataaccaaatgttaggatgtttccagccctttcatgcatgtatagataatgccattcattcagctgcgggacctcagcttagagaagattgtgctgttatcatgtctacacaaggttcattagaggacacaggaaaagctaaaatcacaagagcttacaaccttccatctcaatttgttttacacactgtaggacctattgttcccaatggaacaaaattaactaaacaacaaaattaactaaacaacaaaatgaacagttagcttcttgttatatttcttgtctagaattagccaatgagatggatgatattaaaactatcgccttctgtgctatttcaacaggagtatttggttttccaaaaacagaagcatctaaaattgcagtaaatacaataaacaattggttggaatcacaccaaaatcattttgataaggttatctttaatgtttttagcaacgaagactataatgaatatcttaaagtttttcagcaaagttaatatctaataaaacccatgaaattttaatgcctttattattgtaaacgaaggcttcttgttgacgagtttcttctttttaataatatctattatcgagaaatttgtattcaggcagtatttttttatttttaacgtttgactttctgtaaacctgtaactataatgattacatgttttgattgtaactgttatggttacatgttggtttttatatgaatatgtttaatttagagtaattaaacatacattaattatttcagaatttatttaggaggaattttaaaagatgaaacacttaattctttatgcacatcccaatccaaatagttttaaccacgcaattttagaaacaactgttaaaacattagaaagtaaagggcaagaagtaaaggttagggatctatatgcattagattttaatgctattttaaaaggcagtgactttgaaggtttccaatctggaaatacaccgcaggatattaaaaaagagcaagaatatatttcaaaagccgatgttatcacttttatttatcctgtttggtggacaggtcttccagctatattaaaagggtacgttgatcgtgtattctcttatggatttgcttatcaatatggcgaagatggaaatgtaattggattattaaaaggtaagaaagggttaattattaacacacatggaacgccaaaagaaatctatgatgcaaatggcatgacagatgctttaaagaaaacatcggatactggtatttttgaattttgtggtgtagaagtgactgaccatttattatttggatcagtacctgtagttgacgacgagacaagaaaaaatatgcttagtcaaattgagggcaagctaaattctcttttctcataagcaatgatatgaatgataaagttgaaatttattctgatgcaatactttactgtcaattaaaaaagataggtttattactaaaaaaaaaagaaacctttagtacaaatataacctatttttcattagcctataagtaaatgtaaaattagaattgcttagaaataatgtttaacaataataaaactgagatataaaggagagcgaaaaagatgacttctaaagctgttgaaaatcaaataaaagatgttattaataaatacttgaaatccattgatgaagctgaaaatatttatcttgctgaagagatttggtctgattctaatgaagtatcctttattcatcctcgtggacacgaacgtgggtgggaggaagtaaagcaaaatttttattttggaacaatgagagatttgctttccaaacgaaaattagagttagtaaacgatatatctattcaggcttatggcgatgtagctatagcagaattttattgggagtttaatgcaacatttaaaacagatggcgagcctcttacaacaaaaggaagagaaacacaagtgctacacaagacagaggatagaggatgggttatcgtacacgttcattattccaacatgcctgtcacaggagaaagagaaggattttaagatccgaaatcaaaataacaataacaattaataaaaaaaggagtgtttcatttggaaatactcctttttttgtggacattattatgaaaaaataaacgcaaacaaataatatcatctttttcccatgaagactatatttcatcgtacgagctcatatgtataaaatgtgcactttttatacatcctgtccgcaatcacctaaaagaaaatagttgttatatcaaaggtgtataaaaagctgcataaaacagaaacaaggacctcatcaaaacccttttcccaataggggttctcttttttcatgtgttccggaaagagtgtttatgtaaactagctttgtatatcgtatacagcttcatttattgaattagatgaattaaactaataaataaatgggggtaaaaatatgaatgaaaaaatcttaggttctttcgaattgaaaggaaatcaacttattgtttcagatccgtgttatccagtagaagatgcttttgacgaaagtgacatattatcttgggtattggagccagctaaaagtggagaatgggaatcgactgtcttcttcactgaagattttacgataactaaattaatggtctgtcaccgtgatgttgaactgggttcagaatgggtagaaacaggtaaaaatattggcgttgattctgctatggcgggtatatttgatgcatccgttttcggaagagatgaagctatttcatatgaagtgaagaatatttatgaaatagaaatggacgaagaaggcatgaaatattatgtcgcgtgctcagacatcatcgcttcttctgatgacgaagctggtatcgtagccggtggcacagtttcaatgtctggcataggtgatggatactatcccgtttttgttcaatacaatgatcaaaatgaaattgtagctgtgttattggaattttacatagaagatgaagaggaatgaagtaataagagactttcaataaaggaagtctcttattacttcctagaatgttgattatggtaactacaatgaatggaatataaactaataaattacctgaatataccttttatggtaaaattgattaggtgagaagggaaataataaagcaatattatcta

SEQ ID NO: 74 - DNA, 17371 bp, Priestia aryabhattai
  source 1..17371: mol_type = genomic DNA
aacacaccacaaaaaagaacccttggtaggcaagggttcaaagtttgttgttcgaacgggaacatgcagctttttatacatccttgatatgacggcatttactcgatacccaagtggaaggagaatgtataaaaagcgcaccgtttattcatatgctaacccctataaaaaatcgcctatatgcgaaaaatatgataaaccaactccgaagtatccttaaaaagcaacctctgctgatcccaagaggttgctttttattttgttagcgataaaagtaatgaaaacgtttttttagactgataatatcgtcatttacattatttgtaaattacccacaggtgtgtaaaagccttttgaaggcgaaaatactgatacacaaggatctcaatacttttaattttttgattaaccctatttgtgaatctctgctattagtcacactttgaaaggaaagcagggaaaaagtcttttctcgtcgaaggttactgcttgaaaggtggtgacattatggctggatttgatgaaaacgatcgtgaccctgaggttgaagcactaattgaccgatatcctgaggaaagagacatttatcgttatatgcgggatgagtttgataaagttttagatacatatgaccctgatattcacgatagggaagttgctgtgaaggcgagtgataagtttgacgtatctgtagattacgcgcttgatctttacactagaatggtgtttaagattgcggaatttcaacagagacgattcaataagtcaaaatagccgactagaaggcactctaaggagtgtcttttgtcttggttagttttatattattctcttatctaaaacgtctacacgaggctgtatatacctcagataagtcctttctctttgaaaacctttcttaaacattcattcaccagttcacttttaattccactgtctacattgtcaatgatctgtagtacatcgttatccaaataaaatcctctaaattctcgctttgctttcttcccagctaacagacgatcaatgttatcaatcttctttttattattctttttcatattcttcatgataatagattcgctatcaatatcgctatccttttcgggtctatttttattaactttttgaattgaacttgctacttctttattagccatccgaatattcttttttaccctcttttgaataggaaatgtgcccgttaattgtttagtagttttactattcttcttgaatacttcatcgatgtccttatcaaatatagattcatctgttcctacaaagttatacttgccttctacactgtcccactcgaaacctaatttcttaatttttgtctgaatagttctgtctgaaacctcatactttttggcaagatcatttacctttaatttcttgtcactaatagcttcaatcatgcctcttactaacattttagccacctcatccaatagtgatattactaattcatttcaccttaatttatattcttttatgttagaaaattcacctttaattccgatagcaactttagcaccattacttgaaatgaaacgtggaaacaggaactacaaatcatcggtattagcaaactgaaaaaattttaagtgctttctctatcaagttgttataaaataaaaaaagcgtattggagattgtttcaaacattttacgtcatctaacctattcccaaagcacagggagtaggttttttatgttcttgtactactgtggtgaaattagtaaagaagtagttacaaaaatgatgtatatgatatacaaagttagttaacatatgtggattagatttacttaggtttaacttacgctcgtgttccgctcttctgatcgctcacataagtttaacttatattgaactaattgaaagaacaaaataaaaatgcctggtgtaaatccaggcatttctgttttttgcagggtttttagcgtgaaatattgaataactcagttatccttctctatttcataaaacaatggtactgtaatgaaatagactgtttattttcggcgcttctatgcttgtcttagttcccaaaaagacgagcaaagaagccttttttattttctgtctctttttcctgagctgtcgctgcttctagtaaatgttgttgctgctgtttttgagatgagcggatatattccatcatttctttatcgcggctctctatatgttttttcatctgttcagcctgcttatcaaaactggcttgcagctgctccagttgcttgcttgtttgctcgcgatccgctcgcctttgttcctctaattccctcaaatcatttttagaatcacttaaggcagtcttatactcttcaattattcctaacagctgattgttcacctcttgttgctgtttaaactgatcggctagcgctcctaagacttccggagggagtgacttttcagaagcttgcggagcaattaaagagcggttatcttcttcattttccgtatgctcgttatgtgctcggctagcggagcggttcctttccaatccctcaacaatagtatttgcagctacttctaaagaaagatttttatgctgaaccaggaattttagcttttgcaatgtttcatagtcgctatgtgtatagtagcgctttttcttattgtcagtcttgaaatcataaccgctctttgcgagcgcggcagaatatttccttacattgcttccgcttaattccaggagctttgatatttcgtctgaattcatataatcatcgttaataatcatttgtggcctccaatcttatgtattcgccttccgctccttaaacatcatacagcgttattttcaataattcgagcaagagaatttttttcctctcttttttatgtgctttttgttctttttcatttaggaaaaaacgacaaaaaaccttatgtataaacgaaaatatgaatattttatatacagtaatttgaattactgtacataaaaattataataaaagtatcaaaaaaacagatttttggtatgggggaaatttacataatgaaaaaagttgtcggctatgttcgtgtatcatctgattcacaaattgaaaatacatctatcgaggaacaagtaaaaagaattgaagcttattgtatctcccaggagtgggaattggttgggattttcaaggatgaaggtttttctggaagcaatacgaatagaccaggatataaaaaaatgatggagtatcttgcagatcataagggagagcttgaaagtgttgtcgttctgaaaatggatagagcgcacagaaatcagcttaacttattgcaatttatcaaggtagagcttgcggaattaaatatggattttgtaagcattactgaatcttttgatacaagtaccatgatagggcgtatgatgctaggtattctttcaacgtttggggaatttgagagggaagttattaatgagcggacaaagagcggtagactttctacagctttaaaaaataagtatgcaggcggccaagttccatatggatacgcggtagaaaatggaactgttaagataaacaaagaacaggcggccattgttaagcgagtattcgatgaatttatagaagggcgcacttgttaccggatagctaaaaggctcaatgaggaaggcgttacaacgaaaagcaataaaaactggacacctacgacaattagaagaatgttagatacagaaagctatacaggttttaattcttataatggcagcaaagagcagaacgcgatcagacagaaagaagtttttcctaaaattatctcacgccaaaaatggaacaaggttcatgcaactgtcacagcataaaaagaccaggagaacggctccaggtctttttgctgttgctataagtgaattaactttatattaactttatgtttttggataaccgctcgtctagcggcgcaggagaagagcggttaatatttttatcttgttaagagaacatatcaaaaggctctttgtcttgtttttggtgcggatcatcataaggcgcttgctcttctaaatagtggcctgcctgttcttccaggtgtcttaatgcctcttcatcgaagtattggccgttatcttcatagtgttccgcgatctgttcgcctcgctgctcttctatgtgctcctgttgcggagcgatataggccaatatttatcggtttatcttctctgttcggctcctggttccagtcggcttgtggaaggttactccagcgttttcgtttatagtaaaagtatttgtcaataaaggcgggagctgaacccttttgaaaaagaattagttaaaaccgtagtttttccaagcattttagaaacaggaatagcggtagaatcatcattagcctgtaaaataatttgactatcatatgaatctgatatttcagcggccacgccttctccatagtgttcttttaattgctgaataccttgaaaaattaatgagatacgtacgccgcgcgaacgcatgacggccatatgcttttctaggtcattgataggcgcgatatttgccatctcatctaaaatcattcttacaggtacttttaaatgttgttttggacttttacgagcttcttttgcaagctcctagaaagtgtgatataaatcaggcgcagactctgcttttttgtacctaacctcccatatacagcggagattagttttctctactaacttttcaaaaaatcggtgactttctgcacgtagtgctccttatcgtaagatacgtacaaataactggttaattgtacagggtctccaaagaaaaaacgttcatacaatgtttctcttgtaccaaacgaactcatagttaaatcccacgctagtcgaaaaagcttaattcgatcttctgcacttcttgatttagcttgtaaatagcgcttaatatcttcttgaacaaatgagtggcacgtattttccgtaggtattgccattagtccgcttgcacctaaaagctggataatctctgtaaaggtagggtatatttttgaaaataaatttgcagcaatacgaagtgtagtttcattcggacgcataaatccccattgatcgatttccgcctcttcttctgctttcatcacgagagctttcatggtttctagtccaataataagctccgttgccttttcccgcacatgtggatagtccataatgttaatggtttcaatcagagattgtacaatccctaatacaaactccgttttgataatacgccttgaagttacttgatgcagagcaaaggctgagaaggagctagaagaaagaaatgtattcgatacgtctatatttccatagaaaaacacgcggttccacggtactaatacatgatcaaagacaacaattgtatccatttcttcaaacctagaacttaatggataatcaaacgtcgaatcttttcctgcaaatgattctctacaaataaatttaattccttttgtattacttggaatcgaaaatgaaaatcctttttcttttccttgcatgcctgcgacagacagtaccagtagctcatccgtcattcccccctgcgtagcgagcagtttcgcgccttggataatgattccctcattgtttttatcaactatttttgctgctatcggttcttcgttttgttcgtaataaaaatggcctcgattgacttgaggatcaatgaatgtatgagtgagcgataagtcgtgttctctaacatattgataataagaaatgatattttcaggaaagcaattttctcttccactcagggattctgcagaagatgcaaaagccatcaatacggtattcatataatctggatttctccccatcataccgtgagttaattgtgcccatttctgagtcatttctcgtctctttttcaactcttcctttgttttaggctgtaaataggatgtgccgacaaattccttagaagccggagaacggtatgtcatgatgtctttaattttttcatcatgctgaagatcataaagctttgcttgactgttaatagcccctttaaaagccggatgttctgatatatttccagttacgcgcttgccatcaacccatacatttgcttttaatagattgattctctctacgtactgcttgccattaattgctggcatattcccactcctagaccgtcggtaaacatttttatttattgtatttttatcatattatgatatcttttccatgtttccttcatgcatcacggtttgcagcataaaagaagagaaggttatatgaagaggccactgaaaaacttgcgttttttaacctcataagcactgcctttcacatgcgatgctctttcacttgaagtattatcctctccctctgagtgcaaggaaatcaggacagctgtatttgatgtacttattatttagaaccatgttctaaataaacatatcctactaataaattagcttttaagaggtttctggacagtttgattaagaaaccgagcctttaaaatggtcatgttgatggagtaaagcttgttcctccaggtttaatgtttttcctagatcctgtttcaactgtgctatttctagcgaactgtatatagagctatgctcctgcaacaagtgttcttcttcagtcgttagctcttgccctaaatcttgctttaactggatcatttctagctgttgctctaacgtaacttctgttttttgtgtatgcgcttcttgattctgttgctcttttagccaatcaggaacgatttccttacggataatatgtttgggcgtaaataaagctgctgtctcatctgttatatgtatgtctgactcaggtgcttgttcttctgtattctctttcaatagatttataaactgattgtaggcaatttgataaacaagacggcacatctcatccaacgaaaggggggctcccttatgattagcctcatggacatatttatccaagcctacaatggctgtataagctacttcatgtatgtgttctttcacaatcaaaatctctgtatctcgttttactgcttttgctgcattctgaatacgagcatagaaatctcgtagttgatgtccatatttacctgcatacacattatttactttcttaggaacacctttgatgtaagcgaatgactgtgaagcagatattaaatgattattattatgatttacaggtaaatcaaggttaataaaggcatcggacgttttttcgccctctagacttgttatatcaacgttttcagcactcacaggagttgtcacaggagttgtcacaggagttgtcatttccttttgctgaagcgtttgtatgcctgttatatcatgggcaaaaaagacctcatcacaaatcttgttaaagttcttatgacttttaaagacaaatacatagctatcagggtgagcacccgttgtatcttctttgatataacgtgctacgattataaacggtgttgtcttcaaagattttacaaagcgagaaacggtgctttgggatacatcaaattttttcatgagcgtttcagaacggatggcttgaatgcccgtagccactaagttatagataacgtgatcgagcatttccattctctttttagggaattctttatgtagggctacttgttgttgtttatagtaagtgcgaagtgtttccagaaattcttctttttttgtacgaagggtagctttttgttgccataaccattttaatcgtccattgaaggtatctacatcttttaaatagcaagtcagtatcttgttcatctgttcatcttctcctttaaggaacacaaaaaagacactgcctcccttggaaaaggaaaacaatgtcttgatttagatgaacgaagcccttgaaatagatgtcaatttcatataaaataaaaacataagttttatcttatcgataatgaaactattaacaagagacttcgacaagtgttttccctagttgtgatagggggaacggtttaagagtgggttcacactacttaaacagttgaagtcttttttctatccgcacgtttttgttagttttattatagcgttaagtcgtctcataattcaataaaaattagcaaaatatatcaaaacaagtatatttagctatagatattgttatatgactgtagaaatcaatttcgctatatataatacttcaagctaaggagaagagttatgcatacatatacatagagttttcagttaagattctaataagtctaaactcacttgacttttatggtatttttatagactttggcggattcgctgaaccctatggttgaaagaagagatagctatatcttaattaatccgacaagttcctcggcgatttttagatgtttttttgcttaatctgatagtgtaacttttgaattaagtatagtaaaagacattattcttttgtagatgctgcttcttgtattgttttctttttctgagttaccacaacatcatgatgcaaaatcttcgctttattttttcctacatacgcttgcaacgccttcgcgatcttttctgcttcttcctcactttgaatctcaaagtatttctcgaaaatcgcgccgacttgaatgagtcgtctcgttctctcttttctctctttttcttttttacgcgcttcaacttgttgtttcttcgctttcatcttctcaattttttcttccaactcctgaagaatttcctcatctgttcgcttcttcggcacccatcctcatctcctttttctcttctctaatgtttgttttgattatatcaaaaattgagataaattggtatcattagcatagattctctcaccaggatatggtacaattcccttagatcagagatataagggcgcacttatacatcgtaccgatgtgtgcggttccttcggaacgaaaagacaaaaccaaagacccattcgcctagatggcgaatttcataaaacctgtttgcctatcggcaaagatgaaaccaccatctgacacctttggtgttcatgatgctgatttcatctaaagcgttgattagcgcaccttgtgctctcatcaacttattccaaaaacacaaacccattctcaagaaaggaggaaagaatcatggcagtttatcatctatcgatgcaaatcatcagccgttcaaaaggtcaatcggctgttgctgctgctgcttatcgcagtggcgaaaaactacatgatgaacgcacagacgagcaaaagctttatgtgcgtaatgtccaaccggaaaccatgattctgactcctcccaatgcgccagaatggatgaaagatcggaaccgtttatggaatgaagttgaaaaagtagagaagcgtaaagactcacaattggcacgcgaattaaatattgctttgcccattgaacttaatcgtgaccaacaaaaagaactgattcaatcttttgctcaaaaggagtttgttcaaaaaggaatggttgctgatattgctattcatcgcgatgataagaataatcctcatgcgcacatcatgttaactatgagaaatctgagtgaagatggattcggcaaaaagaatcgtgactggaatgccgattttgcgaatgccaaagaaaacaaccgtgggtacgtgaaaaatagcaaaagctgtttatccgttcgtgaacagtgggcgaactatgcaaatcaagcgctagaacaagctcaaatcaatgaatgtattacccatctctctcatgaaaagcgtggactcgaaaccttaccaatggttcacttaggccatgtcgcacatgacatggagaagaaagggaagaaaacagatcgtggccagatcaatagggagcgccaagactacaataaggccgtggttgatttacaagcctaccgtcaccaaaaagaagaacacttaaagaaaatgaaggaaaaagagaagcaattcagcttttctacggatatagagaaaacctatattcaaaaagctgcgtctcttgtaggtcagaaggttattaccttagaagatattacagcacgccacgaagaactacgcaaaataggtgatcgtcatgatcccattgaacgacacttccatgtacaacaacaacaattcctgaatgtcagcaattattatgatcgtgtgagcgatttagagcgtgaaatcgggcagaataaagaaaaagtagaggaacttaaaaagtcccttaatccatttaaactcaaagaaaataacatgatgaaacgacgtcatcttgataaaatttctgatttagaaagtaaaaaagaaagctatgagaacagcgttcaaaaacataaagaaacgcttcgtttttcaaccaaagaagagttctatgagcgttatcaagaattctctcaaaagaaagaaaatcgactcaatcagattacgtatgagaaaaaacaaattcaagtcgaaactagggtactattacaagctgaagaagccattaaacaagccaaaatccgtgagataagctctcattatccggatctcaaaacagctggaaagtatcttacgtacggcaatgcattaaaactggaacagtatcacgatactgctcaacaaaatcaatttaggctatctaacatcaaacaaagtctagatgctaaccaaaagaaactagaagagttcaaaaaacatcagaaaatggttcgtgtagagaaagaacatgtctcaactatgagtaaagaaatagaaaagctcagcagcgtggagaaaaagcttgatgaattagacagaagcccaggggaaaaagccaaacgacttgtctcgaaaaaggctcgtcaagattatgaagaattgcaaagtgaagctaaatatggacacgaaaatctaaaagaactgggctataaaggacaacaagatttacaacaacaacaaagccttatgaactcaatggaaaaaacagttgtcccatggttagaaaaagaaataaaaacacatgagagcaacataaacgctctaagtaacgtttttaatgctatccaacaggctactcgtagtgaagaaattactaagcaaagagatcaaataggaagtatgagaagcacaactatcaatagagcaaagaataaaggtccagatcttagccgttaaggataaaaaattgccttaaggcaattagaaacaactttaagttgtttccatgtttttaacaagttaaccatctttaaaacaagggcaatcaacaattagtaataaaacaaacacatattattcaggagtcagcatatgtacaagcaatcactctctttcttgcatctactatagagaaataaagaaaagaggtgattgatatagagaactataaagaaaatgtatctattccacgtcctccggatgttgtcactattctttggcagcgaaatccactagatagacgagctccacggacaattgtagaggcaacggtaattggaaatgctagaccttgtcaacaattattacaaaatggaaaacgttacagaactgcagcagcatgtttacttgataatggttttaagcagataacaaacgaaagattaggtgtgtttggtatcgctgtatttgttcgtaatttttaatagtcaataatgagaaataaaaaagcacactaactattttctagatagtcagtgtgcttttcttgtctttaaaaagtgaattctaaagacaaagcgccttatttttctgtccctatattttattcatattgctaatataaaagacttgaattaagaatttttttgaactttgagcaaactactcaagaagaaacggggcatcatcttataaaaacaaattattcaacagagaaaaaactacaagatccctccgttccagtagttttttctattttcaaactgtatccgattttattaatgacctttaggataatttttatagccttcaggtacatctttctatttaatatcgcttattaggatctaggtattagaagtattatcaatttgtccttgatcactaatatctggatcacaattattatttaacatatgtgccactgaaggtgaagcattaccaaaggaaaaacaagctcctactgattttgaattagccgtatgactgttttgaacattattacctatatctagattagcgttttctgtaactccattagcattaaaattttgcacattaatattagatggcataaagaatatactcctttatttttaaacttgacctgatatcggcatagaggggttagcaatttgatcttgatcactaaaatcgggatcaaaattaccattagccatccaagatgtagaaggagaaaagttacctaaagaaatattagctcctacccactttgaattagctgtatgactattatgaactgtgtggccaaaatctatatttgcattttgagtaataccattggtcagtacattaccaataataatagaataaggcataaaattactcctttctcattttatcactttacagaatataaaatcgtccgttctttataacaattgtttcatatatcctgaactttatgtgataaagagataatataagagataaattcactttaattgtagcttatgttctcactccttattaggtaacttgcctattggaaataaaattttattttttgagcaaactactcaagacgttataaggcatcaagaatccctgttcttttaataaaaaaaactactggttccctccgttccagtagtttttttatttttaagctgtacttatttagtagctactaccactaaaacaagaacaaccaatgataactaataaaataaagagtacaacaattaaagcaaaactactaccaaaaccagagcctccacttgaaacacatccagagcctccaccgtaaccgtatccgccattaaaacctccgaaacaacacatattcttcacccccatacgtttctacttttagaatatgtacaagaaggaaaagtgttcgtcccaaactggtaaaagtagaatgatccacgcctgattaatttctatgtctttattaatatcttaagaaacctatataaagagacctgttacttgggcggtgttagtaacaggtcctgataagaaaatatgaaataggatgtttttatgtggtacaaggatattctatgtaaaattagtaaaacggcttatactaatgtctataaaatcttcaaaaatataaattacttatctataaaagaatgataccagcacttgtccaaacccttttcattattttgcatactataaaagtgagcatcgtcctgctcttccaatagatcggccctcatattgctattaggttttaaaaaaactactgtgtggtgaacagtagttttttctgtttttaattaacattataagaggtcaaaataaaagacttaaattaaggattttttttgaactttgagcaaactacccacggtgccaagaggcatcagtccttaaatgagatatgtataaaagaaaaaaaccacttatataaagaagtggttttttaaactgaagtcaggaaaataggcaaatatataaaccttctatgttattttacatagaataaagtattcttattatctctgatgatacgtttggtgccattgttgccagctactatgaggatgttgataatgccattgttcccatggtacatgggggttttgttgatgccattgctgccacgtactatgaggataatgatggtgccattgttcccatggtacgtatgggtactgatgatgccactgctgccagttagcatgaggatgttgatgatgccactgttcccacggtacgtatgaagagtgtccttgttgcattgaattcaccttctctctattaagtttttatagtttatggatattaagttgtaaagagcttatcttcatcaaatatgggctattccattaagaactaaaagccattgggattaaaaatcccaatggcttttaaaattggatattgaacaagtagttttctaaaacttaaaaataactctaataatttcaaaaataggcttttctcttttattactttttactcatttttcaccaaataaaggcatttacccaagagggaatctaggttaatgcatattcttgatttgataagaaaacaaaacggaggtttttctcatgaatttagatgaaagatttattggtagacctggatttggcttcggcagacctggtttcgggttcggtagacccggatttggctttggcagacctggtttcggatttggtggtccattcataggtggattagcaggtggattattagctggttctttattttccggtggatttggtggttatggttatggatatggatatccttatggaggatacggcggttacgggtatggctccccatatggttacggtggttgttgttaatcatttataatttaaataaggtaaatatagctttatcaatactgttcttattctatgtaaaatagtcattgatggtttagatatatgtcctaaccccattatgaataaacttacttaacatgagtaaattactcatgatgcaatgaggcatctcccataaaacctaattaagtcacaggtgtactttttggtgcaatcttaaagcaatcaccaaactcaacagtgggtgctgagcccaataaattattaatattaactgcgcctacaacagatggcatttgtatttccccccccatattgtaaatggattaattatgtattagttgtattctaaattcgttctaaaagtagcttagttattaaattttttctgaaatcacgatactatttaaaataatcataatagccaaaagtaaaatccataaaattattaatcccatggattttaccttcaggtgccatcaataatcggaagtaaattataatatgtgtcaatttagatttaggtaacttgcctagtctgaataattttcaatcttatgagcaaactgctcaagacgttctgcaacgtcggctaaacattgattatcattcatgaaccagaaaaaactactactgggcccagtagtagtttttctgattttaagccgtatatggtatacatgtttggttaacataatgaattttaccggaaacgaaaaagctcttagactaaccatatttactattattatttatatctttctaatagtgaaaaattttcttaaaagccaaggtcctggagtaaatccaagtgttaattgccaagctcctattgcctgcaaaccaaatttacgaactaataccattttttcactcatgcttcttacatcttcaaaccatacctcatgtgtctgtccagcttgatccttgtatcggaaaaatggtgatttatattcttttgaatactgtatagacgactggtatctcatcgctgttttaattgcatcttggttagatatagccgatgcgactgtacctggtttataggggatcgaccaattatatccgtataagggaacgccaattataagttttcttcgtggaacactttctatagcaaattctattgttctccttacctcagtaattggtgcgactggccctgaatcgctacctgcatgatgccaatcatatgccataatgaacatataattaacaacggcacctatacctccataatcatatccctttaaccaagaaatatcctcacttgttttagctggaacagctattgtcagaacatatccagaaggtcttaaacgctcccctaattgacgtaaaaacccagtaaaaaggtctctatcctcagcccttacacgttcaaaatcaatatttaccccaccatatccttttctagatactaaataaaagatattatcgacaagattccttcttgctgttggattatttaaaacttgatgagcaagatcaggactaaatccccctgaagttagattagtaatagtagctaatggtgtaactcggttcctccaggtagtttcaatcgccactaaatcgtttaaatcatttattatatccccgttatttccaaaatgatattcaaaaatggcaatagaagaggaataagtggcgaaatcattaattaaatttcgatccaactctggacttcgaacggcatagtattgcaatgtacctgcaatatagttcgatatatcagggattctgattttcatccctacctgcaaatggttaggatgtatagaaggattagctctcttcaattgttctaaagatacataggcttttctagcaatatcattaattgtatcattaggttgaactgtatatatataaaggggtatgagcaacgcttgacctggaacaatattcgtttcctctaaaccattcacacttcgtaactgattgataggggaaccatatctgttacttattaaaaatagagtttcaccaggttgaactacatgaacaaacatatttgcccctcctacttatcctttattcactcatattttattacataataattttaaaaaacccattaaataaatatatatagatacaagcttgtctatataacctatttagagaatgctagacatacattttccttttatatccctcgttcataatgaataaatctggtgattccgaacaaactactcaagatgtataaaatcatcacgactaacttctaattatgtcacgaaaaaacctacctcttttgactggaaagagataggttttttctgctttcagcctgtatatcgtatacaaagttagttaacataaaacacatttaataattcatatagtaatggataagagctggatttaaataataaacatgtacagattttttatgaaatcctggataatgagtttgataccagtattgagtgagcaaagtgtgtattggatgagaatgaagtaactctccataagatccgtagtataaaccactttcatcataatgatggtgcattttatcaccttcttaattttattttctacaatctatgtcttaaagtgggtaaagttctaatgagattcatttaggaatgaataagttaatcagaaaccttcttttttaagtttggttctctttttgacaattatagaacgaataataaatagcaaattgagcaaactactcaagatgttcccaagcatcaaccattttttctttaaaatactttctcaactttcaacaaaaaaaactcctgaccaacctgcaggagtttttttgttgttgactttgtgaattatgaaggtgaaaaataaagttaaaaggattctaagtgtgagacgaaaattattcgaactacatcatatgcctttattttcctttaggtaacttgcctatttggaataaaattttactttttgagcaaactatccaagacgccgaaaggcttcaatcctttggtaaaataaatgtagcagaaaaactcccttaacgctttgggggagtttttctgtttttaagctgtatattctagttaccataatggattttataggaattaaat

SEQ ID NO: 75 - DNA, 16605 bp, Priestia aryabhattai
  source 1..16605: mol_type = genomic DNA
ttctttatatgaaatgagggaataatagattaggatattgttgtctaacattcatataaatatagaagtgactgttagtatatttatatggatgttagacaaaaaacaggattccaaaaaggttaaaaggataatagaaaatctctttataaacgaccttatatgttcaagtatataaggtaagccgaaaaagtgtatttttacaatgaagattatgaaaacgctttactgaaaggaggggctaatttcaactcatatgattactatttacttcaaagataatacacacattagacttatttttaattattgtcttttttatagacgctagcctaagcataggctctctttaagtgttttaatgaaccgcaaattgaaaggggttacaactatgaagaaatttggattagctacacaaatatttattggacttgcgttcgggattgctataggtgctattttttatggaaataatacagtgatggccattcttcaacctttaggggatatttttcttcacctaattaaaatgattgttattcctatcgttgtatctgcactaatcgtatctatagctggtgtaggtgatattaaaaagttaggaagactaggtggaaaaaccattctttattttgaaattgttactacagttgcattagcagtgggcttattagccgcaaatttattccatccaggtactggtatagatatggggaacctcgagaaaggtgatatatccaaatatgaagaaacttctaaaacaactgagagtgcaggtgtagcagctcaaatcgttcatattatcccaactaatatattccaatcgttgactgaagggaatttattagcgattatctttttctcagtcttatttggtctaggagttgcagcaattggagaaaaaggcaaaccagttttaaacttttttgaaggcgtactagaatccatgttttggatgacaaacttagttatgaaatttgccccatttggcgtatttgctttaattggtttgaatgtcgcgaaatttggaattggttcattaattcctttaggaaagttagtactcgttatatatctgaccatgattttctttgtttttgtagtattaggtattattgcaaaaatggctggaactaatgttttagtccttataaaaatcttaaaagatgagttaattttagcgtttacaaccgcaagctctgaagcagtattaccaaggttaatgactaaaatggagaactttggttgtccgaaagctgtcacatcatttgttattccgacaggatatacctttaaccttgatggatcatccatttaccaagccattgctgcccttttcatcgcacaaatgtatggcattcatttatctttcatagaacaaattacacttttacttgtgttgatgttgacttccaagggaatggcaggagttgcaggtgcatcatttgttgttgtattaacaacactgggatcaatgggattacctctagaaggtatggcattcattgctggtattgatcgtattttagatatgcttcgtacatctgtcaacgtagtaggtaacgcattagctgctattgtgatgtctaagtgggaaggcggattcgataaagaaaaagcaaagcattatacagattctattaaaaaatcggacgtagcataaaaaaatttctttttatgtaaagaaggagatcaatgttatggcaaatatagaaataccagaaaaacaaaatgtaagaattgaaaaagatttcctaggaacaaaagaagttcctacttatgcttattatgggattcaaactttacgtgcagttgaaaacttcccaataacaggatatcaaattcacccagagcttattaaagcattaggaatcgttaaaaaggctgctgctcttgctaacatggaaacaaaaaggttatatgatgggttgggtaatgcaatcattgaagcagcagacgaggttattgaagggaaaagaaacaatcaatttattgttgatccaatacagggtggtgcggggacctcaatgaatatgaatgcaaatgaggttattgcaaatagagctttagagttacttggtcataagaaaggttcttattccgatttaagccctaatagtcatgtaaacatgtcacagtcaacaaatgacgtatttccaactgctatccatattgcaacgcttaatctgttaaataagttactaaaaacaatgaattatatgcatagtgtatttcagaaaaaggcagaacaatttgattctattataaagatgggacgtactcacctacaggatgcagttccaattcgtcttggtcaagaatttgaatcatatagtcgtgttcttgagcgcgatatgaaacgtattaagcaatcctatggacatttatatgaggttaatatgggagcaactgcagttgggacgggtttgaatgccgatccacgttatattgaaaatgttgtaagatatctagcaaatatcagtggtttaccacttaaaaatgccgatcaccttgtagatgcgactcaaaatacagatgcttatacagaagtttctgcaacattaaagatttgtatggtaaatatgtcgaaaatagcgaatgacttacgtctaatggcgtctggtccccgtgcaggactagcagaaatcactttgccagctcgtcagccaggatcttctattatgcctggaaaagttaatcctgtcatgccagagatgattaaccaggttgcctttcaagttatcggtaatgatcatacaatttgcttagcttctgaagcaggtcagcttgaacttaatgttatggaaccagttcttgtttttaatttacttcaatcaattagcattatgaataatgcttttcagacattcacggattattgcctgcaggggattgaagcgaatgaagaacatttaaaagaatacgtagaaaaaagtgtaggtattattacggctattaatcctcatattggatatgaagtggctgctagaatcgcacgagaggcaatcctaaaaggtgaatctgtacgtgaattatgcttaaggtatgatgttttaacagaagaagaattagatctcattttaaatccttttgaaatgactaatccagggattgctggaaactccctttttgatagagaataaacaggttttaatatgaaatgaaattcactgccatcatctgtttgattctttaattaaataatattagtaaaataactgctgattcattcgaactgccctttcattgttaggtaaaaactaataatgagagggcaatttttatactttaataattaaattgctctcttcttttacattaacaaactgtttaatatgaaggagaaaaccataaaaaatctgttggattaacgttttaactttaaaacatgtggtacacatatagtacaacgctaatattattgttggttgttgtgggaaggtaaatacttaatttatgaagggactgattagttttgaaagaattaacagcgacttcaacaaacgtattgcctcaaattgaaagtagatattcgtatctcacacaaggcactttggttatgaaccgatatacgtaacgaaagggcctcacaagggcaaatgaacaacttcttaaacagtatgggaagaagcctgcatctaaggagaccaggcttcttcttttcgagtttacataaacactctttctcgaacacaccaacaaaaagagccctcggtaggcaaagttttcgataaggctacggatttcttttttatgcagctctttatacatccttgatataacgaatttttcttctcagatgattgaaagaaagatgtataaaaccctgccttatatataggttttttctgaaaaagattacattcatagggggggcatgttgaacttttgttctctcatagattgtttacgtatgaaccctgttaaggagcacccttgtatgtatgtgaatgaaagggtgctctataacgaaatttgtatgacaaccttttaattaatgtgttataattactagtagacctaacctttcttatactttcgtaaagtataactcaaaatcaaaaaagtcacctcactctccaagccaatagaaggaggtgctttttattttataatgtcgtttaatctccctccggaatcttaattaaaatagtaatagctactgttgtcagaaatataaccaataaagttatcaatagatttgtactcatatcttccatccacctttctactctaatccctataatttcgttgtaacaaaggaaataagtgaataaaacaaaaaataaaagtgtcttattcatatttttatcatgttaaaatgcttaaattgttttaacccgattaacgtatgtaatttttttcttgagtagagcaagctacctttttctatttggaggtagctctttttattgtaaaaaaagtccggtttaattatttacttaacctaatggaaatcataaacacagagcatagaaaagcaccattctcttatacagtcctcataaaatcaccggttttgatagacgaaaatgtggaatatcaaatgtaagattattttaggaggaaaggtcgattttaccatttgacaagggagaacaatttttaggtggaaaaaaattaaaataaaatctatttattttttgcactccttttgtatttacgaaaaattaaagtatgacaaccggtttacccatgcttgtgttcatgctggaggtaccatagctaatttagcgtctatacttcttgtgtatagtttaattgtgttgggcgttctctcaaagaatctcttttcttaccaatttgtttatttctctatttattatattgttttctcactcttaccctttgaatattcagaaacgagtttaagtgatggacgggctatctatgatgcattgagatatggaaagataaagtgtaatccggattaacaaaggaaaagtggctaattaaaactgtatgtccacaatgagtattaacacgacaacgatactgaaatagatactgattagtaatcaagtcataattctttagatactatgatggagctactgcagtaaacttacctatcaaacaaaaaataaagaagaactcttactgcattaggtaatgagtaaattgtgagataaaagatgttttgtttctgatttttcaatctttttattgacaagttaagaaaacaagtgtaacctttttcttagttaattaaattaaatattcttatctcgagaggtggagggactggccctaggaagcctcggcaacagactgttaaggtactgtgccaattccagtagcaatttgcttgaagataagaagagaatccataacgattattaacctcttcttatttgttaagaagaggttttttatattgaaaagaaagaaggaaacaaaaccatgacaaagacattagtgaaggctccatttaaagctgatcacgtaggcagcttcttacgaacaacttcccttaaagaagcaagagaagcatacgcgaggggaataatcaataaaactgatttaaaatctgtagaggacaaagaaattgagaaacttgtccagaaacaaattgaggtagggcttaaatctattactgatggtgaatttagacgctcatggtggcacttggatttcttatcaggattagaaggtgtagaggagtttgaaacagaatatatcagccaattcaaaggcgcaaaaaccaaaaataaagcgattaaggtagtaggtaaagtagatttcaatcagcattatatgctggaacacttcacgttcttaaaagaagcagtcgaacagtatggtgatggaagccaagttgctaaattctccattccaagccctaacatgttattcactcgaattcaagaagatacatactataatggaaacagagagcagttttatcacgatactgtaactgcctatcaaaaagccatccaagctttttatgatgcaggctgccgttacctacaattagatgatacttcttggattgattttgtttctgaagaacgcatcgatgcggttgttgagaagcttgatatggacgtaaaagacattattgatacgcgagtaagctgcttaaatgaatccatttctaaaaagcctgaagatatgattattactatgcacatttgtcgcggaaacttcagatctacgtacatcacaagtggtggctatgatactatatctgatgccatctttgctaacttacatgtagatggacttttccttgaatatgatgataaccgttcaggagattttggaccgttaaaaagctttacacgtaacaatcaaaccgttgtattaggattagtaacatctaagtttcctacattagaagaagccgagattatcaagcaaagaatcaaagaagcaagcgaatatattcctttagaaaatttgtcattgagtcctcaatgtggctttgccagtaccgaagaaggaaatgaattaacagaagaggagcaatggaataaaattaaacatgtaattcaaattgctcaagatgtctgggagatctaattacagagcgctatttgttatttacttgtagttcagttagggttgggctctcgtaggtagttaggcaccgtttctgctggcttactaacttttgaaaagactctttagaccaacttcgtctaaaaaaatttaagttcgttattttgttatttatttagttggtaaattaaaatctatttcctaattagtaattctttgccatttgaagttgtgatatcagtaatgcggaaatgaacgcattcttaaatagtggaagaggcctctatctaaggagataccgacttcttttttaactgacataagataaaggagcgaaatcagaattttttctgagtttgctcctcttattacactcaaaacatattcactcgtatttctttaaaataatagcggcattatgacctccaaatccaaaggaattagataaacctgcatttatttttgcttggcgagcaatacctgatacgtaatctaaatcgcataatggatcgggattttctaagttaattgttggaggaacgatgccctccttaaggctcattgccaaagcaattgcttcaactccaccagctgctcctaacatgtgaccaaccatcgatttattagctgttattggaatctgataagcttgttttccaaataggtccttaatagccttggtttcagagatgtcacctacttttgtacttgttgcatgagcgctaataacatcaatttcctcaagggatatgtttgcgtttcttaaagctgctttcattgcaagataagcacctttaccctctggatgtgtagcaaccatatggtgtgcgtctgaacttgcaccgtatccaatgacttctgcatgaatgtttgctcttctacgtaaagcatgagatagagattctaagattagaattccagctccttctgacatgacaaacccatcccggtcttcatcaaaaggacggctagcttcagtaggatcatcatttcttgttgataatgcggtggcatttccaaaactggctactgataagtctgttatagcagcctctgttccacccgcaaacacagcatccacttctccagaacgaatgagtctaaaggcttcgccaatagcagtatttccaatggcacaagcagaaacaggcgacatagaagggcccattgcattccacttgatgctgatttgtgctgcagcagcattagaaatcatacctggtacgagagttgggctgactctccttggccctttctgtctaagtgcctcaatattttcaattaaggtttcaatgccgcctatacctgaacctacgtatacgcctaacctttctggatctatatggttgagatctaacttagaatctgtccaagcctgttcagccgcagctaaagcgaattgtgaaaagcgatctaaacgccttgcttccttttttcctaaaactttatccgcatcaaaatcccgaacgattcctgcaatttttgctttatggtcagtaatatcaaatgtatctatagaggagatacccgactctcctttaattaggttgttccaaaatgttctgatgttattgcctataggcgagactactcccatacccgtaatcacaactctttccacttttcatcactccaaatcaataatatacttgtattttacagtccttttatcctattacaagggattgtttatcctagtataactactactagggtaaattggtatgatgaggagttttaaaaatgaacgataaaaccaggcttaaagctttgtctacattcttaaaagctaagcgagctcaaattaaaccagagtctatcgggttgccagctggaatccgaagaaggacacccggattacgccgagaagaagttgcacaattagcaggggtaagcaccacgtggtacacatggttagagcaaggaagagatataaaagtttcttctattgtgcttgactgtatttctacagctctacaactaaatagcgatgaaagagactacttatatgatttggcattagaagcaaagtcagaaattgttcatcctaaaaaagatcaatcagagcttagcccttctttaaaacgaataatagctgaattaacctattgtcctactatagttacagatcgacattgccatattgtgggctggaattccgcagcttctcatgtttttctagattttgaacaaatcccaaatgatcaaagaaatctaattcaattagtattcgcccgaaaagaattgaaagcattagctgtcaattgggagcattttgcgaaaggttttcttgctattttccgtacctattatggacattatttaggtgatgaatggtacaaccagtttattagtcagatgagtcatttacatccagaattccaaaccctatggaatgaaagccaagtgagtaaagctcccgaaatggttattgaatttagacatgcaaaggcagggaaaatgttatttaatttaacttccctccaagttcaaggagatatggatttgcggtgtagcatctacacaccagtagaggaaactgatacggaaaataagttaaaacgcttaatgaaaagagtttctatggagaaattatagagaaatttcattatatcaagcggattaagatgacagtctcttactggggaactgcttttttactcaaaataaaagtataaaattaaagtttttgagcaatctaagaggataggaaccccaattcctactattcttcatatatgattttcttaagaaaagctacttccccgggtatgggagtagcttttttctttagaaataggcttcttctttttgagtttacatcaaacttattttaagaaggaacataaaggttaatacgcctattaccctctctataaaaagggccattattcttaattcaataacatcaaaaaaatcaatagattacttcgaaaacttcaatttcactaataatgaactacaagttaaagttaagaaatatcaaaagaaggaggggttaataaatgattgttgtttatgatgagagatataaagaagaagtcattaaattaatattgtatgtacaaaaagagtattaattaaccttttatttgagtttcgttaaagcaattttattaattccaataaaatttttaactttattcctttagtgtttgaataaagtatagaattaggagtcgtaaaagtatactttttcgaatgggatagctgttttttaaatcattttttcacaatctaaaaaattgtactttttgagactatctatattggacaactttaaccataaattaactatacatagttaaggggattctgatgcataagtgttgaaatgttgtactgagaagctaccagaagaagatattctttatttcgcgggtcattgtccactcgttgcaactctgagcgtttctcataatactgtttttagtgaaggagttgagaagattgaaaaaaatcatatactggattatttttattttgttgattttagcttatgtgactgacgtagaaaacattgacttaaaggatttattctcttcatcacaagaaagtatcacatcctatgatagataaagtgatctattttccaactgataaatattttaaaaccgcagcacatattgaacataccattaataaaggtaaggcagctatttgcacaattaattctgatggggcagaagagaacagaagccaatctttaaaggggcttcctactaagcaaggttaggatagaggtgaattttcaatgacattttgtgatgaaggaggagcaggtgcagaagttgagtatgctaagcctgctgataatcggagcgcaggttcttggatatcttatcaaatcgatcaattggagagttaaacaaaggtttttaattcagataaaataaaaaggaaaaatatgtttgcgtctaaaatgaaaagaacaggtattggaagggaattagacgaattgggacgtgtgaaaattcgatatgaattatgtaaagcttttgggatagaagataatacaacacgtttagagctacttgttatgagtgggtttatacaagtacaggtacaggagaaattaaatggccaaacattgttagcatcgtacttcaaagcaattgaattaaagttagataaaaatttcattcttattctcgaagaagcattgaaaagaagggctctaccattcattactaaaacagataggggtaattagttcagaattacgcttctatctgtttttctttttctagaacccacattaggaattccttttcttgattagttagctttctatttaaggactgttcaaactttaaaactaactctataaagtgctgcatgttatccatttatgttataattcaactccttgagtctatctttaagtataggataaggttaaggtttttattttgtcaaattttgttgtgtcttaatactataatttaagaaaaagtataaggcagccattataaagatatttcaattagacgattagctcttctctttgaatgtcatattgaggttaactatgagaaggagtggaagagatataagagtgaattaacctttatagatcaagtaatctggaccatcaaagatttattttggaaatgaaatatgttgatttaaagtaaatagcgattaatggaatctcatcataaaacatacatagatagaaaaagttaaattatataaaaagagagtaaaccatcttttttatttgtttgctctgggagaaggtattgatcatagatagggggttctgaggtaaaagtattaaaatgttgaaaaaacacccctgaacgggtgctgtgaattaaagaagttcatcgttctggttttttaggaacttgctttctaactctaattgcttcattcgtcgttgtaatcctaaattctctaagtcttgttctaactcagaagataaatcagtttgttctatagtattcctcgtttgttctctagaagttgccaacctcttttgctcttttgagttcatattaacagctcctttcttgtgactttctagattcgacatagcagatgaaatatcctgtaaaaagccatttacctagaaatgcaatagcagtacaatacaaaaaaacatccgtttacagtttacataggatgtttttattctactcttatttcgttttcatctttatagcctgctcctggcgagcttcaattttttcttcaatcttttccatgacctttttatcttctagtattttatgtctgttttcattgactaggttttgaaaagagggttttaactttctcataatggcacttctttctcactgtttagtttagtccgtagacaagtatgattataacggttaaatgaaaaaaagcaattatttgctatcaatattcctatgtgttacactatatttaacttgtttttgttcggtataagattgagagaagaaaaaaccttaaacagaagtttttatcttgaaatagtatgattgggcaagagaggtaatacatttgtggagtattccacagcaggaggcaacattatgacacaaggtacagtaaaatggtttaatgcagacaaaggtttcggtttcattgaaatcgaaggcggagacgatgtattcgttcatttcagtgctattcaaggtgaaggtttcaaatcattagaagaaggtcaaaaagttacttttgatattgagcaaggtcaacgtggagcacaagctgctaacgttcacaaagcataattaaaagtgataacaaaaaggactccttgtgaaggagtcttttttttatggtcttataattagaaaaccatgatttatctactatgattcaataggaaacccaggctttaaaaaagcctgggttttagacaagacgatcgatacaaggtataactagttataacatacaatagaaatagaaagcaaatgcaaataaattaactatgttttcaattaaattaaataatatagtagtaatttttgatctatgcgatagcattggtacaaattatcttcgatggggattaagggggattttattaataagtcgttctccagcttccatgtgatttccacacaaagggcatttttggtggttgtcgtaagagaaatcttttctcatccagcccttacaatcttctactgtacattccaaaacctctgtttgttcttgaactaaaggttcttgatttcttttgccgtaataatacatactaacatcactactcctcatactatattatagcttataaaggagtaataatcatttatataaattggtgtttattaccattttattttcattgaataatgcacggaatttttgatatgagaatgtctaaacacttggtaataacgttcatatcttcttcttttgctttttacttgtaacacttactgtagtagtacatccttaaactaagcctccagcgcaatgaggattagtttagagattagtttaatggtggaatcacttcgcttatcaccggtaatcaagtggttattgatacggactttccagaagtttcgcgacttgttggagacttttatttcaagttattataaataataaaactccattttacctcaaattaaaatatattgtcaatgaaaaattgtaatatcttcaaaaaatgttataatagttttacaattgttttttaatcgtattccgaattccgctgtgtttttttaaatagaattatggatacattttttcaataccctttttaaaactgaaaaaaaactcaaacagttgtgtgagctttaaaggtaagttagttgaataaaattattaatttactatctaatagtaaccgagtttttattctacaaggaggcctagaataatgaatctaatcaataagaaagttacacacaagctttttgggataggcagtatagttaaatataatgattctagtattgaaatacatttcgcatcggaaaataaaaagtttgttttccccgatgtatttggaaagcatctaaaactgcatgataaaagggttgctgatttactcgaaaaaattatagaaaaaaaggaaatggaacacaacgagaaagaacggaagaaggaagaggaaaaaaaactacaacgaaaaaaccaagaacttcgctggggacttgaaaaacttatgaaaaatcataaacttcattctgaatcacaaatggttttttggtgtgacacagaagaacagaatagttcttttttagagtggaaggttttttcaggcgtaataaaaagtggtaataacaagggcaagccaaccaaacccatccgtttgcaccaaaatagtgctgtcttgttaacagcaatagattccagtatgcctgaaaaagacagacgtatcttaggcgtctatatggtaaatgaagattttatcggtaagctttgtgaagatggatatattcctgctcattcaaaatacagactccaacttacagaacaggaatcggatcagatgcttttctgggaatattatgtaaatgaaaggtcatcccaaaaaatgacatggaatacaggtaaataccgttattttgataatttatggatggctcaaattttgcttgatatagttgatttgaaaagtgatccaaaggaaagagagctggcacaacaattttttgaacatttttgtaaaatgaatctgataacagctgaggagttaccaaagcctagtggcgcattaatgcgtatgtaaacgttagctcaaagataataagaatgactagagactgacacatttttcccactcatcattaatggcgaacattccttggctctgtttgctaataaaaaggcaagagcagaacgtaggagaggtagaaaagtgacagtaggtcataaaaaaatctatacggattgatgtaatcttttctcagctctattataagaataatacgataatcttattatttttaataggagagaagatgagggatataagcgtgaaaatatttagtaatggaaaaacagtaactataagagtatcgaatgagttagtaacaatcttaaaaagtcattatgtaaaaaacatgaaaagatactcttatacggtcaataaatatccaagtacttttttctttgaagaagaattaatgaaacatgaataataagtagataaagaggtgctacacctatgcttaaatttaaagttatttttgaatttataaatggcaggacaaaggaattaaaatttcaagccacatcaaagaaagaagtcattagtcatataacaaaagatgaaagattcatttcgaatgaaaaagagctagtgcatatcaatttaaataatgtggtacagtttatggttacagaagaaaaataagaataataaagataggcatctattaattgaggtgctttttattttgatagaaatactgatttaagaaataagcaatactataaggtttagagctctttgattccatgacgtgtcatcagtggcaagcacttacgaaaaacagatgatttttttaatggatggtagctctaaacctgctattattaaggcggagaacgaagacgttttaaaacaataaatttcaagccatgaaggttggtttgaatttaaagaaatagtaaccagtaaaagaactataaaagtggctgggagattggagacattgactcatttctcaattagggaatatcgaaaaccaacagtagaaagatttaattaaattttcctttaaggatattgattcatcattgtccttttttattttgagaaaacagggaatcttttaaggctcgtcgtattaatatagataaagaggtggttgaattgaaactagaacaattaattatcaataatattgaatttgacgttgaaaattttgaagaaaaaacaattacacattccactacaggtgagcagctaaaaaagattggttttgcattttcggttataggaaaaaaagagtataacttatatgacttattttttgagagcccaaattttgaacttactattgttgatacaaatgaaaaacttaaaatgaaaaatatttcccacagtactttctatcaagcagcagagatatcagatgacacaaaagtcgtatttagaattaagttacaacaagaaccagccaaagaaaaagagcttacaaaagatcagaagttgatggttaattccgtaaatgaggttgttttatctaaagtaagatttaaagcgttagaagaaatactagaagaaaaaggattaatcaaaggtgatgaattatttgataagattgaaaaagtagccaaaagagactttgacacgttaaagaaagaactactttatggtagagaagaaacaaatacgtaaaagcacccctgttttatcaaggtgcttatttatttttccataaagagccttttcgtatatcatttccgagaaacaacattatgttaactaaagacgtataatatatacaatactagttgaactttgaattgtttagtctttatgtaaatctccaccaatactaaacctattttcattatttacctcatccagatatccttttaactggatgattggtttttttgtctctatattagattgattttgtatcccttgaagaggcatgaagacatttaaagtaactttctcccctggtttaatatctaatttatttccttcagcttcaaccttataagggctgttcccatatacattttctcttttttcaataggataataaacatatacattattctgtttaaggactgcattactgttgttgattagctttatttcataagatatccctttatctaacttctgttctttaattaattccaattttatgtcgctatagggttcttttgttgctttttgattgctacaacttattaaaaaagtaaaggtcaacaacattaaaaagaataatttaattttcattaggaatctccttgtcctttattatagattttagtctttctagattaatcatctgctctttcaaatattttagattcatcttttttaggaaaaggtcttacttcaaaatagtagctgaaaacaaaaaagataatcacaataacagcaaaaataagtacttttttagattaatgcttggattctttcttattttcaagctctttctt

SEQ ID NO: 76 - DNA, 16481 bp, Priestia aryabhattai
  source 1..16481: mol_type = genomic DNA
ataaaatccaaaagcttatttggaggtaaatgggtttatatggaatagatagggtatgaacaaagtataagtcaaaaaattttcatcaaatctttagatttagtagaagcaaaactttgtgaactgaataatatcgaattaaaagtagtaacaaagcaataaatgtgttctaaaacgctgaattttgcatccaatgagtagttatgcaaaagcatctttccatttttttataaaaataataaaaaaaggagagttattatgaagaacatctttattaaattaatcactgtttttgttttactgatatccgtattatgtgggatcaatcaaggggagacagaagcagcaggcaagtctgcgaatcaagatttgattattattaacaaatactataacaaactagcttattttcataacggacacattgaaatagttgtaccagtagcaacagggaagacgtgggagaaaacacctgttggattctttaaagtagtgaataaggttaaaaatcgcccttattataacgggaatatagctggtggagattctcgtaatccattaggaaagcgttggttagggttgaatgcaaacggtacgtatggtgacacatacggcatacatggaaataatgatgaaaatagcattggaaaatacgtgagtcaaggatgcgcgagaatgcacaatgtagatattgaaaagctttatgacaaagttcaagttggcacacctgttgccattacgtattcctataagagctttgttgatctaactaaagtgtataactatgagttaaaaggcagttaatacaaagcagcattcctctccttgatatgctcccaattaagccaacagattttttatttactctgtctacttaattgagagcatatcagagtacgtttgtaacacctgttttacaaacgtacaatattgttttaactaccgtatttcttcgcctatagggagaagtttaaacgttacacagtcctctccagaagcaataattctacttccttgttctgtccatttattaatttctacagtatagaagccaaccggttttccgtttttctcaatatcatctattgaatcagcttctacttgtaatgttttcagcctaattttctccccatttgttaatgttgagtaatttatattttctctgagaaaatcaatataacttttttcgctattcacactaacatcatcaccatgaatatcagttatttttgtccattcattttggttcttgacttctagctcccaaacattagcatgaaatatcataatatccctccgttttttagattaggtaacatatattgtagtgttgttccccataaagcttttattaaacaactttgttataagaaattttaccttagttgaaacaagatcaaatatttttttcttaaaattatacttatacgaaagctataattctcttatttatttataatcatgtcaattctacatatagataatatatacacttattagttttgctctctttgtccagaaatccaagccaaaactaaaatagcaactgttagcctgaatagcaataaatctttcatttcccatcctacccttaaaaaagagttatttggatagtgtagaatgaagtgtacatagggaaatgagacgttagagcacaatttaattggtactataaccaatagtttacttgctatttttagaggctttataagagaaagataatttttcgttcttgctaaataattatgtgtagtataactaaaaaagtgtgaaagggggaatgatgtgagaaaattaacgtttcttatgcgtcgttttaaattcttaattattaaattattaaggttaaaagaccattcacataaagtttcattgggttttagtcttggttctatcgtgaactttattcctacttttggttttggtcttatgatatcagtaggcttagctaaattatgtaaaggcaatagcatagcagggctaatcggtggaatgttgtttatgtgggccttccctctactgttttatttgaatatggtggttggaggctagatattccctgtagatcttgaccaaacttttctggatgctgcatttcttgtttcatttgattaactgcttgtgcgaaacaagggaacacctactaaccaggaagttccctttttatttcgctagataaaaatacttcaaaataaagattaaagaaataggatacggtgggggcaaagtttttttcaagcgaccactgttacatgatctataggagttacattgaataaataggactagctaccagcacctacgactaaaatgttgtattcgtagctccaccatactactccggaattaatcataacttctcgataacctaacctctataaacactagcacatgtatcaggttttggttcataataacaatgatttttaaattgaccagatgcaggttgaccgtaccatgttggagggcacggagcatgtggattaaaataccaaagagcaaatttcgctgggtgttgtctccaataatccaaattctgctttgctaatcttttttcaacacctctcgctctttgataaaatacattgcctttttgaacagcttcaaacgaataattccccccctgtacttgataaatgacttgtgaaacggttcttaaatttttaaagtctatacaatttgctgcaagacgattaacaattacatttccgacatataacatacctagtcttccttcaccttcagcttctgctcgcatcatccttgccattaagttaatgtctgcacttcggtaacttactcttcccatttactcacccccaaaatatagtatgaaaaaaaacctatattgatgtcattgtttataagatagcactgtttagtttttacatatcatcgcgcatatttaatcattaccattaaataaatagatacttagtatcaaacgaagtagttattcttttgatactaagtatctaccgcactaggtgataactagatagtcatagaatatgtgctgggtttttatatactgagggctgtcttaatcgcctatcttattcatgaaacagtcgggaaatgagaaggtgtccttttatataagaaaaaagctctaattagggaaaaaacaacaaggttaataagttttagtgagtggtaaagtcaactaaacaatttaaaaagagggaagtattaatggagattataatgagattacagatgtttcattataaagaaaaagacaaaaaaataataaatcagaatatagtataagcgaccttagtaaatttgtttacggtatataggatcgcttattattatgggcaatattcatacaagaatccaaacgatgaagacaattcctgataaccggaacgttttctcatcttttatagcatcaactggtctctataaatcggccagattgtatttcttaggttgccgaattacaaaaactattgtctctaaaaaattagtgattctaaaaccactgatgtcaaagtttaaaccttcaattactaacaacaattaatgcgtaattcttgtttttctagttcctttaaacgatcatcttgagtgggtaaccaattgagtatacttactaggaaattatagcttaaaaaacagaaaaacctatcacgtaagggacttcctccacagagtgagacaaataaaaaaactactggcatatatgtgtgtcagtagttttttcaggttaaatactacgtagataagagccttgcattttagaatttaaacacttcatgagtagtttgctccggatgtgcaaatttattagttgttggctaatttacattttaattttataaatagacatattaattaagtatctaatttatttaggaatcaaaggtggaagtttaataatgatgtatgtctttctgagttttttagtttttaatttaatagcatttttttcacctaaaagattagttcctattgaaatatatgctacatatgtttttgcctatgcttatggaggaacaacaagggtccttaagatgatagcttttccgggttatgcaggtttttacacataagaagtctgcatatcttctaccttaattgggatacaataaaatttgacctaccggaccacgttttatcgacacaagaagcaaaacagaacttccctaaataggaatgttctatacaaagatggaggaaagtactatggaaagaaagaatattcatcctggatttcttattctaggaacaatcattgtccaaatgggactaggaacaatttacacctggagcttattcaatcagcccctagttaataaattcaattgggagctcagttcagtagctataacgttctctataacaagttttgccttagcttttgctactttatttgcaggaaagctacaggaaaaatggggaattcgcaaattaatcgctctatctggctttattcttgggctaggattaattcttacttcacaaatttcctccttactaatgctttatttactggcgggtgttatcgttggttttgcagatggaacagcctacattacatctttatctaatttaattaaatggtttcctaaccgaaaagggctaatttctggagtttctgtatctgcatatggattagggagtttaattttcaaatatataaatacaactctgattaatactgtaggcatttctcaaaccttcttctattggggcataatcgttatgataatggtagttggaggctctctacttctaagagaagctattatagtcgaaacaccaattaatgcagagaatgccgagaataaacgagattatacagttaaagaaatgttagcaacaaaagaagtttatttccttttcattatgttcttcacagcatgtatgagtggtctgtatcttattagcattgttaaagacataggtgttcaattagctggtctaaatgttgccgcagctgctaatgcagtagctatgattgctatttttaatacgatcggtcgcctcatacttggttcactatctgataaggttagtcgtttaaaagtcattgcttctacttttttcattacaactatagctgttctcacactgatctttgttcaattaaactatggggttttcttcatttgtgttgcagccattgctttttgttttggtggcaatattacagtgtttcctgctattgtgggtgatttttttggtttaaaaaaccatagtaaaaactatggaattgtttatcaaggctttggcttaggtgcacttgctggatctttcattgcagcatttctaggagggttcaaaccaacctttattgttataggaactctttgcgttctttcactcattatagctatatttattaaaccacctaatcattcaaaaagggaaaatgaattggaagatatctcaaaggctaaattagtttaataatggctaataaaagacgaatagctccatataggtatcactaatcaaagcccttataggttttataaatcatttcatcatattttcattattaattgttaaattaaatcttgtgaaaagcatactgacattttttcataagtttaacccccttttagactcacttttaagaagtgagttttttatttacaatatagacttgtttatcgtaacaacattcaatgaaaaaagagtttgaggtattgaattaaaacggtcttccactttaaaatgagaaaccattttcttgcttatcaacattatcagaagcaaaatgatcctgaatcattttgcaacaagctctttttgctttgaaaatataaattcctttatttctacgattgaaagacctagatgatatgcttccttgatgagacttatccattcctgatcaaacttattctcttcttcttttagcacccatacttcctccaactgtcctaattgaggttaattaggcactatcatttaaaaataaataattaaaatcaagactatttgttcaacaaatttcttctaaattcctgcaatataagtctttttatataattaattaaggtttaatgtagaaaaaagcaaattcaaagaattattgttgatactttgagcaaactattcaagaagaaacggggcatcatctcataaaaaccaattactcaacagcgaaaaaactactggttccctccgttccagtagtttttctgtttctaacctgtatatggtatatatctttagttaacagaatcactctttccggaacacatcgcaaaaataaccccttggcgcacatggggtttcagctgggacatatctctaattcatgaaggactaaaggcggcaataattgttctacatctccctttccttacaattattcctcctttgcttcttcttgtagctttctttaaaaataggaagaagcatgggagaaacaaatttaactagctaattttcatatggaatattgtcatccttgttaaattccccagtaaagttcttaaccgtggaagaatacttttagcctagaattaaccttaaagtaaatctaggatctattacataacgttcgaaaaatcggaagtggtgaaagcagtaaaggataatccaaaaaattaaaacagttccttaaatacagttgaaaaggaaggcggaatgaatggagaaagctaaaattagtgccagtcagctttttatcctaatggttttgtttgagctgggtactactttgttgttacctattgccatggacgcaaaacaggactcttggcttgcgattctacttggaacagtattcagttttgttctgtttctaatttatcataaactttactcgtactatccagatattttacctacagagtacatgcaaaaaatcttaggtaaagcagtaggaagcgtactggcctttctttatatcttttattttatctataatgtagcaagggttctacgtgatatcggtgagatgctgttaacctttgcctatcctgatacccctttgttcattgcgaatgctttattgatccttgttattatttatacagttcgcaaaggtatcgaagtaatagcccgatcaggagaaatcttttttataatcatttatatcctagccattactggctttattctgattgtatgttcggggttaatcgatattacgaacttacaaccagtacttgaagaagggatattcccacccttgaaagttgtttttactcaaatcttgtattttccttttagtgaagccattgtgtttacaatgattttaccgtatttaaaaaacccaaagaaggccaaagtgaccatgttatgtgcatcaggattagctggtatcaacttgactattgccatgcttattaacattagtgtacttggggttgatttgactgaacgttcccaattccctcttcttagtaccatacagagtatccaggtagctgactttttagaacgtcttgatgtattttttatgattgctttagttaccggtggtttctttaagataagcgtgttgctttatgcggctgtcatagggacggccaacttatttaagattaaatcatcttcacgactttcataccctataggacttatgattctatttatgtcaatgacgatttctagcaattttcaagaacacctccatgaaggattggggatagagatgtttgttttgtatattcccctttctgcgatcattccttctctgctgcttcttgttgctttcttgaaaaatagaaaggaccataagcaataaaaggtttatttgcattattcccttcggatatgaggtggttcttacaatctgttccccccctctaagacaaggattattaaggggaatttaaactatttgaggtgacttttatgtatacctggttttatgatcattttgttaatacaattctatttcctcttatttgtatagtaatgatagccatcacgttaagtgcatatacatacttaaaattgaggaaagcaaatgatcaatagtctctaggaattgttgatttttaatattgatttttcttccccctttaaaaaaactgattatgtgtagttccacttttcgtcatatcattaagtaaaactagacgtattttattaaaagtagtgttattgattttactccatgtagacaaatgaaacttttttctacaaagtattacgcttctaaatcacagaatatcaatgattatttaaaagttatttcttttatttcgacgcaaatttttctaacaagatatacttttacgaataagatatttaaatctattacaacatgttaaagtaattattatcgttaataaaaaaagaaagctaccccatcgttgcaggacggatagcttttagggaatttatatgtttctattcatagaaaagtctgaataattatacaacaaatttatagataagacaatataggacaactttgagcatatatatataagatgaaccttttatacatcatttctttcatcacctgaaagaaatgatgtataaaaaattgcataaaacagaaacaaggacctcatcagaacccttttcccaataggggttctctttttgatgtcttccggaaagagtgattatgttaactgggcttttatttgacattcatgattttttaactcaattctaatatataatcagataggaatgacattacaatttagtctatctgaatagaggttagagattgaaaaaacgatatatagtacttttagctgcatcaagcgctcttctagttataggagctgtttggtggtctctttatactactttaaattctataaaacatttatatatcattcccaagattgttagcgcatttttacttatatatcaaaaaaatcatgaggctgtttacttttatctattttctttacacctaacataattttctttagtgttttaggactaggttcgtatgtagagtcattacacaaagtagaaattgttcgtttagatattttactctcgctagcaaattcattttgtgtgataccttcccgatctaaaaattttccgaatttgctcctctttggatttttccaccacaactttaccactcctgtttttgttatcatactgcccattcaaaaaacaagatatacattcttttgcactttatttcattcttttgcacatattggacaagcatcagctcatattatttattaagacgtcaaaaagagacgtcaccttaaatcatcaggactggagagagtagtatgacaaaagaattagcaatctcattattaaatcgaaaagacgtctatttgacgtcagaaggtaaacagatgttagaggtcattttaaaagagaaaaccgcgtatgaagaaaaataagaagctaaaaaatcacgtagacacctatcggcccactgtgcggtaccattccatttatcgtacatatgtagatagtctatttcatgctaccgggttagacagaaatcaaattataaggtgtgcactctttacagcagcgaacaaccctgttttcttagcattaatgaatcagtataaagtaagtgacgtccctctcccctcctctccatggcaaccttcttcccacccgttatggatggaacaagagccacgcatcgaagcgaaaggagaaggcaaacatgatgaccttgagcgaaaaggaacgtctacaagcgcttttacgttacttggaacatcaacagatggccaatcaatgtcaggagcaactaatcaacccaaccaacagtcttctaccagagaaaaggcagcacgtatcacgagacgtcagcaaacgattgagagacgaacaagggagattcctaccttacgattatcaaacaatggaggaattagacttgatctcagataaagcagtcgaaataaaacgaaaacttaaaatagagccgattaaaggttcttataatagctatgcagtacacgaaaaggaaaagagggattggagtaggaatatttatttgacttgcttggtagcgattttagccattgccttttttacctgacgtctttttagaataatgtcgatatttcaggcataaacatataacatgaatacagttaagaccgccttataaactgatacataatgggcggtctttgttgtaaatatgatcaaaaatttctgggaagtggaaaggattttggtaacaaaaaacaagaataaagattcatataaaatatatcttttataccttatagtatagatgacacaggaggtatgtagatggaaaatagtcctcgtttcgcagaattagtttctgattttgaaaaacagttaggtcgacatttaaatgacaaagaaaaagaactacttgtatagataatcaaagaaaaaagtaataagtatgttcaataatctacagttatccccttcacctttttagaaattttcttatatataggatagaattacttatacatggtacggtgacgcatagaaaaaatcctacacactgaggtgtaggatttttaattagtcccaaatattagattagaaacatagggtattcggtattgcaaatgaaatgaaagtttaactttccacattattccatcaaaagtatctttactattgaatatggcaaccttctcaatttgctacctgtatctgggataacaaaaggtaataagttacaattcaccctattgtagattaagtattaatctacaaatgcttgtttatcctctatttcacctggttttgaatatgtaacatacgtgcctgccatcatgtcatgaagacttcttttatccttacggaaaaccaccatgaacacacttacaattaacgcaatacctaatgtaataccataaacaatgccggctacaagaactcttaatagcattgctccgattccaagtttctttccattgactttgacaattctaaccccaacaattcgtttccctatagtatatccataccataaaataggtacagcaaccgcatagatgaaacctataagtgatgtaatgggatcatcaccctcaaagtctcctgtaataagaaaaccaataagccccaaaggaatacttacaataatgccatctaacagatttcctaataggcgtatccaaaatcctgctggttttattacttgatccactttatacttcttcccttcttgtaaattaacactttatctatctaagtagctcctcagatgatgataacatgattaaagaggaaggtaaaaaatataaaatattttaaatttatccactaataataaaatatatgtctctagtattgatattactaaagacatattcatagaaaagagataaaagattaattaggtttttttagttgtgaatttccctttttaaagataataacggcattataagcttcatataaggcatacacacggtaacaaaaagccataaatacaatcatagttggtaccttttcaacaacaggaaaatggccggccaagaaacttttaaccgtaattcctaggtaaaccaatcaaggaatgataataacagctaataacaataaccacggggtcatcttggtttccttcagtttttctcaacaatgcgggcatttcattgtaaaaggacttgaaaaatcttcgaaatgctcaattgtaataggtttttgacaccctggacaaggtgttgattttttcatataagcttctcctttttgaagtgtaaaagagtagaaataatagcgttattgaatatataacattgcccttttgaaaaaagcttcaaataagtttagagctctctaatttgataggctctacacgtttcacataggtagctgccatcaaatcgtgtaaacttttcgcttatcctggtggaaaaccaccataaaaaagctaatgatagcaactattcctattgtaagaccatacataagatctgcgatgaagaaacataaagccatagatccaaagcctacatctcgtcaaggttatagttaaatcgcttgtatacctggtttttatgttgttgattcgttttcataatgttgatgatgacatgttgctcacttttccaatgtacatcaacatcatgaatcatagaaggttgaattccttgaagctccttatattggttaagagtgcttccaggttgtccgtagtacattctaagagaatcagccttttgtttttgctcataatcaaagtaatcagtggtttgtttatacatcttttttacttcaacaatgttttgttgattaggagatgtgctggttgtaagtgagacgctacgcatcatgtttggttgctgttggcttttatccaagaaatggttcatcacaaatacaagaaaaattactccaacggataacatgatccaaagccactttttcatgtcgacactccttctcgtaggctagaaaatctagataagtagatgccatcattgttgaatattaaatagtattttctgcttttactgatttctagatgataacatactcaaaaaatcttgaaaggtatcagcaatctttgatgtggctggatcacattcgtatgattcttcgtagtctaagaaatcaacagacggcttgttcttatcatagtgaaagttcaaacacaaataatctccccatgctagcttcgcaattggaattaattcagaaccgataaggtcttcatcataaatattccgtccttgttctcctaaggaagtttcgcagcaaccaatgtcatacacaccataagggtgctcactgaagtttttaataatgcctaaaaaacgttcaatttgacatctcttattgatgattgttaatggtgtagaatctattactgtacatgcgttatagtgtttcaagaattccttataggcattgggcaattggatgcgaaaagaagcctctatttctgcaatgtcttgatcctctggtaatggataagtgatgctttccttcacaagtctcattgtcctcggtctccttgcaataggtcatcttcaaggaaatacattatgacttttgatattcatacataactggaactttatccattttaacggttttagctacaacataacgacggtaaccgtcttttaagacattcgatcctttttcaatcgtcaatggctcatctaagcgtcctgtacgtttcacaaaatcaatgaccttttgtgttttttcagcgtttggacgtgtctttaagaatgcttcaggtacgataatgtcatcaaagttcaacagatcctgtgttcctttaggttggttcggtagcgttttctttttaggctcagcctttctttcttctgtaggctcttgctttacttccggctgaacagctcttgtttctttcttttcttcttttggtgcaggttgagaagtagttaccggtttttcttcctgtttagtagcagcaacttcttgttgcgctgcagaagcctcttgtttggcctcttttttatcgtttgattcattgtcttctttgtctttcttactcgggagaacggtaatctggaagcagattacacctacttcaccagggcattcatcaatcggaatgtctaatgttggttctccttgaattaagattttttcatgcataatactttttttcgtgagacctgttttgttaaaagccttctttgcaacaaatactgtatacgaaataaacgtactcttcttcaaccctttaggcgcagatggtgaccctttttcacgcatatcaaaggcaacatagcgatcgtattctcgtagtggtcctgtggctgatcctgttaacgtaattttatgtggcataatgctctcctcctgcgtagatatagatttatttattatttagaacagcgttctaaataaacatatcctaataataattcaacttataaggggtttctttactctttgcattttctcctatcgtacatataaacagagactatgcgcatactttgagtatggacttgtagctcaatggtagagcagccagtcgtattacactatacaactttggcgttttgcaggttcaaatcctgccaagtcctctgttaaaacactgaatacgttacaaatagtgaaagtccttgctatgctttaactatttgtaaacattaagaagctggttcctttaatttagcatgttgatgcaataattcttgttcctcaggtgttaatgcttgtcctaaatcttgtttcagttcagccatttctaacgaactgtatgtagaactatgtttctgcagcaagcattcctcttctggtgtaagctcttgttctaagtcttgctttaactgaatcatttcaagctgttgttctaaagatatttctactttttttgtacccttctcttgatcctgctcagcctttaaccaatccggtaagatttctttacggataatatgttttggtataaacaattttgttgatgactcttctttatgtataacttcctcatgagttggatatactgatgaataatcctggtttttaggatccaccaactgatagaattggtttttagcaatcttatagagtaattggcacatattatctagggacaaaggctttcctttatgattagcttcatgtacatatttgtctaatccaataatagatgtatacgcaatttcatgtacttgccctttggtaatatcaatctctgtatctcgtttgaccgtttttgcagcattttgaatgcgagaataaaagtcttttagttgatgaccatacttacctgcatagacttgattgactttcttaggaacacctttgatataggtaaatgactgtgaagcagacattaaatgattatttatatgatttacaggtaaatcaaggttaataaaggcacccggtgatttatcgacctttacgcttggtgtatcaacgttttcagcactttctggatacatcacaggaagcgtcacaggagttgtcatttcttcttgttggaccgtttgtatacctgttgtatcatgggcaaaaaagatttcgtcgcaaatgtgctgaaagttcttatggcttttaagaataaatacatagctatcaggatgagtacctgttgcatcctctttaatgtatcgtgctacaagcacaaacggtgtcgcttttaacgaacgtacaaaacgagaaaccgtacttttagaaactttaaatttcttcatgagcgtttcagaacgaatggattggatacctgtagccactaggttatagatgacatgatcgagcatttccatcctttttttaggaaattctttatgtatggctgattggttctgtttataatgagtacgaataatttctaaaaactcttctttctttttccgaagtgtggatttgttcttccataaccacttaaaccgtccgttgaaggtgtctacatcttttaaatagcaggtcaatatttttgtcatttgttcattatctcctttaaggaacaaaaaaagacactgtttccctggaaaaaggaaaacaatgtcgtgattttgatgaactaagcccttgaaatagatagctatttcatataaaataaaaccataagttttattttatagaaaactaactctattaacaagagacttcgacaggtgttttccctactgtgtttagggggaacggtttaagagtgctaccaacacgtcttaaacagttgaagtcttttttctattccggtcatttttgttagttttattatatcgttaattaatctcataattcaataagaattagtaatatatctcaaaagatttagttttacatcttttatgaggtgaaaatcctatctatatttaaatgaatttattgttgaaggtattaagagaactctctctgacaactgctacaaaaataataaaacagcttttaattactggtcagtaattaaaagctgttttattattttgtgaacattcttttccatatgctttttccttgttctttttgaatttcggtcatagctgaatggatagaatctaattttttaagtaattgatcattcacttcttttaaacgctgattgtcttgttcaagtttattcatctgttcttttatctctataacatcttttttttctgccaaattttcagatggaagcgttagttgttctttcttttccatttttttatccatttcttctatttttttagcaagtaataaaaatgcttctttaaaggagttttcgtttgtatcttcttcctctaaatccttgttaataatttttgtttgttcttcgctcattaaatttgctttaattaattcttcgcgaatcatttcatttggtgcatgttttccgaatttctcttttagttcaataatcttctctatttttttatcttcatcagtaaatatgtatcttattcttccaattcttttatgtcgtactaacccgacttcgcaccagtcccgtaattgatgattttctatattaaattttctagcaacttctgaaataaccattgtttcttcgctcataattgtacctccttcacaaacgaattgatctaactgagttagtatcttcttatatggaatatttttaataactcaattaagtctaacttaattggtcctgactaattaag

SEQ ID NO: 77 - DNA, 16139 bp, Priestia aryabhattai
  source 1..16139: mol_type = genomic DNA
tcaaaaaaattataacaacgaaaagtgtatttttaatttcaagttctctttttgcgtacctcagttatattatatttatatacaatagataaatcaagaaaattattattcatttcgcgtacattttattgtaggtttcatagaagtgagtgtactttaataatgatgaactgttatttaaatattaacagtttttagcgtgaaagagcctatgctctcaagaaatgctataagcaaggccgatgcgataactgcaactcagcttacttcattactaatcattcttattgctattccgatttgaccaaaatttcaagaataaataaggctggttagaatcaccctctatagaaggtgacagatggaataagctaaagatgaggttagaaaaaaaccagataagcaatactaagctcatataagctttctcaaggataatttaaagcagctaatcaggaagagacataagaaacaaggaaagagcttatggtggtaaataaactgaatgaaagaaagagaatcattgatttcttcatttcaaatcagttaatggtaggtatggttcagaggtaattaaatcaccttccatttcaataagaagaatgaaatctccagcaaaaatcccctcttggatataacttacaacttgttgtatataattttcttgctggtcgtaggaatacagtatatgaacactcttttgttctgcaaacaactgattcattttacttttcaacacataatcccttctttcttctctttctcattatactgggattatggtagctaacattaataagtaagcctatttatgttagagtgtacatagaaacatgtatgagtttggaggcaaggtcatgaaacgtgcaatagggatatttcttattgctcaggctttattaacgtacttaactattaagatgatttatactccgtttatcgttagaacattagatagagatactggagttatgacagtttcatatagtttccctttaatattatggttaatttttacaaatttgggcattatgcttatagtgggaacgtatttagtttttgctaaagaaaaaaaaaaaaaacagatctttaactaaaggtctgtttttttatttctaccgataatacgttttatgataactagataaccattgaaaaaaataaatatactctgcttttccatactgatcacttccctttttcagagtactagtatcagcatgtttaagttttagagattgcttacaagtgaattcaagatttccaaccagcacctcatcagtatcttattgttagttcaattgtgactctggttctacagattctatcttagatgcctctagaagaataatatcgcgccaacttgagggtattgagatacgctaaaggatagtggttattgtactttcttacctatgttttcaacagactagagctagatatctgtgctctgacttctttattcatacatttccactaatctcatattaagccagttacagcttgttctttttaaaccataaaaaatcctcctccaaatataatgcaacacccacttttaaagagtgcttttcttacactatatttggagaggatcatactaaagtttatttattttcttgcattacttgagctaattcagtgaagattacgcccaaaccatgtgcacccgcgtctggataaccaagacttctttctccaaccgtaccggcgcgccccatacgtgcaacaatctgttcggttgattttgctccttcaacagcagcttctgctgctttgacaagagcatatttcaaactttcaccttcaacagcacttgatgttaacgcatctgcataaggtactaaggcatcgattaaagttttatctcccacaacagctccacgtccaaaagaacgttctcctgttgcttgaattccttttacagacgcttggaccatttcagcaagttctgttaaagtcagttcggttttagattcagtgttctttccagccgcacgaaatgctgatccccaaataggccctgatgctccaccacaatgctccatgataacgatggaacaagcctctaagaagttgccaatatcatttgatttattttctagaatttcgtgccattcagctttcaactgtttgaaccctttagcaacactcataccaaagtctccgtcaccagcatgggaatctaattcacagaatggtacttcatttctaataatacattcactcatttggtcaaccataaaaataatattattcaacgtcaatcgattttccgttactacggaatattctttgttggtttgcacctcataagacactttcggggcctccgcggtaccgatgatttcatcataagtgacagctggtacttcacctttgatttttagcgcaggagtatcgcactcttcagataagagactctttaagttttcatctaatttcataaccgaaatagaagcacccgccatatcaatggctgtcatatagtttccgacaaacgttcttgcaatcgttacgtttctacgtgacaattcacgaatgacagaatgatttaataaatatagttcttgaagaggtgtgcttccaaatccattaattagaacagccacttctccatttccatcttctatccctacttcttttaataatgacgttaccgtacgctctgcaagttcgtctgctgaaataattttttcacgacggataccaggttctccatgaatgccaacgccaaactccatctcatcttctgcaatctcgaaagtaggagttcctttagcaggaactgtgcaggaagttagtccaaagccaatgcttttgacattcgcaatagcgtattctgctgcctctttcacttttggtagatcatatccgcgttctgctgcagcacctgctattttatgaacaagaacagtaccagccactccccgtcttccaacggtatataaactgtcctgtacagcaatatcatcatctacttttacataatccacttgaattccgtcttcttctgctagataagcagcattcttgaaattcatcatgtcaccactgtagttcttaattactagtaaagttcccttatcgctggctgtttctttaatggcttgataaatctgtatttgagaaggtgaggcaaatacatcaccacaaactgctgcatctaacatacccttcccaacatatccagcgtgggcaggttcatgtccactgccgcccccactaattatacttactttatttttattaatttgctcttttttaataactttatatttttcaattaaattcaattcaggatgtgctagaaccattcctttacacatctcaaggacgacatcttctggtttattaataatttttttcatcttatattaacctcttcttataatcatttccaatttgatctgctgcaaggatagctgcagctactgactctggagtaacagggaatggcatagaatagatagattcctctgggatacaagctttattggctacttccattaactcttcttgtgtaatttgttccactccaatatcagcaagacaaactgggagtcctactgctaaacagaaatctagcacttcttctatttcctcagttggcgcattttccaataccaattgtgctaatgtaccaaaagctactttttcaccatggaagtagtggtgtgcactttctaaaagagtaagtccatcatgaatcgcatgtgctccagctaatccgccactttcaaatcctagtcctgataataagatattggcttcaataatgttttctaaggatggagtaacaacattatgatcgcttgcagcttttgctttaactccatcctctaatagagtgttataacaatgttttgctaaaactaatgctgcatttgtaccttttgctggtgaacataagtcctcacgtactccacaaggtaatccagcatttacattagagaaagaacgtgctgttgctcttgcttcgaaataagtggataacgcatcccccataccagatactaagaatctagtaggtgcattagcaattactgttgtatcaattaatacaacacttgggctttgcttaaagtatgcgtaatcatcaaaagcaccatctggtgtatatataactgcggaatgacttgtaggtgcatctgtagcagcgattgttgggacgataattaatccctctccctctgccacacattttgctgtatcaattgccttaccaccacctaaaccaattgtacaatcacagttgttttcttttgctatttcctgcaatctagaaatttctggtcttgaacattcgccattgaatccgccttcaaaaaatgtaataccatatttttctgctgttgcatctaatttgtcttgtacacgtttaatatcttcaggatgtgctattaaaagtgcagaagtaccaaatgttttcacgaaataacctaggtttaaaatctcattttcaccttgaatgtattttgaaggactaataaatgctttcctcataagtaaaacctcctaattaactttgtaatcccttacaattggaattttactatcttttgtccaagattacattagtcttaaatgacgagtttttacaaccttttatcgtatttttttgctcttttcatttaatatggtattattatgacattatttcaggtgaaaatcctaccaagttcatgttgagcagagattaactttatcgctaaaaactcttttatttcatgaactaaggaataaagaaaaagtattctcaaatagttgatttaaactaccacaaggtaagtaagggagataaaaacatcattgaaaactacttacatgaatttagataaaatactagatttaaaaaagtggcgaaatcttcaagattcgcttgcgcttgttacaaaattagcgattgtcacggttaactataaaggagtgccaatttctcaacacagtggcgtacgtccattttgtgaggctatgcgtaaaaatcctgatacagcaaaactttgtgaaaagtgtgatgcgaggggaggattagaggcagtcagaaccaatgccccttatatctatttatgccactggaatattattgatattgccattcccattataattgatgataaatatgtaggtgccatcatggcgggagaagtgaaaattaaggatggtgaaaaacatcctcccttggaacaaatgcttactgttccatctaagggatttgaacagaatttaaataatgaggaaatacagcgtctatatgattctatccctactctatcctatacagaaattaacgacgctgctcaaatgttatataggctttgtaactacattgtagaggaagctatgaataaaaacttaattttagaagtatatgaaaagatggctccagtaaaagaggacctctgtactgaagatatttcttacggttattccctagataatattcaaaatataaaaaaggaattagccaatacggttactaatgcttacgtaaaaacgtctattaacgatcatttagtttgtaaaaacaaagtattacagccagcctttgactacatttataaacataaaagggaaaaaatacctcaacaaaagatggctgatttatgtcacattagtacaggttatttcagccgtatatttgtcaaagaaacgggtatgaatttttctgtttttatttcgctgaaaaaaatagaatggtccaaacaattattagaaaaaacggatttgtctatcgctcagattagcgatgaattgggttttaacgatcccgggtattacatcaagacatttaaaaaatatgaaaatataactcctaacgtctatcggaaatattatcaagaaaagctgtagagttttcagtcctgacgtaagaaatatataacttttccatactgatactagtactctaaaaaaggatgttctcagtatggaaaagcaaaatctcttttatcggtttagctcctaatcccttaacagattcacttctgatattttaatcaaaaaaatcgttttggggttcagttcatcagacacagtggcttttttgtctttacgctataaataacatataaacctctattccgcacgcttataaacatccggtctcaggtttttaaatattgggatgtttttttgttgttctgtaactttctgtagatggatctccgctgttatgatttcttcttggtctctcccctcttctacaatgtttccatttggatcaatgaccattgaatgtcccgcgtatgtgttgcctgcatgatttttatgattcaccttccccacgctgttgcatgcaatgacgtatacaccattttctatagctcttgccttcaacagtgttctccaatggtctatatttttggtagtccattgtgcaacgtagaatataacttttgcaccttgagacgctggatagcgtgtaatttctggaaaacgtaagtcgtaacatataatttgactagctttaataccgttaatttcaaatacttccggtacttcatctccgccggttaaataatgatgttcatctaacatcggcacaagatgtatcttatctttttggtagagtagctcccctgtttttgataccgcaaaggctgtattatagatgttgttatgccttttattcgaaactgaacctgcaatgatattcacttgatgtttagttgctaaactttggataaaaggaaaagttctctttaaatcaatgtctgctttttctgctacattttttaaatcataaccagtattccacatttcaggtatcagaacaatctccgtatctatatccagcttttcttcaaataaggagttaatacggctttcattttgcttaacttctccttctataatctccatttgaaataattgtactttcatgtttctccctcttattcatatataaatttataaatagaatataaatcattattgtatttgacatcttcaccatgtgaagaagaaataatagacggtttaattctgtctataattcgtccactattaatgttttcgttcatatcgactgtaaactttcgaatcggtggatgtaaggattcagcattagaaaagaataagtctccagttagcagcacattgtcatttttatggtggtatattacatgtccgggcgtatgaccaggtgttaaatatacatctaaaggtaacgttttaatgatgttgtcacttagactttcaacttgatgtgccacgcctgttgtttctttttctcccttgtttggataaggcttttcaccattgataaacggagtttcaatttcgtgggcgtaaataggaatatttaaatggtcttttaaatacctggcaccattaatgtgatctaaatgaccatgtgtcagtaagatactgttagggatgcctaaagattttgctgcattcaactgtgcatacgcatagtcttccattccggtatcgatgatataaacatcctcaccattcactacataccatgtactaatcttaactggaataccaacgacggtttcataagtgagcttataaatatgttgggaaatttgaacgaattccaattcatccaccttcttctcatttatttgatatcataagtttaataagaaaaaacaggcgtaacaagaaggcacaaatttgttactacccattgaggtgagaaaatgtcagactttaaaagtgatcaatacggtgcttgtacgttaactgtaaagcaagcctgtccaattgaattagcgatgcatattatgggcggtaaatggaaaggcattattttatctttattatcaaaatcacctatgtactataatgcaatgcggcgtgaaataccgggtgttactcagcgcatccttacactacagcttagagatatggaaaaaagcggattaatagaaagagaagaaacaaatgataaccctaaaagagttttatattatttaacagagcttggagaaagttttatcccaatacttaaatctttagaacaatggggcaatgcttatataagcaagcaggaagaaggattaaaagaatctcaataattaagaagaatccctcactttattcctttagtatttaacatgaaatcaagtctatcgttcatatgagcatacatttttagttaccataataaagtattgggataggaataagttctaactctaagcaagaaaatatatatcaattgaatactataaaagatttaccaacttatatttaaatttaaaaggcaaatatcacaaacagccttagttgtcataatgtaatataaatcaaaaatttctatatttcgtaaaagtaattgggtggttgcacaattccaatatgtgaacgtaaatttgctaatagtacagtagttatgcgtggtggactagtaaatatcagcgagaggaaacctgaaacagtctgtcttctaaataaagaaaatgatgatgcatgagagtggataatgccttgtaaaagacgttctcttcttatgcatccatttcaaatataataataaataaacgttagaggtctctgttcaagttacttaaaaaatctgccccccagcgttggggattttactttttacccgttgggcatgttgtaatttattagaaagagaaagaaacgcttctttattctgtgcatcaagtgcttcgtttattttgaagttcaagtaattaatctttaggtccaaatctgaaatagagcaaatactgcccttaatatgtaattcgtgaatatcgtctacatagataaagaactgaaattcgttattaatatcgattaaacaatgccatcctaagcaatcgacgtacttgcggttgtttgtaattgtccaaacatctccttcacggaagttaatcatatgtcgatgctgctgttctggacaatagcatcctacttcatgacaaaatggttacattatgacaaaatgtttatccatagccgtttctcctctatttccttctattttgttaaatttcctttttattataaatacaaacacaattataattgatatcgataatcattatcattttatatgatgtttatgatcgatgtcaattgtgttttggttactcttacctgttctcgtacaaaagttttatgacttacaattaatacatataaatagagaatactgtgcaccttttaaaattctgaaaaatctttatgaaagttggcgttgttatttttggtaacagaccctttggaatttagtctatacatgactataaactccgaaatttagttttttataaatgatatctataattgctttaatgaagattaaaagatagtgataacgatacaaatactaaagtttctaccattttttttagaatggcatgatttttttcattttcctttagaaaaggcatatgttaatagaagatacttttattgttgaaaggaaaattgtgcctatgattgcgtcaaaggttaaatttgctgcctcgttatatgcaataatgtctattagtttttggggagtctcctttgtctctaccaaagctgtcttagataagcttgatccatatacactccttgtccttcggtttggaattggggcactttttttattggtattattagtgctaaagcgatatccattaaacattccacttaagtatattcctcatctgattgtgttaggtatccttggggtgtttgttcaccaagtgattcaggcaacagcacttctcacaataaatgcttctgcagcagggtggatcatttcgttttctcccgtatttacggtcattctctcagtattttttttacatgaaaagatgaccgtattaaaagcatcagggatgattgtagccatcattggggttctgctggtgaccaccgctaccaatcagcagtcctttcagccctcaatcaatgttggttacttgttaatgatcttaagtacgttaaattgggcaatctattctgtcctattaaaaaggttacatatccagcttccctctcttgttgttacgttttatatgtgtttaataggatttactctaacgactccctttctcgtaaggaataaaggatgggagatgattccttttttaaccagcgttgagtgggctcatttattatttctcggtgtattcgtttcaggtgttgcctattggtactgggcaaaggcattagaggttttagaggcgtcccaggtatctgtgttcctttatttagaaccagtagcgacattgataacagccattctactgttacaggaaaagattattcccgtaagcatattaggaggcatcataattataatgggagtcattttagttaatggaagattactaacttttctaagctacttgccatggagaaacaagaatttgtaactatattgaaactaccaaatttgctctactcataaggaggtaatctttgtatgagcttaattaaacaggtaaagaacattttagataacttgaattcccctaccaaattggaattgagagaagctcttttggctttagatctaaattttaatgagttaaagccactattgcagtcggcagaagacaagccatattacagaaagcttctctaccaaaatggtgaagtagaattactcgttatgaattggtcgggaatagagtgtgctcctcacgatcacggtcattcatatggatggatccaagtagtgaatggcacagctataaataccgtttacgaagtgaaagaaaaccaaatgccggaagagctgttttcccagtatcagggcgaaagaagaattttttttgctcctaagaaaggagtgcataagatgaatagtgcagaagatacgagtctcgttactcttcacctctactctccaccgattaaagagatgatggtttatgatttaaaaacatgcgctgcttgcattgtgtcggatgattgtggagcatggtggccagatcatcttcgtcaaagggtaagagagattcaattaaagaagagagaatgatgtttattgacccttataatatttctcatgcagaagcgaaccaactgtaagtccagccaaaggaagtgcctcataagattttctcccttacagctgttcagctaccttagtaagaaaactaagaacagaaattgttgatttatccgcacatcatcatgtagagtttaacataacccaccttgaagatttcgctgagagattgcacaatattttagatggttacgagaataagatatagtaagaaaatctataaaagcccagttaatatcatagacttttattttttaaccatttataaaacataggtatgattattcttcctttgaataggctaattgtaaaaaacaatatagccgaaaggaagtagcaattatgcatatagaaatgaatttcttatttactttaggttctttactgggtttattagtaggaggaggacttcttaaattagtaagtcatctggctaggggaagaattcaatttatgtacgctatatgcggaggaatcttactaggcttattgctctttgatatccttccgtccacttggcatctatatgatttaaaaggagttttattaggaattgtagccggatatatcatcatgctatgtattgacctctttttgcataaacaaaacaaagaaattccacctttacaggcacttatcttattaacagttgctatcttttttcataatgtcatcacgggtattacctttggaataacagatatgcaccaatcagcttctgtattggcagctacacttttacatcaggtcccagaggggatggcaattatgacagtcctctctatagcaaaagtacctaacctcttttttttactaattatagcccttctatctctatccttaggtggcagtttattaattggtgatagtgtacaagcttcctcgcttaaactacaagctttatcgactggtgcagcaattggtacattgtcctttgttatctttcatgaaatcataggcaaaactatcactcactttagaaatctgcatgtatggctattaatttcactaggcgtgctagtcatttatgtttatcaatattcactctcattgttacacggacattagaatgactaaatttaattgtgttaaaaagacaactgtaaatgtatgtacttcactctgcttcatttataaaattagaacatttccctctataattattgataattttcaaatcgcagaatataataataacaagagtttaccacaggaaactttttagcatacggcaaataagcgtttaattatttaaaaatgattccctcattacgaaataaaaagagtgagaggtagcctggaactatctctcactctttttattattattttacttgtagctcagcaatcatatcttctaaacgctctttctgtgcttgaagctcttccatagaaggttgataagatgaaatagcttgttgtccaccatatgcctgtttaggctggactagacgttgtagctgaccaccattttgttcatataaacggtagcctactgcgcctaccactgttcctgatacaaatcccattagaaaatcgcggttaatcattataaaactcccccataatcataagtttttttatatcaattcatacaaagagcatgaatgaatatcttaagtaattgcagataacttttgtgattgcactttctgcttttcatgtaacaattccaacacatttacaatccatgtaatcatcgctacatagagcatgtttgatggccctagagataacatcgtaacaatgccggttaaaatgtctgggtgcctcattttattactcgtaccatgagacaagaccgtgtaacctgttgcgactactgccccatatacaagtgcatctggtttataaaaagatgattttcgaatacctgctagtaggagtaatcctccggaaaacagtgtacgtagccaatcatttcgtgtggcaggatccatttgaatcataatatcatctagtggatctaaacgagtttgctgaaaaaaaatagatacataacgaaaaatggtattgcgagaaagttgtgaaacatcgtagtgaataagcattgtttgaatggtaggttctattctcacactcgtaataccttttaaagcagaaaacatatgctcaatttccacatgatttttcttatctctcaatgcggggatatgaaatcgaatacgacctggtatatcatgcagaacgtagaatttgggattcattgctttccctccctaaccataaaattcttgcactatttattactacaccaatagtggcggcattatgaatagctgctcccacaattggagagaagatacctaaagcaccgaataaaattgctataccattaatagcaaatgtggcaacaaaattttgtttaataatgttcattgtttttctagacaatccaactaactcagaaagcatctctgggttatcagacgtaatgataacgtcgctggcttctgaagcaatatctgttcgtttagcgcccatcgttacacctacatgggcatgagctagagctggagcatcattaatgccatcacctaccatcatgacagtccctgttctcccatacctttttacataagaggctttatcctctggcaaagcctctgcatgataccagttcaattttaaacgacgcgccatttctcttgcgaccgttctcttgtctcctgtgagcataatgatgtcgttaataccttgatgacggagattatgcactgcgcggtgcataccagaacgtattttgtcaaaaatactaactactcctacaagtgtttgatcataagctacataaatcacattttcgtcgttttgcatttgttgaagtaaggtagttgttttaatctttaattcattcataaaacgtaaacttccaacaacaacttttttgccatttaaccaagtggagattccttttcctactgttgtttctacctgagtattattgtctctaataggaatcaaaatgttccagtctttcgcttgttttataattgcatcagcaataggatgggtagaatttttctccgctgctgcagctaaacgaatgacatcttcttgattaaagccttcagcagcaatcacttgctgaaccacaggcgctccttctgtaatagttccggtcttatcaagaataactgtatttagcttagacatcttttcaatatgatcactgcctttaacaatagctccttctttagcagcacgtccaatggatgcgtataaagctgtggccgttgataatttaatcccgcaaataaaatcaataactaacatactcatagccctattaagatttcgagtgaagaaaaatgtaagtagtgctaacccaaaagaaacaggcaccattttttcagctactgtatcggctatattctgaataggagcgcgtttatcttgtgcttcctctaacagttttataattttagaaagagacgtatcctctcctattttctccactgtcactgtaaggtgcccactctgcaagacacttccagcgtacacattatctccgccacttacctctcgcggcatatactccccagtaatggaagcttcatctgctgtaccgttcccctctattataatgccatctacaggaattttttctccagtaaacacaacaatctgatcaccaacttgaatatcctctactaaaaccttttcttcaacgcccttttcctttactctccaagcatatgagacgtctaattttaggacggagtgaatataatgcttggtttgttcagacgtatagtctgttaatagctcactaatagtagacatcaaagtaataattaaagcggatcctggattcttcatatacaaagaagcaaatatagaggcagctgttaatgtattggcattccctctttgttcctttaggacatgaacaatgccgtctttaattacctcataagaagtactgatagcagtaagggtgctaagccaataggaaactgcctttactatggcaggatacgaagaacgttgcagataccagttaactaaaaatataatcccacaagctagtatgggtatagctttcttccatgaatatgttgcttgcttaagtgtgtgtttatatttatagatgaatgattttagattgtataaagagagagtaatatgatgataaataagtagacttccggttacttgattatagcttgcagaatatacccctggaaaagagcgtaaccaagtttcaatatgacttatttctagctgtttaggcatataaaaccgggttcttccaggaagagaatgagctacctttatcccaaacaccatcacctattcttttcccccttacccttaatgatgttgtatgaccaataaagtaagctggcagaaaacgcaggcgcacttccaaaggtctgaattccttttcctaataaaaacagaacaaataaactatcaaagtcagcaaagccattggtttgctttttaatccctttatctatcaatccaagggtgttagtcataccattcattaaggtagcatctttgtttaaaatggcattagatgctatttgtacgatataactcatcagttcgtctagctcttcctggttaatatgcggtacaacaaattgaagcactaaacttcccgttagttctgaagcttttgatgttagaataagaggatgtttttttacttcttctgttagagcatgtgcaatgatacggtgcttccagctgtcacattgtatacgcagccgccctggcatcgcatgtaatacttttattttttgatcacggaattgagacataattttaggagcaataaaagaggcacctaaaccaattacagtaggaagcatgcttattcctccctctccttaaaatctagattcttcttgatatatttgctcaataagttgaaaccactcttcgatttctttgctagttgtcatatgagaagcattatatgtaacaagtaaacttcccgtatctggtgtaaatactgcgtcatagacaagagcttgagattttaaatttaaaataattaattcaactagttttttattttctttccaaacagttgatcgaagtctaattcttcctggaatgaaatgtacaagatcgatttgtaatttatgtaattttctttctgcatgcttcattagtatcttttctttaatactcatcaatt

SEQ ID NO: 78 - DNA, 15955 bp, Priestia aryabhattai
  source 1..15955: mol_type = genomic DNA
ctagaagtttaaacgtcttacatttttataaaggagaaaaaatgaaagaatgtattgttttcattacaaatattattaatgtattgcacgacggattaatttatattttttatttactaggattttctctttcagataaagaacttcacttctggattattggcattattggactgctcacgtttttaagcgtttatatgatctttaaattattgtcaaaatggaaatttagtattacagctatttcttttatctatacccttaccgttatgcttgtcttagtttttgccattgaaattcagcaaggaattaccactcgaggcaatatggaatttgatgatgccatagcaggtttatgggggtttttagtcttttttagtatttatatcgcctttgcttcttttttccttttatccaagaagttattgtcttcgaataaagagaaaaaaataaaaaccgaggcccctactcggagccaaaggcacgtgaattaatttcgtttgagtttcaaaacgacttgatggatccgtattcgattatatcgttgaaccaaaataaacggtacgtttgcaacaatcgcataaataaccatccaaacacctatagaaggagagttccatataaaaaaaagaatagaaggaagtatgctgatccagtgagttaactctgctcgatttgtttcaattaaaaaaagctgtgcatattccttcgttctactctcccatttctttttataaaatcctcgtttaaatagctttcctgcatcaggaagccacgttttccatcggtgtaccccgaattttttatatatcccaactgtttcccagctttgaaccttaaacagcgcaaggtccttctttaaataaaagggtgaaatttttgtgcatctgtaggcgatgaacatgtgaatcacaaaccatgccatgatattaattaagagctgagtacctgtcattttattactttcttcttttcttcttctatagatatgctgcgttctttccatttaactttctttctcactgctgtttggatgaaagaccataggaatagacccagaaaaaacagcacatgaataggaaataagcataaagaaaaaaaagtaaacgaacctatttttcttaagctattaaataagagacttacatagcaaacatagctgctaattgccaagcctgcatgttgattccatagagtaggtaaaaaaaggacataattaatcatgctagtaagccacaaacttactagaaataaataaatggcttccgttttccccgcacctgaagcaaaacttttactccaccctcttataaggcttttcataccatttggatacatgcgcatggaaagagctccctgtccgctcatacacgtaataaattcaccttgtttgttcattttttcaaccagcgccatattttcaaccacttctttttttatcccttcgtggcctccgctttgaaagtaggaggctgcgctgcaaagcaagcactgcccgaaaccgacagaaggacttttccaatttttaaaggggtgaaaagcgccaatcgatgcaaacgtaacatagtgaaataaagcagaaaacatttcataaggcctcttaacaagatgataaggatgaaccgacagcacccccccttgctgttgatagtagaaaaatactttttcaattccgtctttctctactgtaatatcagcatctaaaaataaaagcaccgagccttttgcttctcttgctccattccagcatgcccatgactttcctagccacccagctggaagtgctcccgggtgcactacttttacgccaaatgctttgactaccttctcagtattatctgttgagttgtcatctacaacgatcacttcaaagtcagcgttctttaactggagtgactgcaataaaaaggtaaggtttctttcttcatttctagctggaataataatggacaaacatgacatatcggttcttactatttttacacgtttaaatgtagggatagtgatgacaagcatacctgtcaagacaagagcaatcagtaaaaaagacatccttttctcctttccttcacgtatgaaattgagcgaactggacaaaataaaaagttgtagacttatttttattttgcgtgaagtcattttatacacattgttgacaactcgcttttgttttataaggaggaaaaagatgaaaaagaaagtaattgttgtaggcgcaggtttaggtggtctgtcagctgctattcgtctgtcagctgatggatatgatgtcacagttgttgaaaaaagcgagcgaattggcggtaagttaaatattcgcagcggcaaaggtttttctttcgataccggaccttctattttaacaatgccgtgggtgctagagcagctgtttgaaagtacaggccgcagtatccacgactacttaacaatagagcgaattgagcctcagtggagaacttttttccaagatggaacacaaattgatttgaccagtgaccttcctcgcatgcttcagcagcttcaagaacttgctccagaagacattgaaggtttttttgactatttatcttatgctaataaaatgtatgaatcgaacttaaaaagtttttataaaaaaagtttatctggactgcacgatttacgaacgatgcacacggtaaaagaactgcttcaaatggatccaatgagatctatgaatgctactacacgcaaatatttttcaaacaaacatttgcgtcaattgtttaattttttaattatgtacatcggctcttctccttatcatgcaccagctgtattaacacagcttgctcacgttcagctaggattaggtatttattacgtaaaaggcggaatgtacaaaattgctgaagcgatggataagctccttcaagaacttgacgtcactgtgcatctaaatacgccggtaaaagaaatcacaacaagcggagcaaaggcaactggaattacactagaaaatggcgagagtctatcagcagatattgtggtatctaatctagaagcaattccaacttaccgctatttattaaaaaatcatgcgcaagcagctaagcaaactcagcagcttgcaaaatttgaacctactgtttctggccttgttcttttattaggggttaacaaacagtacaagcagcttcaacatcataatttcttcttctcaaaggatcagaaagaagagtttgatacaatctttaacaaaggtcaagtagccatggatccgacaatttacattggcgtatcgtctaaatcagaccctacgcaagctcctgaaagaaaagaaaacctgttcgttcttactcatgtacctcctttaaaagaaggcgacgactgggcttcattaaaagaccgctaccgtgatgtcgtattgaaaaagcttgaggcaatgggattagaagacttacgttcaagcattgagtttgaatatacgtttactcctaacgatatccaggagctttacggtgctaacggcgggtccatttatggcgtagcaactgaccgtaagaaaaatggaggttttaaaattccggcaagaagtcagcttctttctaacctttattttgtaggcggctctacacaccctggaggcggcgtgccaatggtgacattatcaggtcagctaacagcggacgcaattaatgaagattttcagattcctcgtatgcaaaaagatattgggtaatgaaaaagtgcaggaaattcctgcactttttttaaaagttcatttttgactgtccaccatctacgtttaacgtcgcacccactatccatgaagcttgagaagatgctaaaaaaacaacggcgtttgccacttcttccggctctccaaagcgccctgctggtatttcattttcaacaaactgcttaatcttttccggattttcatccattctttttttccaattacccgtttcatgcaaaatgcttcccggcgctactccatttacacgaattcctttagaaatcatttcatctgcaaacgactttgtaaagctgataagcgctgcttttgcgttattatacgtgactttccctccactttctctcccgaaaatagacgtaacattaacgattgccgcatcttttgtcatacgagctgctgctagcttgctcaagtggacagctgaaaagtagttaagctccatcgcttctttgaaaagggataaatctgtttccattgccttgcttccattacttcctccagcgttattaattaaaatatcaatgcttccgaagtctttaatgaacttctcaattaatgcaactctgtctgattcgtttgttaggtctgctgtatatgtacgtacgtcttctaattctgactgtgcatcctgtaacgcttcctctcctcttgccgcaattccaacatttgctccttcttgaataaacaaggcagcaatagccttcccgattccttttgacccaccggtaataagtacatttttattttgcaactgtaaatccacacgtatccctccacgttaaatgataattactatactttctatcatagctcactgcatgtcaaaattaaaatcatatactgttttacctttttactccttttaaatccctgcgttttatggatacgttctttgaatttattgtcagaactcttagcaaaaacaagccacggcgtgatataatgctttttggtgtaaatgttttcaaattgggggttttttaatgcaacaaacgttttcaacgtctcaaaaagttaagcagttcgtttttattttatttccgatattggtcacccagtttggaatgttttcaatgactttttttgatacgatgatgtcaggaagagttagtgcagatgacttggcaggggtagcaattggttcgagcttgtgggtacctgtttttacagggctaagcggaattttaatgtctattacgccaattgttgcacagctggtgggagctaatcaaaagaaaaaagttccgttctctgtcattcaagggctttatgtctccattttaatggccctcgttattattttaatcggcttttttgttgttagtcctatcttaaaaggaatgcatttagaagcaaacgtgatgcgcattgccaaacagtatttaattgctttatcttttggtataatcccgctttttatttatacggttttacgaaactttattgatgctttagggcaaactcgtacgtctatgcttatcactattttagggcttccgattaatgtggctttaaactatgtattaatcttcggtaagctgggcttccctcacttgggtggagtaggctccggttatgcaacggccatcacatattggtgcatacttgtcatatcgattttaattattcataaaaaagagcctttttctagctttggtttattcaaaaaatttcaccgtatctcttttgctgcgtggaaagaaatattaaaaattggtttacctatcggtttttcggtatttttcgaaacaagtattttttcagctgtcacgctgtttatgagctcgtacaataccattacgatcgcttctcaccaagcagctattaattttgcctcatttctctatatgattccactgagtatttctatggctttaacaattgttgtaggatttgaagcgggtgctaaacggaatcaagatgcacgaagctatagcagaattggtataacaattgctgttggcatggcctttgtgtgcgcaggtcttttatttactcttcgagaatctgtagcatctttatatacaaaagatgcagaggtactcgcattaacttctcaatttttgatttatgcaattttctttcagctttctgatgctcttcaagctcctattcaaggcgcactacgagggtataaggatgtaaatgttacctttttaatgtccttggtatcttattgggtaattggtctacctttaggcattgttttagcaaaatacaccgatttgcaggcgtttggctattgggttggactaattgcggggctcgctgcaggagcaacaggacttgcgtatcgtttgataaaaatacaaaaaaagcagctgctagaggaggataaatcttctcgaacggcttaatcaaaaaaagaacgttctcaaaagaacgttcttttttggtttaaaaatggattgatactcttccttatactaagacttaaaacttcttatttatttaaggtacgctctaactcttgtaaaagctgttccgcaccttttttacttaacacaacgtttccattcccaaaggttaagttttcacgcgtaatttccccagttactaagcaggcaccgtacgggctatacttttgtaaaataataatatcttcatcaacatatatttctactggatcacctgtgttgatatttaaaatacggcgcaattcaataggaattactacgcgacccaattcatctacttttcttacaattcctgtagacttcataaaatccattcctttcatagtaaacaaataatatcttctcgatacaaatctagtcaaattcgtcagagttgctaaaaccaaaatgcttcaatgatggtctgataacggtttataagttcttaaaatatggcaaataacgcattaaatagatttatatacactttgtatcatatcaattcgtacactatttatgaatagtgcataatctttaaaatcgaattcatccatatatgttaaaagtgtgtattttatccataatataactatatatccatcttttacactactttgtacccattttataacttttattccgacataagacgacaaaatcagctatagaaaaaacgtgtcttttctaactaaagacacgttcatttggacccgaagttgtcacgaatagctttttgaatcatagcttcacaccgctccagctctacttttaattgttttttatataatttagctttctcttctccctcattcgtaaatgtataataaactacttcttgaagcttcattccttcttttttacgcttcacctgtttgaggacaccatcttcaatcaagtcatgaagagctttgtatacttcagaatgattaggtttgaacccaaaagggcgaaattcatctctcaacacatctaacaaccgaaggccatacagacgctcttgttctgtcatcgtaatcatatataattttaagaaagcacgttgttttaatagaaaaccactggatgtacgcttttctctcatctcaacttcctccttcacatacttgctttcattcagaataatagaaagctctatacgtaattatactttttttattctacataatccttctttttcactcaaaatctcttttttttctcacattctttcacttatttacgcgtttttctcattctttgtaagcaggcattgaattttctttttttcatatatatagaaggaatttacgtgaatataaggaggggttcctttgagtaaaaaatatgaagagattgattggggctcgattcagcataaggtagaagatatgcttggaaatcacttttggagcgatttaaatcacatcttaccaaagcgatttccaaacgtcgacttatatgaaaccgataaagaaggcattatcgttgttgaggttcctggactgcattcaactcacgacattcaaatcaagttggacgcaaatatattaacagttgaagggaacgttccttatgcttatgaagcatctaaacaaaagttaaagctcaacgaacgccatacaggcgtattttctcgcacggtcaaacttccttttcactacacagacgaaccagttcgcgctaagtacaaaaatggattattggaaattcgactgaataagatagaaaatgaccaaaccattgccatacaatttgaagatgattaactgcacgtaacaaaaacccttctgttagcagaagggtttttgttagagcgctgaacttaacacaatgtttccttttggcgtcttattattcgcgttcggtttcaaagtaacggccataacatcccacttttcagtctgttctttttggctcatcgtatagaccactgtcccgtttccatttttatctgttacaaaagcacctgccggatgcggcttatcaccttttatgagccacacctgataaacttcatttccctttacgtttttcaagttattcgcttgaatgaccacatttaaatttccaccttttttcgtaagagatgctgttgcttcaccagaaacgttcggctccgcctgcagcttcattgttttttcagatgtaagaggttcgttttgaggagcaaccgaaacatttggttcttgtttgcctttgtcttcatctttcaacagaaagtagctgtttcctgcaagagataaaagaagtgccgcaactaatccaataatgatggattttttatttgatttcttagacgcagcatgttgtttttcactttttaaagctattggttctctctttgtctcatattgatcttcttcaaatacattcgcaagtattcgccgtttcatttctggcggaggagattgttctggtgtcaaatatgttagatctccaagggcttcctccagttctcgtaattcttcttgacagctttgacagtttttcaagtgcatttcaaactcttttttctcctgggaagtcaactgatcattatagtaatcaatgagtccttattatataatcgaattacctttgaatttggatcactttcacatcttttaaacgtacctttatttttcaaaaatgacaaataattatactttttttatggaataggagcgaaatcgtccaatgaaacatttaattctttttgatggcatatgtaatttatgtaatagcagtgttcaatatattattaaacatgatgaacaagctttgttttctttcgcttctcttcaatcagatttcggaaagcagcagctagcctctcacggcttacttcctgagcaattagacagcattgtatatattcatggaaaacaaagatatataaaatcaacggctgctttaaaaatcgccaagcgcttagatggacccgttaaatttttatatgctttcattatcattcctgcacctattcgagatatagtatacaactggatcgctcgcaaccgatataagtggtttggcaaacagcagcactgcatgctcccaacttctgatacgaaaaaacggtttgttgatgactaaaaaagcttgggacatagagaaaaaacagttcctaaagaggaatatatttatgttaagaaagtctattcattaaaaaatccgaactgattcaacattctaatgaaagaatgctgaactatagttcggatttttcagctaacatatggttgtacgagcttttttaacttccacccattgcttttttattcgttgcttcaattgcctgcttcattattagagagaagtcttgttctttcatcacttttaacccttcggcagtagctccgcctggagttgttacttgctctcttaaagacgcaggatctttggtttcatgcagcatttgtacagagccatacatcatttgaataactaaatctttggctgttttttcgtccacaccgtaagcagtagttgcatcaattaacgattctgcaaaataatataaaaacgccggtgcactgccagttacagccgttagctcatgtacttctttctctgaacactcatgcgcttcaccaattccttttaaaatcatttgaagcacttctttatgttcttttgtggcagaagttccaagtgaatacagtgacatcgattgtccaatcatagcagctgtatttggcataatccaagcgacaggcgtatcctgcggaaggtgattttctaagtaactcggaccaattcctgccgctaacgttacgacaaattgttgatttagatgcgtcgaaagttccttgagcacggaaggatgggcctcgggaggcatcgctaaaataataacatccgaattgtcaacttcttggcgccaattttgcgtcgtttgtacgccgtacgttttttcaacacgctgtaaccgctcaatatctccgttgtttgacatcaccactacctcaatactgtcagcgctgctcgtaaccaaaccagccgctacagcttcagccattcgtcctgctccaataaataaaattcgctgttttttcatctgttactcccagttatatgtccagaattcttctctagttaataaacgttccatttgcggatagtcagataagcggtcgaagtcaattgcgttcatcattccttctgtttgagaacgatgggcttttaacgcttcaatttttttatctttcatcactgttacatcaaaaataacatctggttctccaatatgttcaatacgatcttttgaaaacgcatgacaccaaacaaccggacgcttttcttttggcatacgttttaccgcttgaatcgtagctgcacccgtagcattatgatcagggtgtaccgcaaagccagggtaatgcgttaaaatgtgagtcggctttacatcgttaatgatttcttcgattttatctgcaaaaacatcaatatcaagaaattccagcgttttatcacgaagccctagcatacgcaagtcttgaatatctaaaacgttcgctaaatctaaaagttctttttttcggatttgaggtaaagtttcacggttagcaaacagcggtctacccatatttcgtcccatttcacctagcgtaacacaggcatatgtaacgggcgttcctttttgtctagcttgcgtgatcattcctgctgctccatatgcttcatcgtcaggatgcggaaatacaattaataatctttcttccatgttctattctcctctcttttctgttatgaaaacggatgttcacttaattgaagggcaactgctaaacgaccttcaaagtcatgcccagctagaagaagtcggccttcttcatcaatttcccaatctgttaatccctctgcataaatccatcctaaatcaatttgaagacctacacgataaggaccttctccagttatctttccgtttgaaatagtgactttaccattgcgaataaaagccccaactgtcattactttttcatttacgtgtgaagcatatgcaccgtttgtcgtttcaaggtgtacatatacgtctttatttaaaaatgtttgtatttttttttggactgtttctttatgaattggttgcacgcttgttactcctttctcatgttcataaattgtattgtactaaaaatcatgagcgaatcctaatgtttagttctagactttgaatttctttattccatcgttcataatcatacataaatgttaattctccccaagtcaacatactgatttcttgaatgtctataataatctcagcgagttcacgactaagcatacctagttcttttccttcgaccagcttttttttgtaacgattaaaagctggatctaattgttcaatttgtgcataaatttcatggatagagccatattgttgaataagaggcagtgcggctttttctcctacaccaggaacgcccggaatattgtcagatttgtcaccaagcaatgcttttacgtccacccattgacgaggatgaatattgtattcttcttgaaagtgcttaaagccataaacaagatcgccaacctgctttttggcaataatttgcgaaatatgttgatctagaagctgaagcaagtctcggtcattgctatagatgtaccctggactttgcttttccttactccacttgcttgcaagtgctccaattaaatcatctgcttcataagaagacaatgacatttgataaatgcctactgtgtcaaaaaattgttttaacgtttcgtactgctgaatcagcggctcaggcagctctgctcttgtttgcttatatagggcgtatgtatctttacgttttgtatcctcacgcttaacatcccaagcgacgaaaatatggcttggctcatattggtgaatcaatgcatgcattttttgaatcgttactctcagggcattcgtaaattggcccttactgtttcttgtcaacgctgcttcatctctgccataagaagtagcaaaataacagcggcttaataaattaaatccatcaattactaatagtgtttcgttcacatagtcacgtcctttgaaaactttgctcctttagcttttagagcaaacatactatagcacttgttctttgcacgcgtcaatgaagcgcacaaagctcaaaacacgcccatttttttctctcaatgtaaatgtagtataaagatgttaaattgttgttatgatttattcgtttgacttttagaacttttgactatcctataaaatgaggatgaaagatcaatcctacaaatgaaggtgaaaaaagtgaataaaaacacgatgattaaaacattaaaagttatatctgttgtgtcgcttctcgctttgttatttatcattgcttatgatcgttccatgtctacatccatgattattttgttcagttcgctcattttctttgtatttgtacttagcgacttttttttcgatcgcaagccgtggggattaaaaggccttcaattatatatatcactgatgttattcatcattgccatttttgaaatgcatcaagttgtcagttcactttgcgttatttccattatggctctaccaaaagttattgacgaattagcttaagtgtgaatgataaatgataaaatccatgatcacaatgatcatggattttattacgttttgagtaatttttcagagatgcgaagagcttcttctatgccaaatttacgcactaaactgatggcttcctttatttctcgttttttcaaatcatgggtcggatttaaatttaacaacacttgaataacaactaaatcccgcatcgtaaacatcatattctttttcatatctcgctgaaatgtatactgctcttttaagagccggtcacttattgctaacactttcgactccggaagatgtagctgcgctcctgattcttgacaagaccacaattttttcactcgatcttcagcattcatatttgcgactcgtgcatatgtaatatcgctgttttcttgacgaatctctatctcttttaatgttggctttagcaccgtttttcgcttggagacttttttcttatcaactcctgtatccctgaggactctgccgtgaacggtgtaaatgtcgtattcattttctctttttacatcttgtttattgtattttggaaaataaccatttacaagcatcgttctcagcatatctaattctttttttaatccatgaacttcaatatatccaacagcataaatttctttatggaatttttttgtgttgctaacgccttttcctgcaacgtgagctcttactctttctaatagagagcccgtcgttgttccgatatacaaaagcctgccgggtttatcaaagaaaaaataaatgccgggagcggaaggcaattgtcctatttctgctgtacttagcagtttctgcagtacctgcatgactgctaaatcaattttcgctgtcattatttttgataaccttttaacatttcttcatacacttttagatgcgtatacacagtttgaagaagcggtacgtgtatagaagatttttcagctaatgtcagcaaatatccttgaaggtggtctccttcaatttgaaaacttttttccatatcacgctgcatcgatgacttcatgtcatacgtcattttgtccatcgtattcatatgctgttcaataatcccttcagctaatggtgcatcgtatgccatcataatattttcaacttctttaaaaagctcttgtacaaattgacgccctccttttgccgctagcactgggccaacaggtgcgcgcataagagtggtcatgcctgacataaccgtaataaataaatacttatgccacatatcctgttcaatatatgaactttttacaaacgaagcttttgtaccactgaacgcttgctcaatcagctgtaatctttctgtttccttctgcttaaattcaccgaatacaagtctgtgagcaggactcgtctggacgatatctccatctttgtttaaagttgtttcaataaagcacagtcctccaatgactttttctttcccaaaagcttcttgtaaaggaacgacgtgagccataccgtttaacaaaggtacgacaactgtctgattccctacaaaaggacgcacatcctcaattgcttgtttaagatgataagccttagttgtgagcaaaataacatcataaggctctttcatctcagattttgtaatagcttgtacaggtgaagtgaagtcaccgtgtatgctcttgacaacaagtccattttgttccagctctttttttctgcgttctctgacaagaaaagtaacatcctctcctttttccacaagcctgcctccaaagtaacctccaacgccgcctgcgcctaaaactaatattctcataacttttgctcccctttttctttttcttttattgtagcacagctagtttgaaattttataatattcttatttcattgtattttgagttttttacaaaagatagccatagcgcttttaaagttgttataatgaatacaaaaaagcataaaaatttacgcatagatatttatcccctcttggatatactatttaccaatccgtaatcggaaaagtttcgatttaaacaatgttatttacataggagagactgaaatgaaaacagaaatctacattttatctggatttttaggcagtggaaaaacaacgttacttaaacagctgcttcagcaagaaaaagatcgtaatcgcaacattgctgttgtgatgaatgagcttggccaagtttcgattgactcaaatgaagtagaaaaagacacgccgttaaaagaattgctaaacggctgcgtgtgctgtactattcaaggtcaatttgaaactcagcttcattcacttctacaggagaacacattggatgctatctatatagaaacaaccggagttgcacatcccattgaagtgttggatgcctgtatgtctcctctttttgcgcatcaagtcacgattaaaagtattatcaccacactcgatgcaacaaggtggaaagaacgtgggtccttaagcattcaacttcaaaaacttcttcaagaacaagtaaaacatggggatgtaattttattaaataaaacggacatgctgtctgaggcagaaaagtcttccctgctttttgaggttcaatcaattaacgctcgtgcaataacattattaacgacattttcccgcgtgaagcttgacgtgattcaaaaagctcagctgtctcaaaaacagccgcaccataaggctcatgttgaagatcatcttcatttgaaaacatttgtatatgagtttacaaaaaaagtggatcttgaattatttgaaaattggctgcgccaaatgccagataccatctatcgtattaaaggctatatgcgctttactcattcggatgatacgtattcatttcaatattcatacggcatgcctctatacatgaaagaaatgatgaagctgcccaccactcttgtctttataggggaaaacctcgaccacgctaagatgaaacaagaattatttaatcttgaacagcagtccaattaaaaatcccgcctagagcgggattttttttattacttataaacaagcattttgtactctgcgcaaaatttcatatgcacgatttccagctaactctgtcaattcttcaaatttttcatctcttttcaaatcaagttcaataatttcttttgcaagctcaataatctcttcttttttcaattgttgcacagccatttaaaacgcccttcccttttagaatttatgtatattctcacatttattttctattcatcattttgaaagcaagtgattaaccacaaggctttatcctgtatggttaaccacttgggatcgagttaatcattagtttataggactctttt

SEQ ID NO: 79 - DNA, 15916 bp, Priestia aryabhattai
  source 1..15916: mol_type = genomic DNA
tataaattatgttttattttccaattgtaaacaattaatgctgtaaccatttttgtattggatattaacaaaagagaggttttaacgttgagacatctatttaagaatcctatttaacatcacgtacttcttttaaataaatatataccgtagactaacaacaaaattactaaagataaggatatccaataaatactcattagactatttggaaaataagtaatagctccatataaaagaaaagcagctatcaggaaaaaacaaatgaagcgacctaaataacgtatcgaaaaacgaacaacctctctcacttgatttcctcctccaaacaacattatctatattttaccaaataatcttacggaagattacatgcagtacaattttagatttacataatcaacattatcggaaatcaaataagaagaagccttgcatactagaatggcttcttcttatttaatttctatttaatatgattagcatatggatcatatattccagttaacaatagaatactgatgaataaagcaattgttcctgccattaacaatgcattactgatgattttatactttcgtttacgtgaggacaaaccccataaaataaaaataattgcaataagtattaatataactcctaagcccatattcaaaatcttctcgcctcctagaataaaaaaatacgtctttattttcaattaccataatcaggttctaggcaggtagaaaacccttaaggcattgagcttgtaacaaattcaattagcaaagcacccatagctaatacaattgttaataaggtagaacataatacaattcttttattaactatactttccttatcttttaaagataattttaaataaataaaatatatgaaaatccccaaaacgattgagataacccaagtaattaatccaatctgtgtaactaacttttcccaatcaaaaatccagaaatataaaattaataactgaactaaaattaatgggatcgatagtatctttaaagtatttctcaatgtaaaatgccctccataaataactttgaatgatgtagttaatgtgtaaaaataacaacattgaacattttaccataaaaaggttaatatgtacttttgttacatcgataatatatacaaatctagttaccataatgtaatttataggaacgaaaaacaaagaaggtacaacagactaattttagtctgctgtaccttcttttatcttcattggtatttcagattgaaaaagttcggttctattaacaaaggcaataagaaatgacgtaagaaataataatgttgctaataagaaggttatacgtactccataatgctcagttataaatcctaataacagagatgaagtaccaaaggctccatatattagagttcctcttgcagagtaaacttttgcgagcaattcttgtctagcgtttttttgaataatcgttacttctgccacatcacgtgccatttggggtaaaccatataataaagatatacctaaagcaacccatggaagagatgtcattccaaacaaaaatgttaatgtagttaagcaaaaggaagaccacataatcgtttgacctagctttctttctagaactgtggaatatcgatagactaacagaccacctataaacattccaccaaagaaggctgcattaataaatccccaccaaacctctgttttctgaagagcttgctcaacatatataaatagaatagctgcaatccaaacaccattagcaagcgtttctattacgttcatcacactaattgttcttaattgtttagagttccagataacttgccaaccttctttgatagctatcagttttgaagtcttttctcgacttttacttatcgtttgatcagcaattaaaaacatcagtattgaagaaataacaaaaagcgtaaatgtaaacaaaaggattgttgatcctcccaataaaaccaaaagtagactacctattggccaagcaattaattgtgttacttggtcagatattgccagaaagctattagcctttataagcttttcttctttaactaaagtaggcactaatgcattgcgggcaggtgaagcccatccatctagaaaagaaataaatgcaataagtaaataaagtagccaaagaaattcggttttgatattaaaagctaaaaagcacaaaaacaagagaaatattgtcttaccaaactgggagtaaaacaatatagattttagtttgtatttatcaataataatcggtgctacaatcccactaataagagctgttatggtaataacaaacggaacaaaagacataaaagtcactgatttagtaactttatagaccatagttgttaagctaacggtatataaaacatcacctaagttagctaacatttgtccaatccaaagaaaacgaaaagacatttcgttattaaattttgacatagatatccctcacatcttatttatttgtttatgaatatataagagtaaggaatttctacattggattgcctcctgtcaatatgattaatactcattttatcacagtacagtaaaattttacatattattcaaatttatttgaagatttattgtgtatacgatatacaaagttagtttagtcgggtaggcaggcactctcacgagcgcccgcccccctaagaaccgtacgtgacagatttcccgtcatacggctcaagccttctttttatccgaacaacttatttaatacacggtacatgtactaatttagcagatttacctgtagaaacctctaggtttcgcactgtaactttttctccattttgtagagtctgcttacacaatgcacaacgatatccttgttttcttgcgagtttcatcctatctaatgtattttcactattaaagaccttacggtctcgcttttcccaatactctcttagactaggatcatccgggctgtttttataggctaccatgacatgtcgttctatcttaatccaggacatctttaacaattgaatgttagtaagtggacatgtgagaatccatttattatttccaccgtggtggggtttcttaaaataacgtttgctaatccattttctcgatttctttggatgcaattgtttaaggtgttttcttatttttaagaaaacgtaattgtccatatatccaaacgtcttttttgaaacgacatgtttccaatactgtccgtaaccacgaataattgggtttaaaacacgtattagttcttttactggtcgtcctctcatcactgcgaacgtatcttttatcttattttttgcttttttgatgctgtctctgctaggtttgattaataacttattaccttgttccgtcttgtattgacgcagagagaagccaagaaaatcaaacccattctcaatatgtgtaactctagttttatctacactgagtgtaattcctcgcttttgtaagtaaggagtgagtttcccatacatactttcagcttgttccttcgtttccgttacgatgacgaagtcatctgcgtagagaacacgccctatcttacattttggatcgattccgtatcctccatttggtttgtatgtctttctatacacaataccaatctcttcttccataccacataaggcaatattagctagaaggggagacacaatacttccctgaggggttccttctgttgtcgtacgaagcatatcctgctctatgtatcccattttaagccatcttttaatgagagtgtttcctggaaatatagatgtttgttctactatccaattatgattaagatggtcgaaacatcctaagaaatctccctcaaatacccactttttcttactattcgtgttaagcttattaaaaagattacttatagcatcgtgtgtgcttcgtttaggacgaaaaccgtaggaagtggcttcgaacttaacctcccattgtggttcgagtgcgttttttactacgttttgataaactcgatctcgtatcgtcggaataccgagaggtcttagctttccatttttctttgggataaacgttcgttttgctggctttggacgatgtcgaaagacattgcatttaactagttgtttataaagtttgatacgttcgcttggttttgaggccgtatagccatctacaccaggtgttcgcttaccggtattttgttgcgtcactctgcgaatagagagtaatagatttgctttactccgaaggagtaaacgttgaagtttccttactcttctttgttgattttgttgttcggcacgataaattctttgtcgtaacttcgttacatatttttgtatagtattccaatcaatagagtaccaacctttatgcgagacgtgcgccgacgctcgtagagaggtattcataacagcacgctccttttcgttagaagatagccacaaatttattttcgtgttgaagaccaatgagaagtaggcgctctttcgagcctgtcattgtccataaagacgacagtatccgtccagttatacaatatttctgctttcctgtcccttttcagggtaacggctttcgctttttctcatatcccataccctctgccacatcgtttgactttgcagtcatcctactgcttatgcagatgacatagggcttaccaagttccactttctacagatgcaataggggaaggcaggttctttactccgggcaagatgcgggacgcatcagagtagcattatgattctacttttcctcttgccaagacccaagcaaagctgtgcattatcttgagctaacccttacgaagcttacaaaccttcactttcgtttaccatacctattttctcctagcagtattctggaccatgcatttgtcctctgtttccgcatttcctcatgcaaccgacagactcgttaccaagaatgccgtttcggatggagatcatctttgcgtctagatgagtagcgttagctacactgtaagaaagcgacttcttgtcgcaccataaagcctctttccggaacacatgcaaaaaaagaacccttatgggagtagggttctcgatgaggccttgtttcttctttatgcagctttttatacacccttgatacatcagcttttcctcttgaggtgattgaagctacgatgtataaaaagcttaccttttatacatatgcaatagaataaaaacactttactttattatccaaattatttataatttacaagtcgattagtaagttaatcaccacttactgaaaaagctatctcattccatgagatagctttttacttttatttttcacagcatgctttcgatgacttcaaaggcaagtagtgaaatcatataaagcccacatctattattaaatctaataagccacaaatcagctaattataactggtttatattattaatcagataattccttaaggatatctcttttcgataagtacattgctggaattaaggttgcaactaaccctagtataggagtagtaatcaaacaaattattatcattttccaagggagagtaatgctattatgatcaagtgacaacaatagttggtttaatagtacagatccgaaaagagctcctaggattccaccacctaatgtgaccagtgctccctcgactaacgtcaaacgaactatatatttagtgttacttcctaaagctcgtattgtagcaaactctcgtgaacgttcttgaagactacttgccataccgttcattagccctatcatagctaacaaacaaattaacacaacacatgataataaaattgcaaccctttgactaaattggttatataacgtctgtaattcagtttgacggttatataatataactttagacgaaggctgatttccaattagggtttccactttattttctatgtcactttgggattttttatcgagtattttataatagacttcatttatactatccatattgaaatgttttttcataaactcaggtgaagtatagatgcctatatcaggaccatcttgcataggataatcttttataataccaactacttttagactgagtatttggtctttagattttccatctttgtaatcaagtttatcttctttaaaatttaattccgtatcatgaataactttaatgtagtctcctaatttatagcctaacactttagagccataatctgttatgacgactccaccttgatttaattgatttatgtttatacttcctttagtgacttttaagggtaaactgctcttcatcttattaaagtctacaccttgtagacctgtcatgacttctctttttttatttatattgtacaacatcagctttgaattctttttgatattagattcatcaaagttttgagtaaataccgtaatatctttataaacggggactgattttaccccgggaatgctgtctacttgcttataaaaagttaacggtaatccaggtttgtcatactctgaattagagtcaattacatgacttagagggtatttcgttaatattgatttctccgttgtatctctcactgtagtcaaaacacttattccaacaatacttatgataacacctagcatgattacacctgctatttgtacgcttcttcgtaactgtctaatcgtattacgacttgctaataaactatattgttttaaaaaaggtttgattataaaagataatattttaacagtacaccttaacaagaaagaaataccaaaaaatatagataagattaatatggcagctgaaagtatatagatcttaggatcatggatttttacataattaaaaaaggttagagcaatagataagaaaactaaacaaacgctaataaaaggtaaagcaacccttgttttatgttctgtgtcaatggattgtctatatgcctgcataggagataatttgctggctaaagttgcaggaatgatacttgctactattgttataagaatgcctaataacatgctatacataatggaagtccattcaatataaatgctttctactgttattccactcacttttgttagtacaccttttagaataaaagaaattcctataccaaaaatgacacctagtacagcagataaaattgcaataatcactgattcagaaataactaaccatgctatttgtgtcttctttgcccctaataaccttagagtagctaattcctttttcttttcttgaatcgacatttgcaacgtactaattaacaaaagggcactcccgattaatacagctatatttaacccttgaacgacaggttttagtcctcctaattgctctcgctctctatccattttaatttgtccatcaataaaaaattcagggtcaatctcttttaattggtctattacttgtccttttgcatgccagtcatttaatttgatcattaatgttgtaacatgattgtcttgagaagtagctttagataaccaatcatattgaaataaaacaactgagtgaaggtattcacttttcttcataattcctgagacgcgtacggttttctcttcatttggtggaaatggaaaagttaatgtagagccaagttttaaattctttgctttagcccagctatatggaataactacttcagattttccaggtagatgacccgaagatagcttagtgaattcatgctcttttgataaagaatcacttttcaaccccacatacatcggctgaatttccatctcttttttataaggggtatctttaccgatatatggataaaggaaggggctggtttgttgaatattttcaagcttattaattttatctacatcgctattatttaaaaataaactagatttttgatagcccactattaagtcataattaccgtatttctcctcaactatattttcatttgatttttctaacgtactcattagtatattagaagaaataagtaacatgaagccgatcgaaatccctataattgataagatagttctgctttttcgtgatttaagaaaactttttgctaaagaaaaaattaaactcataatgaaataccttccactctttcagttattttagtaactttttctttagcagataaatttttattcttcaatattaattcgtcttgaattactccatcctgtaaaaaaatcactctatgtgcatatgatgctacatttgcatcatgggtaaccattacgagggaatgatttaagttatcacaaaaatgtctcaatatatttaagatttcttttcccgttttagagtctaaacttccagttggttcatcagccaatataattttaggttctgtcactaatgcccgtgctattgcaacgcgttgttgctggccaccagacatttgagaagggtatgaatcttttaattgactaattcctaaaagttttaaagtttcttttccttttgtttctgcttttctttttcctgctagatcaatgggtaaagtaacattttctatagctgtaagaacgggtattaaattaaaaaattgaaaaataaaccctatattatctcttcttatagttgttaaagcagaatcttttaattgatttattttttgaccatccaaaattacttcccctttagtaggtttatctagaccagacatcatatttaacagagtagattttccagaaccactagtccccataatcgctaaaaattcgccttcttttactgtcacacttacatctcttaatgcgtaaaattgattagagtcttcaccgtatattttagtaatattttcaacacttaatatggttttcatatttaataacccccttatagggtgtatgttaagggaaaaatctaaaaatattattcaataaatatcaaaaaagtatcaaatttaacaaaaataaacaccaaaagaatttattgttataattaagtgtattttaattaatggggagaacttattatgaataaaaacgttttaattgtagatgacgaggaagaaatagctgaattattggaggattttctaagtattgaaggttataaagtctataaagctgcaaatggagaaagggcaaaggaaattctttctgaaatagagattcactttatattgttggatatcatgatgccagaagagtcaggttttgctctctgtaaaagcttaagaaaattgtatagtatgccaatcattttcctcagtgctttacaaaacgatacggataaaattagaggattaaacattggagcagatgattatattgtaaaagatgctactccaggggaaatcgtagcaagaattaaggcaattgaaagaagactaactaattttaataatccattgaaaaataaaacaaacgaagttatacggtttaaaagtctagaattaaatacactgacacgatctttatttatacgggatgaagaagttaccctaacagcgaaagaattcgatcttatcaagctttttttgactaaccctaatcaagtttttacatatgaccaaattattgagaaaatctggggatataaccaaggagattttcatagcgtgagagtctatattggtaaattaagagataaaattgaggaaaaaacaaaggattttaaaatatcaacagtgtggggaataggttataaagcagaaggagtttcaggtgactaattttcaattatctataaagaaatgggccttaatctttttgattttatttttagtcattcctttgtttattacgagattaaccgttcatctgtatgaagatttttactctccttataaaaatgtggaattagataacttggatgcgtggatgaagaagtatgtcttagatgatgtggaacattggaacaacttatcatggcagaggtcaattaatgaaaaaactagtacattaggaattaaaataaggctaatagatcaaagacaacaacaaatattttctaacattaacaactctaataagtacgagttaaactcagatatttcaaaaaataaggtggaattgtcaagtttcttggaagaatataaggtttattctcatggcaagctactaggcgtagcctatgtacaagataatcgtacttttgagataaaacatacccctaatagatggatatcttacataatcaatgaatggggaggagcgttcatttggttatctatctttgttttaattttaattattagtgtaaggtttattaaaagaaaaatactttttccattgaaggaattcaggaaagctactgactcagtaagtaaacaaaattttaattttaatgtaccccatactccagtgaaggaaataaatcaactttctgaggctatagtatttatgcaggaaacattaaaagagtcgctagataagcagaatgaaatggaaaaggaaagaaaaatttttatatcctctatcatacatgatttacggactcctcttttctctattcgagggtgcttggaaggaataaaaaaaggggtagctaatacgccagaaaaaattagtaaatatgttgatattagttataagaaagcaaatattttaaatgaactgattaatgatttacatacttttactactgttaattatattgaacccacacctaaatttaaagaaatcaatataattaatacagttgatatcacgattaaagggttctatccagcagctttaacgaaagagataagcttacaatctaattataatgatgaagaggttatcattataaatggggatcagtatctcttatctagagccttagaaaacataataggaaatgctataaggtatactcctaatcgaggagaagtaagtgtcacggttacacctttaaacggagaatattgcaaaataattataaaagatacgggtattggaatttcacctagcgagattcctcatatatttacgccactatatcgcggagaaaaatcccgtaatagaaaaacgggaggaaatggattagggctgtctatagctaaacaaattatagatcaacacagaggagttattaaagtttatagcaatgatgggggaggaactacttttgagatcgtcctgcctattgagactacatcttagcaatgtagtctttttattttattaataattaatgttgaatggagtttttcttctgagaattgattttaatccataaaatgtaaagacacacgttcgtaaaagtatacttttatgaactttttcaaatcaaacatatcctctttctctttaatctttttaagctaattgtaagttaacaaaaggttgggctaatggatataatgtggttacgtaaaaacattatcattcttttcatattgtgtacctacttaacttgatagggatgcaatactaaactaatataaacaagtacaacattgatttttaaataagaggtgtatctataaagctagatgagttcacaattgggcaattatttaaaaccaaatcctttaaattaacaaaagaagagattatgggatttgcagaagagtttgatcctcaatatatgcatttagatgaggaaaaagcgcaacaagggagatttaacggaataattgcttctggaatccataccattgccctttcatttaaactgcctttgtatctagtaagtacctaaaggagaaagaagtgaatgttggagaaaaagttggaagcataatagaactagcccaatgagggtaattcatacaaaaaagcttttaagagtcatatttcttaaaagctttttcatttctgataaaacgcattatgggaaacaacatggtaaaaggctctattttttctataataagggcctttttatttgtgaacttatacttttataagtagggaaaaattaacttttcagaaagacacatttctaatttataactcattacgattaaaatcaaaggccttttgaatacaggaaaaaattttttatgcatttttaaaaataggactatgtgaaatatcctttttttattataatctatctgtatgatgttactatgcaatcttcttaattaattgatgtaataaaaatcatttttaaatctttgtttttatggttacatccgagctaaatgaaataaaaactgaaggagagtatacagccttggtattcgcaattatttatgagtttttatcttctctactaatcaaacctgaatcaaaaattaaaaaacgtgttagttaggctaacaattcatataggaaagataaagcccatcgacttattaagtcaatgggcttgtttatttattttatttcttaaatttataaggcaatgttgtcacaatgacattttttcgataaagaagatgtgcccttagtaataaacttgattggttatgcaacgtgttatgccagctttttcttgtgataaattgcggaatcaaaacggtgacagccatatggctatcaactgctcgctcctctacacgatcaataaaacgtaaaagaggtccaactaagcttcggtattgtgagtagaatgtaactaagcgtatatcaggatatcgttcgttccatatctcttccattctcttttcactttcacggtcaaatgccacatggaccgcaatcactgtgtctccaataatttttgcatagttaattgaattctccacagcccttgttaagcctgcaactggtataataactacatttccttctaatgctaatgcttctttatctcctggcttgatacgaagttgctttcctacctctacataatggttcttaatacggtggaacagatagacgataagaggtaagaagattaaaacggcccatacttgggagaattttgttgtaaagaaaataatgagtacagtgaagctaataaaagctcctataaaattggtcactaatttcccttgccagccagctggcttttctcttagccactttacaatcatgcccgtttgagatagtgtaaatggaataaatacgccaaccgcatatagaggaattaaccgttctgtatcaccttgaaatgctatgataagcataatagaggcaatgccaagggtcacaattccatttgaatagcctaaacgatcaccacgtatcgtaaacatacgaggaatatacttatctacagctaaattaacagccagtaaaggaaaggctgaaaagcctgtattggcagccaatactaaaattaaagccgtcgtaccttgaacaaaataatagaaaccatttcgtccaaatacctgggaagcaagctgtgaaacaaccgtttcctctgctttaggtacaattccaaaccaataagccaagaacatgacacctgaaaacaaaatagctaaaatcaggcccattgcaacaagcgtacgtaccgcatttcttgcagccggttgtctaaagtttgttacagcatttgaaatagcttctacgcctgtaagggctgaacaccctgatgaaaaagcgcgtagtagtaaaaataggctgattcctggcactgcagttccaatagcaggatgaacatcaggagagacctgaccagtcgctactttccatattcctatccctattaatagaaccaatgcaacaacaaacaaataaacgggatacgctaatgctgaagcagattctgttacccctcttaaattcaaaaccataataaaaataaccaataagcaagcgatgatgactctatagtcatgaagaacaggaaaagcagatgttaacgcatctgttccagatgaaatacttacggatacggttaaaatatagtctactaatagagatcctccggcaataagtcctgcattctctccaaggttatgtttagatacaacataagcgccaccaccttctggataggcataaataatttgtcgataagaaagaataagtgccgttaaaaggataagtacaccaataccaatcggtattgaataccaaaatgcgatcattccaatggtggcaagtacaattaagacctgctctgggccatatgccacggatgaaagtgcatcggatgaaagaatagctaaggccttgactttatttaacttttgttcacctagctcttttgatttaagtggcctcccaattaataaacgtttgatggatgaataactcatctaaattcctcctggaacctttgccatttacctatattagtttactctcatcattccccatctcagaaaaaaaacaccaaaaagaacactaaggttctgcttagtgttctttccaggacaaataaaagcaaaccttctctccaaacgctgatgaggttagctgtcggattcgggcctttagagtagccctaccttcttttagaaggattcaccccaagtgcaaatgcacgcaaaatgggtcccccattcctgaatggattaagcgataaaaggtatgaaaatagcaagattatatatgtacgttaggtactatacgcctgaatgttccatttgtaaagagagatatcaattaatcacacagaacaaggctaccaaagaggatgaagcctttatatttgtataaagaagggcctaattctttaaaatttgataataaccataaataataaaatacgctattaaataactgataagagttccaataatattccactcatttaatataaaggctactgtcattcctattggtgagattagaagaacgattatgtgcattagaaatcctccttaggggaaagtaaaaaaaagaaaggaaggtgaactatgtgcctgatcttttgcaagccttgaaaagtgtcgttcagtcttttgttaaagatgagaacaaaatgcctcttcacattggcgaggcgatgggatgttggatatttttagcgttagtgggtgagacacaagtacagactgaagcaggaattaacagtacaacggaccctgaattgagaaaagcccttcaagaagcagtcaacctcttcaaatcggagaaagaacggattatagcatttatgcgatcagaaggaattccgttaccacctctgagtgaatcgaaaccaatctctgacccaaatagtgttccattgggggttaagctgacggataacgagcttgcaaacagccttaagaaaaaaatatcgatggcgattacaagctgttcggaaacggcgtcgcgatcccttcgcagcgatgttagcctgatgtgggccgaatttttgcaagaacacataacttttttaataacctttaaatcattaatgcgaaaacggggatggctcaaggtgccgccgccttatcatcctacaggtctaacccaagcagaaaagtgaggtgagaaatgtgccagatgtcggaaaagctattaaaaacattattcaatcatttgttgatgaggagcccaaatcacccttacatgtgggagaagtcatgtcctgctggtcctatctttccgaattagctgacgaacaagttcattccgaagcagggattaacagtacaacagaccccgaattaagaaaagcttttcatgaagcagttgagatgttcaaatcacagaaagaacgaattattgcctttatgttatcagagggagtgcccattccacccttaagtgagtcaaagccacagtctaatccaagcgatgttccattgggtgtcaagttaacggatgatgaacttgcaaacagtcttaacattaaaatggttattttaattacctattgtgcaaatgccatcattcaatccgcacgcaatgatgttactttgatatggattgaatatctgcaagaatatatgacatttggagcaactctaaaagaacttgtgaaaagacgaggatggcttaaaacccctccatactattatgctccgggagcgccgataaaatgagacgtctcatcagaaattcttaagaaagggaaccttgagacttccctgggtctaggaggtctttctttgttatgaataagtgattgatagcttgaacaaactacccaagacactataaggtgtcaaatacatctatttagagcattcaccagaagaactatcttactcgtataaggta

SEQ ID NO: 80 - DNA, 15886 bp, Priestia aryabhattai
  source 1..15886: mol_type = genomic DNA
ggaaaatctaacattataatcgttcttttaaatttaaaaatagtttacgaacgttctttaaaaaacatacagttttacaaacatctttagcaaagtaataaattgaaaattctacttcctataatcaaactgatgtaagttcaaaaagaagaagcgtgtatcttcttagatacatgcttcttctcgtgctttttaggaatttaagagttattgtctggctctttttctcttatattcatattgattttaaattgatgccctaatctgctttatatagaaaaaacgtacaatgaagaaatagataatttgaatggctaggaaaacacttagaacaataacggattccttaaatagattaaagtagaacaagtgtgataaggccgtaagagctacagcgccatggataagtgctacgattatcggcacgaaaaacagcatcacggtttgcctgtttaatacttttttcagctctttatcagttagacccatttttgatatagatttaaatttttgtttatcctcatccagatccatataaagtcggaagtatagaaagctaccagctgatacaaaaaagacaatcccaataaatagcccaacaaataagatgggaccatagcccttcatcatttgatatatttcataatctattgctgtaatctcagaccttggtagtttctcgtatagcttttcagaggctgccatcactccatcttttccctcttgtgcttgccaagcataataactttgctcgtcttcaggcttaggaaggtgacgatagtcttcgtccgaaacaatatagtatgaaccagttacaggaagagccttcgattgaaccatttcctttgctcttaaagtagaacctgacgctaatttaattgtttcatttagtaggtctcttttcggtccaaggtttgtaccgttaaaatcaacaacaatagccttcccatgttttaagttaacgggagtttccccagtaagtaaggcaaatctgttaaaatcggattgattagtaataagagttttatctcttccaactttataataatttaacattgtgtgctctgaatctgccttaatgttttcatcctttaaagtcttatttataaacgagacattatctttttcattatctttagatggcttataagaaaatgtagctgcataagtagattttacgcttgaagtcagaacggtttgaaatccaaataaagaaccaattgcacaaaatgcgacggttgaaaccatagctaccatgaaaaaagttcgcgcattgtccttcatacgaaaggccaagtccgaaaacagcaacatgttggttttaaaccaaaaaacacgctcattcttctttagtcttccgataataaacacacttagttgcgtaaacagcagataagttccaacgcaaacaacaataataactggaaccattgcaactacaaccgttactccttttactaataaggcaccaccataccctactcctaataaaagcacagctaacaacgttaaaaaaagattcgcttttggctcacccttcgaaattttattgccttttattaattcaatcagctttttactacgtagaacatacgtaacaaatagggaaataaagaaaaataaaattataaaagagataaaagtaattataattgctttaactggaaagtaaaaagacagtgcatgttcaataattaatacattttcagctagtagtaaaatagccttcgcaaaaacaaggccaagaagtatacctcctaatgttgctgaaaatccaataagcatattctctaaaaacaccatcaaacgaatttgtttcattgacataccttgcatcattaacaaaccaaactcttttttccgagattgtaaaaacgagctcatggaatataagacaaaaaagaaggaaaatacataaataattcctgctgctgcattcattcctgtggttacacttgagctcatatcatcttcacttaatacaggatgattagcaaaaatagaaaaggtaaaaaagaccatgactgtgaataaactgctaagaaaataggctgcatataaccttttattacgtataacgttgttaaacgcgaactgtcgaaaggtcatgtgcatcccctcccaataaagaaagtgtatctataatcttttggaaaaaggcccgacgattatcaccacgatgtatctctgaatagaatttaccatcacgaataaagatgacacgatcgcaatagctcgctgcctgggcctcatgtgttacaagcatcattgttgtcttctcgtttttattgataaactcaagcatttccattacatcttttgaagatttagaatcaaggtttcctgttggctcatctgcaagtagaagcttaggagtatgaatcattgctctcgccacagctgctctttgtgcttgtccaccagatatctcatagattctttttttcataatgcccgtaatccctaactttccagcgatttcatatgccttttccttcatttcgctcactttttttccgtccaatgttaatggtaagacaatattttcttcaaccgttaaggtgtgaagtaaattaaagtcttgaaagacgaaacccaattcacgacggcgaaattttgctaaagcgtctttttttaatatatgaggattcttttcattgattaggatttctcctgtcgttggttcatcaatagtagcaatcatgtttaggagcgttgtttttccacttcctgatggacccataattcctacaaattctccatcgtcaatagtcaaatttatatccgttaacgcacgataagcaattttcccttcataaatcttactcacttgttttacttttaacatcacaagctctcctttccatacacttaacttgtgattagtatatcttttatgtaatcttaaaaaaatcgattttcctttcatttatcttacactcttgtaaggttttgtgttttcccaaaaataatttgaaaggttgatccttgattcaatgtggattcaaattcaactcgatgaccgagttgatcagctgcttccttggctaaatatagacccatacctgtagattctctaaacttccttccattttcacctgtataaaaggggtcaaacacacggcgtttatccgtttcaggaatcccaacaccaaagtctttcacctctaaaatagcctctccttctctttcaaaaatggtgatatcaattctgttactctttcccttggaatacttcactgcattattgatcagttgtgaaagaatgaagaacagccatttttcatccgtctctacgaccatctcttgcttctgttgtaaaacattcggatatacttggttccgaatataaaatcgtttattttcaccatttacatccttaatcattttagacaagtttacaggtttgatataaaaatcctgttcaatggtcctaagccttgccatgtagaggatggtgtttaagcccgttttcattcggtccgtctcttcacgaatacttgaagagtcaggttcatccagattttgggcaataagctcaataacggaaaggggtgttttcatctgatgaacccattgatccataaacttcaagtgttcctcttgctttgactccaacacttttatttttgtttgataatgcttatactgatcctttagcaaatgatcaagcgcctgtgagattggagaggcttccgttgtttggaaggaatcatctagggaagaaagttcgtttgtcaatctcttataaaacttccggcggcttaaatagtggtaaacaagataacctgtgagaaaaaatagtccaagaaagattgcatagaaggctggaagaagatgtcgataaccatcaagccaatagatggaaagaactacgaaaaattgtacgatttgtactgcaattaaaaaagtatgttctctaaaaaataatctcatttcattccaacccttcaccatgtaacgactagacggtaaccagaacctctaactgtttctactaaacctaaaagtccaacttcctcaaatttttttcttactcttgcaatatttacatttaacgtattctcatccacatagacttgttcatcccatagtttttctagcaagtcttcacgacctgcaacacgaggatatcgttctagtaaactttcaattatatcggtttctttttttgacagcaggattgttttattatgaaatgacaattccaatctttccgggaacagctttaatccctgtatctctaaaattcgttcttgtacctgtgatgcatattcaccataagcgcgacgaagctgactgcgaattttcgccattacaatttcgggatgaaacggttttgtaataaaatcatctccgccattttcaagtgccatcacctgatccatctctcctattcgtgcagatataaatataacaggacagatagattccttccgtatttgcctgcaccagtaatatccatcaaagctaggaaggttaatatctaacaatacaagatctggcttctgcctatgaaactcctccatcacattaccaaagttctctacaacggtggcactaaagccatatttcactatatatgactgaaggtgctccgcgattttgggatcatcctcaataattaatattttctgcatctcttcactccttttcatctagaaaattatgccatataaaatatataaattcaaaacacataaacaactaaaaggttttaactttttttaaaaaggaacctttttcattaatgacctatttgagttaaagaataaaatgagattaagcgagctaatcgatgttcgcttggcttagttcctgaagaaatcgtgtgcaggaatcacttatatgtgtggaggtaaattcatgtacaattttagattatatacgttacgtgacgcttcaaagagaatcattaaactaaaagaaggagaatcatttaaagaagaacttcaaagagcaggtattcaagaaatacaaatttttcagatgcaactagtggaaaaaccagagtaatttcagcataaaccttttatatgggtgaaattgtgttagtctaataaaagccaaatagaaaagagtgatcaacctggaagaaataaagcagcaggaaatagatcttactaaagtgtatgaatacgctgaatttccggataaggttttatcaagacttaaattataaaaatcctatagcaaaaagggaaatacatatttgatatatctaatatgtatttccctttttgttatatacactgtctaattatcgaacacgataagcacttgtcaactagcctatcattggctgagaaaggtttatttctctcccttatttaccaatatttcttttcaaaaaagttaattacttcgtctttataattaaatctattaatgaaattttgtaatagttcaattttgtgggaataagtttttcctgtcttgagcgtttctcgatataggtcaacaaagggcagatgattattaatagcattgtttgcttcctcttgcacgtcataggaaatttttttaaatctcacttctgcaactcctgtctcatcaatttcaaggattgcatattgagcacgtagatcagaacgtaacttgccccatatgtataaaggttggccaatgcttcctggattaataatcagttgatcattgctgctataacgtaacaattggtgatgagtatgagcataaatcgcaacatcataatcatgcttaatttacagtattttaattttactattcgtaaagtgaccaatgcctctcttaaggaccttggcatccctcatccaactaatgaaaaaaacaagcctataggccaagccatagcatataaaaaaccatcacttcttaagtaactatctaccccttacctactgcagtaagggttcttttttatttttcgactggacaggcaagcatactgaagtagctacatagtatctaaagtattataactccgttatctaatcagtagctagttcagtatcgctaccccgttaatacaagctgcatacgcctcttgaagccgtttgtgaaacctgtaagggagctgagccgaagaggcgaagggggcgaccggatgggttgagctgaaataactgagacatgaaaagcgaaaaaataaaaagaatgaaagtaggtatcaacatgagaaaaacaaaagggtttacttttcgaaaaatcttttctccatcccccaaaccacctctcaagagacctcgtcccttcaaggcttattcctttgtcccatttagtcccctagctatgctcgatccaactattctaaccataggaggcattgttttaggaattgctatcattgaacgaatattagagcgatggggtgtcattgatctggttgatcagtttacgaaagtgatgcggtttatcctgcctgttaccttctacagcacgttgatttacttttttgcgacctttatgttttgaggaggaatatggatgtttgaaaaactaaaactgcgtggccaactgattaaagcgtttcgtacagcagagatttatcgggtcataaagcgtggggatcgtacctcctatcaattttcgaaaatccatcgaattgatcatcagcacacctacactcggtatgccttttccctactgaatggcattgatcctgaccttttaaataaaaaaagatgggccttacgccaagtattaggcagcaacatcgaaataaacgggactctaaagaattttagtatcacggttcatcacaaaagcctgcctaagatgcttgaatacaagtatgaaaacattcatcctcatattgagaaaatggagcttcccgtatgtattggtcaagatatctatggaaatcccgtctcatgggactttgcggatctggaaaccttgctaatatcgggtgaaattggagcaggaaaaagcagtctcatgcgtgtgatcctcaccacatgggtgaaatatacatcgcctgacgatttacgtttggtcttagtggatctcaaacgagctgatttaggactgtttcatgggattgagcatgtggatgcgctttgttttgaggcaaaggacatgagaaaaccttttgccttattacgagctgaaatgtatcgaagaggcgatttattgttagagcatggggtcactcatatcagcaggctcccctttaagctgcctcgcattgtggtagtcattgatgaaatgtccatcgtgaagagagaaacggatctcgtagagatgattcaacagtttgccagccaaggtcgtgcgctaggtgttcatacgattattgccatgcagcgtcccgatgccgatttgttgaattcagcactcaaagcaaacttacgagttcggatctctggaaggcaggccgatgcgataaatgcgaaagtagccggagtcattggtgccgaagaaatcgatgcagcagccagggggcgtatgaaaattaaaattgatgaggtgaaagagtttcaagcctatttcttagatgaaggagcttgtaaggaaatactttcaccttataaaacgctcgtgaaagatcctgaaccagaattagaagtggtatcacagtccatctttggtttattagagaaggaggagcagcgatgagtttccgtttatctcaacgtgacaaggacatcatagcgtttattaatcaatttagagccgtagatcgagactcattagttgacctattctttaaacagcttaaatcgcccgtaaatgcatgtaatagcgtcatggtacgtttgtatcgtttagggttaattgaacgcacacagcagtattctccgacggtctacttacctgtagatgccaaaattaaaaagaactctcaaaaaatattacatttcctttcgatcttggatgtctataaacagatgagtacgtatagcacacctaagcaggtcattgtcgaagataagcccaccgaacgaaaaggagggattgaaccggatctattttgcatttttaaaggatctcctttctggattgaaatacaacgcaatcagtatactgagcagaaaatgcaagcgaagattaacctctatgaagagtttttcttttcggatgaatggcaggcattacactggcagctaaaagaccgatcacccattttcccttccatcattttgattacacccgttcgttatgccgtgtcttcagaccatatccgcattatacaagtagcaagcattcatgaattgatggagaaatataagagtcctgcaaaatcgcaaaaagaagcaagatcaaggacgaatgtttcttctggtggagttaggattaaattaacataattatcacagctacattagaaagtacgaagattaagattatacacctaaaaaagattggaagattaacgtttaaatagcatcattggaacgaagcgtacttttgcaggcgaaccataacctcatgttataactaaataacatggggctttttaattaaaaaagtcgttgatatctttgtttttatcaatttttttcaccgtatttatgattttttttagtattttaggtgtcggtatgtaatctttcttgttacacaagcgccaaacggtattacgtgaaacctttgcccgttctgcaaactctgtttgctcaataccttctctgtcgagccacttgccgaatttgctacgttttggattattccatggtaacatttctacatcactccttttctattatcttgtccaattttcacctactttaacctgctttcatctaggtgaagcgaaaagtgggcataaagaggcaaatttcgaatagaatagaagaaattaagccaatttgtgtatcttgtcgatatttttggaataatcatatagcatgaatacagttaagaccgccttataaactaatacataatgggcggtctttgttatgggtatgttatgatttttaactacttaaaaaaatagaaaatcctacttaacggagaatcaccttctttacaatgatgaaaaatgattaaaaaactatctttatattggaatattatttttttcgttttttatatctattccaagtaatcataccagatatacacaaaaatatgattaataactcaagttgaacctaatggatcgcaagttaaacttgagttataagaagcacattttgatatcgaataagtgaacttaatagattaatgggtttaactaacaatagcaaaatctttgtttaatctaattcatgttgaactaaaggtcaactaaaacggtgatatatcatcgttatgctatgtgtataacgctataatggttgtaacgggttatgctataaaaaatcattaaacgttattttaacaaacttcattaaccgatacatcgctataacgagtaatttttatcaaaaaataccttttaatcgctataacgcagaaaataagattgtgctagtataaaaaacaaaaaacctcagattgcctctgagatttaaaaagggtttatgaaacgtattttagattttatatttaactatgcaagtaacaaaagaggttttaccgtttccttatgttctcccaaacaaacgagcgataaaaccttgtttcttttgctcttctaatttatctgtagcagctgcgataagtttcatggattcattctgttcttcccgttgctcttgaagcattcttataccttccataagccgattatcgcgatccattaaccttttatcctgttcttcaaatttcttttgtatatatgtatcacgttcttcaagacgttctgataataacttaatgaactcagtctgtttgttaatcagttctgtttgttcatctatacgtttggacaacgctgccatatcaccattatgctggtcattttgtgtttgatttgctgtaacgggtactgctataccttctcctttaagtattggtacgagttcgtttgcagcttgttctagcgtcatgctagtgttaactttagcactaattaatcttcgaatcgccataatgtctttatcactatattgtctatgaccttgatcgtttttaccaaaactccatccagctctttcaagctgatatgcatactttcgtaaagtagattcttttatagctagcatagcaatcaaatcgcttggtgaataatacacttttgaataattatcttcactggacatagcgaccctcctttgatttcacttgttgtttgtttcgctatagcagtagtacaatcctttctatcataacaaaataacaactatatagagtagtattttagtttgttggtaataaaaaaaagacctattacaaacttaacaataggtctcaaaaatttctcttgaattttggaatgtaaaagaggagagacaatgcgctcatttgataggtatgtcttttcctttgagaatagctttattcccataatatcagggtggacctgtacgttgacggaacgataatgtaaaccgtaattttttataatagaaaaagaattattacatttattgatttttaggtattagcatttttataaattctttaaaattatcagcaatctttgaagtaactggatcacattcatatgattcttcgtaatctaagaaatcgacagaaggattgtttttatcgtaatgaaagttcaagcataaataatctccccatgccaattttgcaataggaattaattcagagccgataatatcttcactataaaaattccgcccttgttctccaagagaggtttcacagcaatctatatcatattctccatatggatgctcacggaaatctttaataatacctaaaaaacgatgaatttgacatctcttattgagtgccgttaatggtgttgaatctgaaatttcacagctattataggttttcaagaattccttatattcgtttggaaattggacacgaaaataaccttctagtttcgtaatgtccttatcatttggtaatggacttacaatactttccttaacaatgctcatgcttcaaccctcacttgtaataaatagtcatataaaagcaattaactacttttgatagtcatagacaacaggaactttgtccattttcatggttttagccacaatataacgacgatagccatcctttaaaaccttcgtttctttctcaattgttaatggtttgtcaaggtgtcctgtacgtttcacaaattcaatgacttcttctgttttcacagggtttggacgtgtctttaagaaggcttcaggaacaataatgtcctcaaaactcacgacatcctttgtcccttttggctgaataggttgctgcttcttttgtggcgcagccttttgctcttgtacaggtatttttttcacttctggctgtaccgtttcagcgtcctttttctcttcttttgctataggttgagaaacaggctcttgtttttcttcctgcttggtagctgcaacctcttggtgagtcttagaagcctcctgtttcgcttcttttttatcttttgaatcattggcttctttatcgtttttattcgggagaacggtaatttgaaagcagatgataccaatttctccagggcactcgtcaatcggaatatctaacgttggttccccttgaactaagattttttcatgcataatactcttttttgtcagtccggttttattgaaggctttcttggcaacaaacacggtatacgaaataaacgtactcttctttaaacctttaggcgcagaaggtgaacctttttcacgcatatcaaaggcaacgtaacggtcgtattctcgtaatggtcctgtcgcagaacctgttagggtcattttatgtggcatcgtgatctcctcctacatagatttatatattgattacttagaagtatgttctaaataataatactcttattaaacatcagcttccaagggatttcttcacttttgaattaggaaactgagccttttaactggtcctgttggtgcaataaaacttgttcctgtggtgttaaggcttgtcctagatccttttttagctgcgccatttctaacgaactgtacgtagaactgtgctctttgagtaagttttcttcttctggcgttagttcttgctctaaatcttgctttaattgaatcatttcaagctgttgatccagagagatagctgtatcttgtgtaggctctttttgctcctgttcagcttttaaccaatcaggaacgatttccttacggatgatctgtttaggtttaggtaatgcttttgtttgaacttctgtatgtatgtctgactcagatgttggtttttctgtattccctttaagtagattcgtaaattgattgtaagcaatttgataaacaagacgacacatgtcatccagtgataggggagtacccttatgatttgcctcatggacatatttatctaagcctacaatggctgtataagcaacttcatgtgcttgttctttgacaatctcaatctctgtatctcgttttactgctttggctgcatttcgaatacgagcataaaagtcttttagttgatgaccatatttccctgcatacacgttatttacttttttaggaacacctacgatataagcaaatgactgtgaagcagatattaaatgattatttaaatgatttttaggtaaaacaaggttaataaagggggacgacgttttttcgccctcaaagcttggtgtatcaacgtttttagcactttctggacttgtcacaggagttgtcacaggagttgtcatttcttcttgttgaagcgtttgaatacctgttgtatcatgtgcaaaaaagatttcttcacaaatttgatcaaaattcgtatggcttttaaggataaacacatagctatcaggatgagcacctgtagtatcttctttgatataacgggccacaatcataaacggtgtggcctttaacgatttcacaaagcgagaaacggtactttgggagacatcaaacttttccataagtgttttggaatgaatggcttgaatacctgtggcaacaaggttataaatcacgtaatctaacatttccatacgttttttagggaatactttatgtagggcttcttgttgttgtttaaaataagtacgaagggtttctaaaaacgcttctttctttttacgaagggtcggtttttctttccataaccatttgaatcgtccgttgaaggtatttacatcttgtaaatagcaagttaatatctttgtcatttgttcatcttctcctttaaggaacacaaaaaagacactgtttccctgaagaaaggaaaacagtgtcttaattaagataaactaagcccttgaaatagatgtcaatttcgtataaaataaaaccataagttttattttgtacaaaactaactctattaacaagagacttcgacaagtgttttccctaccgtaactagggggaacggtttaagagtgctgtcaacacttcttaaacagttgaagtcttttttctatccgcacgtttttgttagttttattatagcgttaactagtctcataattcaataaaaattagcaaaatatatcaaaacaagtatttttagctacgatccgtttgttatttctttaggagtcgacttcatcatagctgaatttgtggaattaggggaggggtatttttttatccctccctaaatagttagaaatgtgttataatgctagaattttgatgaagttgaagattaagtgattcgtacactttcaataataatcgcaaatggttctgctaggtagggtgattttttgtagtccttttttgtagatagggtgagaaaaaatcaccctattcagcatgttgaaaatatgataagagcagtttctacttcatgtagaaactgcttttttgttgaattgtaaggggggaatcttcctatatctttggcaatttgtacatgcttacgggtattgttaacgccaagttgtaactttttaagttcttttttaaattgtttttcaattcaatggagacagttcctgtaatggttgttgcattccattctttcttttacctgaaatcgaatctgatacaaatggcagatatagcctcaccaagatatctcatttcgtgctcaattatgggttgtcctgaatggatcggtaggtatcctcattgagtgaaatcatttggcgtttttattcatcatctctatattctccgattaattcttttaccgtatcatttaagtttctcagtgaagtcgcacaacattccatcgccttaatgtgagcttcaattaagtttttaagacgttccttccaatcagattgttgactgaaaatagctaatgtgtgaactagtttttttgaaaattgctgtcatgattgatcatgtttctttatctactcatcaaatttttttacaacaatagcatcagcatttcttattttaagttcaatattttactcgaacttctcaaaatagtggtgctcttttaaaaatagagagaagagcataaggggtttttgcccccacaggctgtgtggggttaggccgagcctaacaaaaccttgggtacaaagaaatgcttgcaagagccccctcagcgcaccctcaaattaaaggacagtaccttcaccgcaccttcaatgattgcaacatttgtgtcaggaaccccttcatagttgataaatgtaccctcaagggtcacctcattttaagtgtttttttcgcacattcatgatcaaaaaggctatttatttttgcttgcaatacaggtgatttacgcgtgcttttttatcatttatgaatcaatttttattctataaaggatgattgttttataagaatgcaagttcacatgccatcaatatttatctttttgatttttacatcaggttcatatgagttagaagaagatcttgtgaaaaagaaaatgaaaaactacagaaaagctaatacagaatcaagaatcgcaataaaaaaagttgcgattcaatccagtgatgaaagcattcagctctatgaagatgaacgaaaaagtttataagagaaactccaaaatttgaatgagatgaaacaagatttagccatgaaatgaaaaaagaggtgtcgccactgactcgccaatgtgtcgccagagagtcgccggataccgtttttgagtcgccagagagtcgccactttgagggtttccgtgatatcacggttttgctaggctttgcctagcctatcacaccctgtgatagcaaaaacctcttatgctcttctctcttttgtagtggggaaccacaatttacaggaaaggaacgaatgtcatggatatgtttttacaaaatatcgatctgattgtcgttaaaaaattaggtgaaatcgcgaaaggaaagaacatttcttcccaagaatttttaaaagtcagcttaaaaagaagggaggtacagagagagttaaaggattatgacaaagggaggaaagagaaatcattaaatgaatttaagaaactttttgcacggaataatggcgcacaagagatagaacgttaaaaaaagcaaaggtttgaagactgaagagtattcttgttttatactgagaaagtagaaggagagaaaaagcagcaggcaaaacaaggtgaggctcttttagttatgaaaaatccatatttataaattcatattcaatcaatcgaatcttataaagcccttttttttccttttgcgagcaatgcacataatcattacagaacttacaatgggttagatcttccttcctaattggtggattaacaatactcccacaataaagacaagttagtgtagtcactataaagccctcttatattgtaaaaaaagagagcattaatgctctctcttaaaactcacgattcatactccttttcttcatcaatccatctatcttcggttaatagcccacacttagggcatttatattttggatctatttgagttgttatttcctcaact

SEQ ID NO: 81 - DNA, 15605 bp, Priestia aryabhattai
  source 1..15605: mol_type = genomic DNA
actatttcgttcagttttcaaagaactcttgtctcaaggcgactttcttatcttaccaccttaagaataacttgtcaacaactttttttattaagttattttcgagttattttttgttgttgtcttagcgacgtatataaatataacatctgttaacttgctggtcaacaactttttcaaaaaaaataaaagttttctcaaaaagattccagaaaacttttattttggatattcctccaaattataatataaaattattaataacaagtaaggcagctatgcctggaatacctaaaatagctgaaacaatggctgtagggaaattaatagggatatgaataccaaactgtacgccaaagatgttaataaagaaaagcagcagaacaccaataataagcttaattgataaatttccaatgactcgaagcattttttcaacaccacctgttactaaaagtagaatgattagtcctattaaaaaagacacaactacaatgggatgatttagcatgttgcctccttcttaaagcagataagttatcttatatgtatgtccaagcattcaaaaaaagcactacttcacggagggaaatccttattttataaagacaacaaaacaggatgcctctatgacatcctgttaattgaaatatttcgatgcttggcttcttttaatagaaaaagatacttcattttggctaatcgaatatctaccattacctcttctgaaggatctacacttctttctaccattgaagttttgtgactccattcctgctttacttgcataaaagtcttcacaaattcatcatcgtactctttgcgtaaccaaccttttcttttaaaaaacatatgcaagtacctcgttatacttctcttctaccttctagggctttagataatgttacttcgtctgcgtactcaaggtctcccccaacgggtaacccatgagcaattctagtaattttaattcctgtcggctttaagagcctagagatatacatagccgtagcttcgccctctatattcgggttagtagctaaaatcacttcttgaatctcatcatcttgaagtctttttaataactctggtactttgatatcttcaggccctattccttccataggtgaaattgcgccatgcaggacatgatacaagccgttatattctttcattttctccattgcaatgacatccttagggtcttgcacgacacacaccacacttcgctctctacgctgatcttgacaaatgtagcaaggatcttgatctgtgatatgcccgcaaactgaacaataggttaaatttcgcttcgcattgactaatgcttttgcaaaatctaatactgtatcttctttcatagataaaacaaagaatgctaagcgaacagctgtttttggaccaatgccgggtaacttcataaaactatctataagctttgatattggttctggataatgcacgtggcaaccaccttattaaagtcctggaatatttaaaccttttgtaaattgacccattgtgttatttgttaaatcgtccatctgttttaatgcgtcatttgttgctgctagtactaaatcttgtagcatttcaatatcttcaggatctactacatcctctttaatatttacatcaattacttgtttctgaccgttaaccacaactgttaccattccgccgccagctgtaccttcaacagttttttcagctaactcttcctgcgctttttgcatatctttttgcattttttgcatttgtttcatcattttttgcatattgcccatgcctttcatcatatgaacattcctcctaaatttactcttgaatttcgattaagtcttctccaaatagctttttcgcttctgcaaccaaagggtcttcctcctgtggttgacctgatgacccatcactttgctgcccttgaagaaactcttctcttactttatcccattcactttctggaattgcaaccatttcacgcttgctgccaattaaagtatataagatattctctaaattatcacgtacattgttgttattttcagaagccattttgcaatgaatttcatatttaaatttaagtataaatgattgatctgaagacgcaaccggttcactgttagataacaacgctgcatgtgaagctttattttgttgtttcaatgtgtccaacacctgcgcccaagatcgcttaatcgtttctaaattctgccgagtggcattttttaaaacttcatttaccttcccaacaggcgttttgtactgacttctggactgtcttgtctgttttttctctgtttgcgctgcctgagctgtatgatcaacttgaatgcctttttcttttaactgctgcagttctgcttccatttgattcattttttgcaaaatgtcttgatatggaagagcgctctcttgatttgtagaactttgagctaattttactaaagctacttcaagtagcactcgaggatgattgctccatttcatctcttgctgagtttggttcaattcagcaatgactttataaataaaggcactatccatttttgaactgagttctttaaactcttcgttaaccgctgctttttcaagtaaatatgcattttcttcagaagcttgataaagcagaacatcacgataatagaagatgaggtcctctacaaacctcgctggatcttttccgtttttgatcaaactttcaacagagtctagcgcttctgcgatgttttcattaaagatagcttggacgatcttcacaataaaagcctgtgatactgctcctgttatggatagaacatcctctaagctcaccttctccgtactatacgagatcgcttggtctaaaagactaagtgcatcacgcatgccgccttctgaagctttcgcaatttcgtaaagagcatcctcgcttacttctagctcttcagaacctaatacttccttcattcgatatacgatatcttctggcgaaatgcgtttgaaatcaaagcgctgacatctagagataatcgttaatggaattttatgcggctctgttgtagctaaaataaagataacatgtgcaggaggttcttctaacgtttttaacaaagcgttaaaagctccaattgaaagcatatgaacttcatcaataatgtacactttgtatcgaacagcactaggtgcatattttactttatcacggatatctcgaatttcatcgactccattattagaggctgcatcaatttcaattacatcagaaatggaaccatcagtaattccccgacaagttgcacattcattacagggttcagcaatgggtgctttttcacagttaacggctttcgctaaaattttagcagctgttgtcttccctgtccctcgaggcccagaaaataaatacgcatgcgaaaatttctcttggacaagggcattttgaagtgttttgataatatgttgttgaccgactacgtcgttaaagctttgaggacggtatacacggtacagagcctgatatgccactacatcctctccttttaatataattcattagttatcattatagcgtattatgagggtttttttcaaaatagtgagagataaaataaaaagcctactccaacagagtagactaaacttatgtatataactgccgtgcaccttccgtcgattagccaccccaggcgttacttaagcagttagctcggttcaggcgaccccatggcacatgagaggttctgcttactgctgcttccttccggacctgacagggttcacagattcccattgcataggacccaaacgtcaacaccacttacttaaggcaggccctaagatgagctaacctcaagaaggaattcggcctcgctagagcggattgcgagtacagggcaccgctacctccccgcttagcacggcaaagttgaaaccaatagtttgggcatcaagttgatgcatttacaagtatacgtcttttcattcaaaaatgcaactgctatagaaaacttacttttttagcgctattttccagccttttttctttgacgcaactcacgaaaaaaggtcgttaataggctcccgcattcttcttctagcatacctcctactacttctgcttgatgattaaacttttcaaactctaataagtttaacaatgttcctgcacagccacctttaggatcataagcgccaaacacaactctttttactcttgataatacaatagcacctgcacacatcggacatggttctaaggtgacatataacgtagcgtcttccaatctccatgttcctagtttcttacatgcttcatcaatcgctaaaagttccgcatgagcaactgatcgctgttctgtttctcgtaagttataagctgaagcaattacctcatcattttgaacaataactgctccaatgggaacctctaatttatctttagcttttaatgcttcatcaattgccaacctcatatacttttcatcatttaacactttttatccaaccttacatattatattttttctgagtcaaactatttactatgtacatcaggaaaaggagagaccttatgtgaagaacgctaaaactgctttaattattattgatatgctaaacgattttcaatttaaaaacggcaaaatacttgctgaaaaatctttaacaattgctcaaaacatttccaaattaaaacaatatgcctcgtctcaacatatccctatcatttatgtcaatgaccactataagctatggcaagcaaacttagaaaccattttaacacactgcacaaatgagataagctcacccattctacatcacatttcaccacaaaacgctgattactttttaattaaaccaaagcattctatcttctatgggacagctttaaatattttgctatcacagctcgatgtgcatacacttattttaacaggaattgcgggaaatatatgcgtgcttttttcagccaacgatgcttatatgcgtgagtataacttaattgtgcctgaagattgtattgcttcaaacgcagatgaagacaatacctttgctttgagaatgatgcataacgtattaaatgctcgtatttgcaaacataacgagttgatgaattaagtaaaaagccttctcatatgatggaagtaagtcatatgaaatggaggctttttattatgcaaatttacactgttaaagcaggtgacagtatatatagtattgcaaaacagttccgcattgacgcagggaaaattataagagcaaatgaattacctaatccaaatcaactcgtcatcgggcaatctatggttattccaatcaacggtacttactacacagtaaaagctggggacactatatggaagataggaagaaaattaggcgttagctatcaggctatcgccaatgcgaacaatgtttcagttacagcacccttaacacctggccgccgcatcttaattcccccttccccaaacaaaagaaacggtgagtttttagggtatgttgaaacaagcaatcgaaaaatcactcctcaaacagagaaaatgattaatcaaaatgcaaaataccttacttatctcgggccagcgaacttcgaagtgcaaaaagacggttctctaaaggcacctccacttaacaatttaggttctattgctaaagaaaatgacgtcattttcttaatggtattggctaatattgaaaacggtgcattcagtgacgaagtcggccgagcaattttaaataataaagatgttcaagatacgctcttaaataatattgtaaaaacagcgaaagaacaaaatttcagagacattcattttgacttcgaatttttgcgtccggcagataaagaagcctatattgcatttttacagaaagcaaaaaagcgtcttcaagatgagcaacttcttatgtctgtcgctttagctccgaagacaagtcgagatcaaaaaggcaaatggtatgaagcacatgattataaagccattggagagattgctaacttcgttgttccgatgacatatgaatggggatatagcggtgggcctcctatggccgtctctcctattggtcccgtgcgtgatgttttagaatatgcagtatctgaaatacctagttcaaaaattatcatgggtcaaaacctatacggttacgattggacacttccttacaaaccaggaggagaatatgccaaagccattagtcctcaacgagctattgagttggcagctcgctataaagtagctattcaatacgacaataaagcacaagctcctttcttccggtataaagatgaacagcagcgcacccacgaagtatggtttgaagacgctaggtctattcaggccaagtttgatttaataaaagaattaaaacttagaggaatggcctactggaaactaggcttggatttcccgcaaaactggctcttgattgaagacaacttcaaaattacaaaaagagtgacacagccataaatagggaaagcttactgttaacagtaggctttttgttattcttcttactgaaagaaatttcttttccccttattctccttctctatgttaaaatattttttgtctgttttttttgaacgagtggtcatgaaggaggcaaatgaatgcaaggcacaccttttatttcagtagaaggacccatcggtgtcggaaaaacctctctagctaaagagattgcacaagcatttcaattcgaaattttaaaagaaatcgtagatgaaaatccatttctcgggaaattttatgaaaatatcaacgagtggagttttcaaaccgaaatgttttttctatgtaatcgatataagcagttggaggatattcaaaaagggttcttatcttataaaaaacctgttgtagcagattatcatattatgaaaaatatgatttttgctgagcaaacgttaaaagatgaacagtataaaaaatatgtacaaatcttccacatcttaacggctgatatgccagctccaaacattattatttatttaaatgccagtttagataccttgttaaagcgtattaaaatgcgcggaagagaaattgaacgaaacatcgatcctcactaccttgcgaggctaagtgatgattatgaaaaagctatgacggcgtttgaacaaaataaccctgatgtaaccattttacgttatgacggtgatgaaatagattttgtacaaaataaacaacacttaaatagaatcttatcagaggttcaagagagtatgttaaaaaggagtatgtaatggtaaacttacgatcgaaatacaacattcctaatgatgctgtgttgacgatagcgggtacagttggagttgggaaatctacaatgactcaatcattagctgatgctctccaatttcgcacatcgtttgaaaaagtagattccaacccttacctggacaaattttatgaggattttgaacgttggagctttcacctacaagtatactttctagcagaacgctttaaagaacaaaagaaaattttcgagtatggcggcggcttcatccaagacagatccatttacgaagataccggtatctttgctaagatgcattttgaaaaaggaacgatgtctaaagtagactatgaaacatatacaagcttgttcgatgcaatggttatgactccatatttccctcatccggatctgcttatttatttggaaggcagcttcgaagatattgtagatcgcattcaagaaagagggcgaccaatggaacaacaaacgcctcttgattattggaaagagatgcacgcccgatacgaagactggattaataactttacggcttgccctattcttcgtttagatattagagaatacgaccttatcaaggatcctgattcaattgaatcaattgttgaaaaagtggctcgctttttacaacataatgaaaagctaaaacgtcgtcatctataaaaaaatgccgctttaataggtaaagcggcatttttaacaaataaaaaaccgttacttataagtaacggttttccaatctccaatttatcgcgctatgttaattgcattataagtcaaatatggcggaggaagagggattcgaacccccgcgggctttaacacccctgtcggttttcaagaccgatcccttcagccggacttgggtattcctccgtatcgacaagtattaatttatcatatacaaataatgaagtcaactcttttattgattttttttaagaagatgttcattaagaattaactcttaatgaacatcttctacttttatttagaaataaattccttatttcccatatatggacgcagcacttctggaatttgaattgatccatcttcctgctggtagttttctaaaattgcagctaccgtacggccaatcgctaagccagaaccgtttagtgtatgaacatgctctggttttgcttttgtatcacggcggaagcgaatattagcacgacgagcttggaagctttcaaagtttgaacaagaagaaatttcacgatacgtttcataacttggaatccaaacttcaatatcatactttttggctgctgtgaaacctaggtcagctgtacacatgcttagaactcgatacggtaaacctaatagttgaagaaccttttcagcatggctcgttaatttttctaattcatcataagaatcttctggcttaacaaagcgaacaagttccactttattaaactgatgctgacgaataagaccacgtgtatctcttcctgcagagcctgcttctgagcggaagcaagcactatacgccgtataagcaattggaagctgatctccgcttaagatttcatcacggtgtaaatttgtaactggtacttcagctgtaggaattaagaaataatcttcttctttaatcttgaatgcatcttcttcaaatttaggaagctgccctgttcctgtcatgcttgtacgatttaccatatatggaggaagaatttcttcataaccatgctcatccatatgtaaatccatcataaagttaataagagcgcgttctaatcttgcacctaaccctttataaaatacaaagcggcttcccgttactttcgaagctctttcaaaatctaaaatatttaaatctgttcctaaatcccaatgcggttttggttcaaaatcaaattgtttaatttctccccatttgcgaacttctacgttatcatcttcagtttcacctacaggcgtactttcatgtggaacgttaggaattgaaagcagcaatagttctaattcttcttcaacgctgcgaagctcttcatccaattgctttacgcggtctcctacttcacgcatttcaacgattaaatgatccgcatcttgtttttcacgcttcaattgtgcaatttgctgtgatacttcatttcgcttgctttttaactcttctgtttgagcaattagctcacggcgttttgcatctaactcttcgaagcgacctaagtccgttaagtcctcaccacgaaacttgagcttttcttttacttcattaaaattagcacgtaaaaattttaaatctaacatacttagtacctccttcagtataaaagggcaaaataaaaactctcatccccatgaaagggacgagagtttacccgcgttgccaccctaattgaaagctaaaataagccttcctcttaaaccagataacggatgaaccgaaactgcctactactttttcgacagcttgctccaggacggattcataagaattgattatcgattcacaccagccatcgactctcttgaaatcaaaaatcttattactatttcctatcaacgctttataccaatatcatttttattaatcataatgtactacaagtctttacaagatgcaattcatttatacaggtttttttgaagcttcttcaaccattgctacaaaatactgagccatgcgagcatcatctgttaattccggatgaaacgaacatcccaagaattgaccttgtcttgctgccacaattcgatcattatgcattgctaagacttcaacgttttctcctacttctacaatatgcggagcacggataaatacgcctataaaatcttcaccgatatctttaatatttagagcagcttcaaagctatcccgttgacgtccaaacgagtttcgagctaccgtaatatccataacacctaaatgaggctcttcacggtcagcgacttgtcctgcgagtaaaattaaacccgcacacgtaccaaacaccggtttacctgcttgtgcaaactggcgaagaggttccataaaatcatacttgtcgatcagacgacgcattgctgtgctttcgccccccggtagaattaaaccgtctacttcgtctagctgttcaacttttttaatgataatggcttcggcgcctgctgcttctaatgcttgtgcatgctcgcgaaaggcaccttgtaaccctaacacgcctacttttaccattttgtcaaaactccctttaaattaccatccacgctcttgcatgcggttttctggtaataatgatgaaatttcaatccctttcattgcacttcctagcccttttgataagtttgcaatgagttcatagtcttgataatgtgttgttgcttccacgattgcacgtgcaaacttttcagggttgtctgatttgaagattcctgatccaacgaacacgccgtctgctccaagctgcatcattaacgctgcatctgctggtgttgctacaccgcctgctgcaaagtttacaactggtaaacgaccttcacgtttaatttgcagtaataactcataaggtgcgcctaatagtttagcttctgtcattaactcatcttcgtccatgcccacaactttacgtacttgagcgtttacttgacgcatatgacgcactgcttccacgatgtttcctgtccctggttcgccctttgtacgaagcattgcagctccttcagcaatacgacgagatgcttcgccaagatcacggcaaccgcacacaaatggaaccgtaaatgtatttttatttaaatgaaactcctcatcagctggagtcaacacttcactttcatcgatgtagtctacacccatcgcttctagcacgcgtgcttcaacaatatggccaatacgagcttttgccataactggaatggacacagcattcatcacttcttcaacaattgttgggtctgccatacgagacacgccgcctgctgcacggatatcagctggaacacgctctaatgccataacggcaacagcacctgctgcttctgcaatttttgcttgctctgcattgatcacgtccatgataacgccacctttttgcatttccgccattcctcgttttacacgatcagtacctgtaatgttattcatgtttgtcttcctcctgtatcaagtgtttcacaataatttttagtgtatatacaaaattcaaaacttagtgtctattctaccgcatttttcggaaaattcctatctaatttatagattatatacaaacaaatctaaaaataaaaagaagagatactctcttgtagtatctcttctttctcttgagttatcattaaaaccagttattcactgtatttgcagcattcatccaaatatcgctgaagaagttaccaatactgcggatagcgagagagaaccatccagccttttcaacagattcgtttgtcacaaccggcgtcatgctatctgtagtttgacctcctacatagcctaaatctttgagattgctgtttgttgcactcacataagcaactgtttctccttttttaataggagcaacaactttttgatcgttcataactttatcgtttaacttaaagttgattttagtatgatctttttgacctttttcggtaataatctttaccgaattctttggagaaacggaagcttcttttgattttcctttagcaacatcaattgtttcatgccctttaatctcgccgttagcaggtactacttcttttaactgaaaatgactaaaagcataatccaatatctttttcgtttgggaaaaacgagcagcttccgtagacttgccgttttccttagcattcattacaactgttatgtatcttaccccgttacgctctgcagttccagtgaaacattgacctgcaaaatctgtatgaccagtttttaagccgtctacaccgctgtaggcagctgaaaaacctgggagcatcttattccaattgttcatttttgtttcgccttgttgcccttgtctaaacatcttagaaggagttttagctacttccaaagattctggataatcatgaattaagtgataagcaagggtagcaactgcccgagccgatagaaggttctcatcttcttccttcgttccttttggatacattccttttagcaaagaattagaaagacctgtagaattgacaaattttgattcacccatatttaatttttttgccgtttcgttcattaacttaataaagttttcttcagaatcgctgacagcttcagctaaagcaattgcagctccattagctgagtaaatagccatggcatcatataattctttcaccgtgtatttttggttttcaattaacggtacatttgataatccataatcctgagaaattttagctgcatatttactaactggcacacgttgatcccaagataatttcttatcttttatggattctaatactaggtattccgtcatcatttttgtcatgcttgcaatacctaataaagcatccgtatttttcccgtataatactttccccgtacttgcctctactaagatcgctgcatctgcttcaacgccaatatcatctgttttaggagcagctgatgcttgtgtagagacaaaaaatacgctggccattaacataacagcaatgacacaaattaattgtttctgtactgcgtttctcactctataccctccaaacgtaaactcacataaatgtaattttatcatactaaaatttaaaaaaatagataaagaagtactgttacattcgtgatcaatgacataaaaaacacgtttccctaatagggaaacgtgttttttaaacattcatgattatctcatagaatagttaggagattcttttgtgatttgtacatcatgtgggtgactttctcttaaacctgctccagtcatacgaatgaattgtgcctgttcacgtaacgcttctaagttagctgaaccacagtaacccattcctgcgcgtaaaccgccaatcatttgatataaagtatctgctacaggtcctttgtaaggcaaacggccttcgataccttctggaactaattttttattatcttcttggaagtatcgatctttacttcctttttccatagctcctacagagcccattccacggtacactttaaagcgtctaccttggtagatttctgtttctccaggactttcggtcgttcccgctagaaggcttcctagcattactgtatgtccaccagctgcaagtgcttttacgatatctccagagtatttaataccgccatctgcgataatagctacaccgtgcttacgagcttcagttgcacagtcatatactgctgtaatttgtggaacgcctacaccagctacaacacgagttgtacaaattgaaccaggtccaattcctacttttactacgtttgctcccgcttcaattaatgcttttgtaccttcagcagttgctacgttcccagcaataatatttaactctggatatgcctcgcgaatgctgcgtaccgtatctaaaacgccttgtgaatgtccatgcgctgtatcaataacgataacatcaacgccagcttgtactaatttttcgatacgaacgtttgaatcagctgttacgccaacagctgctccaactaataatcgaccttgttgatctttagctgcatttggaaactcaattactttttcaatgtctttaattgtgataagaccttttaatacgccattgtcatctacaagaggtaacttttcaattttgtattgctgtagaattttctctgcttcttctaaagtcgttcctactggagcagtaactaattcttcttttgtcattacatcagcaatttgcattgaataatcttggataaaacgcaagtcgcggtttgtaaggattccaactagtttttgttcttcttcgttgttgacaatcggcacacctgagatacgatatttgcccattaaatgttcagcagcaaatacttggttttcaggagttaaaaagaaaggatccgtgataacaccactttcagagcgttttactttatcaacttgttctgcttgctgttcaatcgacatgtttttgtgaatgatacctaaaccaccttgtctagccatcgcaatagccatttcagcttctgtaactgtatccattcctgcactgatgaacggtacctttaattttaatgtttttgttagttcaacactcatatcaacgtctttaggtagtacctcagattttgctggcaccagtaaaacgtcatcaaatgttaagccttctttagaaaatttgctttcccacattatagaatcctcctttaaacgacagaatattattagtagattaacaagcagatatgtacctgtcaataacttcactagatatcagataattctaataaaaagaaaaggtgatttagttgcataaatttaatgatgtttggacgtcctacaatttatttttttccgttccttttgtacaagactttttaaaaaagcgctatcaaaaattgaattatagcgatgcagagcaacatagctttaaaaacagttacccatttatttattatttggaacacagtaaaaattattatcaagttgcggcacaatctcctgtatcagttcaaccagttttattattttatggaatgtcacagctgttaaaagcctgtttgttaacgcaaaacccagtatatccagaaaatacggcggtgttagcacatggagtatcaacacgaaaaagaaaaaaacaaagttatgattttttagatgatgaagttaagatccaaaaaagcggtttgttttcacaagtaggagaagaattgtttcatgtgaaacaactggaaggtagtaaatatacaatgaattatctgttgtcgtgcgtaccggaattagatacattatttttaaatttgggtactaggtcattttctcatttaacaactattggatcgcttccagctacctccttgtctattcctgaacaagttacacggcgttatcatatgaatcacgaaaggctctactcttttttaaaagagcgttcccgcctatcattgtctctgtcagaagatcaggtatgtattcttgatccttcaagctgtttatataattgttcaccttttatgtacaatttccaaaataatacgctacatgcacctttggaaaaagatagctgtttatatttccctgagatgttggcacattacttattactttataatttaagtatgatttcacgttatgaaacagagtggtggtatgaattattgcatacatactcttcgaaagattatccatttatcttgaggttccttgaagttacggctcaaaagattccttacttaatttcttgttacttaaatgaacatacaaaaaaggactagctattttagctagtcttttttcaag

SEQ ID NO: 82 - DNA, 15403 bp, Priestia aryabhattai
  source 1..15403: mol_type = genomic DNA
atgtaataagaagtaataaacgtcatttgtaaccattaagtataattgcgagaactatattactaaaagttaatttttagatttactttaacaaataacaaaaggagtatggaaagctcagaaagagtgaactttccatactccttttttctattgtttgtttgctacagtcttttttagaaaaagaaattatgcctattccaaaagaaagagctaatttccagtgtacgaagttagaggtcattattaaacattaggaaaattcatttaagaaagagaattttttcggaattctgtagggtttaaaccagtccatcttttaaactgtctgctaaaatgagaaaggtttttataaccaaggcgactcgcaatttcatttatagaaatatctggttgttgaattaaaattttagcttcctgtaattttaggtcggaaagatatttccttggagacatatggtataccttttggaaaatctctaatccataatttggacttatacctagtgaagcaataatcggttgtatatgaacgttgttatcagtttcttccttatctaaacccaaatctaaatacaaataactttttttaaaattagatcttatagcatctgcaattgcttttgcatactttgtagtggttatagattgttgcaattgttttctttggttttgtgagatgatgtcagaaaaaacttctaataattcaaacaaaacaatttgcactctaagtttatactttatggaattatattctgtgagatctaacatgttgatccatttattaattgtttctcttaacctttgataaaaaggagaagaagttgtatagattaagtcgcagttcttcaacatttccatacgtaaagaaggctcgtctatatcgaaatgagcacaaaaataagtcatcccatcattagatatacatcgattggtatgataaaaacctggaggtataaggataagatcacctttattcaggaaataagtttccttttcaaggatagtttcctggctaccttctaagacaaataatatctcaaaggcatgatgaaattctgctgatgcagaccaatccttagaaaccgtctgcatatgtgcaccaaaaaaacgtatattccaatcaataaatggaaggagttgggcattattaaattcgatagtgttttccattttttatctcctttgatttgggtaaatttaaccttgataatacaatcgctttttaaagcagattaactttataatagaaacagattaaagaaaacgctttcgcttctaggtagaatattgaaatatcagtattagttgggatagtaaactcattataataaattaagaaagcgttatcaaataacgtttcatcaatattttcttatctatgtaaaattataaaagggtaaatgtagaaaaaagatattggaaataggaagtattctaaaggaaaattcgagtcagctaaaacagaacagctcactcgtacaaggaatcaagtttaaagaaatgttagtaaagaaaggaattagagaaatgacaataattaaaaatcctattattcctggaatggcgccagatccatcaattattcgggtcaatgagatatattatattgcaacatccacttttcattggaaccccggtatacagatttttaaatctacggatttagcaaattgggagctaattgattacggattaaaaaacggtgaagttaatttacgtggtaggaatacaccagctggtatctgggcaccacatttatcctacgattccaccacgaatagatactggttagcattttctaacatggtaaatatggcaggtcgtgaatttaacgcagattcatatgcaatgtgggccgaagatataaatggaccctggtcagatccaatttatattacatcaataggctttgacccatctatttttcatgatgaagatggaaaacattacatctctatacttgaatgggaaacacgtcaagggtatcaagcacctggacatattgtgattgctgaggttgatttagataatggggggattattggaaaatggcatcgagtaacacaaggatttaccagccgtggatgtgctgaagcaccacaaatatacaaatataatgggtattactatcttattttagctgcgggtggaacaggatatgcacatggtgtagaaattggacgttcgaagagtatttttgggccatatgaaccgcatccatccggtgaaccgattattacttcttcaccacgacatttattttcacttggtgatccagatgcggggcattttgagatgtataatccaaattcacctatgcaaaaagcaggtcatggttcattagttcaaacacaaacaggagaatggtatcttgctcatctaatgtcacgtccaatagaaggaactctcttaaacccattagggcgcgaaacgtctattcaaaaaatgaagtggacggaggacggttggctggaaatgaaagatggatcaaatttagcaaagtcggaagttgagggcatggacgaagttaaattattcactcgattatcccgtgacgtatttgataattttaataatgaaaaatataacatacattttatgactccttatcgaaatcaagatgttgattgggtgaatacaattgagcgtccaggatatttacgtattcacggcgagaactctttcttttcgcaaataaatccagctattatggcaacaaaggcgacatcatttaattatgaatttcaaactaaagtcgaatttcatccagatcattactcagaaactgcgggtatgggactttactatgattcaaataattggatttatgcccacttaacttattcagaatcattagatggcacagtattaagtttactacaggctaaattaggagaacgcatggaatttgttcataataatatcgcaatacctgaaggtgtagtggagttgaagcttgtctacaattcaggtattgcagatatcttctatcgtttgagtgataatatgaattggcaagtatttgtagataatatcgatgttctttatttgtctgatgaaggcgttaatggggaaccaggtgaaattggtggatttacaggattgtttaattatataggctcggttgattctcatcagcatgactcatttgcagattttaattactattcagtaaaaaattattagtttccagagaggaagttttacatgaatacgatgcaactaaaaaatacaaccgaaataactgaaacaactaattcccaaaagaatactatatcattaaaacgtttagtgccagggttaattatcggaccagcctcctggcttggaccctatattgcaatttcaagtttatttttaccagctttgattcagcatttggatgctgataacaaaattacattaatagcattattttcctcagtagggatgattaccgcggccctttctaatatggttgctggctacctttccgatcgtacgaagtctcgttttggaaaacgaacgccttggctagtttctggagcatttgtatttatgttagcaatgatttttgcctctatgagtaatactattcctttattgttaacaagttgggcactaggacaagttgctttaaacttcattgtagcaccaatggttgcttggttagatttagcgcctgaaaatggtaaaggaacagcttcatctgcttatggtggtttaggcatggcgctcggcaacaatgcttttacaattttagcagccgtttttttagggcaataccgtttgggttttatcatttttggcattataacattcgtgggaacattgattgcagcatttattgtccgagaaccatcaagcttggacgagaatatatcaatatcaacaaaaaagagagaattttctgcaaaagaagcattgaaagtttttccaaattggtctattggtcgtgattattatttagctttaatcggaaaaatttttcaaggggttggaaactttgctgttacaggttatttattatatataatgacagattttctacacaaagatacatctgctacacaacagtctatacaattcattaatataattatgttaatatttggtattatcataggggttattgctgggccgatttcggataagttcaaaatattaaaattaccagtaggtttatctactattttagtaggaattggcgcactaagcattttctttttacaaaataatatgggtatgattatttatgcttttatggctggttttggaatgggtatatggaattctttagataaccttttgaatttaaaagttattcctgataaggaacgcgttggttttttcttaggaatttacaatttagggaatactgcaactcaagctattgccccgattatcgcagcatttatgatttcagcattagggttttcatcaatttttataatgtcatttgttttctccataatcggaggaatattgattctttcaattaaatctgtatctaggtaatttgtgtatactgctttttaaagaaagtacatttcttttgaaagatgaatgcatcgtagcaaaattcttgtctttattgcaatcgacagacataaaagcttattttagttttgtaacaccatttcttaatgtatacatttttagttaccataatgtactttatcggtatgaaatagaaaaaacatcttttaattttagtattaagtaatcgctttcattttctactttctcaaaatgatttgataggttataataaatatctacaaaaatattaaatgatatgtaagtaacaagcaattacacccttaatatttagctaaaagaaaagcccacctctgacaaatcaggtgggtttttcttttttagttgtatattatacacatccttagttaacataaagtctctttccggaaaacatgccaaaagggaacccttacggctcagttcaggcccaaggggttgctgagttgtctttttatagtttatacagctttctctccatctgctactagtaacaaaccattaaaaggaatatgtaaaccatctaatatatctcctaatgttaaattttcgtttataattctctgtattgaccatattaacgagcagccataactatcatttacaccatctctcacctttcctaaataattcttaaacgtagcacttgtccatctttttaggacatcaatatgtctgacaaaattcagagaagctgtccaatttattaggaacgataataaaaatctttttatttgacttaattgttctttaattatatattagttgcgtgcgcaagcaaataaatagaaggagatgtttttttggcaactttaccgataccatttactttaaaaggattagaacttaaaaatagaatcgtgatggcgcctatgtgccagtattcagtagataaacaagatggtacgccaaacgactggcattttgttcattatacttcaagagcagtaggtggaacggggcttatcatcgttgaaatgacaagtgtcgatcctgaggggcgtattacaaatggagatttaggattgtggtcagacgaacaaattcctgcttataaaaggattgtcaatgaagttcataaatacggagcgaaaattggtattcaaattgcacatgctggtcgaaaagctgaggatgcaaatcagccactaggtccctcggacaacgcggttgatcctttaccagaagaaagcaaaaatggagaatttaaaccaccaagagctttgacaacagatgaagtaaaaacaacagtagttcaattcaaggaagctgcacgtcgagctgttgaagctggttttgacacaattgagcttcatggtgcacatggctatttaatgcatcaatttctatctccagctattaacaatcgcactgatgagtatggacaagacctatctagatttggaatggaagttattcaatctgtacgtagtgtaatgcctaaggacatgcctcttatcatgagaatgtcagctattgaatatatagatggcggttataagattgaacatgctattgaaatggctaaggaatttaaaaaagccggtgtcgatatgtttcatatttcaagtggtggagaaggccccccaggcaaattaaagccggcaaatcatccgggttatcaagtgccgtttgcacgtgcattcaaagaagtgttaaatgttcctgttattgcagtaggtaacttaagtgacccacaggtagcagacgctacacttgcaaatggagatgcagatcttgtagctgtagctagaggaatgttaaatgacccatattggggattacatgctataaaagaagtagctcgaacagtaacacctcctgtacagtacgagagagcaatccggtaagtttataaagtatttccttcttaaataactctagagtcttgttccaaactgtatgcatacggtttgaaacaagactcacactaataaaatatttaacaaaggagactttacaacatgacaaatattacacgaggcattgaccatattggagtaacagtacccgatatcgaagaagctacagtgttctttagaaaagcgtttgacgctaaaattgcttacgataataaaaaattagaagatgaatctttagccggacctgatgtagaaaaaacattaggtgtcaaaaaaggaacaaaagttgttcatatgcgcatactttcttttaaaaatagtgctagcatcgaactatttaaattcgcaaatactgatcaacgaccaccttctattgcttctgattacggtgttcaacattttgctttctatgtggatgatataaaagaggctgctaatcgttttgttgaagcaggaggagaattattaaatagccctggcgaattattaggagatgtcgaagacggaacaggccattttgtatatggtcgcgccccttggggaatgttaatcgaacttattagctatacacctaatgaattagattatccagaagatagtgaagcaaaacgtttcacaccttgataattaatatcaataagttgactagttatatataaaataacaactcaaaaagcgaatttctataaatcattataggaattcgctttttattccatgaaaataataacctatattttattcactaactaaatgaatgttgctaaacaagtgataacgaacagataactatcttatgctttttttatctattaattagtagcaaacattaagtgagactgatctaattattcataggtttctctttctctaaaaaattgtttactatatactttaagtacacatcgtagaagttaatatattatttataggaaggcgattactttgaataaagaaaaaaatgcacttaatcattgggtcaatttttctaaataccacaatagaatttcaaattctctggatcatatccttcaagagagatatcagcttggacttaaagaattttatttaatgatgtttttgcatcaatcagaagagaagaaacttagactttcaaaattcccccaaatggtagatctaagcctgagtgctgtttcgagattagtttcaagattggaaaaacataaatttaaggcagtaaaacgcgttactttcgaagaagacaaacgaggattttatgttgaactgacctcagagggagaaagacatattgttaaaattattgaagaagtaaatcaaattcttaatgaatcaatgtctgaaaaagacattgataatatgcgtctattcacggactaaaaaaatagaaaaaactaattttgaaatcgacaataaacgtaacgtcatatagtagaaaaaataactaacactttatttaaataagcactggctatttcctattttagttagtgcttatcttaaatacgtttttatttttctcttacataaaacgaacatcaattagcttacttaacttcattttattttttgatccgaatacttcatctatgaaaataaataaatccccttcaagtagcgctacgagaacactatcctgtgtgatcaataacaaggccatgagagccgtcagagaaacgtccatcagactgattcgctaagaccttttgctacaagaatagagaaggccatcgtagcatttccagcatgctacgatggccttagctgttgtatacagcgtgctgaggaaaaacaccgttatcggcggctttccgaaaactttcggaaagtctgtgcgacgcggtgaaaagcttctttcggttcccacggtggcaatgactgtgaacgtgggtcatcgtgggcaaaagtcttgaccaaagcgaaggaagccaaatcgtagtcctttgttccttcaccaaatggcaacactggtttagagaactcgaacacaaagacggcttcaacatctgctccattgagaagttccagctgtgttccaatgtagtctgcttgctcccactcgctgcgtttcgggactactccctcttgaaagattccagtaccatcttggtttacaccctgaagaacagcaaagccgccgtcaccaagcttccctgctccttcgtatgcacagcacccgacctccattacagcaattggaattccttcccttcggtaacgatttaaacctgctacatactcctcatcggtttccgtgtgtcgatagtagtcgactcccacaatgtcaaagatgctccagtcaacgtcttcccacaagccagctgagtacgttatttgtcctccgaagactggacgaaccgtttcaacgaaggacctaagtgcttgattgagaagaactgccttttctgctaaggtattggaaccgccagggcctgagttaaggttctccgactgcgagctaagccacatgccgcgttctgcccatgagtttccagggaagatgccgtcactaaaaatcgttaattcgcagccaatgacgaatacgattttaacccccgaaagtctcagtcgctctgcctcttttgcggcctccgcaaggtaggtctgaatctcctcgaccgtcgcgcccattttccagggattaaagaagacggtaagaccgaccttatgagctatgtgtacagaggttacgagacgactgatttcttcaccttcaactcgtattgcattggcgtttaagtcatgggcaattgtgttaatgtcatactccacgagtgagggatcgaaaggttcgacagatagtgtatcaggcgagaacctcaatccaacatcatagacaactccgtagtatttcataataaatcttcccctcctattattgtgacgcctgcatggcactgccaggcaagccttttgagatacatttcattaaaggaagagatcttaacccattatcataactatgtgttctatgatttagtgatctattaaataggaaactctcatctcttcagcaggaaattcaaatgtataaaagtttttttctaaatcagataaaactcttgttttgtccagctttaaaccatctcaatcctcggcattctcatccttttcttcaattttatgaagttccttaattactgccttcatcaatagctttgttccctccatcacagtttcttgttcgtttggacttaggtgatttaatgcttctacaatagacctatttacaaattccatttgattatcttctacatatctatttgcatcgtcagtcagagaaatatctactgagcgcttatcttttgggcttggagttttaattaagatattcctttttttaagtctttcaataacttcagatactgtactatgggtcatgcttaagttttgagaaatctttttaatactaatattttggtgtttaaatacctcattaataacaagcatttgcggcacagtaatgtctaatttctcagcttgtttttgaaggtttttttttacataataatttaaaaaatgaatggattcccgaataaaattagcatttttcatcttagtcaatctcctttctttcataaatatatatcgtgtacgatatatatttatgctattataacaaacttgacatgtcaatatttaaactaatgtacataattagaaaacaaattgttattgctgtaactttaatttttttgagttcatttgaatatttcctataatattttgaaacttaaacagattatagagataatagatttttctacaaaataaaagtccgtaaaagtatacttttacgaacttttatttcagataagaaatctatcatttttatcgttcatttaagttcaaaaacatattacgaacgcactttgaaatacacacacttttacgaacgtttttgatagaatgagaggaagagagacgcaaaaagagtataagaatggaaaatagaaaatttggatatatacgtgtgagcagtcgagatcaaaatgaaggtcgtcaactacaattaatgcaagaagttggtatttctcctcgtgatattttcatcgataaacagagtggaaaaaacttcaatcgagaacagtatcaattattaaaacgaatgatccgtaaaggggatatcctttatattcattcgttagatcgcttcggtcgtaataaagaagaaattcttgaggaatggaatgccattacaaaagagattgaagctgacattgtcgtcttagatatgccgttgcttgatacaactcagtataaggacagtttaggaacattcattgccgatttagttcttcaaattttgtcttggatggctcaagaagaacgggaccgaattcgtaagcgacagcgtgagggtattgatgctgcgctgaataagggagtatcttttgaacgacctaaagctgaagccaataaggagtttattgaagtttataatcgatggaagcaaaaagaaattacagccgtacaggcaataaaggaagcaaatgtaaaaaaaacaaccttttataagtaagtaaaacaacatgaaaatacgcttgaagtgactactttatagtatgaagaaactcgtctaaaattgtttacttcttagagaaaagcttattttagacgagctttttataatgattatgaaataagtgttaacttttaaaacttataaacgttaataatgaatcatacaataaaaaagattagtatacatacagagctaatttagaatcgctaaaataaataacctccgaaaggattttaaagccttggatttctttaaaggcctttcttgcttctatttcgttttcatattcaaacattgtagtagtgtttagatttgaataagtagtgattatccacataaaaatagctcctttatttgtattgactttaaattcaagaaatatttttctctatttctacttttgttatattccttctgctttttgtaaggaagaacgatcctataatgaataaagctattagtaaagttaaaaagaactgtgtacgtaaagaattaataaaaggcattgcgataaaaatactagtaatgcccacaatcgtgccgtatgttaagtaagggaacagccacattcttattttgagtttctctggctgcttcttttcataacttttacgcatacgtaattgagagaaagcgattaccaaatatacaagaagagcgactcctccagaagcattgactagaaacaaaaaaatcttatcaggagaaaaataattaaaacctacgctgatataagagataattgtacagcctataattgcattaaagggaattccttttctattcacctttaaaaatagtttaggggcatctcctttctgagccatagaaaataacatgcgagaacttgtataaagacctgaatttaagcaagaaagtacagctgttaacaagataaaattcattaattgagctgctgctggaatattgacgatttctaatagcgatacaaaaggacttttcatcaaactagaagaatcccaaggaagaactgttacgagaattaggatagaaccaagatagaaaagtaaaattctgtagatgacggtattcgttgcggatataattgctttctctggatgaggtgattcacctgctgctgtggctacaatctcggttcccataaatgagaacattacaaccgttactcctaaaaagattgaactgattccattgggaaggaaccctcctctatgaaaaaggtttgatgttccaggtgattctactcctggtatgaaaccacatatgatagcccctccaaggattaaaaacagaacaagactcactactttaattaaagaaaaccaatattcaaattcaccaaaagacttaacagaaaatatgttagttaaggttaatagaaaggtaagagttaggctcacagaccaggatggcaaagaaggaaaccaatattgaataattgttgaaccagctatcgcttcaacggcaataacaataacccaaaagaaccagtacaaccaaccaattgtatatccggcccatggaccaagtgcttctctagcgtaagtagcaaacgaaccactcgatggattggctgttgacatttcacctagcatccgcattactaaaatgactaataaaccagcaaatgcgtatgagataattgaaccaggacctgcagtattaattaatgttccacttccgataaatagtccagcaccaatgacaccaccaagagaaatcatggtgatatgacgcgtttttaattcttttttgagctcaggctgttgatcttgcatatcttataacctcctttgtaaaaatgaatatacttatctattaagcacgaaaatttaatagttgagcagagaagaaagccattagaaagagcctttgctcacataacaagggctctttaattcttagcagaatctcatacatatataaatattacaaaaattcagaaatttacttagaaaagaagccttttagtgcaaatgcaacattttgtggtctttctgccatacgacgcataaaatatccaaaccagtcatttccaaaaggaacatacacacgcattttgtagccttctttggctaaactcaattgcatatcggttctaaatccatacagcatttgaaactcaaactgattacgattaatttgatgtttttcagcaagtccttttactttttcgataatattatgatcatgagaggcaattgctgtatagcttccacttaataaatgttcttcaataattctcatgtaattattatctatttccttcttttcttggtaagctactgtaggagattcttgataagcccccttaaccaatctaagagaaatgccttttaagtcttttacatcttgctcagctcgaaataagtatgcttgaataactgtacctacgttatcacaaccatatgtttgacgtaatttttttaagatatctaacgtaatttggcaatgtgcatagtcttccatatcaattcgtacaaaattattatatttttttgccgtttcaaggattcgacgcatattttccatacagaaatttggatcaatatccaaaccaagctgggtcattttaacagatagattacaatttacccctgatttccccatagcttctaatgtacgtacgttatattgagttgcttctatagcttcttctctactggatacgaattctcctagatgatcaagagtgcaaactaaccccttttgatttaattgatttacttttacgatggcactctcaattgtgtcccccgccactacttgagaagctccaaatttaagaccccatttttttgcagccttatttagtactctattttgagaagcatgaagaaaaacattttttgaaacctctgccaacatgaaaatttccccctaaatatatatacgtattatttttaggtgggacagcctggaaaggctgtcccattgtttttaaagtgctgtacttgttgtttttgcttgcatgtgcaggattaaataatcaggtcctcctgcttttgaatcagttccagacatgttgaatccaccaaatggatggtatcctacaattgcacctgtacaaccacggttgaaataaagattacctacatgaaattcttcttttgctctttcaatgtgagcaggtgtattagaaagtaatgcacctgtcagagcatagtcagtattgtttgcaatctccatcatatgatcaaaatcttttgctttacagaacgctacaaccggtccaaaaatctcttcttgcattaaacgtgctttctcatctacatctgcaaagatggtaggttggatgaagtagcccttagaatcatcagcttctcctcctgtcattaatcgaccttcttctttgccaatttcaatataagataatacttttttgtaagaagcttcatggatgactggccccatataagtcgaaatttcttctgggtttccaactgttaatgtttttgttaatgtaactgctttttcaagtacaatgtcatatacatcttgatgaaccacagcacgagaaccagctgaacacttttgtcctgagaatccgaatgcagagtacacgatagaagatgctgctaaatctaaatcggcatctttatcaacaactactgtgtcttttcctcccatttctgcgattactcgctttaaccatttttgtcctggctgtacttttgatgctttttcatagatacggcaaccaacttcacgagaacctgtaaaggaaacaaaacgtgttttaggatgttggactaaatagtcaccaatctcaggtgtaacgccaggaataaagttgagtactcctttcggaagtcctgcttcctccattacttctacaaattttgctgctacgacaggagttgcatcagcaggttttaataagattgtgtttcctgtaacgattgctgctgctgcagttcctgccataatagctaatgggaaattaaatggagaaataatgatgcctacacccagtggaatgtaattaaatttattttcttctccttcacgactttgtaccggtaccccatctttaagtttcagcatttgacgagcataaaactcaagaaaatcaatggcttcagctgtatctgcatcagcctcattccaaggtttagcagcttctttaacaagataacctgagaattcatgcttgcgacggcggataatatcggctgcacggaataaaatatttgcacgtgcttctggagcttcttttttccatgtgttgaatgtagagagtgctgcttgcaaagctttttcagctaattcttggtttgttttagacactcgaccaataacctctactttatttgctgggttaatagatacaattttttcatctgttgtaattaactcttcaccaataaatagaggataatctcttcctagttcggattgtacagtttctaaagctttattaaactcttttttattttcctcaattgtgaagtctgtaaacggctcgtgtgtatatgctttgatttctgtaagagttgttgtcattgtaatattctctcccttaaaagtttta

SEQ ID NO: 83 - DNA, 15174 bp, Priestia aryabhattai
  source 1..15174: mol_type = genomic DNA
tagtgtttagcatgtgtataatattgatatctagttaacataaaaccatttatcggaaatcttatttctaaaaaacctctgccaagaagtagagattcaatcatttatttagctagttctttgactaaattaataaagtccattgaatgctgttgatttttctttatcatctttactcttttaggatctaaaaggatttttttgatctttttattcttccaaataacagtattgtaagatgggactttatataaatctctaaaccactcttcagatgttaattcttctatcgctagttttagttttgaataagaagttggcctcattaaaatgccgtaagacagtaaatctttaaactcctccatctgatcaccttcccatattcacattttattggatatcagcacataaatgactatgcatactatatacaaaaaaagtttacataatacctctttccagaagacatacaaaaaaggaatccttatggaaataaggattcctaagacaaggaagttacgtattcattgggcagcttcttcccgtagacgctttatatcttctctaggtggaaaaccaaacatacgagagtattcccgactgaattgcgatggactttcatatcctactctaaaggctacatcagctatatcggttgactctgataataataagcgccgtgcttcctgcaatcgtagttgtttttgaaactgaataggagtcatagctgttacttctttgaagtatctatgaagcgaaggaatactcatattcgccatttccgcaagttcttgaatacgaaatgattggtcatagtgatccatcatttgtttgataacatgccggatttgattggtatagctaccctctattgctatttgttctagtataaatccattaggacctcgtagaattctataaaggatttcttttataaataaaggagaaagtactggaatatcctcaggagtatctagcaaacgtactaacctaacgacagcatctaacatagatggctctgtcggactaacgtacattcctcttttcgtatcttcattcaggccgcctcgaacttttttagcaccatttaaaacatctaagatttgaccaggcgtaaattctagtttgagggacaaatacggaacattaggtgaagcctctatgactcgagcagtagccggtaagtcaatcgaagcaacaaggtaattggcaggactatatctaaagtgctcctttgctagaaatacttctttcataccttgcacaacaatgaataaggcaggtttataaaccgcatatcttggctctgtaatagtagaccgacgagtaaaaaataaagatgaaatagctgttttgtgtacaccatctcgacctgaatgacactcaataagtttggcgagctcttcttgttgcttataaatttgtttagacataataccctccttattcctttatcttttcttgatagtgtcattataatgtatgtttgccttcctacgggagtatttctgataagattaggcaaatatttgagaagaatatgataacagtcacggccccatttattgcataataatgaggctgaatatttcactgtgctttattttagcgcaaatatatatttaatcaattttcaatataggagtaggtgaaataaaatgaaaaatacgtggagaatttatatgctaacctttatcacgttcttgcttggcacgtcacaatttgtgatagtaggaattctagatcaagtggctgattccgtaaatgtatctgtaggaaccgcaggacaactaattactatctttgcagttgccaatgcaattggtacgcctgttgttatgattgcaactgcgaggatgaatcaacgtaataggctcctaatggccctagttattatgttagtggggatcgtagcgaccgtggctcttccaggttttactttcctaatgctcgcgcgtgccatacttggagtaggaaatggcgtttttgttgctactgcttattctttggctccgaagctggttcctgctggacgtgaggtcagagcaatgtcaaacgtcgcattgggctttagcgcatccctagttttcggtgttcctctcggtcgagtaatcgctgcttcatacgattggaagataatcttttggggcattggagtctttgctttgctgggaattttcgctgtcgcaaagacgatcccagctatggaaagcgaagaacctgtatctctcggaaagcaacttgggctcttaaaaaacccgagaattgttattgctctaagcgttacactcttgatgtttatgggatattcggtagttaatacgtacattactcctttcttgacctcagtggtgaacatgagtggaggaaaagtaagtattgttctgttcattttaggtatagcaagcataattggttccaagcttggtggcgttgtggcggatcgtctgggtcccatccgcacactcataggaggaatgggcgtccaagcaatttcccttatgctgttgtcggttgtctctgagcaggcaattgttacggtattattgcttatgctatggatggtagcagcttggacgttcttaccgcctcaaaatttcactctagtctcccttgctccagatgcttctgggattattcttagccttaacaactcttttgtacagcttggcttcgcagctggtgctgctatcgggggtggcgttgtaggaggtttatcagtaatggctattagttggataggtgcagcatcagtagcattgggagctatcgttgcagcgctctcttttgctcgtggaagatcatcatcaagttcaacttaaccaaggaacgaaatgaatgaattactttcaacattggataaattagggttaataattattaaaactataggtgagttatatataaattgttgctggacaaagcaactaaagaaaaaaatatcttatacttatggaggaatatgaatgaaatatacagtaattactggagcaagttcaggaattggatatgaggcagcgctagcttttgcaagacgtggaaaaaatcttatactggctgcacgtagaaaagatcagttagaacaattaaaagctaaaatagccgatatgagcaaagatttaaatgtcattgtaaaatccgttgatttgtcaatatctgaaaatgctcattcattttatgaatcactaaaagaatatgatttagaaacgtggattaacaatgctggttttggagacttttcctctgtgggagaacaaaatttaagtaaaattgaaacaatgttacacttaaacattgaagcattaacaattctttcttctctattcgcaagagattatgaggatgtggagggcacacagattatcaatgtctcttcaagaggcggatattcaattgttgcgaattcagtaacttattgtgccacaaaattctacgtaagtgcatttactgaggggcttgctcgagaattaaaaagaaaaggttcaaaaatgcaggccaaagttttagccccttctgccacagaaacagagtttatgcagcgctctcatgatttgaatgagtttcaatatgcaggtcaagttcctaagtttcatacttcaaaagaaatggctacttttatgttagatctttatgatagcgataagaccgtaggtattgtagataaatctacgtttgagtttcgtttacaagatccaatttttccttatagtgtaggaacgacaaaacgtccacaatcctaatctttagttatatccgaagtaaattatataacattttccatattgactacttattaattagactgatatgaaaatgaaaagagaatctttacaaccttaatcggataaagataaggaattctcttttcttatctttatatagggatcatattagagataaatacatatgaaacacagcttagagctgtatccctttttgtaattttgcatcagaatcactctcttagaattaattgtctaaattatcttctattgaaaaggaggtgcagtaaagctttataagctttaccacaaaatgcaaataacaaaaggaataaaaacgattgaattagtaatcaatttgatggggaaatgcagtgtgatacatccgacactaatttggaatgacactgaagctattttagtagatactggcgttcctggacaatttccaatgattaaagaagcaatagagaagtccggtatagcgtttaataagctaactaaagtaattcttacacaccaagacatcgatcatgttggtagtcttcatgaaattttagaggctgttaattataaaatagaagtagtagctcatgaaaaagaaaagccttatattgaaggtgaaaaatcgccatataagatgacacctgaacgattagctaaaatgacagagtcctttccaatggaaaaacgaatcctatttaaaacatacttaacttctcattacacagtagataaagtaattaatgatgaggaattcttaccttattgtggaggtattacagttatctttacccccggtcatactccagggcatattagtttgtatcatcatcatagtaaggcattaattacaggagatgctcttgtagcagaaaatggcgttcttaagggtcctaatccacaagtaacaccagaaatggatactgcttttcagtcaattgaaaaatttaccaattatgatattgaaactgtaatttgttaccatggtggggtaattagaaaaaacgtaaatgaacaaatacgaaagttggctaattctattaagtaataatttgaaattcacaaccctagccgttagattactacaattaaaacaaaatccatcttatccaaaaggaaagttcgtgaaagtatactcttatagttaacataagacacattacaggaacaaaaaagcagttgaacatatctatttcaactgcttttttctttgatattatttatgagtagttttaaaagaaactaaatgtacagctttcagacttagagttctcaatagcttataacttaaatagcctatataagcaccaacaacattgaggataatatcatcaacatcactttgtcctctatgtgctacaaattggataacctcaataagaaaactagctgagaacgaataaacgagaacattttttacgttagtacactttttaaataacacaggtaagaaaaaacctaaaggtgcaaatatagctatatttccaaataagttatataaaatcgtacttaaattaatatgatcaatgccagttgcataccacataattgatttaaaagggataatatttatattcatcttccagtcatacggattgtatacgccagctgacgaccttcctggtccccctattaaaataatccatacaacaaatgcataaaaagaaaacaacacaccacttaggatttttaaaggcattttataaggagaaatagccttatttaattctttactcagagctttttcatttccaaatgcttgagtagccagtttgatagcttcttcttcactatatccatcaacgatatactcttctgtgagaagtaataggtgatcttggagttcagattctaactctcttttttctccatctgacatatctgtttgttcaacaatatgcttgatgtagttctttaactctttattcaacttaatccctccgtacatacttgaataagacggtttacttgtctccattcatttgtttttctgtttagttcttcttttcctatgtctgttaacttgtaatgttttcttcttgctgcagacacagattctccccaataagattctaaatatcccttcttttctagacgcttcaaagccggatataacgtaccctcgctcatttgatataagtcattacttttatcttttaaacttttagcaatttcataaccatatgtataaccttgtgcaatgacagagagaacaagtatatcaatactccctttcataatttccttatccataattaaccacctctaatacattgtaattctatatacatcgtattacaaggttttaaacaaaaaaatttcaaattctatgtatatcgtatacaaagcccgttaacataatcaaaaattttctttttcttgtctttaagtgtatacatttattactgcttattcgttgtataagtacagggaggataaataatgaaaaaagaagacatacttgcctcctaccttatcgatttaggagaggaagtgctcaaactattactagctaagggcgctacaaaggaagatgcagaagacatcattcaaaatacgttttacaaggtatacacattattagatgatctaaaagagagcacaatacgtccgtggttttttagagtcgcacttaatgaatacatagacttaaaaagaaaaaaagagcagaaaaatatctatttaacagagaaaatttattcgaaattacaatatacagagtgcgaattcgatgccattttaaataaaaatgaaatcttttttttgttaagggatataagaaaagaatacaaagaagtcttttttttaaagtattactatgatttttcatatgaagagattgcagctatgttagacgctaaagtaaacagtgtgaagcagaaattatatcgtgctcgtaacttgattcaatcaaaagcaggaggaaaacgttaatggaaagttctttacaaaaagctttacaaaaagccaaacgaaaacagttttttaaaattatcattatatcaattattattgtacttgttgcattaactactatttataaagctggcaattactttgcagctaaaagtactacaaggcttcacgacgcactttttttaaataatgagatttctcagccaaatgtccaaattgactctcaagtaacaagtagtagcacaatgtttggtggtaacattgtgacgaatcgttctaaaaacattgatggctatgtagtccagtggagcacactaacaagttcttatgactggtttagatctaatatcgacacaaatgagttagtaccaggattttattggcatagtaaggaactctatcagtatgataaacaaaccaaacagaaagtagggactttttatcatccatctattaaagattactatggaggcataaaaaacgatataagtgcagtctcacaaatgaaaaatcatgttgctgaagtagctatttctttcaatgaaccatatacattgaaggaaatacaaaaacaaattcctgataatttgaacattgtatggttgtatatggcgtcgcctattgtagatgaaagtaaaggacctgcaggtatgcctgtttatgggtttgatccatctgattcaccgaaagagagctataatgaatttatcaagaaccttaaaaagtacaatgcagatgccgaagatgaaacaattcagaagtttttagcatcaaataaaaataaatcatttgataaagttaaaattttaggggtgatggtgacaggccaaacccaaaattttaaagcgttagaaaataaagattttattcgtggcgcctctgtaggggccacggcacaaatggttccttatatcacaccagagaaataattgggcagagaccaagtaagtatttggtctcttttttgtttctttaacagagaatataaaccctagttaacgtaatggattttctaggaagggaatatcaatcactaggcattaatattctttaacttaggaacagctcccaaactaattttcaatagaaaaaagggttacaaattcaattgtaaccttttttcgacgtgttttttgttttatatgattcctataatgattacaggactgaagtatggttcgaaatagcgtttattatatgatcccaatcgtcaaagtgaatctcgtgacttgatcctttaagggataacaacaaagcattcggaatttcattaacaagggcaagagcatgatcgtatggaagcactatatcctctgtaccatggataactaaagcaggtacatcgatttcttttaacttcccctcataagaatcatcgcctttaagaaaggcgtgattaaacatactgagtagattatttgctcgttttatttctttttctacctgcttataagccctctgctcatcgaatgtatgctttgaaccacagagtaaagctgatcctgcgaccaagtagtctgcaacagattcttcatccgaccaatttagtttcgctccattagcatggtaagcgagtatcttctcatccatcggagataaattccgatggttgtcatcagaaccaaaaatacccgatgcaatcatagttatacttagaactcttttggggtaccttaaggccataatttgagcgatcattccacccaatgacattccaacaatgtgcgctttgtcaatatgatatgaatcaagtacccctacagcatcatcagccatatctatcaccgtataattggaactcccgggctcataagtaattgaccgcccgacatctctattatcataacgaataacatatcggcccgtatcagctaattgttggcaaaattcttcatcccaataaaccattgaacacatggctcccataatcagtaggactgcaggatttttgggattgccaaaggtctctgtacatatatcaattccattaattttattaatcttttcattcatgattaattcctcatttcattcgtatttagttaattaaaaagacatagttaaataaacccatatcttttaaagaaaaagatgagcataatgaactatatttaaaattaacgtaaacgaatgaatttgataatcatgttaaatactctcctataaaaagggattaagggttttacccttattgtgattataacatatctctgtcagttataataagagcccatattcttagtaaaaaagaagatgtatacagtatacaagctcagttaacatagtgtacgttccaggaaccaaaaatcttatcggagaaatgtgcaaaccatctaaatgtgttaacattgtaatttatagaaattatagaaattttaagggtggtattatgggtacatttagtccagcaggattgctattattcttaataattatcggcttaatagtatttctaggttttaaacttgttaaaaaattaaaaaataaataactaacaaaaagaacctactacattaaagcagtaggttctttttgttagtggttaagatatcaaaacttaattaacataatcaccgttctaggtagtaaaaacaaaagatggtgaaagaagtttctctttcaccatcttttattttgcttttaaatcaaattcttccgttttaccgtcccatttgatagttacatgaaagggtttggagctatcttgttttgcacatccttcacaagcatcattgatactcaatttgccatccactggtgttgaagttttatcgatactgccataatcaccttcaattttatatgtaacttctccaatattatctttattagatcctttataaataatgcttccctcaccattttccctatctttatcttgagttaagaaatattgtgatttccaattatcactttccccttcaaagcgtaaactcttatcttcttcactacagctagcaagaagaagcaatgaacaagtaaataccatgactaaactgagctgtctaaatttcaaatttatatcctcctaaaaatatctatttttatgttaacacatccaatttcgaataaggagaaaaatgtatattatattcaatgctagttaacttaatcaaaattatagttagtcattatttgattctcatgataggatcttggtcatgaaatcctatacacagtgggacattaactttcataccttgtgcaactgtccctaaagctgtaactgttcttataactagaaagagtgttacggcttttgctttttctgtcgcatcaaacccattctcttgatagatttgagcaaaatctctattaatgggcccttcaatttcggcaatccactcactagcccaatcatcatcctcttcagacaagctactatattcatcacaaacaaaaaatgtgctttcccactcattatccatgtcatattcaaaataaatagcttctacggattgtttgtttgctatatacaaagctttttggagactactctttaatgttgtttgaaaaatatctaaatttacattccgaatcctttctgctacgttatctcctgcaatagtagaacataatcgataatacttagcttcaatttcttcaaatgacttttgaaataagtctacttgcatttcctctaggtaatcaaagatatccattaggtttattcctttctataaataacgtttagataataaaaagtaactataactaatgtataccatatacagagctagtttacataaacactctttccggaaccaagcaagcaaaagaacccttgcggcagtagggttcagctaaggatccttttgcttgagtatgcgtctttttatacatcgttgatatgactacgttctttgggtagttgaaagaaacgagaatgtataaaaagagctccttttatacatatgcttttacgggaaaatatagtatttgtagcaaaaatgtgctaaaatttactagaatccgtttatcatacgctttatacgtgtgaaccctgtttatgagctacctcgcttccactgccgaggtagctttttattttgcttaccttttgactggacaaattataacctaatactatattttagatatgtacatgtatatttcacttttatcaactattaatagcagctatgatcaaccacacatgtaagaaaagccctcaattaattttgagggcttttcgcctatttgtcgtcatcaaaagtaaatacttaaactaaatatttttatgaaatactttatggttcacttaatataaaatacattaccgaaagactaatgtgtataaagacctcaatcccttagatgagggggaatgctatatgattttatatgtttaaacttaacgaattttatactatctttttctggtacaagaggacttattcgaaatgtaaaacgatcctttccaacagaattatgagccccaattgaaggttctgtttcgatagtaattaagaaatcaaacccacgaaatccattcactctctttgccttaataacattcatatcataaggataaacagtaactctttgctttaactttttaaaatagtactgattagctacttcctcaacttgtgcatttaatataagcatcaacatatcgttatatattaagactcttgaatctttagttgtatcaatgtctttcgttttagcataagagattgtatccaatccagtactaagcaaaaatataaaacaaatagatagtaataatttcttcagcatagatttctcctgttggtttaattttttttagtatttctttcccaacttaatctatgtaaaattgagcaatggctataacagagactatccataatttataaggatatgaacggtctttgttttaatgacttcgtacgctatatatagcgaacagaggtatgaggatatatagtttcttagttaaagtagcatttttagtttataacctgatccttttcatcgtaaaccacaattttataagcatcactttcaattaacttcttcatctttttggactggaaaaggacttttccttctttttttctaatatcttatttaaattgttaaaatctcgaaccacttccagcattgataatttcttcgctaataatttccctttttttatggatttagaagcctcatcaaataaattcgcttttatttgagcatctgcaaggcaataccagtaataccaggcatccaattttctaattttatttttataaaacttttcaatagtaggataatatgtagaatataattcttgatcataaactagtttttcaccattccattttaatacatctacaagataactatcaccgatatacatatgccaagttgtaataccaaccttttggttcccttttactagatctattttatggtatggttcgtcttcaatttctttgaaggatgtatcatcccaatgaataactttaaggtgacttcctgctggttctccaattgtaactccccataagtagtccttcacaccattccctgtaatatcagctagtcctgaaaagtctaaatctactccttgaacttggtcattaaatagctttctccaatttccatccttttctttttttaagatcattactccaaattgagaaggagagggttgctcttttgctttaatttcataggtaataatgatttccttttgtccatcatgattaaaatcataaaattgaatgggttttgcggatgttggtctatcagcttttataagaattgcattagatggcttgaagttttcaactattttcattagagaaggcccctgaagttgctccgccctaacaagtattgaagaaaaattcatccctccaaagatcaataaaataattagtgtcattttcattgtaatattccacctttaaaggatattacaattagtgtttccaaaagtagtacgtatattatggaggcagttaaatacccatctttaggtattctttgtagttgggggtcataataatatgttatattgtctgaaaatagaaaagagtggagtggtataacatagataatttcaatagtatatctaattatcatcattggtcttattgctctatttgttgtatcgtttacactattcattcgaagattgcttattaattcttcaattaaaagtagtcgttcaattgaaattgagaaaaaactcgataaaatcttagaattgcttgaaatagatagaaaaacctaataaataagggttagtaacacctgtaatcttaattaccataatcaaaattataggtaacaaaaaaggtccttgattaagaggacctttttttacattacatctaaatcacgtattctaattgaaatttcattatcgttttcaacgtatatattgaattttaaagttaaatcacttcgttctccatcatagtataaactaaaggttccctcatagttaggtggagacttatattccacctcatatatatcaatttcatcttcccaattctgatatgcttcatttggaggtaaagtcattttaccagggtaatatcgtaattcttctctaatttctgcctcagttatttcagaaaaaccggaagaaacaatgttttctatattaccttcaactaattggtgtatcaatatcttcaatttttttaccgtttctttttttaaagaatatgtaatcattttagttctcctatatatattatgagttccatttattatatcagttttactctgatattcagtgtacaaagtatacacttttagttaacataatgtctctttccgatacacactccatttataaatccctcgtagatccagaggttgataaactggaatataatattaatatcaaatatgcaactttgatataaccgcatttattggatacccaagtgggaggaaggtgtataaaaagtgcacgctttacattaatattgaaaatgactatttattatttgggagtgaatttgaaattaaacatctttgggatagatatgtaaaatggttgaaaataaactgcccagaagcattaaacacattaaagagtggtgcagataagaaggatattagcaaaacagaggaagaattaggggttgaatttcccgaaagcctaagggatttactaagtattcacgacggacaagtagacgaagggattggggtaataggtaattattatctattatctttagatgagatcttatacactcagtccactatgaaagaattactagataatggagattttgaggactttgagccaatagaagctattggtcctgtgaaaagagatttttggtggaacccgaaatggatatctattgcaactaatggttttggagatgacatatgtattgacttagatcctgacattggaggaaatgtaggtcaaattattaccttctggcatgattgggaggaaaggaaggttatagcaaaaagcttagaggaatggtttgaagaagtactagtaaaattagaaaatggaacatatagattaatcgaagaccaaggtgaattgatgtttagtaaagacggctttacagaatagtctacatccgtactttaataattttaacctttaaaagagtagctgttggtaaacagctgctctctttggtactttataccgaggctaatcaaggttgtcccatgtagccacaaaaaagcttttataagaaccttagtactaactaactgacgaaagggattttttaaaaagcccatgataacaagacattaaaatttctaaagctctgaagtgctgaaatttgcatcgaatgatctcatatacacaaaatcaaacttgattttctcagagagcgtttctctgcgtatcaaatgcagacatctaatttttttcttactttatacaatacctttaaagagacaaattcattaatgatcatccagacatctatgcaactactttttaataaaaccatttttaaataaatcgtaccattcttctagctctttcccttttaaaacatccaatttacttagaatgtctcttgaaaattctagtgcaccactaccgttagctgtaattagacaaccatcactaacagattgtgcttctatatagttttcgtcacctcgataattaggggctccttcttttaaataaggtagtgaatttcctgtatgtttattttgatcaagaaacccataattacctaaaaaggtagttgcatcacaaatcgctgcaacaggaatattacgttcaaaacaaaaactcacaagtttctttacctgatgatttttctcttctctccatccagttcctccaggaataattaacataacaaattctaatttagaagaaaagtcttgtaagctgtaatctggaagaacagtcaatccccccattgaaactttaggatttttgtcaattgcaattgtttgaacttggaatcctgcttccggtttatttaattcagctgtcacataactggcttcccaatcagcaaaaccatctgtaataaagaccaacactttcttcatgtatatttcctccctaattcttgattagaaa

SEQ ID NO: 84 - DNA, 14335 bp, Priestia aryabhattai
  source 1..14335: mol_type = genomic DNA
cacaaaataatcgatctggtggtgtggaaaatgaaagaatttatttccagaaaaacggttttagacaggattgggatcccttctcatttaacgtggggatacataggtattattgtttttatgattggcgatggtttagaacaaggatggctatctccttatcttgtagaacgaggtttaaccattgaacatgctgctttactgtttactgtttacggcattacggtctctgtttcttcctggttctccggcgtactggttcagctgtggggtcctagaaaagcaatggcattcggcttgatatcctttattattggttcaattggatttataggtttaggacttcatattatgaattacacaattatactaatttgttatgctcttagaggatttggttaccctttatttgcttactcatttttggtctgggtgtcttaccgcacgccccaggaaatgctttcaaaagcagtaggctggttttggtttgccttccagcttggattaagcgtaatcggagccttttactcaagttatatggttccgaaaattggcgaaatcgctaccttgtggagtggtttactttttgttttgatcggtggaatcttttcgattattatgaataaagacaagtttaccgtacaaaaagtaaacgataataaaacaaaagaattaatgaaagggattacaattgcatttgagaaccctaaagtagggatcggcggcatcgtaaagattattaactctgctgctcaatttggatttgttgttttcttgccaacatatatgatgaaacatgattttacgatgagtgaatggttgcaaatctggggtacattgttttttgtgaatatggcttttaatattatttttggtattgttggagataagtttggctgggtaaatacaatcaaatggtttggcggagttggatgcggaattgtaacacttgctctctactatgtaccgcaattcgtcggacataattattgggtgatgatgattgtcgcatgctgttacggtgcaacactagcaggttatgtccctcttacagcgttagtgccttctttagctccggagaataaaggagctgcaatgtctgtgttgaacttaggatctggactttccgcttttgtaggtcctttaattgtgaccgtttttattggtcttttgggcacgggcggcgtaatttggatctttgcttgcttatacttctttggtgcttttctaactggtttccttacgattccaacagagacaactattaaaggcgaaacaataaacgaagtcaaaagtccgatctctctataaatatgcttaagcagaaaaagctggaggtgtctcaacacctgcagcttttttaccttctctattttataacttttttaccgacgcacgttctactagttcgggaataatcgttactcgctgtttcgcatgctcttcttttttcatagactttaacagctgttcaaacgtactagtagccatctgagaaatgggttgttcaatcgttgtcaaacccggctcagcaatatcggcataaatcgtattatcgaatccaattaccgacagatctcccgggatcgaaagcccctgcttccttgcctcgtttatgagcgataccccaattagatctgtacatgcaaagactgctgttggcctattaggcaaggaaagcagctgtttacttgctctcctgctatcttctactgttgaataacagctgataatggactgattttctagtgataaatttgcttctgtgagcgcttgtttaaatcccgctaatcgcccctcactgctttttctatctttttcagtcataatcgttaccgattgatgacctttttctattaaatacgtacctgcgatatatcctccgcgaacgttatcaattgtcactacatgggttgagatagaaggatggtcaactgaaaacaatacaagcggtacatcatgcttcacaattttctttacgagcttcgtatcatttagctcggttgcgataatgattccatctacttgttttttaaataaaagatctatatattcatgctcgcgcgcagtttgatgatctgtactgcataaaaaaagcgtgtatcccgctgctctagcactattctcaaaagctcttgctacctctgcaaaaaaaggattagagatatcaggaactagaacaccgatcgtgtacgtcttttttcctgttaacgccgctgcgacactgctaggctgataatctaattccatcattacttcattcactttttttatcgttttttcactaatacggcctgtctgattgattactttggatacagtggctatcgatacccctgcttttttcgcaacatcgtaaatggttggtttcactttcactgttcctttcttcgtgatctctttccttattttatcacgaaagtattcaatcgttttatatattaccataagcatattctataagtccttgaaaaatttttttattttatgtataaaaactatctattaatcaaatcataatcttaaccttataaaaggagttgattatgatggcaaacagcagaaataagagcagcaacgaattagcagtacacggtgctcaacaagcaatcgatcaaatgaaatatgagatcgctagcgaatttggcgtaactcttggtcctgacacaactgcacgcgcaaacggctcagtaggcggcgaaatcacaaaacgccttgtgcaaatggctgaacagcaacttggcggcggacgtttctaaatcactatcataagcaatacggctgaaggaagagcgaatgaccgttcttccttttccaatttttacataatcccttatcgctttccttctcctctatatgtatctaaaacaaaaccactaccccataacgttcacatcccgttatataaggttctctttctctcacaatagattgtttatgataaaacataaaaagaagttccttttataggaacttcttttatctcactttataaatgtgcaagctctttagatatcttttcggtctttgctttaagctgttcctgctgaccttctaagtcagcaagaacagctaacacttctgtattctctggttcttcttcatactgttttaacgtagcaacaagagactgtgaaactttgatgagctcttgattaacttcttgctgctgtattaaatagtcaagttcgtattccgttttttctagatttctcattggtccccttcctttcgttaactagcttttatttaagaacgcagtcttttattatctcatttagttactccaacattaccttattttattttcgtgattgccgtataacattttttcattcattgggtcagctgatttttcagcaggtgtcactgtttgtcctagagctgaattgtgtttatcatgctcaactgcgtctaccatcagcaaaacttttccttttttaagatcagatacatatgaggaagcttctgcagcaggtacaccatattcggttaattgattttcgattcgattaacatcttgatccattttttcttcagacggagtaaaagcattttttattttctccataaaggattgatggtgctttgagtgttgatctgtatcaactgtttgcacatcaattcctgcagaatgctcaatcacttctgtattttcatgacgcagaccactgtttgtcaaaacagaaagtgcactgtccggatatccctgtgtttttaaatttcgaatcgctgtaataacggctacctctgaatcatacgtacctactacattttttgtcattttctattcctcctaggtattatcattttttagcttgttatagtattaatacccttggattttttggtaaaactttttaactctatctctagctctccttacaaggaaagaccaataaaacaacagacctgaatctaaaaattcaaggctgtttcatgatatcaatgatttttattataaaattggtgacagtaagcgggataccgcttctttaaattttataagaagagagcgctctttatatcgttcaaacgttaattttgaactgcattgcacatcttcaagaaacaggttctgcaactttttggcaataggctggtcatatacaactgcattcacttcaaaattaaggctgaaacttcgtggatcaatattcgtcgttcctacggaagacacttcattatctactacaatcgttttagcatgcaaaaagcctttttcatagagataaatattcgcaccatacgtcagcagttcgcctacgtgagaccacgtagcccaataaacaaaaggatgatcgggtttgtttggaatcataatatgaatctctactccagataataaagcaattttacaagcatccataaagcttgcgtctggaataaagtaaggcgtttgaaggtacacactttctttggccgacataatcaatgagatatacatgtttttcagatgctgggtagtcgagtttggcccgcttgctacaatttgtacaggaaccgttccagaatgagtttctgtacgatgcaaaaattgttccagttcaattggctgttttgttgcttgatgccaatctaaaatgaatctcccttgaatatcgttcactgactctcctttaatgcgaaaatgagtgtctctccaataacccatttttggatctaaccctaaatattcatctcctacgttaaatcctcctatgtatgctacttcaccatcaataatacaaagctttcgatgatttcgattgttaatccgaaaattaattaagcgaagaattgaagggaaaaatgcctgtgcttcgccgccatatgaaataagctccttaaaaaatgatggcgtcatttttctagatcctacttcatcataaagaacgcgaacctttatgccttcttttgctttttttgttagctcatctcttaattttttcccaagattatctcgttgaataatataatattgaatattaatttctcttttagcatttcgaatgtcctcaaacaatgcatcaaatttctgattaccatcactaaagatatcaatttcattgtcggtgcgcacgagtgacttagaagaatttaaattagtgaacagcagtttattatgttgaatcaataaatcatttcgatattcatgggtagctttaagttcttttaattgttcatctactgaagatcttaaatattcccgctcatcagatgataacttataaaagttcttctgttttagctgtcttccaaagaatagatatacaataaagccgacaatcggtataaaaaataaaataagaagccacgcccatgtagatcctatatctcttcgttcgatgaaaataagaataccggctaataaaacattaatagctgttacaacagatacacttagtgtaaagatatgggcaaattccattctattactcctttctttctactgcattgctttattaactcattcccatttttaacgctctcattcactttactatacataacacagatcgcttcctttttcatctttagtatccaaattttattgtttttttattttttgctataccaaaaatttaaaatttttctttctgtggtgtattaaaaacaaggaggaaataatttgtttttttcttttatttttcttagcctcatcaatgtatttatcagtattagcctggggtatacggcttatcaattgtttagaaaagcatttattggaggtattcttacgtgtatccttgcttgcagagctcctattatatttgtatggcctttcctgtttttatcaacgggcatatcactttttctctactttctcattatttactcaaaaaagcacatatcatctaatatgtaaataaaaaacacgaaaatctaagatttccgtgttttttatctaaaagctgtatacgtaataatcctgcacgtgatatgaattgaaaccgcatgtttcgtagagttgcaaagcgcgtttgtttttcgcttcaacctcaagaaatatatcatatcctagctgaacctgctttaaaacaacttgttttaaagcagcttttcctattcccaatttttgataagaaggcaaaataccaaatccataaatccatgcttcgcttttatcataagatacccttaactttccaaccgcttgactattgtactctacgataaaatgattttgctgttcttccgttttcgtttgttcataataagcagctgcttctgttaaagacataccaaagcattccacatcaacttgcatttccattttcatatcggtatctgattgggaagaacgaagtgtaacaaagggattatcatcttccaattctttttttgtccacttcatttgatattctgaaaaagtaaatgaacatggaatttgctttaagaactccctgcctgaaaccgaatcgccaggagcatttaataaaatctctgtataaccacgcttcttacatatatgtaaagcttgagaaaacagctttgaaaaaatcctttttcggcgatagctaggagcgaccattccgcatatttctactgtattcccaaacccataaagaccaataaacccaacaagctgattatcttcataatgaaaaaaatcgttaacttcattttgttttcgacttcgtaacatatcaaaattcagcttcagctctatgtgctcttcttgttcgcaaatagactgtagcttttgtatatcttctaacacatgttgttctaacataaaactccccctgcattcttctttttattataagttcggctttatttaactttttcctttcatctttagcgcaatagtcgaataattatagggtaaaagcaagatcaaaaagcatatagagtaatcaaactaaataggcggggtgcttatgaaaaagaccattttaataagttttattgcactagttgctttaaccattatttattgcctgcagaaagaatttattttcgctttagctttgtggagcatttatggaacagtattatctgtttttgtatatttttctttttacaaatcaacggaagatcgcgaagaacagtaacgataaagctattaaaagatctgtgaaataaacctttttacagatcttttataaatttacaactgggatatatgttggtaacaatttagaaacaagtaatccttattcttagtgttatagaaaagttattacctatttcactaaggagttggatatttgtatgaagacaattacaaaatctatatcggttttagcattagcagcgggctttactttttcatctctatctggaacactgccattcactcacgagcaaacagcaagtgcagcagaaaaaataaacgcaccgttcagcgtatatgaagtgaccgcaaacgtactcaatatacgttcaaaacctagcactcagggaaagattcttgatacattaagaaaaaaagatcaaattgaagtagtcaagtttgtaaatgcagactgggctgccattaaaataattggcggcaccggatatatcagtacttcctatttaatgaaagtccctactactgttcatacagctgctaaccttaatttacgcacagggcctagcacaagcaacaaagttgtaacaactattcctaaaggaaaaagcgtcagcttcttagcttggagctactcaaaagataacaagctttcatttgattgggcttttgtagaatgcaacggctttaaaggatatgtaagcacttcgtacttacagttacctacttatagataaaaacagataactcccttgaattatttcaagggagcttatttatggacactttattaatagtgccctgcccatgaagcaccaatgataattagtaaaataaatagcacaacgattaacgcaaagctacttccgtgacctgctccgtatccgtacccataaccataacctccgtaaaaactcattttctttcacctcccttttttgtagaatatgtgaaggaaaatgaaaacgaacatgattattctttatcacaaaattcattataatttataaacgttaactcttttactagtaaggcataggatatagcatcccgtggttcatctctacatctttccctcgttcccacctttaaagtaagggtatattccagcaatacaaaaaaagaagagtttatataactcttctttcttattgaactggattatcaacttgcatgtagtcattataatattcttctaacgtaattcctttcttatacaccttagaggcgagttcttttccgacaaatcgtatatgccacggctcatatttataacctgtaatctgctgctttccttctggatagcgaacaatgtatccgtatttgtatgaatttgcctcaatccatttggcttcaggagtatctttaaaacaatcttgagctgcacacttaccggtgctgcttgatacatctatacttaaaccagtctgatgttcactgctgcctggatgagcgctgtaatgattagctgccgcttctccatcttgttttatatacgcttgataaagagattcttgacggctttgagaacgataggcagaaacaccggctaggtaaattccttctcgttcagcagctgaaaacatcctttctaacgcttttgctgcttctgtacgcatttggcgcttttcaattttttctttaaatataaaccgaacgtctgggtatacaaggtcagtgggttcatagtgatcaggaagaagattttgcttgtttactaacacagcaatggactctgggttccctacaatttctatactattctgcttctgtttagaagaagataaaggattatgatcagacgtattcaaacgatcgttgtgctgaaataatccctgatagcctagatacgagaatcctgcaataacccccagcactattagtaaagccatttttttataaagtttcatatttctatactcctgacatattttcagctttttaggacactcaaacattgtatataaatcaagaaataattactaatataacaaactaattcctactataaattttagtatgcccggacctaattttttcaaacgttcattttaaacataaaaaagagatgtctcctaaaagacatctctttttacttctattctataagactagtattagtcgataactgtaattttaactgatcttctgccccagtcttgtgcagcactatctgaagaaacgaatacatcaattcgatttcctttaattgcgccacctgtatctgctgctacagcttgaccataaccttcaacgtatacttttgaacctaatggaataacgctaggatcaaccgcaattactcgttgatttggatttgattttaaatttactccagtagctgttgtaccactgcatccagcacagttagctgtataagctgttgcttcaacagtcatagacttgccgctagcttgctgttgagactgctgttgctgctgttgagctgcttgttgctgttgctgagctgcttgttctttttgtgcttgttcttgtgctgcctgtgcttgtgctgcttgagcttgctcttgttctttttgtgcttgctcttgttctgcctgtgcttgtgctgcttgagcttgctcttgttctttttgtgcttgctcttgttctgcctgtgcttgtgctgcttgagcttgctcttgttctttttgtgcttgctcttgtgctgcctgtgcttgtgctgcttgagcttgctcttgttctttttgtgcttgctcttgtgctgcctgtgcttgtgctgcttgagcttgctcttgttctttttgggtttgttcttgtgctgcttgtgcttgtgctgcttgagcttgctcttgttctttttgtgcttgagcttgctcttgttctttttgtgcttgctcttgtgctgcttgttctttttgtgcttgctcttgtgctgcttgttcttgctgagcttgtgccgtttgagactgctgcgcttgtggagctgcctttgctactggcgcactagctgtttgagattgagctgcttgtgccgttttaattttaaattgttctccagggaaaactaagtctgatgttaaaccgttccattctttaatttcttctactgttacgccataatgttgaccgattgaccacaaagtgtcaccacgttttacagtatgtacgatttcttttatgctagataagtttagtgtctgatttggataaattagtgttgatgttaagttattagcatcttttagctcgtctacgctcacattatgattttgagcgattttccataaagtgtcacctttttgtacttcatacgttccgcttgtagaggcagatgctgcacctacaaatcctgctgaaagaattgccgttgtccctagagtaaatacaaatttcttcattttccgaatacctccttatttactcaatgactgaatgataccacctgttcatttcacttccattacaggaatattttacttttattacggatttaattaattttaaacattttcttgtaatatttctgacaattcatttttgaataatgattaaatttcatcaaaatcatgtcaaaatttgaagaaaactctataaaaagttggagttgtattcggtgataaaagtaacttatcagcaaaaaaaccttctaaaagcagttagcttttagaaggtttttttatttatataaaacagttaaagttggagcatatgcaggattgtcgcccccataaatttcaactacgtcacttaaaaagtccgctggacctaagcttgacaagcgaaattgagttttgccggtcctagtcatatatccccaaagtgaggaaggaagttgaatagttgtatatccattattgagtgaaggcactgacatttggaagccccctgaaatagatggtgaagcctgataatctatttgttctaaagcactgctagttccaaatacaccgcttttaatatcgcctttcaaagatgaaatattaccagttgaagatttgcgataaatttttaaagataaatccgtaatgattgcatcatcaggtaaagaacttgtgtcaaaagataaaatggttcggtatgtgtcggtattgtacattcctttatccccaattttatgaatagaactactcataccgtcagctgataagtttccgataaatccatcttcagcagcaagcgaagaaaatactgaagttttctctgaagttccagaaatttgataaacttccgtctttacttcctcttggttgcccgctgcgtctacactaaaaaactttactgttttgctagagttgatggtaataggctcagagtactttagagaattaacagttggtatgcttccatctaatgtatagtaagtgatggcaggttcattggttgataatgtaacagaaatggaacttccatacgtccctcccgctggtgaagcagctgtaaccggtggggatatatctcctgaattaggagcatcaccatttttcggatggcttttaaaaaagttccagcttaatttagttgcatttggtcctttaggatctgtataagaaccggatgtacttccccctgaccaagcatgtcccattccttctatcatgtacttttccattactgtttttccggctgtatctttgtaaatatattgcgtatagcttcttccaccggatactgtacctgttgcagtttgatctgccgtatcatcaatattgttattatccagcccatcagacgctctatcatttgtttgagcccattgcgataataattgatgcgcatttataggcgcaacggtgtagtcagctgtcccatgaaacaagataactggaaccactcgtttatgatctcccatggctgaataggctaaatctccttgttggataggattaggacctccactgctcattgctgtataagcacctgtcacattagtcgctgctttatattctaagccagccccaacgctgatagccgcaaatatgtctggataagtagctcccataataacactcatagctgcaccagcagatagccctccaacaaagacttggtcggcatctattgaataactgctttttatttgattgaccattccagcaattaacgctggttcaccgcttccccttgattgatgagccgtatcaaaccagttccaacatttatttgaattagcagaagaaggttgttctggataaagaacaagaaacttctctgtctccgccagttcattcatttgcgttcctgctgcaaattgatcagggtcttgagtacagccatgtagcataactactagaggtaaggcagcacctccctgataactgctaggtacgtacagtttgtatgtccttccgttatatgttttagaggtaaaacttcctgcggctgaagaagatacagcacctaaagataaaaaaagtataaaaatcatccctgctataaataatcgtttcatcttcctgcttcctccctatattgatatggctatacttaacagcaaacgtacatatcggtatggtatggaaatgaataagagttactagtaagatgatagcaaggttttatgtaataaaatttatattaactgcacgatttgcctacggttatgaggacgaataaaatcattcatctcccaaaaaagaaaacgcttacattaaattgtaaacgattgtgccgataaatactataaaaaagacataccttttaaaaataggccggtatgtcttctatggattgcttacttaagtattcatattgtgactcgctgcaatttaccatagcaatggattgaggataacgttgtaaatgagaagggagctccttaaacccaaactgatgataatattcaggaagaatatcgctatacagcataaaaatagcgctgcgcttctctatcttcatctttttaaaaaagtcttcaagcatatcacggccataccccattcgttgataaagctggtgtacaacaacggatccaataccatgcaaagcaaactttaatcgaggagtttgtaaaagaagcaaaataaatgaaccaataatttgattctcttcatttacgtatacataccgaattccatatgtttcttctttttgattatctctcacatactctttgtacgttctgcctttaggccatgcggcatatcccatttgatagacttctgccaattcttcagactttatttttcttaataacatgaacatcccctctttatttataatcccatacgtcagcagacattttttataaagttaaaaatagttcctgtatgtatatattatacttcatcctacggaagctttcttgctctgagtgctattaacagctaatagtgagctactttctcaaaaaactagaaagattcctgatagctgttccttacccatagcagtcatatatgtaaagatactctttatcattccataaaaacatagagatgtaaatgtatttccagcttcatttagcattcattacgtattactcatcaaaaaaagcatagaaactacgttctatgctttacagtgaaagtactcatcaattcttaagctttttcgttctctacatactccactagatgaaagaaaaaacgatatgtaagaacaagagcttcacctatcgacattttttcattaaactcttttatagcatctaactcaatattcacatcccataatccatctttatcattaaataaaagctggacgcttgttgggctttcattaagttctttagcaaaaaattgttttagtaaagaaccgaattttttttgcatatgtagccccgttaatactttatatgtgccaaacacatcatccacttcaaaagaacatccatcaagcttaataaattcgaaccattttgattctatatatagaaattcacttctgtgttctttcaagtaagaaatgggcgtatctaaaaacgaaagaggagattcttctgcgatcagctcgtccgattctttatctactctttcgatataagaatctttaaaacgtaaagatgcctctttttcttctatcatcaggttttgcggtaccaactctttttgcaacgcatattccttttcttcctggtatagagataaagattgaccttgaacgttcatttctttttcaatataagtttgaatattactttgtaacatgaaaaaacctcctgattaatctgcatcactatcttatatcataacctaaacaagtgtttataaatatagccaaacaaaaaatccttaggctatgcctaaggataataatgatatattcaagtatgtataaaagataatttggttgcggggacaggatttgaacctgcgaccttcgggttatgagcccgacgagctaccgaactgctccaccccgcgataataaaaa

SEQ ID NO: 85 - DNA, 13905 bp, Priestia aryabhattai
  source 1..13905: mol_type = genomic DNA
gcctttatatatgcagttaaaacaggctattacagaagatattaataaaggagtttatactccgggtgaaaaacttccaattgaaacggatttgtgcgatatatacggagtaagtcggattacggtaagaaaagccgtattagatttagtagaagaaggccttctgatacgtcagcaaggaaaaggaacctttgttcaatatcccaaagctaagagagagctgtttgccgttaatgggcatacagaatatatgtcggaattagggaaagtaccgcagactaaaattttgtcttttggtataaaacctgtaaaagctcatgtggcaaagatgttatcaatccctccagaaagtgaagtccttgaactgcagcgcatcctgtattatgacaaccagcctcttaccttagaaatttctcattactccttagaattgttaccacacttagatcagcacgtccataattcagtttcaatgtacgatactataaaaaataagtacaatattgctccggttcataataaaaaattattgaacatggtatttgcaaatgtggatgaagcaaaacatttagaatgtgaagtcggagagccgctgtttaaagtggaaaaagtggcgtatgatgcacaaaaaagaccgattcattcatcttttctacactaccctgcgaatcgcgttacgttcactatagacagttctaattcttaataaaatagcgccttgctttaaaagcaaaggcgctattttattcattttaaaactatcgcacagtctgcgttatattcttttccatatccaaatgctccgtaattctgacaggtttgtgatgccaccaatgctccattacggagggctttggctatgtttttttctggtagataagaagaaagaaaaccagctataaaagaatctccagccccaagcgtatccactacatttgtaggaattataggctgtttaaataattgattttcgactgataataacgctccctcttctcctcttgtcacgcatacgacactggttcctaacaagtgtactcgctttattaaattcatacactcttcttctggcaggctgcttcctgagaaaaatgcatagctgatatatggacatacttgctgtaaatattcctcatcgtatctcgtagaaaaatcaaaggaaatatcaatgactttatgtaacagtggaaggtcagattctaaatgactaaaaacgctcgtatgaagaagatcgtgctgacgaatataggttaaatccgattcattcagcattagttttaatctagattgaacgccccctttatttgatcctacaaaaattcgatcaccttgttcatcaagtgttacaaccgccattccattctctcctacagctcttcttactctgctaatatccatcttttcttgctgcagagtatttactacatgctctgccgattcgtcattccccacgattcccatataggaagagtgatgattgctcaatctattataaaatacggccacatttagtgcgttgccgcctggatagatctttccttggtctttatagtaatctactacattatcccctactccaattagtttcatctgcttatcctcctattatttaacacttccgttagcaatgccacggataaaatatttttgcataaataaaaacaacataacaatcggtgctgctgaaatggtcagtccagctagtaataccccccaatctgtttgcaaagcgtctctaaattgcattaatcctgctgggattgtacgcaaactgtcgtcgtcgataaagataatggcaaacataaattcattccatgtgtagtaagctgtcaaaattgtcgttgttaataaaatgggcgtgctcattggaatgaaaattcgaaataaaatccccaagcttgtacatccatctaaccgagctgcttcctccagttcttttggaatcgaaagaaaataagctcgaattaacaagatggttaaaggaattcgataagcaacataaggcagaatcagtgccaagtgtgtattatagattccaagtttttgaataatgctatacaaaggaattaaacttacctgaggggaaagcataagccctccaagacatataataaggacaaaagcttttccttgaaactcaaagcgtgataatccataagctcctaacgcactgaccaggaccgtcaaaaaacaagacgcgcccgtgacgatcacactgtttaaaaagtaagaagatattccgcttttccacgctgtcacataattttcaattagccaagtatgcggcatagaccagctgtgagtaaagatttcatccgtgcttttaaaagaacttataatcatccaaagcaaggggtacgcaatgacgataaaatagacaatcaatccgacatatactatcgttacacctgtgtacctcttcttttttctttctttagtggctgtattgacaacattaggtaaggtgacatttgttttaggcatctgcatcaagcgtcttcctttcctgttttaaatgctttcatttgaacaagagaaatcaacagcgtaataattaaaatgacagtagcaattgaggaagcgtagcccatcatatctttcgaaaaggctgttttgtataaatacgtacttaggacttcagatgatgtacccggtccgcctccagttaaaatataaggttcattaaatactgtaaaagcaccagtgagcgttaaaataacggcaacaaatgtcatttcttttgtttgcggtacagtaatatgaaagaacattttaaatttattagcgccgtctatctcagctgcttcatacaattcaggcgagattttttgtatcgctacaatatacagcatggcgatatagccgatagactgccactgagatacagcaataactgcataaatagctgtattactgtctcctagccaaggttttgccaatgtgtctaatccgatcattttgagcacttgatttaaaagccctacttcagggttgtaaaaaaaagtaaacaacaaggcaataacggtcatcgagacgactactggtaaaaaataaaccgttcgaaaaaaaggagaaaactttcgaataagtttatcttctaaaacggcagccacaattagaccgccacccacttgaaaaataattgaaataaccgcataaagaatattatttttgagtgcctgataaaagacagggtctttaaataagtgcacataattatctattcctacaaaaactttgtctggtgaaaatgtgctccactcataaagactatcccgaatattctgaaaaatagggatgtacacaagtagtaaaaaagcaaaagcaggaagaagatataaataaggggttagcttattgcgttttaacatcgctttttcacttccttattttttagattcagcacgaacactcgctgcagctttttgcacatctttcattacttctttaggtgttttatcaccatttagcataagctgagcccctgttaaataagcatctgcaattcgagcatcgattgccatatcaaaccatggagccatctctttggcttgtaaaatattatctactgcttctaattgctccggtgttgaattactgctgttagctgtatcatttactgcactgtatttccctacttcttttactagcttttcacccatttgttttgatgttaaaaattcaagaaattccatcgcttcttttggatgcttggttttagaagaaatcataaacccttcaggtgatccagttaaattagtagcatttccttttccatcctctaatttaggaaaattaaacatgccaatcttaaatttcgttggaccgaaaagcttaatttcagcggtttcagcataaaacatagctgcttttccatttgaaaattgttgtcttgcatattcatgatcaatcgagtttgtatttttattaaagtaaggaactaattcttctaatttttctagagcttttacatagcctttatccgtgaatgtcccagtttttgaattatagtcttttgaaagaacgtcacgttttaccatgcgctgatttaaggttcctacgtagtgagaaatggtccatgtatcctggcttccaaattctaaagctgtataatgcttcttttttaacacgcttaaaacatttagtagctcgttccagtttgtaggcgcttttaatcctaatttatcgaagatatctttgttgtaaaaaaacattttcccatccatcgtgacaggaacaccgtaaattttcttattaacggtatatggtttaatttgagattgaacaagcttggaagaccacgctgaatccttcttataataagaggttaaatctaaggctttgtttcctctgacaaattgtctagcaaactcatcgctccaagaaaagtacacatcaggaggggtattagtgcctgtcataactttaattttgtctttatatgaatcgtttaagaccgcttctgttttaatatcaatatcagggtgctgtttttcaaattcttttacaacttcttcaaagtagcttttttcaggttcttttggccatctgtgaaagaatgttaatgttgtctttcctgtgtctgagtctgaagacgtttgttttccagcacaccccccgagcattaaagaacaacttaaaagtgaggctaagattaaatttgtctttttcatatagaaacccccttattgtaagtgctttcatatataagttatactataacgttttataacattatagtataactcgtaaggaaaatatacagatttctatctttattagaagattattaatattctactttccacatgtagcgtcttttacttaaaggatgattgcgtgcttcagctaattcttcggcatactgacgcagtacacggtttaatacaagaggagcaatatacccttgcacatccttatcaattccttcgaagtcatatgcttttgcatctagaacagttaatttctttccatatcgtttagagaatgataaggcgcgttcttctaaaggtctcgtttcatctagtccagctaggatgataaacggtacgttttcatcaataatttcgaatggaccgtggaaatactctccagcgtgaatagcgtgagaatgaatccactgcatttccatcaagatacagatgctgaatgaatatgctgctccatagttcgaaccgctggccattgtataaataaccggttcagacttatgtgattcagcaaattttcttgcgttgctcgcttcgtattctagagctttttcataaacagactgtagattttctaagctagtaactaactttgcaaatttatcatttttttctgctacgtataagagaccaaatacaagctgatataaaacgcctaagtttgtttcaaaagcatcgatatcattgccccattcatacttaataaaaatatctgcgctgtgtgctaaaggtgaagtaggttcatttgttaaggctacagcataagcgcctttgcttttagcgaacttagctgcttctgtagtctcaggagttgttcctgacatggaacataaaataactaaggagtcttttcctagctgctgcggattgcggtggataaattcgttcgagctatacaaatcggatgtaatatgttgagcttctcgatctagtacatacttagctggatacatgatcgcagaagatcctccacatgcgacgaaaaacacattacgaatttgcttgctttttaattcgtttaatacggcttgcacatcactttttacattcactactgttttgctcattttccccactcctcaaataaaatatgatatacaacattatgtaatgttatatattgttatattaaaccgcaaacgttaactagtcaatacatttatcagaatatttaacttttttatctatatttgtagaaatacgctcttctgtttctccatcaaagaaatgcaagtaggttaaattcaacgaaaaagcgcttttgtcccctgcttcaaactcacataaaagaggcactcgagccacaaacgtttgcttttctaaactagcatataaaattgtttcagcacctagtacctctatcatatctagtgtcgtagtgaagcaaaactcattgttcaactctctcttactatcctctttatgatatacaatgtgttcaggacgcgcacccattatgacctttttctcattataaccttgagaatgtaaagcgtatattagaaaatcaggaagctgtattttagtttttcccattataaaataagtgccttggagatacccccgaaaaaaattcattgcgggcgatccaataaaactgcctacaaatacattcctaggatgtctataaatatcttgaggagttccgatctgttgaataatcccgtctttcataacaactaggcgagtagccattgtcatagcttccacttgatcatgcgtcacatagattgttgttgtttgcagcctttgatgcagtttaataatctcagcacgcatctgtactcgcagcttcgcatccaaattagataatggttcatccattaagaaaacttttgcttcccgaacaatagcacgacctaaagcaactcgctgacgctgccctccggataaagcttttggctttctatctaaatatgtttctagacctaatgttttggctgcttcatttacacgtctatcaatttcatctttctttattttttttaacttcaaaccaaatgccatattttctcgaacagtcatatgagggtaaagagcataattttgaaagaccatagcaatgtcacgatcttttggagctacttcgttcatatgatctccatcaatgtaaaaatcaccttttgaaatcgtttctagacctgcaatcattcgtagcgtagtagatttaccacagcctgaaggtccaacaaatacaacaaattctttctctccaatctgaaggttaaaattatttacggcgatattttttttatcatatattttatatactctatctaaatgtaacattgtcatctcacctcagctccttatatttaaagtttgagatacattattgcaagttacgagtctctttttccttcattctttcctcctttttatgtaaattgttaacttgagacattaaagtaacttaataactatactaatcgaatctagttaggcagaaaataaatatgtaaaggtttctaacacaaaacatacaagcaaccgtttatcctcaaaaaataaaaaccttctctaaaataagaaggtttcacatcataatctgcatagagactgcctttgccttacttgtgaagattttattacatatcttctttgccttgacagctcggacactcataaacatgtacaaaataaaggccaatatggtgaaatcgtttccctaagcaatctggacatgttcctgcttcgcgcatttgttcccggcgtttgtctcgctgattagctaagaaatttacaaatttcataaaaaaacctccctcatgtttttgactataggttttcctgatgggaggccttttattcgactaggtgtatttataacagcacctgcttgattgtgcttctaaactataatgacgttttccaataatacaaaaaggatagatagagcagtcttatgacgctcatctatccttcatttttatcatatataatgtttaacgctatacaggcatctatcactatttcctaacaaatatctgatttttgatacagctatcaagttattcttctactttgtatttttctttttttcgaagaaacggccaccagtttccttctccaagcgttacgacaatcgctggcataagaagcggaagaataataaggccataaagtaaaagaccaataataacaaccgttgctacatgaacaagtgttaatacacctgatggcatcatagccccaaacgttccggctaagataatagcagcagtaataataaccgatcccatcttactcatggacgtaaccatcccttttgctacgccgcttttcacttcttcgttaaaacggtctaacaagaaaatagaatagtcaattccaagggcaactaaaataacaaaactaaagaatggcacggcccagctgattccgtcattccccattatatccacgaatagaagctctgagattcccattgcagtataatacataagcagcagtgaagcaatcatgtatacaggtattatcattgaacggaataaaatggtcagtacaataaacagtccaatcatcataataaccattgtgcgtgaaagatcagttgtagataaatcttttaaatccgcatttgagctcgatacccctccgtacacaatttctgtatgctcaaacggcgtatcaacgacttcgcttgccaccgctttttcaatattttttacggttgaaatggcttcttcagaatatggattttgatcgagcactacgctgagcttaactccttttccacctgcaaaagaatagttatcgatggattgtttaaaccctttatctttcatcacttctgctggaagataaatacccgtatctctaactgttgagctgtcactcatgttatcaagcatatctgttgcttttgttaagccatctgagatcttcgtcagtccgtcattcgcacttttaactccttttgccaactgattgatactgtctgataacgttccaacttgaccttgctgagctgaaagattctcatttgcttgttggagaccggtttgaatggtagtaagctgtttactgattgcaacaagctgcggaaccgcttgctgcacatttcctgtagtagaaagctgagtgctgacaagctgcagctgttgattaatttgagctaatccgtctgcagcaggtgcaagcgatcctccagatttctctttagaagcagaacctgtttggtcagctatttgatttagccctttttcaacatcacttaatcctttttgtacatctccgattcctttaacagcatctttgattccgtctgatacagagcctagctgtgaattaacatataaatcatcaatcttttctccggtaggctgtgtgatagtcataacagaatccacgtgatccactttttcaatcgctttgcttatatttcctaaataaggaataacatccgcctttgttaactctttatctcctttaataataacattgacaggaaaagcttttccttctcccagtgcatcactgatagcatttagtccttttatagatttataatcactgcttatttcagcagtagagtcaaacgatacttttgaatcgtacgttacaataaaaggcacggtaataatcgctgtaatgactaaaaacacgaacggtcgcgccactgcctttttccctaaaaagccccacagcttattatcgctatgagaagccacttttttagacggccaaaataatttttctccaagcgtaaccataaaaagtggaagcagagtaaataaaatgactagcagtacacctacgcccactgctacaccgacagccgactggaaaatggcaaacttggcaaatgcgatggctgcaaacccaataaatacggcaattccgctgataaatagcgttcttcctgctgtacgataagccgtgatcgtggcttctactttatcatgtccgtttgccaattcttcacggaaacgattaagtaaaagaatgcagtaatccgtaccaattccaaacaaaatagctactaagaacgtttgcgtgaacgttgagattggaaaatcgacatttttaactaaaatccctagtaacgattgactgattaagtatgtgattcccacaattaaaataggaataaacggcgtcacgactgaacggaaaacgagtaaaagcaaacctaaaatcaaaaagatagtaataaactcggttttctttaacccttcttctgaactgtgtgcaaaatcctgattaataagagatgcacctgttacatatgccgtaatgccttttggcacgttatcataaatctgattcgctattttttcaactttttcatccgatccactgacagtaaccggaactaaaacggtttttttgtctttagacattaattgattacgaacatcttgatcatctgttaaaggcgttgtgacatcttttacacctttaattttctctgtcttatcaatgattttctgtatttgtttctcactatctttatctaatgcgttatctagcttgataaccatgctgatggtattactatcttctccggcattttttagaatttggctggctctagatgaaacggcatcgtcgggaagctgagactgtcctttttcacttgcgagctttgttaaatttggtgccgttagcatcaatataaccgttaaagctaaaataaaggccgcaatcacccatttaaatttcacaataaatttcattccttgctttccccttttatagttaacttttcttttgccattgtaagaatttcaataaatgtatctattttttcttcttctacatcatcaaacaaattctcaatgatactaaaacaagcggcatttccttcatttattaccttttcgccttcagccgtaatcttaataagcttagaacgtttatcgctctctagttcattagtgtcccactccacaagccctttttcgagcagttttttgattcgattcgaaatggcacttttatgaacaccttgcaagactgcaagactgccaggtgaagacggacctttaatcattaaactatttaacaaatcaaactgctgcctagagacatgttcaaagaggttatggctaatctctctgtgaattacttctgttcctataaacagcacttcttcaaaaagttctacagcttgatataacttgcttttcttcacttctttccctccttcactcatttagtttataggtttaaactattcaactttaaaaatagtttataggcctaaactttattctgtcaataaatttatgtctgactgtcttcatatatgataaagataaatagaaatccaaaaaagataccgcttacattattttttttggttgtcaaagctccatcacttaagtattattagtaattgacttcttttcaaggagatataaattttatacacagaaagggtgatcacacatgaatacaatgcatgctaatgagcaggtcagtaagaaagattcctttccgattgctctcatctcgttgactcttggggcttttgctattggaatgacggaattcgttattatggggatactgcctaacgttgcggaagaccttcatgttagcatttcgactgctggtcagctaattacgagctatgcgttaggagtggcgatcggtgcgccaattttaaccatttttactcaccgacttcctcaaaagcttctgctttgtttacttatgcttctatttattctcggaaatgcgattgctattattgcacctagctatggaattttaatgggagctcgtttagttacggcattatgtcacggtactttctttggagtaggcgctgttattgcttcacggctcgtgcagccccataaacgtgcaagtgctgtcgcaacgatgatggcgggtttaaccattgcaaatatcatcggggttcctgtgggaacattcattgggcaacacttaggctggagagcttcgtttggggctattacgatcatggggattattgcatttattggtattattctgtttatcccaaagcttggtcaagacaaattaacgggtttaaaacagcagtttgctgcttttactcaaccaaagcttcttgtgatgcttcttttaagcgcaataggatgcggcagtttatttactgtttttacgtacattacaccgcttcttgaagatgttacaggagtaagtgaacatagcgttacatggatacttgtattatatggatgcggcgttacgctcggaaacgttgttggaggcaagcttgcagactggaagttaatgccttcggttgtaagtatatttgcttttctttgtattgtgctgactatttttacgtttactgttaaaagcccaacagcagcaattatcacgctgtttttctggggagcagcagcatttgctgtaatgcctggtattcaagtgaaaattatgaacttagcacaggaagcacctgctttagcttctacttcgaatcactcgtttgctaacttaggaaatgcttttggcgcctttttcggaggcgtaattattaaccatatgggtcttacttcacttccttgggttggcgccatttttgtaggaacggcttttgttattagtacttgtctttttattgtggaaacacgcaaaaaacatagtgaacaatcgtcctaactgtctaacaactgaacaaaaagaaaaaaagagcctttctttgatgaaaggctctttttttgtttctaactcgcttttttcatttctttgcttgttaatcgactgtgcttacgagagtaacctatatacacaataataccaagcacaatccatatgctaaaatacagccacgttgttttaggaaggttaatcattaaaaataaacaagataatacagataaaattggcaaaaccggcacaaacggcattgtaaatccacgttttaaatttggatgcgttttacgtaagatgataatactgacgcccaccatgccgaaagttaaaagagctccgatatttgctaaattcgcaagttctttcaaatcaataaatcctgaaattaacgctccaataacgcctactagccaagtagaaagagttggaactcctgttttctcatttgttttagcaaatgcttttggcagcaagccgtcgcggctcatggagaataaaatgcgtgttgctgcataaatgtaggcgaaaataacagccatgattccaatgacagctcctgcagcaataactcctgccactgcattttgtcctactgaatgaagaacataagccattgcctctggaacattgagttccttgtacgaaacaactccagtcataacaaggcatactgctacataaataatcgtgcagatcacaagtgaactaataattcctattggcaaattgcgctgcggattctttacttcttctgctgatgtagataaagcatcaaaacctaaaaaagcgaaaaataccgctgctccccctgtcacaacaccttcaattccataaggcataaaaggtgtccaattagacggcttcacataaaaagcccctacaataataaaaagcaggataatgaataatttaacaagcaccataaaattatttacttttttactttcttttgttcctcttgaaagcagccatgtaataagaagcgtaatacaaatagcaggaaggttcactaggcctccatttgcagggatcgtaattaattcttttggcagtgaaaaaccaaagccttctaaaaagttgttaaaataagaagaccagccgtttgcaactgctgacattgttaataaatagacggaaagcaacgtccaacccattaagtgtgctactacttctccaatagttgcatatgtataggtgtaaacgctaccagatacaggtatagttgaagcgaactccgcatagcacagcgctgcaaaaccgcatacaatagaagccaatataaaagaaaaaataacggctggtccagcatcattagcagccaccaagcctgttaacactaaaacccccgttcctattacggctccaataccaagaagagtcaaatcgaatgctcctaatgttttgactagagatttgttttgactttgttctaataattgctcgatggacttctttttaaatagttttcccattgcactctctcctctctgttgccactcatcccttaaaaaacttaaaaatgacgtttttttcccatttggctgcgtgtttttacttcagatacagaagtaattatatagaaataattactaacttg

SEQ ID NO: 86 - DNA, 13626 bp, Priestia aryabhattai
  source 1..13626: mol_type = genomic DNA
ctttggtacttacaatcaagttctaatatgattaacatatttttaaaatatcttattgaaactacagaagatgttgatgtgaaagacattcttaaacaaataaacgaagtatcaacatatcaagaacaaacagctaacttacttttgtctgaaaaaggctttaaaagtacctcatttttcaacatccaagatgatttatataatccaaatacgaagttattttcagatcaactaactacagaaattcttaaacatgtaacgagtaacggattgaaagaacttacattgcagtattcggaattaactgatttaaaaatcaaaaaattttttaaagaacttctcgatacttttactgaaatagattattctttattaggattgttaggtgataaaggcatgctacaaaataattctttctcttacaaaaatgcagaagagagaaaagggaaattgttcaaagttaaatcaactcagcacagaccacttaatgcagtagaattgtcacatatgtttagttctcttgcatgtaataatgtgggggttgctctttgtgctggtttttctgaagttgtaaaggatgatgacataaaacattttttacgtgagggagaaaaactcgcatttaaccaggcttcaactttatcgaacattttcagagagaacggtgtccctaccacaactggattggaggctcacgttaataagattgaagcctcaccattgtcagataaactaatagcaaatttgattatgtttctaaatccaataggagtaaccaatttacaaagtgctatagtagttagctataaaagagatcatgtaaatttattaaaagaattaattaagcaggtcgaagacttttcagaaaaaggatttaagttattagtaagaaaaaactggttccatgaacctcctctatctaattggatgcataagtaaaagaataaaaaatagaggtgaaacattatgaaaaagcttgttgaactcatagaagaaaaatttgaattttcccaaaaacatcttcaatattgcaacgatgtataagtatgaattctacacacacatacgtcttgcagcgtatcattaactaagtactttccgacgtatgccaatcccatttgagcttgtttcctaggtggcgtttcaagccgtaaaattgcctgtttctttggttgttgacgaagaggacgaacaaaatcccttaatattgttagttgaccttcatacctcattgcttgtatttcttctaataaaactaaacaattaatagtaccttcttcaagacgccccagtatatcctttttataagaatctaacttactttctttttttatttatttactttgatcttagataactgattatccttgaggtatttacttacagttttatgattaaactgtgatagctgttttggtcgtccaaccttcttgaaacaattctccaatcataaaaactctccaattttcagtaacgtttctccactccattcataatgtgatcttgaaatgattgtccgttactattagggaattttaaatcgttgttattgagtattttacagtctctgattatacttgaatacttaaaagtttttttatttaatatgtaccttatggaattccctaaaaatataccggaaacgaaaaagataatacctaaaaataccggtcctaatagtattgtaaaaatagttaaagacctagaataaattataccgactgttcctaaataagctcctaaaacaaacggaagataataaaatggggggttttcaccctttgcttccctaactgcatcccacatagcaaatacatatacgcaaggataaaacaatagccattgataattagttacttcaatggcttcgttaacttttccattaaagcttaacataatggaggcatttaaattcgaattataattcattaaaaattctaggaagataaatattatacctttgaatatttttctgtttaataactgtccaaaccccggtatgtcaatgctccatagtaacttttataacttatcttcattcatcaataccacttatccaatcaacattattttttctgtatgattcttttaaagtagacaatttaaaagtaataaaaaagcaaatgtcttttctaacttaaattgtaatgaagttattatttgcaatttgctatttgtttatttatggtttgtggtttaacaaaaatagaataaaaataacataaaaagaaattgatatgaaaaaagtaaacttaatatgttttgcatttaatttcaccagaaatggaaacagattcatacgtaatcgatgaagaagcatagcttataaataagctatctcccgttgcggcaaacgcctgagtcgggataaaaacttccaaagtcattatgataggtactagcttttcttcaatggacaacactcctattcagtttttgataccggacgaatgtaaccatttgagaaaattttgttatggtttattttgttacattttcataacaaaggaaaaactgttgcatcgtaaatcatagaacagctaatactaatcttacgactaagaaaggagatgaaactatatgaaaagtaaaaaattagaaaaacgatttctaaagtttataaccgtcatatttttaggtagcttacccttcgttttaaagaaaacccctatcaaagattcactgttggtcttgtttatgaatggatatacaaatgctatcgttgacaggtttctagttaaccgtcaaatacttcaataccctatacgttttatacctaaagagtttaaatcgaatgttttatttgatttcttatgtttaccaactgtttctttatggctttatcatttaacaaaaaatgataattcttttaaagttgtatataagattgtacttaccatcagttcactatttttagttgagttatgggcagaaaaatatacgaaactaattaagtggcaaaaaggctggaaatggtattacagccttattagccttaatataagagctttatttagtcgtttggtaattgcaattattaacattatagaaaagaaacaagaaggttaacctatgctcctactagaaacaggatcttgtgtcttgatcttgttttataggtggaaactcaactggtactacttcttcaaagacaaacaaatctaattgttcagtctcaaatggattaccagatgtttctcagccggttaatgttccgaacaggtcttcatttttccatccagttaagttacccccaatagaaaattcactttcataatcatgagaagaacttgggaaagctgatcagatattagttgtttttcattttataacctttgaatttataaccatatacgctcgtaagatcaacaaagctcttataggaataagtaatgtcaaccggtgtacccacttgaactttatcataaagcttttcaatatctgcattatgcattctcatgcaaccttgactcacgtattttccaatgctgctttcattgttgttgccatgaataccgtatgtatcgccatacgtaccgttagcatttaatcctaaccatcgtcttcctaatgggttgcgaggatcgcccccaagaatatgtcctgtatagtaagggcgatttttaattttgtttaccactttaaaaaaaccaacaggtgttttatcccacgtttttcccgttgctactggatcaacgatttcaatataaccattatgaaaatatgcaagcttgttgtagtacttgttaatgatgattaaatcttgattcgctggtttacttgctgcttctgtttttcctccattaactccacacaatgcgaccattagtaacataagaaccgtcattgatttaataaaaatattcttcataaaaactctcctctttattatattttttatatgaattgaaaaaagcaccttccaaatggaaaggtgcttatcctaacgattatttaataaataaagaggccaattttgctttacaacaaattgacctctttttatttttatctttgttttctttcccttaatagacggttattttgagatataataacactactgaaaacagtggtagcaaccatacccaaaatagagaagaacagtagtgccacaaaattattatttgaacgcatagataacctccattatttgcgaattattgatattatttgaaatatcccagtttttattctctattaggcactatttcagttctactccttgcagagaaacgttctctgatgaaattaacttttgttttgcgtattgctggaactgagatgaacaatattaaatttataaaacctgtttatccggaagatgaattacatactattattgtggtaataaatttcccataataaaaaacaaaaggtagctagaaataggccactgtattttgatctatataaagacaagattacttctaccatttatatagaggcttaaataataaaacacgaagatgtacaatatttatttttaatgagtttgacgggtcttataagaagtaaaagccctctaatttaaaagaaactcgagagcctttcaatgcttacttaaatcttttattttctaatacaattacctttgaattcgttgactttcctatttgtttcgtgtgttcaaccaattctagaatattatgacaacattgtttggcaccaacaactaataaaggtacaccgatgaagtcaatttttagctctctggacaagaaccctcctattgtcatagcaaatggaacagttggtgatgtatttgaaaaaactattttttcatgaatttgatatttgtcttgtaataataggcttaaattttttaaagctggaacaacaagttttgaggactttcgaccaattgtataaacgggattcccctctgtatctaccccatgaaaaataatttttcccatgtcagaatgagttaatttattgaaatagtcaatatttaatatttcacctttagtcagcgttcgacctgtaggtaatttttgtaaatgataagctgctgccatagaagtggtatgtgttccaccataatcattatagataaaaatcatggtatcatcctttagtttttgatttatatccattattaccgtttatgcaattgctaattcaaggatatattaaagatgttaaatttcttaatttagcttaatagtatactcttaaggacattgtatttgaatctgtttcacaaccttaaaggaataaagccaaaggttttctttaaattagtttaacgcggctaaaacacaaaagtgaattttaatacttcgctacaccttctaagttataatgttgtttccaaaatgattatctttcttttaacttgctttccacctaaagtaagtcttcctttgtgtactctattaagaattaaaaaaacatataggttacactgtatactgtatccacctattccatctgtcctcaacctcatctgtacaaggtattgaatgaatggaatagagcaagtaccaagcttgattaagtagacctcttaaaaggcacaatttgttcattaaatgaaaaaaccactattttcaggaagaaaaacaccaaatatatggatttaatatgtagagaaacgttctccaaagaaattaagtttgtttttctggataactaactgatcactggaagcaaatttcagctttttagagagcttttccttgttgtcattgtttttacaaaaactgcttttatcaaagagtttttgtaacgtacgatgtttaataaaccttatttctatacacaatctaaaagttaataacatataccggtgaagaatggaagtagaagaggggattcttgactaataatcatttatatctagatgagaaagttataactataaaaaacgttactgatgaaatgaaaggtttaccagaaaggcaagttcgttattatgaaaatcgagggcttattttccaaaaaagaaattttccaggtatctgaatgtattccttttccgatattgaaagattaatgaacactgcagaaaaaaatcgaaggtggtgctcgaacacgagaaattcgtaaagatttttcttaaagaagggaagctaaaagcgagaactatttattaatgttatgcttttgtttttactctcataacatattactagaagacaaattatacagatacagaaaaaattagatagttaatacttagagcaaacctaactattacgtttattttttactcccattacacagactttcccctccctataaaggaagacccttatagacgaatcaaaaagaaagatgatggaatgcataaattttagtgcgtactttcatacgtttttaatagctctgaaattgtaacacattcataccctttttcttttagggcgggcaaaatacgtttgagagctaaaatagtctggctttttccattcacatggtcatgcaaaagaatgatgtctccattttctatatcatttaatacattttgaacaatatatttcaccccaggtcgatcccaatcacgcgtgtcatgcttttgagaccacaacacaacctgcaagttagagtgttcaaccacgtccacgagtttttggctgtaaaatccttgaaccggcctaaataatgaaggctgatatccacttatattagaaatagcttcctgagttaattcaatttccttgatcaattgtttctcggaaacattgcgagtccaaatcaaatgatgaaatgtatggtttccaacttcatgaccttctcgtatttccctttcaacaatagatgcataacgttcaacacgagaccctacgacgaagaaagtcgcttttgcatcgtattctttcaaaagatctaagatttgtaccgtttcatctgatgttggtccatcgtcaaacgtaagagctattttcttcttttggataggaatagaatgaatgacatgctcttgagatagagaaacggaaaataacggactcatcaataaataggcgttaactttttttccactcattatgaaaaaggtaaataaaaatactccaaccaacaaagctatccgtctcataagcatccccttctttaaaacgttatacattaggataacctattgagtggttttttatgtataacccctctgccatgggctataaatgtgtcggcaaaagaacaccacatatatgtatctaatgtgcagagaaacgatccctggggaaattaactttggttttacataacaaggggggttattttttcagaaaatttttatttcttgttataatcgatttcccaaaaaattcactatctaaagacagttaatatcctagactcctatcttatttataaagcataagtatgatgagaaaaaccaattaaaaattaccttctaacgtattaaacttttttggaaatccgttatttaggtatataatatacaataactttttttaaggatatactaatatagatagcgtgcatggagctttcatacagttaattcgtatagattatatgaggggataatgtggagaagaaaaaggaaacaaacgtgttaaaggatgtggttaagtcttttgcattaggtttactgggaagagattcctagttcaatttcacaaatggtagtgtataatgagactaccttgtaacaaattcttttttatcacacagatgctcttggcagagcgtcttttttatttatccctatatggaagcaaccgaaagccaggtcgttataagtcacaagtatgactgtagtcttggaatcgaagcgttagaatctcccattaaactgtgaacaataagaccgccttttacacatttaccgcactttcaaccttcactgacttcaaagcctcaaagatatcttcttttacactgcatatagacaaatggagaatatctaaaaaaacagttgaaataataatcaactgcttttttgcaagctataatttctggtaatttaacttattgattgaaaggaatatcgtcatatttaaaaaattaggaatcatagacgttggagataagcttcaaactgagttaacaaattcatatagttttcaggtggattaatgtctggttttctttgacgtataaccgatagagcttgatctcttcctaggctaaagcgctgcatataaaacgctgtaatgacaaatcctagacgttgaattcctgctgtatcatgtaatagaacagagtacccggaatcaattagattacttatcaaattagtcatatccatggtccattgcagacttgggggtgaagagagagtaaggggtgcccaaatcatgatccgatgactgaagtcaaaaggtggttgatcctgctttatttgaagattaataatagctgaaatatagctataaataaaactccaatcgaactttcttattcgtcctccaatatataagcgtcctgatatcatttccacaatacttatgaagtagccctcctttataaagatgtcttctagaaacgctctttaattctgataaattttaaaacttaaaaatgccttttactattttatttccgataacttctgttatgtaaattagaaacaaatattctatacatcattcttttcaacaacctatttcctacataaaaaaattgagatttactctttttcttacgtaagagtaatgcttgctttacgattggccacgaacaattttctcttctagtttacatgtccatttatagtatcccgataaaatcataagaaggataggattgatagctgctgaacaccaccaatcccaccagccatatctaaagtatccccaaggttcaggaagcaatgtaagaacttcataaaggactaatgctatatcctaatagatgaagtatattatttttttactgagtaaatttctataaggaaaccaattcaaaaatattatatttacagggggaattaatatagcatgggcaggaaacactttccaatccacaccttttgtaaagtaccaataaccatgatatttaaaattcacataaagatcaaaagttaattgaaatgtagttgtaaatatccaaatatggactatttgatttgctgttagtcttttatttacgataaaagcaataagattaaaggcaataattgcaataataagtcctatcatcactaacttcctttttttattaattttcccatacttatcagtgtaatacctcaatgtgaaatttaggttcctcattgggaatgttttttaggtaataaagagctacataaaacaacaagatgctcaaataataaaatggaaattaaattgttgtatatcattataaaaggggtaaatccatggataaaaggatagagaatttttggagagtcaggtccttacaagataaaatagcagaattagatataaagtattggttacacgatgaatttttaacaggaagctggtggttgcttcttgtttttcttattcttccttggatcatttggagtatctttttaaaccgtaaacaagtccttgaaaccttattgtttggtaccttcattatcatcattacatttcttctagatcttattggaattatgtttcgtttctgagggtacattacgcaattcctccccatttatcctggcgctttaccttttgatttcagcatggttccagtcacgttcatgttagtgtatcaatattttagaacctggagatcctttattgtttcacttatatgtatggctagtgcattttcttttattggtgaacctttttctatatgggcgcatcttgtcatctatataaaatggaaatatatatactcttttatttattatattgtaattggaattatagtaagagcttgtgttgaaaaattagttgctatctctaagtcccatcgattagtaaagtaatgattactacctttaaaacattcttaaagatagtatcctgattcatattagtatggaaattaggatattatctcttaaataaaaaaattagctgtaagaagctaatcttttttatttaactacctagaacatccattatggtaactagggttgtatacaatatacagcctaaacacagaaaaacaactgggtccgttcagttgttttttctgttctcgtaaggatggagaattatctctatgatgcctcacggcgtcttggatagtttggtcaaggtagtaagaatttatttgtagaaagaagaaaagattcttagtgtctaatcattagttttcttcttcataagatatacattcctaagttttggacaatcctattaaaaagttgtcttagtgagaggaggagagagaaaatactaataaatattattatgggatttattgtaccttggatttttgggtttatcttgtacaaaaaggaatctataattgttctcttaattgcaccaataggaatgacagtatcctttatactaaatgagtgggggactaattatttttggcaatttgaaccaatttttagaaatcgaagtttatctgcacttcctttaaatatgggtttttatccggtcttagcctcttttttagtttatttaaaaataaaaaagagggttaatacctttctgcttttaattggttttactctttttactacaggttttgaaggcattggtttaatctttgaaaaggtagagtattttaatacttggaatattattggaacttttattagctatttaatagcatatattattatttatttttattatcgaagtttggtaaaacatcaagttttaaaaaattaagcctacgctctattttctacgagttgctcgaatcaaataatttgtaagaaagagaatagcaaagggaccaattaaagaaataaagtatacaataaagacctttcgtaatttatcattcatgtatattaactccacctttatatactagagtgagtattgaaggatttcttaaatagaatgttcaactaaagaaagtttcattcatgcccattaagaagatggtcttcttctgttcgttaaaccatagttgcaaaagatcttttcataggggcttgagtaatttactcataaagttttccttttaaagtaaaaaggatgtctgcttaaatgaaaagagagtaacttccccattaagttaattttttcagctagaaaattctgagatgaaaaattggaattcaaatatgcaaaaatttgaagaaattgaatatcattatgataagttaaaagtcctgtagcctagctattggaaagaggaagtagtatttacttaccaatggtggataatgattttaattttaattctcccattttatagaaagcaaactagataacctagttgctcaagttatgcttccatctcttatcttaataatttatcatctatttttgctatatagaaatcttcctttgtatgagtgaataaatagataaaaaagaacgctcaatatacaggaacgtcccttttatcacttttgattctcttttatccctgaaagaaatgacttgtttcgtaagccagcgcgacgtatataggcttccactgtaatatctacatctaactttggaaagtacacatcgttccattccttttttaatttcttaaattgatttggcctagtacggtgaaccacttcgccaaaccccaagatatccgttttgtttttttgcgcacgttcaatagctgtctttagctcttttttaatttcttttctcagagattgttcgatctttgtgatgacctttggattagtgatatcaacaggtacctccatttcaccgagatctccttcaacacgcgtatgaacagaaatatgaggttgaccattcttcacttgggcagacacacttgttttttggcgtacagtttgataggcaattgcttgtttttttccttcccaattaatgttaatatcagttccttggattttgtcgagaatccataccgttcctctggctggttttccatacagccaatctactagttttccctgttttaagacagcaattccggaagctcgaagtgtcgattcaggcgcactttcttgaaggttatccagcttttgtgcttgttgcggattcccaactaggcgaaatcctgatacaacggttcctcttccaggagattcaaggcttttcatcacctcttggagcgatgtttttacactctctccccattttctttccgtaaactctaaggtttttagtaccttattcgctggaatcttatcaactggagttaacgttttcacaagatcagctgcggtcgaatggttcgcaatcacgagagaggaagtattccgaaattccgggtctcgatcaatcgcatcaattaatgtattaattccttcttctcttgccattttttctccaactacgaccaagtttgcatgagcataatacaatcgtcgagaaattcggcctgaagcttgtctacttgcttcgactatattatcaccggaagccgagtaaatggtaataggagggctttgagtaccgcctccccctccttgtataccagccacgttccctggattaataatttggagtgttagatgatatctcccatctttcgttttatcgatacccatagctgccacgatggcaaggtccgttaactcttttttactccaacaactggtgagcaagaccatcatcgtcatcagtagtaaaagaaaagcccctttacgtttcattattgtcaccttcttcgcagtctttgtttgaacgcataaaaaatgaatcctttaacaccacaacttctccccactttcacttgacgaacgacgaaatcggaactgtttcctgtttaatgatgttaagattcgttcatggtgaatcccgtatatgttctaatgaatacattgttttgtagcatcaaggtatcgattctttcttatgtttggatttttaaaggataaagacatatttccagtgctttttttggatattttaaccacgtaccgaactattatgtaaaactgaacaaaaatgtttctacgccatactagcagaaagagaagaagatggtgggggtaacatggtatgaactaaataaaaaagcccatcgacctaagttaatgggctttatctttcctatatgaattgttagactaactagatttgtatgaatcaggttataattgattttaaacaaaaatcttgtatatagaattgatgagaatgaataaggaaacacgtaaacaaagaatagaggaacttaaaagaaagaatgtaaaaaaacaattggaagaaaaattcaaatgcatttgtgcttctataactgattttgaattccttacatctaaggaaattgaattgaggtttcaaaatgtttattctaacgatcaagagccccagattcgattcaaacataatctaaatagaattatgaaggaaatgtcctttttacaagaagaattcggcgcatatagaaatgaatatatattgctatatcagaaggaaatacttgcttattaccgattaaaattaaggtttgaagacttttggaataacttaaacctaatagctgactttttaaatcttgaagacgagtcttcactctttttctttaccttactaggacatcaaaagaatttcggaatctttatttatgaagatgagtatggattagatcatattttattttgggatgaaaacttttgacttcctagaagct

SEQ ID NO: 87 - DNA, 13287 bp, Priestia aryabhattai
  source 1..13287: mol_type = genomic DNA
taaacagcaatattctacctatgtcaaatgaagatcatagagaagagtaaagacctgtagtgtgtagtttagtatatctctagctgagacaacaaaacataaaaatatctagaatcagatagagctactataaatatcgtataagatatatgaatgttcttacgagttaagaattattgtttttcttcttttaaaagaagatagcaaaaaaaggctacatagcttcctttgaagctatgtaaccttttttacttccgaaaattgattatacaccaaaatatctaactttaaactttaataagggtattagttactataaggtttaattattttatttacattcatgtattcgttttattgtgagaagtagatgcacgaaccactagttttggagataaaacaattcgttgcttcgtctcctttgaatcttcaatctcctctatcaatagttcaacaaccttcttactcatttcacgaataggctgagctatcgtagttaaaggaggatcacaaattgtcgaaagaaccgtgtcgtcaaatccaataatcgatagatcatgcggaacttttattttaagttcacgcgcaccttgtattgccccaatcgcaagaaattcggttgaggcaaagatagctgtcggggaaacaggcaaatgtagaagttcacgtgtagactgtctcccctcatcaagtgaagtattattgagagacactaaactttcatcatatgacaatcctgctttctcaagggcttgtttatatccctcaaatcttgctcttatcgtcggaaacttaatgtcttcagtaatcattgcgattcttttatgccctaagcttatcaggtattctgtagcctcataccctcctaaaaaatcatctactaatactgcatccacagcaagagaagatacgtctctagaaagtaacgcaaccggaatctcggccttaagcagctccttaatagccttatcctcttttaatcctgtagcaattataataccatctatgtatttttgctttaatatagaaatatactcgatttcattttttaaatcattgtccgtactacaaatcatcaaactaaaaccaaatttcttaacatggttttcaataccccttgctatttctgccataaaagggttcgcaatattaggtatcagaagcccaatagtttgaatacgctttttgacagatgctacgacactaggttgatagtttaactcatgcatggtatctctaaccttttttctggttttctctgcaatactccccgtattatttaatactttagaaacggttgaaatggatactccagcttcctttgctacatcatatattgttggtttcattccctttccctcttttctcttaacacctcatacatttattctaacctattttagttataggtaaaatggttgtaaaacaaagactaagatactgattgctcacatcatacttcttgtgggattattatttgttaactttaatctacaggagacatcagtaacaaagtttgttagcttattggagtaaagaacaggactatcttttgaagacctccttatttacccttgatttcgctcatgttagtgctcgtcacaagcttcttgatacacttgaaacatcttcacgtacaggaatggttaagaaattaggctaaatccctttaactaagttttttgaactcaaaatgacaaacttcatatgacttgaaaatttcttatcaatataaataaaaatttcaaaaagcctatccatctttatgggtggtctttttgatttctcgttatttctatttaccataatgtttatttgcccttttattttgatgtaggtttcatcgactcttcatgagttattggttgatttaagatgatgccgtactcttttctctaattgaggtccatattgatgaaccaagcgcataatggtagtgtgagcgattgataaccattgctcttccagcatttccactaaatcacgaaaactcaggttgtactgtaggtactaccttactgttactaaaataacatcacgccgataatgtttctatttgaacaagtttttctctcccatactgatcacacaccttttttaaaataatagtatcagtgtgtccaagattgagagcttacttgtaagtgcattgaaatttccgcaccagaatccttattcttctatagacctgatttgatgaaaatgttggataatatactgtttgaagttttcaacaacaggagatagatattttccttcaacccacgaaaccccaatcgtacgttgaaaactcgatgaacaaatgcgtatttttgcgaggttagtttgatccaaccctttaagatcagggagtatagatactcctaaaccagctgcgacgaaccctgcaatagtagcagcttcttcaccttcaaatacaatagtaggattgatatttgcctgttcaaaaatatcgtcgattgttacccgaagagcatatccttctcttattaaaatcaaggactcctcagcaatctcctctaccgtaacatgttctcgtgtagataacctatgtcccttaggcacaaataaaaatagctcttcatcccataaagcaatccatttcacaggagattctacaggaaaagaggccagtaaacacagatctaattcaccagatgtcagcttctcctgcagccagttagaatggttttggtgtaactgaaaatgaacgttagggtattgtttcttgaaccctgcaattaaactagggactattgtgactcctaaagtatgtaagaatccaagtgaaatttcaccttggtctggttttaaaagtgaattaatctcttcctttccttcttcatagtctttcataatagaatccactttcttgagaaaaatttctccgtatttatttaacttaatagagcgcttttgcctatcgaaaagagggactcccaaatggccttctagtcgcacaatagatcgtgaaagagcaggttgactaatcgataaaatttcagcagctttcgttacgtgttgaacgcgcgcaagagtttgaaaatactcaagttgttcccattccattaaaatttcatctccttcagtataatcattacatgtaaacattaaaaatatacttattatgcattatacattataaaacatcaatgctagtataactttgtcagtaaaaaatttaaactattttttgtttttataaaaatcgaacaaaatttaatgtgtctaaaaggagaagttaagatggaatatagattagaaaaagatactctgggtgaaattaaggttcctgcagataagttttggggagcgcagacccaacgtagtaaagaaaactttaagataggcactgaaaagataccagaacgtatgataaaggcctttgccatactcaaacgtagtgcagccaaggcaaatcatcgccttggaaatttagaaagtgaaaaagctgaagcgattgtaatgatttgtgacgagttaattaaaggtgcatacagcgataattttccacttgttgtgtggcaaacaggaagtggaacgcaaagtaacatgaatatgaatgaagttatagcgaatttggccacagccttattgaaagagatgggagcaaaaactacaattcatccaaacgacgatgttaatcgtagtcaaagctcgaatgatacgtttcctacggctatgcatgtagcgagtgttttagctgtttatgaacaattgcttcccccacttaatcaacttagaaacacattagagaaaaaagccaagcaataccaagacattataaaaattgggcgcactcatcttcaagatgcaacaccactaacccttggtcaagaaatgagtggttgggttcatatgcttgatcgctcaaaagaaatgattatagaagcaacagaaaagatgcgcgatttagcaatcgggggtactgctgtaggaactgggattaacgctcatcctcaatttggagaggttgtgtcagaagaaataacgaattttacaggacaactgtttaaaagctcattaaataaattccatgcattaacgagccacgatgagatggtttatacacatggagctttaaaggcccttgcagcagatttaatgaaaattgccaatgacgttcgatggttatccagtggtcctcgttgtgggattggagaaattactattccagcaaatgaacctggaagctctattatgccaggtaaagtgaatcctacccaaagtgaagcgatgacgatggtagcagcacaagtaatgggaaatgatgcaacaattggtttcgcagcgagtcaaggaaactttgaacttaacgtatttaagcctgtcattatttacaactttcttcaatcagtaagacttcttgccgattcaatgcaagcgttccatgataaatgtgctgtaggaattgaaccaaacatcgaaaagattcaacaaaatgtagaaaactctctcatgcttgtaacagctctaaatcctcatattggttatgagaatgcagctaaaatagcaaaatatgcccatcaagaagaattaacattaaaagaatcagcactcaagctgaacttgttaacagaagaacagtttgataacatcgtaagacccgaaaacatgattaatccttctatataatgttgattatggatgtctgcatgttatgaatgaatttatgcgtgaagtctttacgaagaactaaaggattaattactgaccttttacattatggctatctaacgaaccaagtacaatgtccataaaagtatacttctttagaaacacgaaagtcgcagtaaaagaaggaactgttaaataataattcatattctgtgatttagaagtgtaatatttggtggggaaattgcttatttatcgttagtaagtgtagacagtaaaataatgatgtttacgaaatattttattatttaattaacgtaatgaatgttttcagaatataaaaaaggtgtcctaacttactgaaggacacctttttattgttgcattaactaattcttcttcaccaaacaaatcaagtttcacattttgacaagatttaatggacacacacgtaaattagaaccattagaaattactgattttattgagcgtaaaacgcttttaaaatacaaaataaaaacctaacatgtcttgtttaaaagagcgtgtgagatttttgttaaaaagggcatactaacgttatctgaaagaaagaggtgtcgctatggaatctccttttgaaatgataacagatctggacaaagtcgaaaatgcttattatgtagaagtaaagcctggtgagtacaatgcaaagtattggaataaagaatcggtctattttgccgatgaagctttttcttatttctacaccacgatttgcaattatgtgccacagtatcaacctaccgaagtgacagaaatcaaagcagaaacatggctgcgcatcagtaatcagctacaagaactagcgcattttttgagtagcaatcctcctatgattaaactaaagaaatggattgattttagcaaagtggaggaaacgtacaaacagtttgatcgtcacaaaaacaagtacattcgtgagttaattaacatgatcgaccaatttacagcgtggttaacaaaggtgtgtcaaacacaatcgtacatcaccattttgggcacttaatactgcagtaggtaagatgtaaatggccttggaacatgcgcttttttataggctgggggtgacttgtctctttttagaacaagagaaggaaaggtgtctcaacttccacaattctaaaaaagtttaatcaaaaccatatataaatgttgacatagtcattgactaaatattttttttactaattggcctacttgttttgctactgtttcagtatctcctgttaattctcctaatacataagattccattatacccacaatagccatacctgaaaatttcaatataatatcttcatcaatttgtttatctttagctgaagaagcgtctagctttttttctaagtcattaataataaaagctaaaagtttttttctaaaagagaaggtacttgtacttttaaaaagcgtcgcaaaaaaaattttatgtgtttcgaaatattcaaaccatatgacacaacctttaaatagatcgacattttgcttatattcaaatatcttttctaattcttttatatgattatctacaatttgatccaataaatccgcatgatgaaatactagaagtgattcatagttttggagaaacaacaagaagagccattgaagctggttttgatggagttgaaattcatggtgcacatgggtttttacttcaaaacttcttctctcctttcttcaatagacgtgaggatgaatggggaggttcactagaaaatcgcttgcgtttcccacttgcggtcgttcaggaagttaaaaatgttattaaaaagcatgcaacgaaaccgtttattttaggatacagaatatcacctgatgaacatcaaccaggtggtttaagaatgcaggatacttatgaattaattaatcgactcattgaagcgaatgttgattatgtacacgcttcgttggctaacgccctctcttcaaaaccggttgatagtcaagatgataaaacgtatcttgaattaattggtgagcatgtaaaagacagagttcctgtcatagctgctggatctatggtcactgcagatgatgttaaaatggcattagataaaggactctctctagcagcaattggtcatacgttaattatgaatccagactgagtaaaaaaggttcaaaacggaaaagaagccgaaattgaaacagcacttaaggctactaaaatcaatgagattgagcttccagaaaaactttggaatgtcattcgagcttcaggaccatggtttaagatagaagaataattttacacacaatttggctgtctactcatagaaataaagttaagggttttctttgagctaatgaaattattttaatgctttgttatactccttgaattataatagagtatttaaatcgctcatctttcttttaacttgctaaggaagtaatactacactaatattgacaggtacaacaattgatttttaaataagaggtgtatcaatgaagctagatgagtttacaattggacaagtatttgaaactaagtcccttaaattaacaaaagaagatattatgagatttgcaaaggaatttgaccctcaatatatgcatttagatgaggaaaaagcgaaacaagggagatttaatggaattattgcttctggaatacatacaatggcgctttcatttaagctttggattgaacaaggtatgtacgaggaagatgttattgctggaacagagatgaataatattaaatttataaaacccgtttatccaggcgatgaattgcgtactattgtcaaagttattgataaaaaaacgaaaaaaagtgaaacgggaatccttactgtcttattatctacttataataaagagcaaaaagtatttgaaggtgagttgtcggtactgattaaaagataagttcttattgaaaaagaagaaatccaaaaactttgtcgacaataaattaaatcaaaaggagcagtattgttaatgtactgctccttttatttgaataaatcccgagatagttaagaattaaacgttaaaataatatttaacctatcaattagtccttttactacatttttatctatatcgacaactttttaaatagcaacacagcattatgtccgccaaaaccaaaaccattagaaatagcatagttgatctttgtcttagttgcatgatttggcgaataatctaaatcacaatcctcatcgggtgtttcataattaatagtaggaggaactatatcttccataatacttctgagggttattacagcctcaatcccacctgctgccccaaaaagatgtccagtcattgatttcgtggaacttacctttaagttataagcatgagcaccaaaaacacttttaattgctttagtctctgatttatctccttcaggggtgcttgtcccatgcgcatttatataatccacttcagtggattttatattccccatgtctaaagccaatctcatggcatttgcggctccggtataatcaggggaagttatatgataggcatctgttgtggaaccatagcctacgatttctcctaaaattgttgctcctcgctctcttgcgtgttcatactcttccaagaataaaacacctgctccttcagacatgacaaagccatcacgacctctgtcaaatgggcgacttgccttttctggaaaatcattaaaagtggacattgctctcattcttgagaacccagcaaaagccagtggattaataggagcctcagcccctccagctaatatgccatcagaatatccatgtcgaatatttagaaaagcctcaccaattgcttgatttcctgttgcacaagcagaaacaggtgaaaagctaggtcccttaaaacccgtttttatagaaataattcccgaggccatattactaatcatcataggaaccataaatggagaaatttttcttggtcctttttcaattaaagccttatgattatctaatgtagtattaattcccccaataccggaaccaatataaacccctaatcgctccttattcaaactttgtaaatctagattcgcctgttctaaagcttgttgagcagcagcaaccgcatattgtacgaataagtcatatttccctaattcttttttatcgagatattgctctccatcaaagtcggtaatataacctgcaatttgggtgttaatattattaaagtcatcagacttaatttttttgatacctgacttaccttctttaatattctcccagaacgcttgaaccgtatttcctaacggggaaacgactccatatcctgtgactacaactcttcgtgacatcaaaaacactcctcctctaaccttcttttttacatacaattcaatctctacttacaagtattgctggcattgcctcgatgagaaattttgtacctactcctacgttatgaatattgttttctctgataataatggttatcgcctaccccatgcacccgtagcttcgaacattgcttttgatatttttccgtttttaaaagtttataaaaaccatttttatacatttgttaagttcaaacttttttcttttttattttcccgttgtagagccactagtatgaatgtaatgacgataattcccattaaaattctaaaaagcataattatctcatgagaaatggatggccctccagtaaccagtttcatgatcccgtcaactgcataggttgctggtagaaagttacttacggtttggtaaaaatttgacaataactcccttggtatagttgaaccagatgataacagttgaatagatagcatagcaatatttacccatccacctgcatcacccacaataaaaaatggaacctgggcaaggaatagaaatgttagtacatatatcatttgaaaataccacattgttataaacccttgatgagaatgtacgcccattgcgtaaaccataatagatccaatggtagaaattaggatggtagccgtaataattaaaagaactcttgccccaaacctttgccaacgattgtataaagtcttgaaagctttagcagctttgttcatttccataataaatagcattgaacctgtaaaggatgccattactaacatcataggaaccatcaatcttgaaaaatttgaaacttgattaatattgttaataacgggatgtatacgttctgatagtccttgagacaatccaatagcttgattagaaggtacatgcatttgctcaaaagtaaattgtaagcccgacttcaccgactctttattaatcgtactagttactttttgctcaactgtttgcattacactttttaacatacttggatttgattcgtttaaagagtaaataattttcgcctttttttcattattttgaagcgtagaactaaaatcttctgggatatagattaccatttgaactttacgatcatctagcttatccattgcactttttaagactgaagactgagtaattttaaattttaagttttcttctaaattatttgctatttgtgctcctatttcagagtcttcatttacaataataattttaaattgatcgatgcggtcagtaacatgatcatatcctgtaatccagataatgctaaataatacttgaaatataattgcagttattaaaccaataatgacactccttgtttttaataaggataaatataaatttttcatttcagtaattccccttacatttacttatgctttttttaatccatattaacattgtgtatattgacattgttaatatggatttcatacattatatgaccctaataaaactacctccttttgcacggagggcagttttttaagagatttttctatgaaccgtatcggtaaagaaataatgtatcgaacctaacaaaatgattaggttattttccactttttattaaaatcttctcctcttttatgaaggaaagcacttgctgaaagccttgaacagctttaattgtccttttgtgcgaattttacctgacatgactgccgataacacccctgtttctttggccatgagccgaatccatgtttgactgtctgcaataagttggaaatccgcatctcctatatgtcccttttccacagtaagagtcttgttctgaatgataaccgttgcttgagcattttcttccccagtaaatgtaaaatgataggtagcagctaaatcttttgcttgatttctctgaaacatatgaggaagcacttgtaaaaacgctttgattgatttcgatcgtaaaccgttgctcaccggtcgaacttgtttatgtggaaaacgctttttcacatgatcctcagcgtcggaattcggtactacatacaccatttcgcttttatcctgcagtggtttaacaacgtctttcaaaaatttcttacgatcttcaagaaactcaccaattacatcttctccagcaggacaaacagacaaacagtaggctgctttatagctagccccaaaagaaaggctctgccacatagatgctgtttctgtatcatttactttgtccttgtatgctttagaatttttgctgtcggtaatcttctccacccagtcggtgaagccgccggaaaattctctatagttatgcgtataacaggcggagaaattaaaatgaccatcagcgccaatagctcctaccggacaggcagctacgcacaatttacactctaaacacggattataatcaatgggctgactttccgaagtcatatctgcatttgtaaggatcgtacctaacaaaataaagttgccgaacttgggatggatgacatttctatggatgccgatttgtccgagtccagccgcaaccgcaattggtttatgtgaaatgacccatgcttttcccgtgctttcctgttccatcgggaatcctgctggcggattcaacgcttttatgccttgctcttcaagctttttcacgatttcatgtccgatatgcgttacgttatcgacaacatgatgaaattccgtgtttgcaatggatcgagccgtcgaacgcaagggctcgcggttcattttgcagacaaaactaataagcgtcctagcttcaggaaacaaattcaaaatctcttctcgttggtccccaagttcgtttcggtcaatagagacgaacccaacatcgtcggctcctgcatgtagacataaattccgcaaccattgtgtatctatgcgcctgccttcggttccctgcatagtttcctttttctcataatattgttttacagaagggtgatcatttattgtcacctttttcatagcactcaactccttagtcattcaatttaacgctcatctgtcagtactactctgtttgatgctctgcccaatcatttgaagtcgtgcattccatactgaattcgtaaaattgatttttagttctagcgttgtgaaactttctaccaaggctaacagagcttgtacggaaagcttatcggaacggtcaagacttaaagtttctttcctcttgatcatcaatgatcaggtgatatcaactatgacagcacccttatcagagttcgtagaatcgttctaagtattataggtagaaaaagagaccgaacggtcttttttaaggtaaaaaaaagccatagtcggcttcttttttagactgttaggaacaggtctgatcaagaaacgatctaagatgatgcacagctcttttcatgtactcttggttcttgtaaagtttgctaagtgctagcgccccctccaacgtggagataaacacagtcgccacaaactcgggatccactccctgtttaatctcacccttatttatgccttcctgaacaagattacgaaccattccgagtaagctatccattgcttcacggactttttcttgaagtaatgggtctgcgtcatccgcctcaatggcagcattcataatcgggcaacctccagggaacaattccttttcagcaatcccctcgaatacggaaacaatggaaaaaagacgttccatgcatccttgtttgcctgtcattgcttcagaaaaaagatgcctcatcgtgtcaatggaaaaggaaaaagcgctcagcattatttcctctttattttcgaaatggttataaatccctccttttcgaagaccagtctcgtgcatgatgtctgatatagaagatgccctatatccttggctattaaaaagtttcgatgctttttctaagattagggctttagtctgttctcccttgcgattaaccatgaatctatttgcctccgtttaaaaaaggtttacgaaaatcttaagaccgtttggtcttttttcattgtacaattaggtagtatctttgtaaagcacaaaaaataataggcatataaaaaggcagcaagtctatctgaacgcggtaacattaaaggaacaggtactaattaatacataaaagaaaacatgctaaacttctaatgattctacaaaatcacttgtatgcaaaatattttgaatatgttatattttttctaatcaaaaaatcacagctaaagatggtgaggcattcattaaaaactacgatatacgatatctgtattcattttttctaggaaaatttccacaaagagtgaagcaagttaataaacccaaacttctttttagagtttaatacctgtccaatatgtactacttcatatcctatggaaataggta

SEQ ID NO: 88 - DNA, 12610 bp, Priestia aryabhattai
  source 1..12610: mol_type = genomic DNA
tttagaattgaacatatgtataaaaggtacgttttttatacattgtttgagttgatgccatcaactgaaagcctgaaaaaaagccgtatatgacagaaaagaaatattatgagaagtaaacattttccctattacgccgtcgaatttgaaaaccctttgttgcaaccagcaaagggtcatttttattatattcgagcacccgcaatgtttcggaaatatagaaactactagcagtaaatagtatcgtggatgatttttggggaaaataaaaaggaacctgaatgttctaatagatgtaggaaagttgttgaatttccatattcactttttttatttaggatttgaaacaagaacataaattaatgtcaaggagctgtaaaagtgaaagcattacaggaatatcaaaaatggttaaattacaaagagttacccaagaaactttatcaagaactacttgctattcagggaaatatggaggcaattgaagaacgattcgggggtgttcttgattttggtacggccggacttcgaggaatactaggtccggggttaaatagaatgaatatctatactattcgtagaacctcttgggcactagctcaatatatcttacgtcaaaatgatggcaaagatttgcatagtatcgtaattggatacgattctagacatatgtctagagagttcgcacaagaagcaggacttacagtagctgctgctggtattcgtgcatacgtctcaccttatttatgtccgactcctgaggtatcattctcagttcgccacttccaagctgatgcaggtataatgattaccgcaagccacaaccctccagaatataatgggtttaaagtatatgatccaaacggatatcaacttctacctgacgctgcgtcaaaaatacatagtatcatgttggaaaatcaggatgtattcaaactttcaaccttgtgtcttgatgatgcaacaaagcgtgaattattccagtggattactccacaaatacgaaatatatatacaaaaacaatagttaatgaagtacagtttccatctgttacttcttcgcaaagaaaggatctatctattgtctatactcccttgcatggtacaggaaatattcctgtgcaagaagtattgcaagcgtctggatataacaaagtgcacgttgtaaaagaacaagctgatcctgatggtgattttccaacagtcaaaagtccaaatccagaggaatctgaagcattaaaactaggtatttgtcttgcaaataaaattcaggctgatatcgttatgggtacagatccagatgccgacagggttggaattgcagtatgtaatgacaaaggtgcctatcagcttctcacaggaaaccaagttggggccctcttggtggaatttattcttaatcaacggaaaacagaaaatagattaccgaataatgggattatattcagtacaatcgttagttctacacttggtcaagcagtggcctcatcatataagattcccatagaaaatacactgacagggtttaaatacattggtgaaggaattacccgttatgaaaaagagaatgagcatacttttttatttggctacgaagaaagttatgggtatttaatctcccctattgttcgtgacaaggatgcagtacagacttgtttggctattgctgaaatgacctccttttacaaagaacaaggtaaaacccttttggttgtgttggaagaattatttcagagatttggttattacaaggaaaagttgttcagaattaccataaatggaggaaacgagccaaataagacagaattagtaatggctaaattacgaaaaaacattccaaaaattgagggacttaaactagtatctatcgatgattaccatacattaaaacgaacttacgtaaatagaaagggagaatcaacttctaacacagagcctttacttttaccaagctcgaacgtattaaaatattggtatgaggatggttcttggatagcgatccgaccctctggaacagaaccgaagcttaaagtttatctagctgctcatggaacaggctcaacagaatgtgaaacaaaaatacaacagatgcaggcagctatcaaaaaccatataaaataaagagagccatatggctctctttatttttcaccatttatatattctttacccgacagtgctcgaccgatgcatgcttatatgaacgactacctgatgtactttaccatcatccacaagttttaagtatggctgattctcaagtaccttaccgtcaactacccatgttaataaagctccataatctggtctacaataaacctcaattgaataagtagtctttttatatctatagtcgatcgtaaacgattcccattcagaaggtacacagggatgaatatatagttgatctcccaaaagtttaatgcctaatacatactctaatccagcttgatacatccagccaccagctcctgtataccatgaccagccacctcgaccttcatgtggattcgcggtatacacatcggctgacattacatatggttcatttgcatatatttggacgtcacgggatgtttgtgtatgattaattggattaagcatagaaaaaagctcaaatgccttatcacgtcttcctaacatcgcccaagctacaattccccaaataacaccatgagtatactgtccaccattttcgcggattcccggtgggtatccctgtatataccctggactcgggcttgttttatcaaaagcctttgtcaacaatcgtgcaagtttcatatctttatccacaagctcacggtcaaacgaaagcatcgcccgagactgtcgttcctcattcgctccctgagaaataactgcccatgactgtgcgatggcgtcgatgcggcactctttatttttaattgatccaagccatgttccagcatcagtatacgcacgacgataccacgcgccatcccaagcagaatcatttaaatgattctgcaattcaagggttatatgttcaaactgttttactgtatcatgaggaatgatatcattctcaaattttgtaaaacgtttcagaatgtctaatagaaaccatcctagccagacactctcaccttttccctttgcgccaactcggctcattccatcattccaatcaccaatacccataagtggaattccatgttcaccaaatttcagagcatgacggattgctcgtaggcaatgctccaatagtgaatctttctcatcagataacactgtatcttcataacgttctaattcttcttcttttagaacttcgctgtatagaaatggaacttcctcttttaaagtctcataatcacctgtctgttctatatatcgagatacagtatatggaagccacaataaatcgtcagagaatttcgtacgtatacccttatgtgtttcctcgtgccaccaatgttgaacatctccctcttgatattgatgtgcagcattaatgagtatttgcttcttagtaatagaaggttctgcatgcaaaaatgcaagtgaatcctgaagctgatcgcggaacccatatgcacctccagcttgataaaatgctgtgcgtgcccacaatcgacaagccaaggtttggtacaataaccaaccattcatcattagatccatcgctcgatctggcgttttaatctggacttgtccaagattatgctcccaatattgagcaacacttgtaattgtgtctttgtatgcagaagtatgaccatactgtctaataagtgaatatacttcctctttggaagaggtacaaccaattaaaaaagtaactgttatttcatcttctgcgggcagttcaattatagtctgaagcgctccacatgtattagagaatgtgcctgtacgattagataatctcccctctaaaaaagctgaaggatattctaatgtaccaccacgaccaataaattctcttcgatctccggtccaagaaaatagctgttcagatttttctgctaaagaatttggtaacacgatatgcataaaaccaaccgcatcacgaaatgtctcttgatatgcattgcgagcaagcaatgtgttatgattcttatcccattcggtaacaatgtatggtgcttgtgcttccctcatgactccaagaacccattcagcgtaataagtaatagaaattctcttcatatttttacttttattgcgcaggcgaagctggataagttttaacggatctttcaatggaaccgttgcttccattgtgtgtactacatctccatcgagctgctcaaatcggctaaatcccctgccatgagtaactttgtatttgtgctctcggcctgctggttttggagtagctgaccatacacgactagtatcgagatcgtgtaaataaaggcattctccaggttgatctagaactggatcatttgtccacggtgtaagtttacactctcgtgagttacgccaccaactgtatccggtgcctaactccgtgaaaatgcaaccgaattgtggatttgctattacattactccatggttttggtaaatatttaccatcctgtacattaatctggtaagccttaccaccctcaacaaaacttccccaaccgttaaaaaattcaccctccttgcaaatagtagatggttgctgtttctgatgtatttttcgagaagaaattgcttcttgctgtatcggccatatttctccttcatcaaattgcaattgcgcacgtaagcttggacctccagcccgtagcaagacacgtgataccgttataagaagagttcgttcagcctctttcaactgcgatgcctttaaccccactattcgtttcatctctccaatcccaagtgtagcaaggttatcgcgtagacggttcatgagctgatcctgatatccgccaatagtttcatcaagtactaccaagtcaatttctaatccaagtttgcataaatactggtgctgacgtgctaataagattacaaaaggtaaatcagccagattactgattgaaacaacaacaactggtacgtcaccactaattccatgtgaccatagagaggattggcctaaagtattctgcacaattgcacccccacgctcttgcgtcagtggtggagcaaaaagacctcttcctgccaatatttgtgccactgaagcctgcatcggtgttaaatgcatgtgacgaagatcaatttgggagcgtacccaagctaaatgaaaagtgcgatctgcttgtttagattcacttaagcgatgaataatgtctaggacattctcacaattttctgcaatccctgttataatatacacttttgctgactctccgggtgccaattgaatacggcgtcgcatgataaaagctgggtccactactgatccaacagatcctcgcaagcgcgtatatattccatttggagattccagtgaataacctcttttaataaattcggctctatctgtttcaaattcgtaatcctctgtttcatctccatcaacataaatggtatgagctgcccaagtctctttttcctcgtcctctcttttacgtctctttgccaacagacattgattgttttgatcatggctggtttctataaataacttgctgaatgccggatgtgcactgtctgccgatggacttgctagagccaactctagaaatgacgttacttctagcatacgttcctcatcactgttgttgatgatttgaaggcgttttacctctgcgtccacatctggagaaatagtcaattcaagtttggaggaaatgttgctataagttccttcaaaagttgttttgtcaagacggaacccagctttcgtatcttgagttccttgacgaggaaatctgttagcgctccatgtttcctccgacttagtatcatgaatataaacaatagctccggaagtatcaacaactgaatcttctctccatcttgtgacggcaagaccattccatttgagcatacctgttccatcattcgtattcatactagtcatggaaccatttgacaatacattaatctcaggtacaacagtgggctcaataaatgtccgatcttcatcatttaactgaccatcaatttcagaaaattcctcgtgtaacccaattggttcctcaattaacgctgcatttttaggcacacgttcctgtaaaatcaaatcagctgcacacacacgtgcatcagcatgaaatcttttaatcatgatatcgtccgccagtaagttgataagagtcagcatgctcatgccttgatgatgagccatatagctttgcactactttatatcgttgtcctcgtggtagtcgggctgtagtaaaatcaacagcttcataaaaaccaaattcgccttttgcactgtaatctttgaacttatccaacgctgcaagtccagcttgacctgaaaacggaagggccatcacagtagcatatggcgcgacaactaaattctgttccaaacctcgatcaagtccaagtcctggaaccccaaaagctcgatattgataattcaattgatagtcaaatgcataataaccactttctgaaattccaaacggcacttgatgtttatttgcgtatgtttgctgttgatgaataacaccacgataggtggaatcccacaccgtatttttataggtacgcataatcaaacttggcatcatgtactcgaacattgttccagaccaagataacagcgtcttattttttcccgaaattgtcattgttcgtcctaatgcaaaccaatgagaaatcggaacttgtcccaaggcaattgctacaaaacttgcttgtctagcttctgaagccagtaggtcataaagagttgtatctttttgattggtatcgacatgatagcctagacaaaatagacgttcatcagaattatataaggatttaaaattagtctgctcaataagttcctcgatgtctctattgagattctcaatgcgagattgaaaatccatttctcgctgactccattcagataaagcttggcgcacaagcatcaagtaagcaacaaaatttccggaatcaactgtagaaacgtatttagggaatagaggcttagctgtttgagtatcgtaccagttcagcagatgcccattccatttttccatgtttgcaattgttttaactgatgcttcaatgcgcttaatcatggtaagtgtatctataaatttaaggtcacgcgcagccactacactagctaaatataatccaatatttgtaggtgatgtacgatgtgcgacagcctccttcggatgatattgtacattgtcaggaggtagccacgactcttctgctgtcacatactttttataaaatgaccaaatttgcagtgctaactcctcaagttctggacgagcgccttttagccaagtacgtggatccattttacgaggatggttcaatttctgtataacaggtctagctagaagccacataacaagagcaataacacttataatacgacccgaagtgctatcagaaaaccaagctattgcagaaaataaaaaaatcacaatatacccagctggctcgtacataaatacgcgtcctttaatagacctgcgatccgttactgcagatgtagtccactcaagtagattgcgcttactaataaataagcgataaagtgttcgtatgatagcatctaccgcaagaacagccgaaaatggaagagttagtagttgtacaagactttgcagaaaactcacgccgagtatgcgacttatgtttctaccaagaactcctagtacaagagcacgcaaggaggggagaaaaatcgttaataacacaattgtttcccatacccatttctgaccaggaagcaagaatagtccaagtatcgcaattaataagagagccggtgtcagtaggcttcggcgtaaattatcaattatttgccaacgtgttaatccacacaaagcaacgcgcttattctcaccgtgacggttcttacatattacacccaaccatttgaggagttgccaatccccgcgaatccatcgatgagcacgttgttcataggcatagaatgtaggggggtatgactccaccacttcaatgtcagaggttaaccccgtacgtagaaatcctccttcaagtaaatcatgactcagtacatgctgatctggtacacgattaatcaaagtcttcctaaatgcattcacctcaaaaatgcctttaccaacaaagattgcctgaccgaagagatcttgataagcattcgagacagcaaaagcatatgggtctatgccaggatctccggcccataattcggcaaaacgagatctttgtgtagattcaaagttcacggcgatacggggttgaaggacaccgaatccttcgactatacgtgtctcttctttgttaagacgcggacggttatatggaaaatgaatcgtacctgctaagcggttaactactccaattggaagttgtgtatcgtgatctgctgtaaatatatatcgaattttttgcagaatgtctgtttgcccatatatcgttgtataactggtctggtcactaccagacaaaagttcgacgaactcaactagtttaccacgcttgcgctcccatcccatataaatgttatcgaccgaattatatagacgtgatctgtgaaatagaaagaatttattatccccatattgcttgcgtaaaacatcaattcgtccaattgcatggtcgacaattttcttgtcttctgggtgtatctctgtagatgcatctgagaagtcagccaaaatgccaaaatagatattttgttgtcggtttgctagatagtgaattaggagtcgatcgatcacgtcatccacttcttcgatacttgaccaaataattggcatgacaaccattgtactagcatcattgggtaacttttccgaaaaatcataccgtagaagggtggtaggtcgacaatagcgacaaatgacatcatgtaaaatggttataacccattcactaacaggcaaggaaagagcaactaagattgcaagccaagatataaatccaatcggctcgccatacgatacccatctcgcagcaaacaccatcaatccaacaaaaagtaaaatcgcacctgataaatataccaggagaggttgacgtcgaagagaaatatttggtaaacgacgtggacgtgttatcgaagagatttcctcacgtatgtccatgattccttttggatcaagtaagtagtatgctaggcatgcattgcgaggctgcaaatctgtttgatttgattcttcttgtttagatttagcaagtcttacagcagtttgagcaaccaacacttccggaacgtctagttggcgtgcaaattctgcaatacgtccacgaagtaaatcgcaactttgtatatctaaacatttatactcactagttgtatcagacaacaaaatttgttctacatgcgaaatttttgtaaacgttaattgccatggaaaacgttccaaaaggtgtaaactccgaactaggtttccacaattaacctgtaattctgtttgaagctgatgctcaaacgagaccatctgctcaagactggattcactgtttcctacatgggccgcaagccagtctcgcacggtttgaatatttggttcccattctctcaagtgttgtacgaaatgtacgacttctactggtcctaacttctttttgcgtgtagcccgttctaataaagaacggattctgatatcagacatactctttatacttatacttccaagtaaggatgtaataaaattacacacttcatgtcgatgccgtacctcacgcatttctacagctaaacgacgaataatcataacacgcatggcgctaggtaacgcccagcattctgcaaccttaaggacggcaacttcctgataggataataaataattttcaaaagattttacatcatagtgtccatctacatgctctagataatcactgcaaatagcatatattcttggcattccagtagattgtaatcttggaagctgtttaagcatggttctcgaaagttctcgcataaccacttgtgcttgtgtctctatgaaattgatatgatcaagtagccaatcttctgcaggttgcttacaatttaaattattgcttcttaactgctctgcaaactcatgcaggctgtccatgtctgatttaaaaactggccaaaagcctttatttaccttattatttgtacataattcatgagttagagcaaattcgtgtgctctatcttttaattggtcgttgtttagaatcataagggcctccttgtaggcattatcaaggaaaatatgccctataaaccatcattttatacaaaatatagagctttgaagctcactagttagtaataaatcatctgaaaaagaacatattaacttttaacaaattactttctatcagatattttttaaacaccatcaaaatcactcattttaacactcgaaactattttgtgtatagtaattaagctttcccattggggatatcattcatattttgagcaacttacttaatactagctttccatcaaaaatagagcctcaaagttaatgaggctctatttttgatggaaagtaaatgtttcttgatattctctttcttcgcctttttctttccacgttatcacaacatttaagtcggttgcttcttcagacaaaccaaaattggaaacatgtaaggggtgtccatctttctgagaaagctctggagattccatagctggaaatagtaaagctgttttaaagaaagtgagtttacacttttacttttaaacacgttagaattaataagtaataaatataataaataattgtaaaagagtatttaattatagaaacgttagatatttatttaagacaattagtatttttaatattgttattaacattattggagcgtttcaaatgaaatggtaaacatcgtagacctttttatataatacgatgtaaaacattctaattataggtcgtgttttggtcttaaaagcatggtacgcatggtagggatcactctcgagtagagtctatcgtccaaggtgtattaaatgacatagaaaacagagcctttatttttttgcttaccctaaaagaaaagggggacgaatgtattgcaatttctgtgatattaaaacctcttgaaagtacgtactaatatttacaccgatttttgtatttaaatatgataataaaaacctgtcttggaaatgaaaaaaggaatcgcaaattgcgattcctttttatttattagctacgtttaggacactcagtgaagtattaagtgctgatttgcacttattgatatcagggttggatgaacgagctgctgctaatacaacatcaatagttccatcgattttagtccatttagaaccgtcgacttttctaagtttagcttccgacgagtcccattgatgttctaaatcgtctgctccttttttcgttgcagtaaagtcttttgaatttacgtccttgagcatatcattttcaattttaataaaaccttttaattgtccagatagtgtagcttgtgaagtagtggattgcgatgctatatcattactgcgccagatataaccacctatacttagaactaagaaaatacagagcactacaatggtttgtatcaaaatatttttcttactatcatgcgtttcgtttgcatccactgttttactttttgaagttgtatcaatttttgtaatagcaagaaaaacgattattgctaaaatagctataagaaaaataacactagtaacagttgttcccaaacctaatccaccattaacttttgtttgtgataggtaatctcctaatgatgctcccagtggacgagtaagaatataggcaatccaaaatgctaaaattccattaagtttcgatttgtaagccaaaaagatacagcctatgataatgatgactgttactcccgttttaagatagccaaaacctagttgctcagaatataaatcacctactgctgttccaagtgcaaatgtgaatagaatagtaagccaatagaaaacttctcttcttcttgtataaatcgagtgtatagagagtgttttttcactacggtaccaaaaaagaaaagttaatccaagtagaacggagaagacaatggtactaacttcaagaggtactcccattgcatctgtcaaattatcagttaccaatgttccaaatacgcttataagcacaaccgttgtccaataaatccctgggacatatttagttgctctgaattgaagatacaataaaataaaaaatgctattcccataattatagtagtgagagttaacccgaatcctaggttaaaattcaggaaatcagcaaatgtttcacctacagttgtgcataaaactttgattatccagaagaaaattgtgacttctggcactttgttaagtgaaattcttaatttattttggttctcttgcatacacattccctttctttacagtggtttcccacaactttttataaaaaagaacacgctgtttgttctatagcattgccatgcattttagaatccaaaaaacgattgcaatttgcatcaatttactcaatgaaccatttccaattgtttgtttttcattgaacttaatttttatc

SEQ ID NO: 89 - DNA, 12568 bp, Priestia aryabhattai
  source 1..12568: mol_type = genomic DNA
aaaaagtatgaaccaaaattaaggtaatttttagtgacattataataaaccaggtaattggaataagttttcttcctaaaccgaaatctttttttatcaacataatgtaatttatatatctttcctcacaaattataaaaacgcacttttcctatatgcttttattttaaaatgtaatttttatacattaatttaaaagagggcacaatcctaatttactaaaaatagcccagtcaaacttgatgattttttctataatagtcaatgtagcatcattataaatataaagagggggattagccatgaaaaaagcaagaaaatctgtgggtaataaaacgaaaattttcttaacattaacatcaaataattcaggcaaaattgccaagaagcgttgagacattcaactaaattttataagaaaaaaaacagctgtcttcgtttgaggatagttgtttttgttttattgatttatgcaattcttgaggatcagtattttcacaaaccgaggtctacagaactgtaattaaagaattcagtaatacattgcttacgaatatatctttatacatattttaacctgaatttataaattcaattaatgttttcataagtaatacgtttgtccaatcctttctaacggaacatgaatattctataagtactcagttctttaggagggaaatagatgcttagttggcttgttactgtctcatctctattcgttattatactgttattttatactgtgaaatatatagggatactcttacagttagattcttcagaatttactaagaacactcaaataatcgttaagtttaaagaagatgtgtgtgaagaaacacagctaaaaattcatcataagcataaatgtaaaattttagaccacaacaaggaacttgactttcaagttttacattctaaaagggatattaatacacttattaaaatttataataaattagaagaggtagaatacgcagaatcaaatcatatgttgaaagccttctatacacccaatgatccttttttcgcctatcagtatggccctcaaaaagtacaagctcctgatgcttgggatgttactaccagtaatggaaatataaaaattgctattatagatacaggagttcaattaaaccatcctgagttagctattaagctttggcctggttataattttgtagaggggaatttaaatcctaacgatggtaatggtcatggaactcatgtagctggtattgctggagctcttacagaaaatagtttaggtattgcagggatagctccttcagcatctataatacctgttcgtgctcttgataacagcggaaatggaaccttgagtaatattgcaaatgcaattacttactcaacaaatgcaggagctaaagtaattaatttgagtttaggctcttctcaaggatcaattactttagaaaatgccattaattacgcctggaatcaaggggtggttattgtagctgcggctggaaatgaagcttctaatacactaacatatccagctgcttatcagaacgtaattgctgtcgcttctacagatataaacgatcaaaaatctgatttttctaattatggtacttgggtagaagtatcagctcctggttcaactatcttatccacttacacaggaagttattatgcgtatttaagtggtacatcgatggcctgcccccacgtagctggattagcagcattattagcagctcaagggaaaaataatgtacaaattaaaaatactattttatctacctgtgatccagtaccaggcacaggcttatattggacttacggaagaatcaatgcaaatcgagcagttcattaactcttctaaattaatgaaaaaactattggtatattaaataccactaccaatgtgaaaaatataacatacacttttaaaagcactgaccttgcaggaatattcagtgtttttatattttagtgtaaattgaatactttatatgaacatgaatctagaaataactaaacaaattgccatctgaacgtatttagctatgtaccctaaattttaaaataagtggggggataatttttaggtatttatccacttttcttagttacttaagacctattaggattaagtttctctaagtctgtagttactttgtccaagcaaaaataaatgatttagcatttactataatagaactgttaaaagtaaagggatgattatattgaatttacaagatattagaggatcttatgatttaatgttagggttaggcagctggtgtggtccctctcttaatttaagaagacataattggagaagattttcgttccctttagactggatgatatctaattcaatttctgatgtgagtagattgctaaaaaatagatttactggatttatggagtttcaaaacttacagcgaactgacggttatgctcattttctcgatgatggtgtagcaatctttcctgaagaaggaggaactgaaccagttaatgctcacttcattcatgatacttactacaatatcatttctgtccatgatttccctatcattccaaacgtggattggactgtaatgtacccttcctataaagagaaactccatcagcgaatagctagatttttggagaaagtcgaaaatagttcctccattttatttattagatggggagcagctagtccagaagaagctatagaattaaaatctgtaatatcagggttgacaaaagggtcgtttaatatattactccttcagccggcagagggacttaaaaacgttattgatatgcattggacgattgatggggtctgttctgttcaagtacctatggatgaaccaaataatgaactagtatgggattatgtattaaacggagtaagtttgagtaattattgggattagcatttaagatagagcatatcttttttatcgctatgataatgaagataaaaagaaagagtcattataaagaaagacagcagaacttcctaaaaagcttctgctgtctttctttataatgattgaataaataaataaataaatatccctttttaatttttttataagcccaatacgcaactctttttaacgctatttttaaagttttacaaaagaataataagctctaaagaaatccttatgtttataccgccttcctcccacttcacttaaaaagttttataaattgggtagctaagtttttattgggaagattaatagattagcctatagcaagaaacaagggtgagcatattttaataaataagggggcgaatacgaaatagagcaggtacttatgctcaaataacatgaatagggtgtgtatacaatgaaagttatgactattttgggtacaagacccgaaattatacgtttaagcctcattatcagaaaactggatgattatgctacagaacacattttggtgcatacaggacaaaattttaccgcttcattaagcgaggtatttttccaagaattaaatgttcgccaaccagattatatattggctaaccaacaacttaccctaggggaacagttatcaaaaatgtacaaagagctagaaggtatatttttgaaagaaaaaccggacaaaattttagtattaggtgatactaatagtggtctaagtgcgattttagctgaaagaatgggtataccagttattcatatggaagctggaaatcgttgctttgacttagaagtgcctgaagaaaagaatcgacgaattattgattctatttcaagtttcaatcttccttatactccccaaagtaaagaaaacttacttagagagggtatcccctctaatcgaattattgtttctggaaacccaattaatgaagttttaacgtattacaaatctagaatagaagatagtaagattcttaacaaattgtccttaaaagaaggagactactttttagttacagctcatcgtgcggaaaatgttgatcatgaagatcgattactggaaattattaaagggatcaatatggtggccgaatattaccaaaaaagagtcatatgtagcatacatcctcgtacaaagtctcgaatagaacatagttcacttgttaacattcacccactagtagaacttcataagccatttggcttttttgattttgtaaaacttgaaaaaaacgcttactgtgtcttgacagatagcggtacagtacaagaagaatgctgtttatttcacgttcctactgtaaccattcgtaaaacaactgaaagaccagaaacaattgaatgtggaagtaatatgctttcaggaataagtgctgatcaaattttaagctgtgttcatgtaatggttaatcaattaaaaaattggtactatcccgaagggtacggtcatctaaacgtttcagataaagtgattaaagtagtattaggaggaataaaaggtgtttgaaaataaaactattttagtgacaggcggtacaggttcatggggatacgaattagttaaacaactattaacacataaccctaaagaaatccgcgttttttcaagaaatgagtccaaccaattcacaatgaagcaagagtttgacaaccaacctaaattaagcttcataattggtgatattaaagacagagaagcaataatggaatcctgtcaagatgtgaattatgtttttcacttagctgctttaaagcatgttccagtatgcgaagatcagccaattgaggcattgaaaacaaatgtacatggaacacaaaatgtaatagatgcagctataagttgcaatgtagatagagttgtctatatttctactgataaagcatcaaaccccgctaacttctatggcttatcaaaggcgatgggagaaaggctaattattcacgctaacacattaaatactaaaactaaatttgtttgtatacgcggcggtaatgtactaggaacaaacgggagtgttattcatgtatttaaaaagcaaattcaggagaaagggaaaatcggcattacggacccgaatatgacccgcttctttctaactttagaagatgcaataaaacttgtttttaaggcgacatttgaaagtctgggcggagaaatttttgttatgaaaatgcctacttgcaaaattattgacctagctactgtattgatagaggcttctggtaaagaaacgattgaaattgaaacattaggtatacgaccaggagagaaaatacacgaattacttttatctgaatatgagagtacgaccactgtcacatatgatgatgaatatttcgttattttacctccaatccatattgaaggcttaaaagaatattacgcaccatacacccttgtaaacctagaaaaatatgattcaagtaaagaaacaattagcaaagaggcaattagagaaatgttgctgaaaggcggttttatttaaatgaaattattgattcttggtggaaaaggaatggcagggcatgtaatcacaaggtatttcatgctaaattcaaattatgatgtatcctatacatcaagagatcctaaggataaaaatggaatttacttggatataacaaattttaaaaggctcgaggaaactatcgacgctataaagccagatattattatcaattgcattggagtcttaaatgaacacgcaagtaataatcctatgcgtgcttttcaaataaatagcttactaccacatcaattagctaaattaattgaacgttatcaaggtaagttaattcatattagcacagattgcgtatttttaggattaaaaggggattacacagaaaacgattctccagatggtacatcggtatatgctcaatctaaacaacttggtgaaattgttgataataagcacctaacaatccgtacttcaataataggtcctgaactgaaggaaggtggaattggtctatttctttggtttatgaaccagcggggaataataaaagggtataaaaaagttttttggaacggagtaacaaccttagagttagcgaaggccattgaattttttatagaaaataatgttacgggattatatcatctacattcaaagcaaaagttatcaaaattaacattattagaattgtttaaagaagtttttgagaaggatgatattgaaataattcccgacgaggaagtagtattagaccgaacaattattagtacccgcacagacttttgttacacccctccaggttacagagagatgttaaatgaattaaaagaatggatgtctaaataattccctctaaataatagaaatgataaaggaagccacactaaaaatgatgtccttttttatctcgacctattgtttgaagttttgtgatttatttaaacattcatttttaaataattaaattaaaggggtaatagacagccaattatttcaaaatgaagctaattagctgtctctttttataataccttatttgttgtgtaactcttataattataaaagctaacttagcataacccattcaggaagagctagatcttttaacttgttcaggaattacatacactgttaaaccataacgctcttttatttcagttgcaatttgatctgctgttactttatcgttaaatgctcctgttattaagcggtaacgttgtttttgagtggagttattatcattactattatgagtctcttcaaagtgattattatccataatacagccctccttacttataactaaggataagttaatttaaatacttagttacaaacagatttatcagttactctttaccatggtaagggcacccctaaaaagcaccctaacatccttagaagagatgccttaaatgaaattgaataaagattcgtttcaacttgtccaataatcttcatgttaattatatttagagaaaacaatttatagggtataactgacttagagcaaaataaagaataaattctatgtatttacactaatacctcagcgcatatcctccttttaaatttaatatttgctcttactaacagcaaaacttcataattatataaaaattaccccctttataattaggtaagaaaaggctccttcatgtaattataaaagggtaatatcagctagtatcattttccaataatgattgtttgcattccatttatcatgactaggcaggtcaatggcacagactctttgcagagaccaactcttttcaactaaatggtccacatcggtatgattaataacaagaattctaaaatcattagcaatcattccagataagatagcttcaagctcagcagcttcttcaaaacttgcttcagttcttataaacaggattctttgacttgtagacaacttctctaaaaagcgctgaattcttctatcatatttttctttaacctcagcatagccacctaattgggtaagtgtatttttatctgttttaaaatcatggttaaaccctatattataaacttcatcccacactaataagtcccattgtgatatatattttataattctaagattatttagattcaaaaagtcagcaaatcgattctgtaagagagcattaacattctttaaagaaggagatgagacccaatctaagattccagaaaacgttcttaagttgttatctttaagctgaagtgaagtcaaacacaaatctcctaaactgaaaatagcgtcgtagtgcccttttataccttctaaattcatactattttccccttaaaataaaatttgtacgagtttatatattatattaaatgcacaaatctaaaaaaaggaagggctagtaactactaatctaataaaataagcattcacacaaaggattatggatgggtcatagagaagctttaagtcaagtgagtaaatcgactaactattaaacaatcatatttataagtgttatttattattttttagaaatgcgtatgtttctgttaagccattaaagatagaaacttgagactgccactctaatagcttatgtgcttttttactatcgagacagctatgtttaatatctccagggcgtccttccgtatggcttatgttaattttagaaccatgaatcttctcaagctcctttaataaacgattcacagaggttctctgcgtagtactagcatgaataacctcctgatggcctttgtcaatagcagctatatttgcctgaacaatatcttttacgtaaacaaaatcacgggtttgttcgccgtcaccatgaatatttagcatagttcctttatttagtctatctaaaaatactgcaactactcctccttcaccctttggggtctgcctaggtccgtatacatttccataacgaagaattgtataagatagtccatataaacgggaaaataggcgtatatatgactcgcctgttagcttagataaaccataataagaaatgggtactgtaggatccatctcggtaattaaatctttttgtaactctccataaacagctgaagtagatgcaaatataattttatcaacagaagcgtctcgacaagcttcaagtatattgatagtcccctttatatttacatcagcatcgtactggggatcattgatggatcttgaaacatccgcctgagcagccagatgaaacactatatttggcttttctttgagaataatttgtttagtctgtttactacatatatcttcaacatgaagagtagcaagaggatgtatattctcttgctttcctgagatcatgctatcaattatatgaacttcaaatccttttataataagttcttccacaagatgggaaccaataaaacccgctcctccagttactatagccttcatatactattctctccctctttaagtttcaatagtatatgtcatcaaaaagggcactgtgtaagctccctacccaatacttcgttaaaaagatgaattaatttacctttgccgcactactaaaagttataagtttacttccggtgtgagagaaccttttcgtaaacgttcaataccttatcaactgcttttttttgtgaccaatgatttaaggcccattcctgagctttagcccctaaggtgtccctgtattctgggtttattaataagttataaatattttcacatagtgagtttgggtctccagcaggcgaaattattcctgttgaaccgtgttgaaccatttctggtaacccccctgcatcacttactattacaggtttgccagcaagttgcgcttcaattacggataggggctgattttctataaggctaggaagtacaaagatattagcaagagatagtaaggaagggacatcatttctgttgcctaaaaaaacaactctttttcctagccctagtgctctgctctgagcttttaactcagcttttttatccccatccccaactatccaacatacccatcctttttttaacttttttagttcactgagggcagataataaatgatgaattcccttaatctcaaccaaccttcccgtataaataattacttgttgaccaacgcgtgaacgaagagttgaggggttctgcatccgctgaaggaaagaattaatatcatatccataatgaaatactgtaagcttttgctcttgaacctgaaattcgtttattaaaatattcttaagccagttatttgcaaccactgtacagtcagcagacatagcacctgtatgctcaagctcattaaaatacttacatgctatatcagcggtagaggatttcaaagtatttttaacgtagtgatttaattcgtgagccacacaaccgtgtatagttgctactaatgctgttttttcaggttttagcgggctaatacaggcagttgacactacatcttgtgtatgaattatatcgtattgatctatgcctagatccgtaattccttccatataacccagacgctgcttctcataaaatttaactacttcatctttatatagaagaggttgatttttctctttttgagctaactttgtgactaatgaaagctcatctttaataaattcttgatttttattaacaatatgaactgattcattccctgctccatgaccaagcaagtctacttcatgtcccaatgcttcaagttctttttttaactgttgcatataattccaaacgccacctacatgagggacttcccaaaatgtagcaagtaatattttcataaatttctctcctcttttcataacatcagcactcccaaatccccttatatataggtattcatgtagctaattaatgttataaactaccatttttattttaaaaacaatattttaatacagtagcataaaggctctaaatgaaagatttgttttttttagcatacatctaatattaagcttaatttaatgggaagtttaaatacattggatgggatgtgaaactgatgaatgcaaaacataaattattaattaccggggcaagcggctttactggacaacatgcgtgtgaatatttttcaaaattagacttggatattatagccataactaacaagagaaacttttgtcataaaaaagttaaaacaaaacaatgcgatttacttaataaaaagggaataaaagaccttattaaacaaataaagcctgattatgttctccatttagcaggacaaaatgcggtaggtcgttcatgggaagacccccttaactcccttgaagtgaatgccatgggtacagcatatcttattgaggctctccgacaagaagtaccagcttctaagacagttattgtgagttcagctctccaatttaatccaacttctatccccacttttaaccatccctatggcctaagcaaaacgatacaatctattttttctcaattttgggctgccttatataatatgcatattgttattgctagaccatcaaatttaataggaccgggattctctacaggagtctgttcaatttttgctcagaggatcgtaaacatggaaatagggaaagaagaaaaattcttaaacgtgagtaatttaaataatcgtctggattttttagatgtacgagatgcagtgaaagcttatgattgtcttctcaagaaagggaagtctggtgacatatatgatgtttcctctggtgagagccattccttaggtgaaattataaacatatttaggaaaacaacgaatattccatttcaaacaaaattagataatcaaagccctatagttaatcatgttgatctgcaccctgtatctttaattgaattggggtggcaaccaaaaatccctctggaaactactataaagaacattgttgatttttatcgtcaacaagtagatggtcttaataactagagaaggaaaaatggctactttattaattagtcctttgatcattcttataaaatctcttgtttgaaattaattaagatttactttaatcgaacctttttccttatttccactagaggttggcatataaaaggtgttttttagagagttttcatatcatttaacaagttctttgcatattctaattaaggaattaaataaggtaatttcagactaatggattccttgatattccgtaaagtatataacttataaattccattgcttaaattaaagctatcattttataaaattttggattaagtatggataataagcaagtcatataccctgaacacaatttattttttggagggtaaataatgggtccaaaagtatcaataatcatccctttttataactgtccttacgtagatcaggcaattaaaagtgccttagatcagacatatgaaaatatagagatagtggtaatagacgatggttctacaagctatacggaaaaaattatgccatttaaagacaagattatttatataaggaaagaaaacgggggaactgctactgctcttaacactggcttatttgttgctacaggcgagtatattgcttggttaagttcagatgattattttgttcctgcaaaagtttctaaacagatagacttcatgactaaaaagaaaatagacgccagttttacaaattttgattatattaacaaagataatcaagttttagttccttggtgtactaaacgctttaccaatcttgaagatgtatataatgcttttctaacttataatgctattaatggctgtacgatccttataaaaaagggaattttcgataaaatagggattttttctccagactttcgttatacgcacgattatgaaatgtggttccgcatgcttgtgaatggctatgaaattcattactttgatgaatcccttacaaaatttcgctcacatgagaattcaggaacacgtaaatatcaatccgaaatgcaaaaagagatgaaaattattgaatatcattaccgtcctcttttaaaaaaatatataaaatcacttcagtcagaccagttataaagtgtgtataagtttataattctccatgcccacaaatacctatctcaaccttatttaataagctacttcactacttgttcgaattatgaatcccatctaaatgattaaaattctcccttacaagtagtgctaccccttattcttagtctctttacacctatacacatttaaattttgttacatacatccctaatcgaaatattaaaagaata

SEQ ID NO: 90 - DNA, 12146 bp, Priestia aryabhattai
  source 1..12146: mol_type = genomic DNA
cggggatagtttttgcgtctaaaccagtggcgtgggccacactatataaaagcgacttcttgtcgcaccataattcaagttatcggcaccatataaaaataagcctagattattaactctaggcttatttttatattaattatttagcaagaaacatttcattgacgctttcaaagaatgactctagtttaataaactcttctttatttccacgtgtagagaaaacttctcgatcgtcgtggttaactacaaaagtaggacttgatttaaaaattgcaaagatttgtttacccgtttttatttctttaattttataaaatggaatatgtaatacaataggtaatttcgtaaaaacttccccataaaaaagcaagcttttatctgtataagctaaaacccctttgattggcatagggtttccatttggcacaccgacaagccctgaaagtccactttcagactcataataagtaaaaatagatcctcttatttcctccccactatccattttactttggaactctttgattgctctctcttttaaactcataatattatcccccgttgaaataaacaatttataaaatttaaactaattttccttatttataaattttaatcattttttggaagggtaaagaattccatctaattaacataacaggtattatcggaaatgatttaaagtaagttaaatttaaaaagcagcaacccaacaataataattaaaacaattaatacaaagctagctcctgaactatgtaacatatttataagcagaatagtagaaattaaaattataaatatcccttaaaggtggatccaatataaatgaataataaggtttatatggtctttcgtgagattttcattgtttgcatcgttccctttgctattatctttcttatcgaccttttgttacaattgcccggtaaaaaaaattgatttatattcttcccccactataaacggataataaatagtaacttgagcaaactaatcaagatgtcaccaaacatcggcttatgcaactaaattctgcaacagaaaaaacctacctctttttactggaaagagatgggttttttctgttttttttgacgactatgatatacaaccttagttaccataaaacaaatagttagccttttggggaaatcttgatctgatagtaaatttcagttgggaaaacatcaactgacaacttaatgtttttaactaaaaaaggatactcaaagagtatccaaagtaacatctgtagcatgttagggtgtaaaggttataatgtttaaatctcgattaattgctgtagctgaggtaacatttgaagctgttgtaacaatgagtctgagactataggtagaagttgtagtagcaggagctatatctacctgtgtattagctaatggaaatctgtgagtacctgattgctgcgagttgctattaagtattctcgtatcaattaatgttgtgtctctatataatcgcatttcaagtataaatgaccagttggctgtagtaattatctcaacagctaaagcataatcaattttaagtcgttgattaatcagaacgttttgggtaacacttgcaactgttacttcagtgcctaaaggtggaaagatagttattgttccaggtacttcagaaaaagctagagttggtgaactagcagtcggtccggtaggaccagtggctccggttgcccctgtaattccggtagctccagtaactccggtagttccagttgcccccgtgattccagtagctccagtgattccagtagttcctgtgattccagtagttcctgtgattccggtagctccagtaactccggtagttccagttgcccccgtgattccagtagctccagtgattccagtagttcctgtgattccagtagttccagtagctccagtgattccagtagttcctgtgattccagtagctccagtagttccagtagctccagtaactccggtagttccagttgcccccgtgattccagtagctccagtgattccagtagttcctgtgattccagtagctccagtagttccagtagctccagtaactccggtagttccagttgcccccgtgattccagtagctccagtagctccagtagctccagtaattccggtagttccagttgcccccgtgattccagtagttccagtgactcccgtagttccagtgattccggtagctccagtagctccagtaactccggtagttccagtagttccagtagttccagtagctccagtgactcccgtcactccggtagcccctgtaattccagtagctccagtggctccggttgccccagtaactccggtagttccagtgactcccgtcactcccgtagttccagtgattccggtagctccagtggctccggttgcccctgtaattccggtagcccctgtaattccggtagctccagtagctccggtagcccctgtaattccagtagctccagtggctccggttgccccagtaactccggtagttccagtgactcccgtcactcccgtagttccagtgattccggtagctccagtagctccagtaactccggtagttccagttgcccccgtgattccagtagttccagtgactcccgtcactcccgtagccccagtgattccggtagttccagttgcccccgtgattcctgtttctccagtagttccagtagctccagtgactcccgtagttcctgtgattcctgtttcaccagtgactccggtagctccagtaactccggtagttccagttgcccccgtgattccagtagctccagtgattccagtagttcctgtgattccagtagttccagtagctccagtagttccagtagctccagtagttccagtagctccagtagctccagtaactccagtaactcccgtcactccggtagccccagtgattccagtttctccagtagttcctgtagctccagtgactcccgtcactccggtagccccagtgattccagtttctccagtagttcctgtgattccagtagttccagtgactcccgtcactccggtagccccagtgattccgatagctccagtgactccggtagccccagtgattccagtttctccagtgactccggtagctccagtggctccggttgcccctgtaattccggtagcccctgtaattccggtagctccagtagctccggtagcccctgtaattccagtagctccagtggctccagttgccccagtaactccggtagttccagtgactcccgtcactcccgtcactcccgtagttccagtgattccggtagctccagtagctccagtaactccggtagttccagttgcccccgtgattccagtagttccagtgactcccgtcactcccgtagccccagtgattccggtagttccagttgcccccgtgattcctgtttctccagtagttccagtagctccagtgactcccgtagttcctgtgattcctgtttcaccagtgactccggtagctccagtaactccggtagttccagttgcccccgtgattccagtagctccagtgattccagtagttcctgtgattccagtagttccagtagctccagtagttccagtagctccagtagttccagtagctccagtagctccagtaactccagtaactcccgtcactccggtagccccagtgattccagtttctccagtagttcctgtagctccagtgactcccgtcactccggtagccccagtgattccagtttctccagtagttcctgtgattccagtagttccagtgactcccgtcactccggtagccccagtgattccgatagctccagtgactccggtagccccagtgattccagtttctccagtgactccggtagctccagtggctccggttgcccctgtaattccggtagcccctgtaattccggtagctccagtagctccggtagcccctgtaattccagtagctccagtggctccagttgccccagtaactccggtagttccagtgactcccgtcactcccgtcactcccgtagttccagtgattccggtagctccagtagctccagtaactccggtagttccagttgcccccgtgattccagtagttccagtgactcccgtcactcccgtagccccagtgattccggtagttccagttgcccccgtgattcctgtttctccagtagttccagtagctccagtgactcccgtagttcctgtgattcctgtttcaccagtgactccggtagctccagtaactccggtagttccagttgcccccgtgattccagtagctccagtgattccagtagttcctgtgattccagtagttccagtagttccagtagttccagtagctccagtagttccagtagttccagtagttccagtagctccagtaactcccgtcactccggtagccccagtgattccagtttctccagtagttcctgtagctccagtgactcccgtcactccggtagccccagtgattccagtttctccagtagttcctgtgattccagtagttccagtgactcccgtcactccagtagttccagtgactcccgtcactccagtagttccagtgattccggtagttccagtgactcccgtcactccagtagttccagtgattccggtagttccagttgcccccgtgattccagtagttccagtgattcccgtcactccagtagttccagtgattccggtagttccagttgcccctgtaattccggtagctccagtggctccagtaactccagtgttatttacaactaatacggccacatcatccactaaaacatctgaggtctctacttgcggaagagtattaataacaataaatgctcgtgtggaacctagtggagccgcggttgtagtatgatagttttctagccacgtatgattctctacattagggatttgattacctggaactgttacgagaagtccattttcaagcaaattagactgattgtcatagtaaaacacttggatagtaatgaaaatggcaggtgcctgtcctaccgtggataaagaggccaaaacctccaatctctcccctggttcaattgggacaaattgcgaaatataagagaaggttgcccccccttgtaatctcgctgaataaaaccctgaatgcgaatattcactggtgattactgtattagcagttatccacggtgaaagtgttcctgtttcaaatcctccattaacgatcaggttttgaatagacattcaattatttttcctccgtttcattaaataactttttaggaattcatccattttcgttctatggcacctcctgcttttaaaaatgccttacaaagatataaatatgactaaaatcataaatgttttacaagtatttcaatagaattattgtaaacatacaaaaacaatcttttttactaactattcatataacgaaatttaaggttaatatcttagtaaaacatacataagatgagctatgagaaaataataattttttcactctttactccacatatactgatactctaactcatggttgaataaattccactgctttataacgaagtgcctattctttatttataaaagtagatgataaccacacatgtattaaaaatttataggagggacaagttatggtttctattagtttatgtatgattgtaaaaaatgaagaagattcgattggacgatgcttagagagtatttaccaattagttgatgaaataaatatcattgatacaggttcgaatgaccaaacaaaaaagattgcgagtaaatatacagatcgaatttatgatttcgaatgggttcatgacttttcaaaggctcggaactacgcgtttgagaaagccacaaaggattacattctatggttagatgcggatgatgtttttctagaggaagatcaacagaaattgctggcactaaaactgaacctagaatcctctgtcgactcagtaacgatgaaatatattttagctacagatgaatatggtaacgttacgtcaagtttaaggagaaatcgattagtaaagagaaggaatggcttccgttggattggtgctgtccacgaataccttgaagtatggggaaatattatgaatagcgaagttgccgtaacccataaaagcattcaccacgactctgaccgtaatttgaaaatctatgagaaaaagctacttactggtggagagttttccccgagagatttatattattttgcaaatgaattaaaagaccatcgacaatttaaaagagcaattgagttttatgaaaaatttctgtcaacggaaaaaggatggattgaagataatattgcagcatgtagaaatttagctgattgttatcatgaaatttttgataaagaaagaatgattaaatctctactacgatcctttacttatactgctcctagatctgaaatttgttgccgattggctcattattttattgaaaaaaatgattaccaatctgctgttttttggtatgatacagcagcgaaaaccggagttacctcggataatttaggaattcaaaatcaagcttattccacatggattcctcatattcagctttgtgtttgttacgatgctttaggggattatgaaagagcaaatcatcataatgaattagcaggtacttacagaccgaacgatcctaaataccttcataataaggaatatttaaaaacgaaacttccgatagaaaaagttggtgtaggaaatgaaacataaaaaaaggatattagtcgcaagtcccgttcaccaaaaaccagaaattttatcattattcctagaatctttaaaacacctcaataaagaggaaataatagtagatttctatttcatagatgataacgaaaatgtagattccagtcgtcttcttatacaatttcaagagtgtattcaatcagtaatcgtcgaaaaatctgactatcaagatgtctattctcgtgatgggcaaacacactactggaatgaacatctcgtttggaaagtagctggttttaaaaactcaatcattcaatatgcaaagaagaaaaactatgattatttatttttggtggactctgaccttttattatttccagaaactctttctcatctagttcagcaagaaaaagatattatctctgaggtattttggacaaaatggcagcccgattcgatggagcaaccccaagtatggctttatgatgaatatacccaatacaataaacaaccgggagagaatttatctactgaacaaacaaatgctcgttatcaagaatttataactaaaatgagaaatccaggggtttatgaggtgggaggacttggtgcctgtactcttatttcgcaaaatgctcttcaaaaaggagttaatttcaacaaaatacctaatttaacattttggggagaagaccgccatttttgcatacgtgcagctgcaatgggtctttccttgtatgtagatacacattaccctgcccatcatatttatcgagatatggacattaaaaagggggaagaatttgtaacaaaaataaaggaaaagcagaaaacagtccaacccaatatctatgtatctactcctaaaaaaacaaaacttactttgtctatggtgattaaaaatgaagaaaatcgatatttagatgaagctttgagaagccaccttccctatattgatgatgctgtgattatcgacgacggtagtactgacaactcgattgaagtttgtaaagaagttttaaaaacggtgccttataaaattatacgaaatgaagactcaaaattctctaatgaagtggagcttcgtaaacagcaatgggaggaaacagtcaatacagaacctaattggattttaaatatggatgcggatgagatatttgagggcaaatttgatcgagatatacagcagcttctcgctcaaggagactatgatctttattcttttagactctatgacttttggagtgatacccattaccgtgaggatgactattggcaatcacacttttactatcgaccgtttcttgttagatatcgaaatgatttctcctatacctggcaagaaactcctcagcactgtgggagattccctaacaatatatttcaattaccgaatagtatctccaacttaagagttaaacattatgggtggtcaaaacgagagtatcgtttagaaaaatacaaaagatatttaacccttgatcctcatgcccaatatggaatgaaagagcaatacgaatccatattggacgaaaaccccaacctaataaagtgggaagagtaaagataatttatattaattatgttttagggtaaaaaagagaagttttcatttctcttttttatttgcctttcactcttataccatggtttacctagtatacatttagttaccataatcaccgttatcggcatcaaaaaagaccttaaagtttaaggtctttttagtgcatatatctaaagttttatatttgtagtcctttgctttcctgtatgtaatctatcagtatttggcgttcgtcctcaaataacatttttaagttactaatctctgataaaggcttccagcaaatatctaatatcaattcatcaggatcttgaagtttcctttctccacctaacaatttcacttcaaaatactcaatatggacatttgcatcatatgtgactgtatcacgttcacatattttatcaatgactgaaatcttgtatcccgtttcttcccaaacctctcttatacaacattcttcatatgtctcagaaccttctataccgcctgaaggtactgaccatagttctggctgattcggcttcccctgagctaccattaacagttcgtttttatcgtttatacaaattgcagcagcgcctctccatttagtcattccatcttcatcctcttttacaaaattatacaatttcattttaacacaagaagataagtataccttaactatttaaaaaatattgacaattctatgagtatcacttaatattctatttaatcgaattgatttactcggaattaaaaaatatatttagcaaatgcctaccaggcaactgggggccagactatcgcgttgaacgtgtgggctggccttttttgctttttataactctactaaacaacgataaataggagagtacaattgaaaccgggaaaatgaatttgaatttaactttactatctatttaacaaaaacaaagatttcaccccttttaggggaactaaaaaggaggaagtaatatgagtatagttgagaaaaataaggtagcaaattctgttttggaagtatatccaatagctggtcagattggcgcagaaataagagggattcacttatcttcagatctagacactacgacagtcaatgctattaagaaagcattactgcaatataaagtaatctttttcagagggcaaaaacaccttgatgatactggacaagaggcttttgcaaaattgtttggtgaaccagaagctcatccaacagttccgataaaagaaggcagtaattatttattcgaacttgactctgagcatgggggacgtgctaattcttggcatacagatgtaacgttcattgatacatatcctaaggcttcaatactccgcgctgttgttgttcctgaatctggaggtgatacagtgtgggcgaatacagccattgcctatcaaaaccttcctacagagttgcgtaatttagccgataaactttgggcggtgcatacaaatgactatgattatggcgggagacatcctaatcgttctcaagaagatttagaacgtcaccgtaaggtatttgcctctagggtatatgaaactgaacatcccgttgtcagaatacacccagagacaggggagcgtactttagtattaggacattttgtgaagaaaattaaaggattatcttcttcggattcagctcaccttttctctattttacaagaccatgttacgcgattagagaacacagttcgttggcattgggaagctggtgacattgcaatctgggataaccgtgcaacacagcattatgcaatcaacgattatggtgaaaaacatcgtataatgcgacgagttactttagttggggaagtcccagtgagtgtggaaggacaaactagcaaaacttataaaaaagactaataaaaaaacgtattcaattcacatgaattcataagtttacctgtaatgtagtaaatagagaaaaataagaaatacctcatgctcaaaaaaagttaacgtataggtttagttttatataatgtaaaagagcttttactcttccactgataactctttaacttagatgcatcatataaaccgactagtaaactagaggcttgtatatcagaatctttcattctgatatataagcctcctttttttcctactaactaaaattaactgttatatacttgagaattatgctaaatgaaatatttcaggaggagaagtaaatgcattcattacaaaggaagtataccttgcccgttttctcagttttaattctatctcttatggtcttatatcgccaattgttaccctaagaacatgacaaataattaaaacacggaaaatttttccgtgccaaacatatattttatttcggaaggtttagttgccacgagacaccaaactgatcatttaaccagccaaacttcttactgaaaccatagtcacctaacggcataagtgctttcccatctatgattagtttctcataaagattgtcaagctcctcttcagtatcacaagtaacaaaaattgaaaatgaaggagtaaaggagaactgatgcttcaaattactgtcaatgcacataaattcttgcccttttaaggaaaaagtagcctgcattacagttccttcatctccaggttcattcgctccatagcgaacaatacttgtgatttctgaatcgtcaatgatggatatgtaatgattcatcgcttcttctgccttgccatcctgaaacattaagaatggtgtaaccttttccatataaaccaactccttaaatataaataataatacatcaatacaatttctctttgaattgcgtcagaaggaggaaatgctatctaagttcgcataattttaattcattcatatcgttaactatgctaaatgaattaaggctaatcaatttatcgaatatacaaatcatttaattcctttccatggagaattttctgcatacatttttcaacccttgactctcattttcatttaaatttttgaacatatataaccgtccaacagaacacttgttcctgttttatattaacatatttttcatgagtatggaactaccatattcaacaatctggccctttaattgaacaaggtcctaagtattttatgaatactttataccctactgattaacataatgtacttttccggaacacaactcaaaaaagaacccttctcgcataagggttcttatgaggctcacttttctacattatgcagctttttatacatccttggtgtcacaaggtttctcttagcgatgtaaatcagaaaaatgtattaaaagtgcaccttttatacatatgctagccctttgaaatatagtattattgggaaaatatgttattatgtgtctacgcatgcattttatagtaaaaagccacctgtcctgcaaatactgggtggctttttattttgtatatattaaaaatagacaattaatcatttatattaatttcttctaatttatttaataactggtctacaaattgactaattaaaatcgtattatcgctagtaaatccttcttctaaccctatttcaaccataagttccctcgctgcttctatatctacaagtagagtatttcttaacatactggtgtatctgtatctttgcaattatgtagtgatctatctctctaagttgttaaatctttatttaacaataactggatttcatccgtataacaataattgttcttgtaaaatccaattaagagcatataatgccggttttagggtttgaatggttaagtttttatacttaatacatattttgattcttgaatttataaaaataaagctgtaaaaactaccaatgcatataaatgattcattactcctttataaggtatactatagtaa

SEQ ID NO: 91 - DNA, 11790 bp, Priestia aryabhattai
  source 1..11790: mol_type = genomic DNA
gaatactatatacaacaccagtttacataattccttttatcggaaatgatttaaagtaagttaaatttaaacaataacaatccaaccataataattaagataattaatacaaaactagctcctgaactatgtaacacgttgataaacagaatcgtagaaatcaaaataataaagatacctattacatttagcaaagttctatttttcaaatttccatctccttttcttatataaaacaaataataaaaacataaaaaaccttctatccaggctgaagcattgataaaaggtttttctatgttttttatgtatcttggcctaattttcgatctactaaataagctaaaaagaaaataattggaataaataaaagttttagaagtgataaattctcaacagatgtatgtgtgatgtaaaccgttaagaagatgagagctaaaactaatgtaaatatcttttctttcaaatcacacacctcactttccttacaattacattataacatatatttaacatatctatttttagttaccatagtgtactctataggtagaaaaaaggcagatcataatcgcgtagatatctcactattttcagatccattctgaaccacactgagcagcctaaatcctttaaaccacactattactccagttccccataatattaaagctgtgccaaaacctaccgatacccaccatgccataatttgatgatctcttattatcatttttacagggaaagttagcattacagtagctgcaagtaagcacaggagtgtacctgtgatatgataaattcgaacctgaaacagagaagctagaggaaaaaaatgggcaccgacaataagggccatcacaggaacaaataaatcctggtgattggtagactcacaaaccacggcggcaacagcaatcaatacaccttctaaaccaaaaataataccgaaccacatattctttcgtttccaacgagggccatcctcttcagtcatctcgtttgataaccctcctgaattctttatcaatatgatcccaccaataagcaatatgacaccaatcaatagggataaggccaaaagccaaagaaatccccatccttgtagtcccctaattccaattcctgcccacatagtaccaaaaaacgccatgaagataactccagaagctgtcccacgcacggcagctcttggaatagtagtttgagacatatcatattccctcctttttaaatttcatgctaaattatgtttttttcaatttatggattaattatataatgtattctaaaatttcgaatataagatgatattgtacagataaaaaatattcaactattctaaaggaattgcccataatgaataaaaccctattgcatcttgatcaaactacctgatgcataggtagtcttttctgttttcacgctgtatacgccatgtatttctaattaacataatcaccattccacgaagtcaatatatttagaaagatataagaaaacttcagacttatcctgaagttttcttattattatgggagttaatagtcttcatgtggaaacgacgttcttttattttgatgttctctaatgcagtaatttaggaagaaaaggttacagtctccattatttttatggattttataaaaccaagtgtgtttttgagtcttttatattagcattccagtactagtttaccaatcgtatttcttccttctaaaagtgtatgtgtttcggcagctttctcaagaggatagataccaaatatttcggtatgaagatcacctcttgctaacagctggagagcttcttttgcagcttgttgaacttcatggggatgagttactgcatatccacctaatgaaaagccgacgatagctttgttatttatccataattcgttagaagaatgtaatacatcttctccacttgcttctcctaaagctacaacttggccaagtgggcgaagaaggtcaaaactttgttttcgtgtcagtccactaaccggatcaaagacaatatgaactcctttctgctccgttgccaattgagttctttgtataaattctgaacgaacaaataactcatcataacctagcgattgtgctaattttgttttttccacgttccctactgttcccattaccttttcagctccagctaattttgccatttgtccaataaaactacctaatccgcctgctgctccatgtacaagtacatgatcaccctctcgcaggttgctcacctttttcacagctatgtaagcagtcgtgagattcacaattgctgcagctgcagtcgctaagtccatatctgctccaagttcatctagtggaacagtcaaattggctttaacattagccatagttgcataaccaccaaggtcaagtaaggttaatgaagctacaggttgaccaatataaaatccttttactccatcaccaatggccctgatatatcctgccacttcaattccaggagttgctggtaaagggaaaaatatcacttaattctcctttgcgtactaatatatcaatatatcctacgcctgcataagcaacatcgatggtcaattctccttgaccaggttttaaatcagatagctcttttacttgtaaattctcgattccaccaactttgtcaataacaacagctttcatttattacgcctcccttaatcttttcttttacttagcattaaagcttataattttgatcaagtatttactattcatttttagttaacataatacctctttccgatacacagcaaaaaagagaatccttggtaggcaaggattcaaagtttgttgttcgaacgggatatgcagctttttatacatccttgatgcgccaacaatctccttacagataaatggaagaaagggtgcataaaaagtgcaccttttatacatatgctacagcatacaaaacatggctttttttcaacataaatgttactatctgtaaaggaatacaattccaaggtgatgttcgaaaaagctacttcactccatcactaaactactattagtaaaaaggaggtagcttttttgttttgcttaccataccttttgactggacaaattataacctaatactatattttagatatgtacatgtatatatttaacttttatcaactagtaaaagcagctattatcaaccacacatgtaagaaaagccctcaattaattttgagggcttttcttgtatttttctccaatatagataaatgataaaactatttttaataaagtacattcatcattacttaatgatataccgaaaagtgaaactagacataatcagctttatgtaaactaactctgtatatcgtattaagttagcaaattttttcaaagctcattcgcggtcctcgttagtgaaacgccgcatagttttgcgccgttccactaggagtgtgataatcattcgagctgtcatccttacacaaccgtgagcacgatcttgccttggatgtgcccacgggcggctcgttcgtgcgccttgcgagcatcggcaagtggaaacgtgctgtcgatggcgacacgaaccgtcccggcatcgagcaaacgccctaattccactagctgcggtccgtttgagcgcacttgggtcatcgataccgtgacgcccagctttgcggcctcctcggcgtcggagaagcctatgaacactgggaacaaagcgccgccacgcttgagcgtacgcaagaaacgaccggttgttggaccaccgagggtatcgaggacgagatcaacgtcatgggcgatgtcctcgggagggctcttggtgtagtcgatgaattcgtcggcaccgagctcgcgcaggaacgactcatgcttgcccgatgccaccgcgatgacatgtgcccccttccatttagccagttgcactgctaaatgccccacgccccccgcggcaccattgacgagtaccgtcttgccgttgagtggcagagggcgatgcgactccggttgaaacggattcgcttcattgtgccccaactcgatcaggaactgccagccggtgagacctgccatcggcgcccctgcggcgtgcacatgatcgatgccagcaggtttgagtgcaagatccgacgctggtgcggtaacgtactcggcataagcagcgctctcccccatgctaggaaagcgaaccatgccgaaaacttcatcgccgatggagaagccttgcacatccgtggctaccgcctcgacgacgcccgacatgtccgaacccagaattaagggaaaggacaccgccggctgccactcaggaggaagatctttatacccctcgcgcaagtaccagtcgggggggttgatgccaaccgcgtgaacgcggacaagtacttccccaggtttcagttcgggaagcggggcctcctcgtgacgcagtacctcagggtcgccgaattcgtgctgccgaattgccttcattgtgtttgtagacattgctttctcctttcacacacatgtgttatccttattagagcagtgctccacttaaacggagcgctgttccatttatcattatacggagcactgttccgtttgtcaaggaggaatcatatgcgagctgatgcgaagaaaaactatgagcacatacttgcagtcgcgagcgtcgttgtaaccgagcatggcgtcgatgcatcgctgcgcgatatcgctcgcagagctggtgtggggctcggcacactgtatcgtcatttcccgacgagagaggcgctgctggaagctttgctccgcgcaagcttcgacgagtttacgacaaaggcacgtgagctcgaaactgcgagttcatccgatgatgcactcgtgtcgtggctacgcgacgtcgttgcattcacaggaaattatcaaggtgttgtggacgcgatgatggcagccaaggaggacccggagtctgcactccacgcttcatgcgtcacgatgcgtacggcaggcacgcgacttctcactcgcgctcaagccgagggtctggcgcgtaccgacatggatggtgatgacctgttttcgctagctgctgcgcttgcgtggctcagcaaccagccttcgtccgcgccacgagctgagcatctcttcactattatcgcgagcgcgatcttgacgaatcgagcgagcagcgatttcagggccagctgtacaactgatgattaaaaaaaagccagattttccttagcgtacgttttccgcgttttgttggcggtaccccctgtacaataaaatcatactattgtacaggaggcttttaagattattggatatgcctgcgtttccacgactgatcagaatctaggccgacaacttagcatgctgaagaaatatggctgcgaaaagataattgaggagaaattcacgggtacgatgaaagatcgtcctggtctgcagacttcaatgaatgtgattcaagcaaatggtttttcttaaagtatgggacgttaaacataaaaagacttgctttaggtaaaaagcaagttaaaagaaagataatcacgttggcaattccattataatccagaagttgtaatgaaacattaaaatatagttaaaatcgaactaaaggtaaattaatccataaaaggattaatttacttttttattttgtggtattaaaaaaatttcgatagtttaaagaaaactttgattttattattttaacattttgaaacataatcaaatataaaatctattacaagatgttagagtaattattatcgataacaaaataaaaaccctttattttcaataatatacagatagcacattcattgttctcggaatcatcgtttacacatcatctgttaagtagcgatggatagaagaaaacacattatctcttatcagctcttcttcatttaataaatgatgttttccgttctctataagttcaacatctatatttggaaacttctttagtaagaaaccaacattatatctccaatccactgttgtgtccttttttccctggaggatgagaacagggacagaactgggattccccttcttaatcaattcattccatcttatcaatgcttctacccaactgagagggacctgatcatactgtaacggatcattcttcacaaaacgcaaaaactttgcatctgatgaattgtctcgaagtatccttttcaaattccttgtgaacgtttttaagggctttaccaaaatggtgattgcattccagcgataaggccgaacgaggggcgagacaagcactgcttttcgaatctgagacgtttcagggttattcaatatataatcgactgcagcagcagcgcccgtactatgagccacgatatagacgggcagagggcttgaagacaggtgtctacgcacgacttctcgaatactttctgtatagagagaaaactctgaaatggctccccgttctcctgttgacaatccatgtcccggtaaatcaaatgtcaacacatgaaacccttgttgaatcaagaaacgaatgacagtacttagtactccagcatgatcataataaccgtgaagaagaagaatatgagcttttatcggtaagggacgaaaagattggataaacagccgttcatggacaaacgattcaaatccgtaacgatacattatgttctctgttgggagattgtaaaactcactgtaacgtttcatgttttcattcatggggcgtgaatcgtatgtaaagcgaaaatgctgatcatttttaatgtttttaataacttgtttcatattcgacctctgtgtctccgtaatttttttatgtcatttaataatcaacgataactcaattgctatacaaaacatactattgtaaatacagtttttattgcttggataaaccgtttttcatctggtttctactgatcattgtttgcatagttggtgcccctgttttattttatccaaatcactaaagtcccaattcctatgcttaaaagtgacagtagcatacctctgttattatttttctttgcaaataggccattaacattaaataaagaagttagctgctgtacattattcattatgcaaatccctctttgataagtgtttgaaagaaagctctcttccaacatctttattttttaccgacgctacatatatatactgggaaaatgatgctatcgttacttgggttttcaaattatttcctgtaattatttaaaaaccaatgtaaaccttaatacatatatgactattagaaggagtgaaaaaagaatgaaggcaaaaaaatatgtactgggactcttatcagctattttatcagtaggatttctttttggttgtaatgataaaaaagatgaagctgagcctgatccaactgaagaaccgtctgaacaaaaagctcaaaatactcgtgacaacaatgatctacgaaacgtgggatttcaacccgacggtgttcaaaataataatgtagataataatcagacacgattagaggtagctgataaagctgcggatcgtattgctaaattaaatgaagtagatactgcgaatgtgattgttacaaaccgaaatgcatacgtggctgttgttttaaagaatgaagcaaacggggaggtaaccgaccgtttaaaaaagaagatttcagatcaagtaaaagctacagataaagatattcgaaatgtgtatgtgtcatccgatcctgattttgtgaatcgtatggaagggtacggaaatcgaattaatgaaggtgcgacaagaaatggcctatttgaagattttactgaaaccgttaaaagagtattccctaacaatcgttaaataaaaatgatgagatataaaaaagcaattttttatgttttaaaaagagaggcctccttatagattaaggaggtttcatatatgcttctctctctattatacgaaatgacttaatagttatttttggttccttttttgctatcataggagcattgatcatgtcatggattcttcattaggagagaagagtctgtctatctaaaattgaaggagaaaatcgggatggattataaaatattcaggagaattaatcaactggctggtcgctattctgtattagatatgctgatgatattgatttcaaataaggtacgttatctattcgtttttgtattaatgttgatgtggttttgaggctattcacaaagaaaagcgaccgtatatgccgtcatatcttcgacttgtacgttgttgattaacatgttaattcaatgtttttattttaagcctcgtccatttatgaagcgctgtgtcggcatccttattcctacaaagatgaactccgcattcttaagtaaacatacgttgcctacaactgctgtatccacttctatttttctacgtgaacgtattcttgggtcagttatgtggatattgtccttgttaacaggattctcaaggatttgggtagggcatcattttccctctgatattgtccgaagcctctttattggtagcttgacaagtattatcgttgagaaagtttttggttctctaaaaataatgaaccgaaaatcaaaaaagtattatgcccaaatacgtaaatgaagcattttcattagctaataatgtctcgattctgtacttgctttaataattagttaaagcagttgctatagcgaaggcttctactaataacgacaagataaagctcttaagggaaaaattccctaagcgcctcattttcagttgtaaaatttgtatttaggctgatgagctaaacaatcttaccgatctcctgtagtttatcatcgagttttatacatatgagattttaaaattattcattgcttaagtctctttttgttttataactggatttatttaagacaaatcctgtaattagctcattaaattgaacccacttttttgtaggcagttggtgaccctgttgtggtaaaacaaagaattcagcatgcttacatttatttttatactctttcatatagtgggtagtccaatcctttttcccaccatatataaacaacaaaggcatagttaaatgatgaagtttgtctaaacagttatagtgtaatgaatgattataatactgataccatgattcttgatctgcttttttcatataactaactaggctctttcttagtgtcttgtctcgagtatgacttatagaaaggctttttattaatatatttaggtgttcttttaccatatacattcctattttatgtaatagttgtccaggtatatctcttactatagggtaagttcctgagaaaactaataattcgattctatcgggatgataaatagccagctcttgagcaattagacagccagcagaataaccacatataatagccttgtctaaatgcagcgcatccataaaacgcaatacttcgtttgcatagaaggaaattgatacagtttgttcagctctaggacttcgtccatgaccacttaaatctggaaagatgaccctcatatgcttggataaatcgtattgataatggaagactttatttcccatgccaggtggatgaataaagatgactggcataccctgtccacgctcttcataatacaagtatttattagtgtctatttcaataaaaggcatgattatttctcactccaaaatcaattaatacttacttttcagttaagattaatctagtttatgaaaaccaagatcttttttcatcttacatttaactcaatataattaactatttgttctgtattgtttaaaatcaaaaatcctttttattatttattatgaggttattatagtgagactatacagactaaaaaaggggagattttagaattgttaataggatttctgataatgctgattatgtgaactaaacatgtatacgatacacaatttaaaaagcagaaaaactcctatcggttggaagagagtttttctgctttttaggagtttgctatagtattatgatttatccatcttgagtagtttgcttaaaagataaacttttattcatttacataaaaaaaaacattcatgacaggtagctaaagcttatacatatagtaagagataaattgattaaaaaggtgattattatgtttcgaaaaatacaggttgttcttgtcggaagcttattattaagtataggaattaatggatttttagttcctcattatttgttagatggaggaacaattggaattgctctcatccttcactattattttgaatttcctacaggtgtgatgattattattttgggttttccattatgttggtttgcttgggtttatgaaagaacttatttttataatagtttttatgggttaattatttcttctttattgattgattggctagagcctattaaagaccagtttcaactttctgtttttcctagtgtaatctttggaggaatatgtattgggacgggagttggtcttatgcttcgatacgagacaagtactggaggaacagatttactagcacaacttatatcaaaagctttttccttaaacatagggatggttattttaattatagatggttttatcataacagcagctcttcctttattaggacctaaaacgtttcttttttcatgttcgacaatttttataggtggaatgacgacttcgttaattacaaaaaaagaataatttggattataaaatcagtatcttctatcctctgttttttgcccctccctttctacacccttcaatcgctttataagttcatgttaactattttgacttataaacctaaaatccttttaaaaatggccttcttttagagtgatctaaaatacaaaaaccttttcgtaaaaattaaggaatgctgctatgacatttgtttgattataaattgaataccatatctctttctaaatcatactatataagtacatttgtatttatatgaaaatcaggagggtctattaatgagcaatgctaatgcaccggcaattggattcatttacaacggtgaattttacgagatacttataaataagaagtccacaacatttaaggaaaacattagcccccaggaatctagattacctacgaagttaaactttcctggtgaagacgaaaaaaaattagtttttgtttcctataattccaccggaaatggtcagacaccaacaatacttgagaaatctaatcaattaccagaaaacgctataaaaatgctattagaatactgtattggttcatctagacctttcttataaaggaaacttaatgtggaatctgttttcaaaaaatatagcatgattctccataaggactatttttatagggactaacatatatatataatgcagactttttatgcattcaccttccactggggtatcgagaaaacgtagtcatatcaaggatgtataaaaagctgcatactccggaaaaagaaccctcggcggaaccgttctgcgacaagggttcttttttgtggtgtgtaccggaaagagtgattatgttaactgggtttgtatatcgtatgcaacagatttcctgaaacatatttgtttaaattatgtaaatatgtaacttttatggagtttattcgtatagattataggaggggattaatattaatactgaaaaacgtcttgaggaaattgagaaaaaattagatgatttacataatgaaataagtaagcaacaaaatagaacaaattataagcctctttttatagttttacttgttttatctgctattctcatatttttagtgctgataggtattatgagcttttttacaatttaatttgttagatccagcctctcagaattttttctgagaggctttttaattttaaaatactgataatttaca

SEQ ID NO: 92 - DNA, 11346 bp, Priestia aryabhattai
  source 1..11346: mol_type = genomic DNA
ttatatacaacaggtattgtatatgattcaaagaactttagcagtcttccctactgaggagattctatactttattgaccttatgttaactaaacatgtctcatatacagcgtaaaaacagaaaaactactgaccatgctccagtagtttttctgtgaatagtgagtaattagaagttgtttttgaaatcatatattgacctctggattatagtttgttcaagttagtaagaacttatgttatgtatagaaaagagaaaaccctactaaacatggacagtagggttttcttttggactattcatagtacacaatgaagaattgagaatgaacatctctccatcttttcaatagtgtgctcaattaagatataaatcattcacataaatgtatcaaaagcaggcttaagcctgctcttatagccataaaggctagtctatagttaagtagtgcgtattatttttgtgagggctcttgatgcaaatttagaataagaaaagccatagatgcctcacggcgtcttgagtagtttgctcaagatataaaattttatttctaataagcaagcaagttacataaaggaaaacaaaggcatatgatgtatttcgaataattttcgtctcacacttcgaatccttttaactttatttttcaccttcataatttacaaagtaaaaaaagaaaaaacaatctgtattggaagacagattgttttttcttttaaaagagagatggctttatcgaagtggcattcctagagccttctttaataatattcaaaatcctttcagataatgaattccaataaaatccactatgatagctaaatatatatatgatatacatctaaaaaaaaagaaaaacccccaggcggcagggaatttttctttttttaacaactacaaatccgttagggagtgtaactgagctactgggattcaatgggatggttcattcattctatgtaaagtaatctaaagggtttatttatatctaaaaaaatcctattatttctaccagtgcagagtatgggcgagcattttcactttttatacatatcttaaaagtattaaacatgtagggggtggagatatgggcttctttggcggttacggtggctgtggttatggtggcggttacggttatggcggaggcggctgcggtggtggctttgccttaattattgtactatttattttattaatcattattggcgcttcttgttttggcggcggttttggcggctgtggtggcggttgctaataattaaagatcatttttattttaattattatttaccattttaaaaagttagctttatgctagcttttttatttatctttactgtttacatatataaatttccgataatttccattatgttaactacgtttgtatatggtatacagcgtaaaaacagaaaaactaccttggagttagaaagatagttttttctgtttttggatgttatacaattgggctctataggttgatgcctcagggcgcacaaagcatcttgggtagtttgctcaaatagtcgattcctattcgttttatttttaaccagcagcctttgaacccgaattagatcctaaattccataaactaaatataatcgtgattaaaccaagaactacgcttgaccaaacctctccatttgttaatgagtagataaatgggaaaattataaaccagacaccagtaatcgcggagatccagttttgccatgaattccagccgggtttgtcatagccccataaagatacaataacttgaataattccaaaaattatacttgaccataaagctcctgattgatctgaataaccgatagcccaaggtgcgataataaaccagacaccaattaatgcatttaaattacctcttaatttcataattacacctcctctaagtttaggaatctttaaagattccattgttagattatatgtttagaaactatagagattaactcaatatataacaattaaataaacagaatatttaaacaatacctttactttgtaatcgctttcatttataataaagataggttggatggcatgagtggctgtcatagtatttagcgtaggtggggctgatacaagggatcagggcataaaagaaatgtccttttttgctttgaaaacatttattaagagatggaaagcttttattttttcacttagttgattaattagagaggtgttttatatgaataaaaatgaagatattaacgtttttttattaatgttgtcggtgatctctatttgtggaggattgttattaacaaatgtttttatttattcccctcttattggttggcttgtagcagtattttgtttaataatgaattttatttataaagaggaacaactgaaatatagaaaaagagaagattaagaataggatcttctctttttttatggattcttataacgtgttttatgttaacaggtaagagaagttatggaaggaaatatcattttgcatttgaatactagtactatacttttaaaacggaagagggggctagtatgatgctggtaaaaaagatgttaaatggaattatgatgaaagaaatcacaattaaagaattagctgatcagtatgatgtaagtactcgtaccatccaattaagaattaagaaactaggatatgaatgggacagtaagcaaagtatttatcgttatgttggggaagagccagaacctttagaagttgattttaatactcttatttctaaaactaataaaatgccagcagaacaaaagcaaactaacagtgagatagcagctagtgttagctatctgaatgaaagtgaaagtactagcgatagcgtttcaaaagctagtacaactactagcaaagtagatgcaattgatatcttgttgcaaaatccaaaagaccggtctaagagagtatatcgaggtttctatttcgatgacgacgtgttaagtattattgatagggttcctaagagctataaatctgaattagtaaacgaagctttgagaaaagtctttaaagaaaaaggattattaaattaaaaaactcacctacatataaggtgagttttcttgtttgttttacaaatagggtttgcaaaaatgtaagatttggtagaaaattagacataagaaaaagccctcaagttttcgccgactccgaggacttcttctcacaaattatttaggaaggaattaaccttctgtttttgaattcattataaatacattctatcacaaggggttatattctttccagtaaaaattggaggaatactaagtgaaaaaagctttagaccaagcagagaaaaaagcaagaatacgagattcaaggattgaagaattaattggtcaggcggatgttggtttgtcagcagatcaacagaaaatgttattacagattttacataagactaccggagaagattattttattggtaaacgcaagaaaaaaactgatggggtgaagtttgtgcagatgatcactgagaatatcgattacctatgtgaaattggctatctgacccaagctgaaaaagcttttttgtttgagatatctagatttctcgagttcaaatcaaatgtaatagttgagaagaacgttgaagatgaaggtaaaccatcagcagcttcaccaagttatttagcaaaaaaattaaataaaaccagaacttcagtatcaaaaatgatgaatgagttattagataaaggtatcttaggggtagcagagacgggagtaacaactgaagaaggacgaatttgtagttcaagaacttggtttgttaatccaaatattttatgtaatgcacctaaagatgaagtggatagagcaacacagcaaatattttcaaaagctcttagaaatataaaagttggggaaaaaaagaaacataaattacctatttatctattttaactgcaagaatactcttgcagttttttttttgtgtgatttggataaaattaggtgttaaaaaaaattaacacaggtgttaaatttttttaacaccttcccttctaaaaacgttggtataataacattcttgtacttgtcccttctcactctatttaaatagcaattcgctgatagaattgcaagagtctttttatacttttttcgttaaaactataaaattaaaatggctatttaaaatacaaggttcgagtagtattttttaagaaaatcacttaaaaaatctccactcttttctccttgtattttaaatttcggcaggagtggttatatcgccaagccgaacatacccaaaacgaagttaaagatgctcggcttgtgacggccattatacctgccgaaccgccagagcatccgtccatagttagtaattttgctaaaaataagctacacaaaaggggactagtccccgaacccctagccagcacgccaccccaaaacgaacggggttgcacgggtaaagttataacttaaaattaaagtgaatggcatgcacggggggcgtgcatctggttttaacatggttatgatttaatcaaataatagagtgtataaacattgatatatcagtacttgactggggttgaacgccccccgtgcacgtaaaaaaatgatgtgcatggggggcgttctttgttattctttaaaggacattttagatgagaaatataactatttatataaatacgcgtgcacgggagggaacggcatgtcagatgcaaagcttggccaagaaccagcttattggactagtgaagtagcaaagaaacttgaggtgtcagatagtactttaagaaagtggtgtattcaattggaggccacaggttataagtttgttaaaggagagaatgatagtcgggctttcactaaacatgacttaaacgctttacaactatttaagcaaatcgtaaaagtccaaaggaaaaccaaagaagtagcatctttagaagtagttgagcgttatggtgcacggcaaggaacgccccccatgcaacctgcacaaatggccgttcaagctcatgagttcaaagataaaattgatgatatggctcaaagtattgaagagataaaaaaacaattacatgaacaaatggaatttaataaaaagctggtagaacgtatggatcagcaaagtatgagtcatatacgtgaaattcaggaaacgagaaaacaacttgctgctgctcaagaaaaaaagaagtggtgggaattttggaaataaaaaaagactgccagctggcagtctttttttatttaaatgagttatttccgataacatcttactctctacttatattataactctatttggaaattatttatagactgttttttcactcatgtccagccttatactgttatacgcaagtcaaaaagtataaagggtggggctatatgaatgacaagaaaaatgtcttagatcctggtccgttttttcatggtactaaagcagaactgaagattggagacctgcttgaaccattgtacttatccaattatcaggataaaaaatctaaccatatctattttaccggaacattaaacgctgctaaatggggtgctgaattagcaagatctaattcaaaagagagaatttatattgtagaaccattgggcgattttgaaaatgatccaaatttaactgataaaaagtttcctggcaacccaacacgttcttatagatctaaatctcccttaaaaatagtagctgaattaggttcatgggaaaggcattccgatgaagaaataaatcatatgctcacatctttaaaaaagctaagtgaagaaggaaaaaatgtaatatatgattgattctcatggcattgaaatcctaattaaataaatgcccaaggtcgccctataaactgatatatagtaggcggcctttgttatgaatatgaaaatcatgttaaatgtaagaattttgggcacaatactataagtttatatagtattggaggtaacaaatttgaataataaaatgagattaacgtcctcagaaattacaagtttatggacacaatatattcaagatacaatggctctttgtattaacaaatacgtgttggcaactgttaaggaccctgagatttattctctattcgaatttaccctaggtatatccgagaagcatttaaaagtgcttagaaatatttttaaatctgaaaagttggagccaccgaaaggatttactgaaaaagatgtaaatgtagatgctcctcctctgtttacagatgttttttggttaggctacatgcatgagatgacaatgcacgggttagctggatacagtatatcttttagtgtgtcggctcgaaaagatatacgagatcattatttccaatgtaatattgatgctatggagatttataataaatcgattgaaattcttttatccaaaggcatttatcaacgatctccttatttttctaaatctcaaaggagtcaatcagttacagagttgggatatgttatggacttattcggagataaaaggcctttaaattcaatggaagcaggaaatatttattttaatctaaaaaagagtattgcagctaaagctctcgtcgttggatttaaacaggtaattaaggataaagatattcataaatttatggataattgtttacatacagttaataaaaatataaatattttctcttctgtacttcaggatgaaaaccttaaacctccccaattattagacagtgaaattacaaattctgatgtagctcctttttcagataaattaatggtgtttcatgctgggtttttgtttaatttagccactacgtattatgctgcagctatggtaacaagtatgagaatagatgtagctggacattgtgatgcctctattttgcgggatttaaaaacgatttcatcttttgggagaattatgattaaaaaagggtggatagaaaaactaccagaggcggatgatcgtaaagagttacctaataattgacgagagtttttactcttttataaatttttaagatgtattttatattatctgtcaacggtaaatcgcaagaccgacaggtcgagaatttaaggagttgatagattcaccagacccaaaccctcttggcactcaaacaaactcgtttgtttgacgccaaccggcgagggagccccctcaaaaaagtgagggggttgggggagtttttaagaatggggttaaggggaagagttccccttacaggtggtggacggcgtccacggtcttcatgaaaaagggcatccgttgaggatgtcttttttcattttggcggagccaaacacagggaggaacgccgaccgccacctcgtagagcgcgctcccaattttatcgaagatgaaaaattggtgtagtgcgttacaccaaatctaaagttgtggtatgctaaacccaagtacagtggtcgaaatgggggattgagggatggccaaatatgggattatccgtatgcaaaagtttcataaagacgcaatattggggatccagaaacacaaccaacgagaaggcgagaacagtaaaaataaagacattgatccaaccagaacgatgcttaactatgacttggtgaatgaggacaaaattaagtaccatgaagaaattaagaagatgacggccacccgtgtgaaacgaaaaattcggaatgatgccgtcctggtggcagaattctttgtgtcggccagtccggagtatatgcatgcgatgtcgctagacgagcagcgtaaatattttgaagcatcactggatcatattgccggcaaatatggccaacagaacattttatatgctgtggtacataacgatgagtcaacgccacatatgcacgtgggatttgtgccgatcacggaggatcggcgcttggcggcgaaagagtattttcatggcaaaaccaagattcgtagaattcaggatgattttcacaactacatgaacaaacgtggctacgatattgagcgtggcgagccgagcgaactgcagcataaaagtgttcatgagtttaagaaacaagaacgtgaaaaagagttaaagtatctgcaacaactagtggctcacaaggaaaaagagcttcaaggtatggataatttgctggagctaaaaacagcaccacccgttgagatacgcagtgagagacgcattgaagagttatgtagccaacctgttgaagtggaggcggccaagagtgtcatgggttccaaagtgaaagtggaagaagcagattttcatgagcttatgagtctcacaaaagagctgcagcaaacattggcggccgagcatgagcgtacccatgcattgagtcatgagcttgatcgttatgagaaagagaacaagacgttgaagcatgacttaagcgaaacaaggcaagaattagaggtatatgctgcagatcaagacggccaagtggagaaagcgaagaaacaaatgcgtcagaagcttgtacgtgatttttcagcagaacaaaaagaaaatgtgaaagacgaggttaagagagaactagaaaagcaatatgaagcccatataagctctctcagcgatgatctaatgatcgagaagcagaaacgtgagaaaacgaaaaaagagcttgtacaagcaaatgaagtgaatgagagcttaacgaagatgaatcttggctatataaaagattatgtgccgaaagaagagctggataaggcgaatcagcaggttcatgaattacgagaagagaataggacattaaaagcctggaaggaaaaagcgttgaattggattgataagaatgtggagaagatgaagcagatgtcattttttcaatatgtcggtgggatccgcaagcaatcaaagcgtcaggaacaagacttagataggtaaaaaggagacatgaagttggacaaaattaaaacgatactcttacttattgcttttgcagttgtagctggttatgatatttacttattgttgaatgcttatcactacggtttttctggtcagtaaatataattaaagccatataaaaaaagctatttcaatcgtattggcatcggagtgaaatagctttttctatattacattcaagagtgttctggttcgtcatggatatctttatatgtgaagtatatcacaaactttcttggctgtgaagatgaaaatcaaaatttgtatgacaagttttgattttaagataaaattccattgtataaggacatttgtatactgtaaaatactatatgaaaataaaaagataaaatgaatacaaggttgattgcttttagaatgatcaaccttgtatttgttttgctattaaaagcaaatgggtgaggggaatattggagtctcataaagtgattttaaaagaagctttaacagttgagattgaaaaagagagaaaatctttggtagaaacggcatttaaagagggttttacgagtagcaacacggtagagattagtcaatttattgatgagatgttaaatgaattagaaaagattaaatagagctattgaaaacaacaaaaaagcaacctcggcattggccaatgaacgaggttgctttttttgtaagggtttgttcatacgtatccgaagtatgaaacataagtagattaccacgttctgtaattagaggctacttttaatatgttgctatatatacaaaataaaagaacaacctctgcagtggacgggaggttgttcaaaaatagggttacgttgaaatttgtaaaaaatagtctgacttttaatatatcatatttgtatacaaaatcaattattttaaacgttctgcatatgtataaaatgcagactttttatacattctccctccacctagatcttgggaaaaaccagtcatatcaaggatgtataaaaagctgcatactccggaaaaagaaccctcggcggaaccgttctgcgacaagggttcttttttgagttgtgttccggaaagagtgattatgttaactaagattgtatatcatatacagcataaaaagagaaaaaaactcctgggctcaatcagaagtttttttcaaaggttattatacatgagatgatatccatcatcttgggtagtttgctcaatatgtaaaaaaataatcattatataaaaagagaaaaaacaatccgtgggagttggattgttttttcttaaggaaagatcaggctgatagttccttgttgtattttatgtttctcactttgtgttatgactacctataatgtgttttatgttaactaaaagtgaacatatatgtgcaactgtagaaaacatcgtgttcattcttttgaacacgatgttttaatgatttttttaatttgtatcttttaatcgcatgactttaccatctgcacttagttctacttcgtatctaattttagagatgtctttccattcacctcttccaaagaattgagggtttaataagaaaacgcctgtttctttttttattagaatattctttttggttaactgattaactgcattagttactgattgttgtttaatgcctaaattttcagctacaattcgtttatatcctgaattaatgatgataaattgtcctttatttgcataagttacgcctttaataagctcgtataataccttacttatccatccttgtatttctgctaatacaacaatgttgtctagatatacttttatataatcgggctcttttccatagttaaaagaaacactcgtcgtttcttccgttatttctccgttcatgtcaactacttttgttgtttcaacttttgatatcttagccacattacccacctctatcattttttaccatttactatatttttatcttaactcatattcaagttattatcaactctttattggagttaaaaacaactctttaatagtgttgtttttaactcttgatttttttgaaaaaacaactctttaaaacagttatttttaactcctatatgagttaaaaataacccgtataggagttagaataaacttatataggagttaaaaataacttttgaaaaagtcttataaacctttatatatcaaggtttatagcaatatatgaaaatcttttctcttcttttatttttattatgtactttgttttacaaaaagaagatctctattcaaaaagccttaaaactaatcgttttaaggctttttgcttcttataagagtgattatgttaactaactttgtatattatatacagcgtaaaaagagaaaaactcctgctgttgaccaggagttttttcagtaacgtatcaagatattaaaagtgatacgtaacgtatctttagtagtttgctcaagatgttatttgttattcatttttataattattaaataaaaagaaacagacttgttaggaagtctgcaactgcgacaagaaataaagctat

SEQ ID NO: 93 - DNA, 11322 bp, Priestia aryabhattai
  source 1..11322: mol_type = genomic DNA
ggcattagttgaacataatgaacgttatacatttaatgaatttcgtgaaaaagtaaatcaattgtctcattacttattagagaaaggggttcaaaaaggtgaacgtatcggtattttagctcatacaagtgttgcttaccctattgtaacgatgggtattctacaagtaggggcggtggttgttcccctaagtaaaagtataactccttatgaacttgatagtatcgttactagtggacaactaaaagccattgttcatcatcaggaatttacgcctgttttgagagaagcaaaacaaacacacacacttaactttatgctgttaattgaagaagcaaaagaatttacgtctcaattttcatcatatgaaacaagtactccggcatcacttcctgaagtactccctgaagaccttgcgctcatgatgtttacatcaggtacaacaggtaagtcaaaaggatgcatgattactcatggatccgtaagagcccttttaaattccagaagccaagaagaccgtacaaatatcaataaaaatatgtgctacctatttgtacatccttttttccatgtaagttcaatgactatctcctttatgtgcatcaagtcgggaatcacaatggtgtgttcaaaagaaacagatccagctacagttatcagtattatcgaaaaggaacgtataaaaatgttatttgcattaccaccagctttaaaatacatcgtagaagagcttgaaaaaggagctcatcatgatttccctctaaaacttgctctttcaggcggaacaaaagtatctgaatctctaattaagcaatacggtcgtcaaggcatcattttagcacagggatacggaagtacagaagcaggagctatcagctcatggaatcctcagatggggtgggacaaagtaaactcagtgggtaaactagctccgcatgtagaagttaaaattgtcgatcccgacacacgtcaggaagttccaccgggggaaaaaggagaagtgcttgtacgaagtccttatctctttaaaggttactggcaaaacgaagaagcaacatgcactgtcttgcaagatggctggttagcgatgggcgatgcagggcgattagatgaagacggatttctttatatcgaaggacgctacaaagatgtaattgtatacggaggagacaacatctacccagatcaagtagaggaagttgtcttagctaaagacggtgtattagaagcgacggttgttggtatgcctgatgaggtgtacggagaagttccatatgcatttgttgttaaacaagaagcgtcaaccttaactgaagaagatgtagtgaatttctgtaaagagcgattagcatcatacaaagtgccaaccgttgtatttgtatcttcacttcctaaaaatagtgtaggaaaagtatttaaaaaagaagtaaaaaataagtatgagcatatgtataaaaatcgactataatgatcgttttttactactatattttttaggatagggaaatcaagagaagtaaatataagatacctttaattcctttttaacgttatatggtaaatttatttttttaaacatgataggacttactattgccattatcgtatttaattttattgcatttaaaacaaataaaagactaacagcaaatcaaattcttcatatttggaggtttacaattgcttttcaacatatgttcgatgcctttataaatctaaaatatcatgcctattggtattttacagaaaatgcagattggaggggaattcttactcatactgtattactcccacctgctaatatgatatttcttaattggtatccttttaagatgttaatcattcactagattcgctaccttaccttttggatggccgccattttgctttatgaaatgattacattacaccccgaaccttggggatatttccactatggttggtggaatttatggtattcagctatcattgaccctgtacttctacttattacattagggtattataaatggggattaaagctagaaaacaagttattaacaggaaagaaataaaaagagcattgtagtagtaacaatgctctttttatttctttccacttattgttgacgaagttcttgtatttcttcttttgtaagtcctgttagttcgataatagtctcttcatctattcctttttgaaccatccctagagctacctttataataccttttttttcagctctttttaatgcagacttttcatccaataacgcttttcttcgagcttcatatgctaatattacttcaggatcctgacttacacgttcccattcatccatcgctttttttaatacttgatcttcttgcatcgcaatctcctccaatacctgagtgatttcttcgtcttccgatgcttccagtaacagtaaccatcttactagttgatcttctcgagggtctacctctttgttacgccacttaatcaataacttagggagctccatgaaatggatttccagcatatccgttaagagtagcttctgttcgcgctcatataattgaaaagtggagtgataatcatgaatatgcgataagtaacggaagttcacaatattaatggtaatggttttacaaagctctccgtaatccatgccttctttcatttggctactatacattttggaccagtaatagagcgttcgtttttccatatcatgtttattattaagttgaatctcaatatttacacggcttccatcctcaagttgcgcatgtacatctaagatagaacgcttatcttcttgattttctttattaaaatggggatccagtaactgaaccttataaatttttttctcatttggaaaacggagagcagcatttaaaaaggcagctaaaattgattcatttccatgggtcccaaacagagacttgaaagcaaaatcaacacgtaaatctaatcgttttttcataacgtcctccgtcatttcatcttctttctccttattatatcatgagcgttctcttattcctatgcaatgccttttactatcaacctaattgacagatgcaggactagactaaaacgaagctggttttcttacttccatcaaatgatttatgatttgtatcagataacacgtaacttttaagaataacttaatgatgaaaaataaagtgtttttctacaaaacatataaatcattaaatgaaatttagagttagtttattatgttattgatatgttgaaaattgaaactaaacgtaatatccattacaggcactcaaaagaaagcacctttacttatggggctttctttttggtttatttaattcattttgaagtacatttaatgcatttctcatctttagcatatagttcctatctccgttagaacatttaaatgaaatattattggttccgttatcacttaataaactcttttcttttagaagagttgaaagcctttctacggtacccttactgccatcaataagttgaatgtgagaaggtagaacttcctttaatacaggcttataataagggaaatgcgtacaacctaatacaaccgtaccatattgatttaaatcaaatccttctagctttgttctgaaatacgcactcaattcatcccaattaaaatttaggtcttcacagaattcaactaattctggaagaggtaatggatcaacaattgaatccttatcgattctggtaattaactttctatattttaattcttttaatgttaagtctgtagcaaaaacaagcacccttttatccattgaactacttaatttaatagcaggctttgcagcaggctccattccgattattgggatatcgtaaatagaccttaattcattaatagagatgctagtagctgtattacaagcgataacaagagctttgacctcttctttaaggatgtcttctactgcagcttggacatatttatttacttcttcttttgccttggttccatacgggacgttgcgtgtatcagcataatataaaaaatcttctttaggaaaatgttttactgcttcatttagtactgatattcctccaattccagagtcaaaaaaaccaattctcatgttgttcaccttacaattcaaatattttttacatcatttattatacctttagagtaaatgattgaataggaaaagcccaattctatagattgaaatagacaagcactacgaaaagaggctcattttttgattaactataatggagtgttttcaaaatattttctgcttgttgcatagtagctgttactatatctgctgctgttttatctctctctaacagcttttcggatatcctctggatgcatataagcagcgcctaatgttcccagaccaactgcttcacacacatttataataagatctatcgttgaaattttatctctcgccataccagcctgtataacgggtaccttaatatctaaaacttcatagacatgattatataaattcatttctctcccccggattatgaagtaaactacacgagttgtattaagatttaaataagcgatgcgacttggtagttagttcttttttattttcatactttaatcctgacataagtaatatagaccctatgaggacaatggctgctgcgcccaataaagaggtattataattatttgtggcttctgaaagtactccagcaatagtaggaccaaccatttgtccaactgcgtaagcagccgtgaaatatcccattatccggctactgtttttgggtaccatttgccctagcagcgttgctccaagagaggtaatccccatgaaggtagcgccaaagatagcagcactcgcaaacaaacttaaggatgaagatgaccatacaggaatgcttacgccgacagcttgtatgaacatagctaagattaacgatttgataaatccccattttttagaacacgctgaccataataaacaagaaggaatagctgttatacctactactgtccaaattacagaaggatcgaaatgaaaagaaggggttttttgggcgatagagacaataaatgtgcccgttacaatatatcctaacccttcgcagccattggctactatcaagaaaggtaaccattttcttggtggaattgtactttggtgagctttgccttcttttttactatgtaggaagacagaatgttctttaaaaattagaaagataataattaacaaaagtaagcttagcccagctaaaccaatccaagctcctttccagccccaactatgatagaaaaaaggaatggaaatgccggttaagaaaattccacatccaggtcccatataaaagaaaccagaccaattcgtcctatctatttctctcagttttcctaaaactatgcttgaggccaatacaaagactatagcactacacactccagataaaaatctcaatattccccaaagcgtataagaagtcgtgaaactcatcaagcaagtggtcgcaacaccaataattaagcttacccttaagataggaatcgttcttcccttcatggaaaatagtccagttaaaatagctccaattagatagcctgcataattagctgaagcgagataaccggcaatggtttctgggaaatcaaatttctgttgcataagaggtagaataggagtgtatgaaaatcttccaatccctaatgcaatggccattgcaagtaatcctcctattaaaaaagagaggttttttttatccatttcttcactccttacaaaagatgctctatatttatcatatacgctttgctccatatagtataattcaaaataaagatctttggcatcactttaacagatgacaaatagaaaataggtgtgaaaaaatatggatattcaatcattacgtatttttagggcagttgccgagtatgaaagtatcacaaaggctgcaaaagagctaaactatgcacagtccaatattacgactcggatgcaacagttagaaaatagcctacagactgtcttatttcatagacataacaagggaattaccctaacagcaaaaggggagttactaataacctatactgataagatttttcgtcttttagaagaaacgaaacaaataatgagagatgaagaagagcctcaggggtcgttaaatattgggtcaatggagacaacagctgccgttcatttacctagatttcttgctagatatcattctgcttatcctcaagtggatctaaacttaaagacgggacctactggtcaacatattgaagacgtattaaattataaattggatggtgcgtttgtctctggccctctatctcaccctaatcttattgtaaaaaaagttttcagagaagagttagtgttagtaggaaacttgtatctttctcgatttttagaatccgaaaaggttgataatttaacacttctagtattacacaagggttgtttttatcgggagaagtttaaacattggttacatgaagaaggtgttaggccttctaaggttatggagtttggttccttggatgcgcttatggggtgtatagcagctggactgggagttactttacttcctctgtctattgtacaaaagtacagccatctcgaggagattacttattatccaattcccgaaaaattttcattagttgatacacttttcatttatcgggctgatactaccttctctacacctcttattaaatttataaaaatgtttcaagagaagcagtcctctgtaactttctagaacagccattatgttaattaaaaaaagaggatcagaaaaaaatctgagtctttttttattgtttacaaattaatggttgacttagagctaagtctaaattgtagtatgtaaagaaaggaggatatggaaatgtatagtatatctgaagttgctacgaaaacaggatttacggctcacacattacgttattacgaaaagattggattattgtcttcaccattaagaaaaggtggaaaaagaagatatacggaaggcgaaattcgccttctcaagtttatgaaaatgttaaaacaaacagggatgtcttctagaaaatattgattctgccgccattcaattaaaaaagattcaaacgagggcagatattttaaacaaacatttacttcttctagaaaagcaaaaacaagagattgaaacagttatgaatgtgacaaaagagaaactagagacgtatgaaacaatgattggagacttgaaagatgaaaagtaaaatataccttatgttaataggtttcgctatatttacaggtgctacgttcaacttggctaagtatgctgttcaatatttctcccctgcaagtgctgcagtatggcgatttggaattgctgcactcgttatggttcttatattaggattacaaaaacaaataaagttagaaaccattaagatccattggaaaatgtatatcttacttggcatcataggaatttttggattcaatgcttttttctttttaggaatgcaatatacgtcccctttaaatgggtccctcatcatgggaactaatcctctggtaactacactttttgcttattttattttaaagaaccccattacaaaacagtagatgctgggtatatattttgcattagtaggtgttatccttgtcctaacccaaggttcgttagaaattattcaaacactatctatttctaaaggggatttattaatcttagcagggaatctatgttgggccttatatggtgtattaggaagaaaatatttgaatggtagttcttcaatggagacaactacttatacaatgatcattggttctctttgccttgtcatcttaacagctttttcaccaagccctcagcctttgtctcacgttacatcgtcagcttggggagcaattctctttatggctctatttacaagtgtattaggctatttgtggtggaataaagcaatggctacgattggcgcaagtaatacgtctttattttttaatttggttccagtcgtcaccatgatcttttctattttaaccggttcccttattacattacctcaagtaataggtacatgtttagttattttaggtgtcttaacagcttctggctttttacgcttacgaaaaaaacaaaaagtttcagcttcaatataacaatgaactgctaaagcctatataaaaaatatataggctttattacttccggtaactctgttatatcattttgtcaaattcaattttttactcccacatgttcaattattcgcttcattgcctgaatttggcccatatgagttgcttcatgcatcagtgtaacacccgccagctctccaaaggttttacatcccagaaatggcttttccaagttgttgtttagctgttcagcaggaatttgctgaatacgggccaattggtcttttagttggatcttaagctcctccatagtaggtacattccccgtccaatcggctggtttcgtaccatttccgaacaattccatatagtttgctggaagatggattgttgcatgaggaaaaccaaacatagtttgttcagtaattgtcaaaacgtgacctgtatgccaatgaattgtgttgttaaagccatctggctgtacatcagtttgatccttagaaacagcctctatgattttgaggaagtactctcttccaatttcaaattgcttgaatacaagtttgttcatctttttctcccctttcactgatacaatcatccatattataccacttttggaggggagagcaatataattaagattcctctagtgcttcataacattcgtaaccagttaatataacttatctattcttgtcattaatacttgattaatagattacctttttctagttaattcaggtaagtttgcatatcgtattcttttttaaaagaaaaaaactaagaataatagttgacttaagcaagtattaaggttgaaattggtaaataattacgtttgtattatttaaaagaggtgtgaaaatgatcgatgtacagagtaagtgtggccttgaatttaggaaatttaaccgattttacacagatgttttaggttttttaaatgaacatatctatgacagtccgttttctttaacagaaactcgtattctgtttgaaatttataacactagtaattgtacggctaaaaacattcaagaaagattagatttagatggtggttatgtaagtagaattatcaaaaaactcgaaaaagaaaagatgatttataagcaaaaatgtaaagacgatggacggaattatcttttatatgtaaccagtcatggggaattgatttacaaagagttggagaaaaaagccaatcagcaagtagaatatattcttggaaacttggatcatgatcaacaaaaaaagcttgtagcctcaatgaataccatacaagaaattctttctacgtcattcaaagaaaaagatgaagaagctgtttctgttagaagctattatacctctgatgatattaacaacatgattgaacaacaatggttattttataatcaagtacataaatgggatgacagctttttagcatatctcaaggaaacttttaatgctgatatagaaagaatctggatagcagaaataaatcgcgagtttgcaggctgtattggcttagtgaatgatggcaataaggtaggacagttaaggtggttcttagtaaatccgtcatttcacaaaaaaggaatagggagtcaacttattaactctctaattcaatactgtaaagaacttgattatgaacgtctttttctttggaccgttagtgatatggtgacagctagaccattatataaaaaattcgggttcgaaataatggaagtgcaagagaaaaaatccttgtggggagctaccttaatagaagaacgttgggatttagagctaagaaaaaaataatcacttttagttgaggggaatatatgaaaagaacatttcattacgcttggattattgtttttgttacatttttgacctttttagccgttcaaggtgttcgtctttgatttggagcttttgttgagccttgggaaacagatttctcaatggataggggaaccatttctcttatttcaacattgagctttattacttatgggctgtctcaaccactcattggaaggctggtagataaattgggtgctcggctcattttatcctttagcacttttctagtaggtataagtatttttctcacatcttttgtaactcagccttggcaattattctttctttatggaattatggtttctttcggcgtgggaggagcctccaatgtagccgcaacagtggttgtgaccaattggtttaacgaaaaacgtggcctggcgtttgggattatggaagctggatttggtgctggacaaatgcttcttgtcccaggatctctcatgttaattcattggcttaattggaaaatgacagttgttatattaggcgcctttttagtgcttattgtctttcctatcgtccttttatttttacggaatcaccctaaagagaaaggtttagttcctattgggggtgaaatcgtagaagaagatacagtcgaaaaaaagctttaaatacaaaagcttcaatatggaatgtctttctaaaaagagagttttggtttttaatcttaccttttgctatttgtggtttcactactacaggattaatggatacacaccttattcctttttcacatgatcatggattctcaacaagtgttactagtgctgccgtaagtatacttgctgggtttaatattataggtatcttactatctggttttgtggctgatcgctggagtagtcgcaaaatgttattccttttatatggaatgagggctatatctatttgtattctcttgtacagtcataattctgcattattgcttatctttgcagtactatttggattagttgactttgcaactgtagctccaactcaattactagctacccaatattttaaagaatactccattggatttattttaggatggttatttcttagtcatcaaatcggatcggcattgggcgcttatttaccaggcttattttataacgaaacaggtagttataatatttctttttatgtttcaattatgatcttagtaggagcagccattttaaacttgttactacctgaacctcataaaattgcgcaaaaagagaaaatagatactcacgaacaactacaaggttaataaaaaggtaagccttcattaacggcttacctcttttatttattatgactacctataagagtgtttatggtgcgacaagaagtcgcttttatatagcgtggctcacgccactggtttagacgcaaaaactatccccg

SEQ ID NO: 94 - DNA, 10918 bp, Priestia aryabhattai
  source 1..10918: mol_type = genomic DNA
tacacaatctctattttagatattctaaaaagatataatatatccgcaacattctttgttgttggttcagaagtgaaaaaattcccggatataatacaaagaatttatagggaaaagcatatcatcggtaaccatacttggaaccaccctgatataacaaccctttcaagggatgaattgtggaaggaaattaattcgacaaatattcaaataaagaaaataataggacattctccagatctatttcgtcctccttatagttcaataaatgataaaaatgctgatgctattaaaaaattggggatgacttctgtattgtggaatgtagatagtaaagattggcaggaaaaatcccccttaagtatacaaaagaatgtcatttcaggaatcaagaaaaagagtctcattgtaatgcatgacggggatcaatacggtagtggacctagagaccaaatcgtcacttcattgcctgaaatcattacatatttattgaaaaataattatcgttttttaacagttccagagttccaccaagttgcatacacaattgaaaaatggtcctaaaaggatggttaacttttttagattcagctcaacagtaagatagttttttcttttttagctgtatatgatatatatttttagttaatataatgaattaaatcggaagctacacttaaatcattttcaatacccatcaataatttttagttcgatccatgataagacccttccatttttgagggcaccccctattataataaaggtccttatgagttctacatggggtgctttccttgccggaaaagtgcccttttattttgttgtctccttctacttttttgaatccttaaagagttctttctccaaaagctgaacaagaaaatcttttttgctcatacttcttcaatacatctcttagtgaattctttaaataattcttctggtatatcagcatttaaatgcttaaatccaggcagtgttttaagcatattaagctttctcctagaatgagtgcgcactcaaataagcggtaattaaaggatataattaccatagataataaccaaaattgaaagaggtatttagtcattaattacctataacagaaatcttgaatatcataggaaggattaacaaattaaaatccggggggacacgatgtgaccaaactatttgctatcagtgcaggtatgtccttttttgctgttgctaaagctgagaatgaaaaagaagtacttactattcttgttaaccgagaattagaagaacaagaggattttggtatcagagcgcatattgatgacttttcgattgaagggctgtgtggtgatttcttccatgatgaaaagggatcatttatcgaaggtcacatcttagactaccctcgccatataaggaaaatgagcactaaagagcgtgatacctatatccaatcacatgtcgaaaagaatgctagaatcttttggaaagacaatccattttatgcggaattgtacttgcgggaattcaaaaagtataaggcagcagggaaagacctaggaaatacgttccgtcctcatttttcggatgaattttatttcattacggccaaattaattattactgaaacggattggtacggagaagattttcaaatcattgaaattgacttaactaaccgtaattaccagcttattttcgaacttactttagaggaatattagttaacataatcagcattctaagaaataaaaaagccatgttcttaaaaagagaacatggctagggaagatgaaaaggttgtaatacattatatatactttataaataagttgtattagacaataatctaattttaataaataaaattagatttctagagcaaactattcaagaagctgtaaagtttccattcttcaatcaaataaatgtaacagaaaaaactacctctctccccaaacggtagttttttctgttttttaggctgtatatcatatacaaagttagttaacatggtgaattttatagaaaataactaataacatcttatctataaagatgctattaccactgaacttgaacactctttaaggtattttatttaactaacccgtttttatatttctcctagaacttatttaacatagagattttcgtttagacaggaggatttcttgctatattcataagggtctgaacattttgagcctatttctcatactgtattaggtattaataatatattgaggtgaaaaatatggacacaaattatatagattctcattattacccaagatttttaagcccacagttcccgtcccctagtttccctggatcgcctggtggtttccctggatcacctggtggtttccctggatcacctggtgggcaacaagctccaacttccccaccaccagcatttatcccacaacagcaaacagcaacaccatttgcagtcgacccaggagccatttccttatgtttattccgtaacacatatatttggcttagaaatgggtcaagtttttggtattaccctatttttgtaggaccgagatcagttgctggtttcagatggaacgggcgattctggactatttttggtatagatacaagacgaattgtttcatttacatgtttctaagtgttcataattgatagccctagaaaaagggaggaaccagctttgcaacctacagagaaggtcagggttagtatgccattcccatcacgatggggtatccacgctgagattgcaggtagacctatggtttggggtgtgcttatcattaactccattacaggcaatagagtaatgggtacagttaattttcggggcaccctcattccaattcccattaatgggtattggaatgaggggagcaaacaaatcacctttaattcaccttatgccacatattctggtaacttaactatgtttgacgattccactactaaaattcgacatcttattttaagtgggcgggttattatgaagccaccttccttactagcaggtaggaatggaacttgggtggctaccacagatacaagtctcacaggacctgccgttagcaatagtgatttacctcctgttggtgcctttttaacatcaaatatacttcatagtggacttggacgttgaggaaatcctttgaaaatatacaatttggaaagcaaaaaaactaactttgagtcagatagaagttagttttttttgctttttatgagatagattaatacattctcttataaaattataggaaattcctaataagtattataaatattttcgcatgtttcagcttttggttgataaaagcagtgaagcttatatcgggcaacaaggggttgattgtaccatgttggagggcactgttgaggaggtctgaaataccataggctaaattttgcaggccaactacgttctcctctgacagatcgacgtgccaaccgtttttcactttctcttgctctttgatagaaatagcctttttgagtagcttcaaatgcatggggttgataaatcatttgtggaatagttctcagtcctttaaaatcggagcaattcgccctgattcgattaacccctacatttcctataagaagcattcccttttggccctcaccttcaccctctgctctaaggagtctcgctaaaagagctatgtctgaagttgtagctttaacaaccgccataatttcacctccagaaataagatatttctctatagcccgtataatgtcttttcgtcattttttaaaaaaataggcttttctctaccattacttcctacctatttttcccgaaacatggacattcacccaagacggaaactaggtaaatgcatattcttgctttgataagaaaaaatggaggtttttgtcatgaattcagaaatgcatttgttacctaatttatattttcaagaaaatcagttacctcatggagacatgcggtttattggaagacccggatttggtggtcctggttttggcttcggaagacctggcttcggttttggacgccccggatttggctttggacgccccggatttggctttggaggaccgtggtttggccccggatttggttggggaccgtggtttggcccgggattcggttggggagggccttggttttggtagtccctttttatattagttgatggtttattacttggctctttgttttctctatgtgttttagtatagatacaaaaagagtcgttttatttacatgtttttaaattatcaaattgcattcactagactgatgaaataaaaccatcagtctaaatatataatttaaactagtacaagttatactggtgttactaacaaacaacaattattttatacggtgttgtttgaggagaaatactctttgttgtaggtccataaacaacttaaaaaaaacataaaaaacattggttgagccttagccaatgttttttatgtttagatagataccctgaggagggctttttcttttaaaaaacggatgattctcagaatccagattacattctattcatcgacctgttttcaggtgaattgtttatacgaataacatttaataacttgagaaaactgctcagaacactgtaaagtgttaaatacgtctatttagagttttaactggttttacttatttagtaactcccaccactaaaacaagaacaaccaatgataactaataaaataaagagtacaacaattaaagcaaaactactaccaaaaccaaagcctccacttgaaccacagccagagcctccaccgtaaccgtagcctccattaaaacctccgaaacaacacatattcttcacccccatacgtttctacttttagaatatgtacaagaaggaaaagtgttcgtcctaaactgttaaaagtagaattatccacgcctgaccaatttctatgtctttattaacattttaaggaacctatataaaaagacttgttacttaggcgctgtcagtaacaggtcctgtgtaggaaatattaaatgggatttctaggaggtagggataaaaataataaaagctttgtatgaaatcaacgcttgtccaaactcttttcattaatttgcatactatagaagtgagcatcctcctgctcttccaatagatcggttcttttattactattaggttaaaaaaactactgtttggtgaacagtagtttttttctttttaaatttgcaaactcaggcgattgaaaaaggcagataatcttaatcctgaccctaacactccgaacaaatgaattacgtttaatgcttgcacttaaaaaggaaatataaaattaagaagcttttatatattcactttacaaaaaaattaatatccactaaatcctgtacaagatttagggattacttgcaattatttcgaagttcttacatcaaaatctgttttatcatacttgagggtttaaatttataaccgccttcactattttgcttctttactccccccctcgtccttaaacttattaatgatttgtttaactaatggtgaaatatcatttattatgggtttacatacattaactgtttcaatcagagtatcaatggttgccatgagctcaacaatattcttattgctactaatatcttcagcaggattaggagaaatattattaggcccagcatcgttactaaataaatcatgatttacttcttctgttttggcctccctgatcctagagtttccaaacatgaattgtgagaacctatcaatatcccgattattattctgtttcaggatacgatccctgtttccatttgaattgccactccgtagggaatctcccgttgttgagctcccctgggaggtttcattaaagtcaatattatcttccactattatccttcctttcattttggtatatcttatgattttccacattgccaagtttggactttttttgtttttattaaattttaataatttctaatatcccctgttcagcccattactagtgcaaatcttatgaaaaagaccacttgtggagatagcacatttgatttggtcataaattcaacacactctagacataatctatcagggaagtgaaaccagctatattttggaggggattaaggttttgaaatgtattttatcagatattattttttaatcctttcactgacagctcagcctcgatatctcataactaaacctagatgcctataccttaataagctcatttgaataaaataggagggattatactagtaaaggggggattaagatgtcccataaagataaacaaaaagtaatccatgctgacaaagtagtcattcatacaaaggatgttgaaattattcataatcgaaaggaaattactcgaagggatccatggggttttttttgggggagacaacaggtagataaagtaaatgaacaagaagtaccaaactcagaagaaccacagactaagagcaatgaaacagttatgaagataaataaaacaggaaaaagaaaaggaccatggtttccaagttattagaagtctaaaaagctcttaattgtaagagctttttgtcatatgtatatactacacaagtcagtcaccatataaatacatatatcagttataagaagtcaaaataaaaataggctaactattttccagatagtcagtgtgtttttattgtccttgaaaagtgaattctaaagacaaaatgccttacttctccgtccctatattttatgcatattgctaatataaaagcttaaactaaaaatttcctttgagctttgagcaaactacccaagacgccgttaggcatcagcaactttaaaatccctattcttttaacagaaaaactcccctcaaaaaaactaactgaacaattagataggggagtttttttctgtttttaagttatatattttatacatgtttagttaacatagaaatgggctaaaagaagtccatgaattaattcatggactgtttgccgcccttacaggggatggcaataaaggtagagtaaggtttttggtatttgtcatacataatatatgttgctgtctattactaagcatattgtccatataaataaaacaaaaataactagaggaacctattcaaggattggttagtaatctttagctatagctaaaccactaaaagaaatcggtcctacgatagctgcttctgtaccatttgtaatattctcagcagttactcggtaatcatgtgatccagctctcacattcttatctatagcttggaatgtcacaatataatttatctctgattcaggatctgcttctactccttcttgagctctaaagatttcttgtccatcacgaaaaattttaaataaaatttgcgaagtaccacttactcctcgaacaccaaccgttgcaattaattctacatgatttctatttgcatcccttccaggaatagttacacgtatatctgctaacacagtttttttaggagaatgagcaatcggacttgggtttttttgattaactttatgaactggttcagttgcttgataatcaacaatacgaaacattataattacccccttaacttttataccctaaagtatgtaatcaggggagaattggcttggacaacttttctatgtttaaaagaaaaatttctctaagactatttttctgtatattttatgtatatcatattcgatctcaattaccataacgtgagttatagaccaaaatacagattggttacgctgcaatacataacctctctggaagtaaaacagctagcatattattactagctgttttactagacaaacattggaaataacgaaataagcttgccttgattttctcatatagtcagaagttcaaataagatttcccccttattagtaccccccatgactaaaacaagaacaaccaacgataattaataaaataaagagtacaacaattaacgcaaaactgctaccaaaaccaaagcctccgcttgaaccacaaccagagcctccaccgtaaccatagcctccactataacctccaaaacaacacatatccttcacctccatacgtttctactttaaaatatgtacaagaagaaaaaatgttcgtcccaaattactaaaagaaaaattatccacgcctgaccaatttctatgcctttattaatatcttaaggaatctatataaaaagacccgttactcagacttcaacaggtcctctaatataattaaatttacaacttagatttacctattgaaaatttaatttttatatccacgcctgtccattaccttttattctattttgcatattctaaaacatatgagatagaaattctcatgtaaccacccgtagtctatattcaccacatctaacaacagcctctccctttatggagcaataataaactcttattatattcctaaaaatagactatttactatgaaaggaaggtgttaaatatgagtttcacattaattgtcatcttattcatcttgcttatcattgtaggatgttcttgtacaggcctaggtggatactaattcaccaaagggttgactataaactatgatcttatattatccatctaagtagaaggattagtttaatattagttgattgaaaaagaaaaggacaggttgaaaaatttgtctcttttattgaagtaaggtctttttccaaacagctgttaaaagacatctgcctgcttgagaaaggaggatgaaaatggaaaacttaatttggagatatcggggagaacccgttgagattatggatcgttgcggaagaatccacaggggagttattgattcggatccaccaagaggaggaatgtttcttcgtaatggttttggaagaagatttatcccattcttcttaatcactgcgattttcctttcaagatttggaagacgacgcattttttaaaaactacccctgattataaataaataggggatgggaaactgctatagaaacgttgactcatctttttttagttgttaaaccatcagacttacaacctaatacaaattttcaagttataaaaatatatctttagaacggtgaaatgttcacttgaataccaagagataatatccagaaccaatcaatataaggtgcatataatattccagatggtaggtaagttgcccggcttacagatttatcatccttatctatgagccatgtcccctagccatgaagggcatggccattattatggaaatatatatactttctaagacttatgttacatatttttttatatttctattgatctgattcgaactattttgaccggcattcaacaaagacctgttacttaatcggcggtagtaacaggtcctataaaggaagtgtatgggatgtccttatacaaggataaaatattctatgtcaagttagtgataaagcttgtacaaatacctataaaactaacaaaaatataaattaattatccatgatgaatatattttttataactgaagcaaactactcaagacgttttacaatgtcagctaacaattgattacgatttatgaaacaaaaaaactactggtccctaataatccagtagttttttgtttcaagctgtatatcatatacatgtttagttaacataatgctatttctaataattagaaagtttaatttaaacagggaaatccattttacccttttgggtatacttgtctggttgtaagtacacctagggcatccctaactttttttgcaaaagaaagtggttggccgatagattcaaaatgcataaacatcagacgaggttgatcaaatagccagtgattatgaactgccgttacgatgatgtcatgttccctaagcttactaataaatggatttatttcatcctgtaaaataacggtttccccactacaaagagcccgaccatcccttgtcatggattcaaatgtgaacatttgagggatcagtaaaaatgacttcccccttctacccaaaacttcaggatgaatatttgtgcgggatttcatcactgtacaaactccgttctcaaatgtatgcattgatcccccaagaatttcattgaatctgtcacaaagattaggcccactgggatcagtagtcataggtctagaatcagcataaacatcgcgtgtagttagtactctcattgcatccttaacttttcttgcaaaagaaagtggttgatcaatagattcaaaatgcatatacatcaaacggggttgatcaaataaccaatgattgtgcacagcagtcacaatgatatcatgctcgcgaagtttgctcataaaaggattaatttcctcttgaagaattactgtctctccaagacataatgctttaccgttcctatcaacatcttcgaaagtaaaagcttggggtacaaacataaaggattctgctcttctccctaatactacaggatggagattcgtacgagatctagtcgccgtacatacgccgttgataacactcggtgtagagccaagtattcttgcaaactctcgacaaagttccgatggttgattgtccatgtttctaataagaaacgcctcccataaataacatgtaaaatatataatcttgttataatatgtacttacatactttaggaaagtgacaatcgtctattattttattttttaggatttatatcatatacaaagctggtttacataatgggttttcttgctagaaaaaaagtcatgctcttaattaaagaacatgatcagaaaagaaaaacaacctttcagcaggtattccatatataatatgtgctttaagggtagcttgtactaaacgaatatcttttttttatattaacgaataaaattattcctctcgagcaaactacacaagatgattaatatcatcccatctataataatttttgagaaaaacttctgattgagcccaggagtttttttctgtttttacgctgtatata

SEQ ID NO: 95 - DNA, 10600 bp, Priestia aryabhattai
  source 1..10600: mol_type = genomic DNA
tcaactaaagatttatattttatatagcttaaaacgaaaaaaagccactgataagttggtggcttttttgatctattcttataaagaacagaccacgttgactttaatagtttgctctagaagttatataatatacattaatttaggttcatctgttccactctgaagctaatatacccatgaaatatgtatctacatatttcccttccacataggcgtgatttcttaatatgccttctgtaacaaaaccaatttttttatataatgcaatagcctgttcgtttaatccccttgttgttaaatagattttatttaaacgaagctgtttaaaccctaaatcaatcatttgctccatcgctatttgaccatacccttgacctctagctgcggaagataaaagaatgccgatactagctcttccatgtgcataatctatatcttttaggaatacccatccaaccaatacttgttcgttggtttcaatacctaaaattaaatcgtcattcattcttttcttttctacttcctgtactacctcttcataagttaaaggtgtcctacctaccattcgcattgcctgttcatcatttaaccatttatgtaaatgttgaatatggggcgtttcaaatgggataagatatatttcttttgtactcatttatttatctactccttctgctcccaaccagcgaattttttaaaatgttaatagctatacatcctgccatacttcatctcgtaaatattactgacaaaagtagaaatgtatttctactcacgatgtaattaaaggtaaatgttggtaaaataggtaaatgtataattgaattaagccattaatctgtttttaatttggaatatacattaagatctataaactttccttttgacttctctacttgcctaagtgttccttcaaatgtaaaattcaatcgacgtaaagttttaaccgaattagtatttaaaggctctacttttgcttcaacacggtttatgtccaaatctaaaaaagcataatttaataaactgttaataacttcagacgcatatcctcttccccatactgcttttgaaagctcgtatccgacttcaacttttgaatgctcgaagtctaacatgttatagccacatgatccaataatttcatttgtttctaattcaataatagtaaagcgaatagcctttttttcagaggctagtttatttaagaagttaatcatatctcttgcttgttctacctcggtaaaattgttaatattcatgtacttagtaacatgagggtcagaccaaattttaaataaattagacgaatcggattcgtgcatctttcttaggtgtaacctttttgtatatagctccgaaatcaataaaggttcctccttatattttactaacaagaataatatctaaaggtatttattgtggaattttaataaagctcagaattctatttatttaaagcatgcctgtcctctaattctaagagcaaaattatctttattaaatagatataataaagatgatgtaaactctacctatttttactcctattgattcaggtaaaacccttaatctacttgatcatatgcttactccttatttggctttaaagccaataaggctccaaaatattgtgaagctgtagtaaagctgataaatgcacataactcactaatttcacgatctgtgaacgtttccttcaacacgtgaaaaaaggattcgtttatttcctctctttgttttagaaaaacttctgcaaaacctacagcaagagacgttttttcatcaaataaatcatggttaggctttccttttgctttacaatattcgcatccatttttttgagctaatgttcttctaacttgctctttcaaggaagctgagaggctgttatccccttctaaaacttctcctagattgttccaagcgctcaatacatttgtattatggcctaatagctgctgaaaaggagtacttccattaccggataaagaaatatttgtcataatattgatccccccttattatttttcatcccttattctaaaatttttcagttcctttgagaatttaatttgaattaaataacattggaataagatgcaaatagaatccaaaatcatttcttacattacagatgtaatgtaaataaattatatatatttaaaagctatctttatcggcatatttaatcacactaaaccgaaagttgatgtatagagaatttcataatcggtaaaaagaaaactcaacagccccttgtggctttggggaggcctttttgtataagttcttgaaacgctggttatgtgaactaagaatatataggatattaaaggttatggtataataagtaattatattaatattttggtattttatatgatgaaaaaaggaggtattttaatgggaaaggtattattctttaattttcctggagaaggccatgttaatcccactattgcactcgtagaagagctagtgaaaaagggagaagacgtggtctattactgtgtagaagaatataaaaataaaattgaaaaaacaggtgctttatttcgtccttatgaaaatttcacacgaaatatagatccaatgaaaaggctgatgggaaaaatagatcccctcgaaatgttgctatttatgggacggtcaatggataagattatagaggttgttctaaacgaaataagagaagagaagtacgactatgttatttatgataataatttcgctgcagggtggattattgctgatgcattgggaatacctaaaatatcttcttgtacaacatttgccattaatgaggatatcttttcagctcttataaagagcagaggagaaatggatgaaacctctccaaggtatcgagaaattgaagaaatatcgacaaaatggaaacataaatatggagtaattctcagtgatagacaaaacttgatgtcttgtcctggggatatcacgattgtatttacctctaagttatatcaaccctatgctgataaatttgatgagtctttcatctttgttggtccttctattgcgccacggcaagatgtagaaactcttcccttaaaaagtagtcctagtaataagctcatctttatctcaatgggaacggtatttaatcagcaacctgagttatatactacctgttttaaagcatttcaagaaagtcaagctacagttgtattatcagtaggaaaacagactgatattcgccagcttaaagatattccacctaatttcatcgtacgtaactatgtaccccaattagaaatactacaacaagcagatgtttttattactcacggtggaatgaatagttcgagtgaagggctttattttggtgttcctctcgttgttatccctgttatgggggatcaaccaatagtggctaatcgaattgaagaattaggagctggtttacaacttaatcgtcaagaactagatgctcttacattaagaaagacaacagaacaagtactatcaaacccctcatttcaagaaaaaagcttaataattggaaaatctttaagggattctggagggtacaaaaaggcagcagaagccattttaaaatttaaaagagatgcaaaatagaggattttatttaatcttatctaatttttaattttaacctttaagtctggaaataaaaaattaatgaggatggaaaagaagtctcaatgggagacttctttttattatcgcctagaaaaacattatggtaactagacttgtatatattctaaaaaaaattagactttttcactgtgtttaccttttgtaccaaagtaatttgtcccaataactcctgtaataatggtaattgccccgactagatgataaaggtgaaattgttcttttaaaaaaattactcctgctaagattgtaatgagtgtagcaaaattactaaagacactcattttagatgcttctatttttgataaggcgtaattagaaagataggacgtcactaaagatgataataaacctagatagacaattgcaatcacaaaatccaggtgaaaaaaaggctgtataaattgatggatagtgttattcattagatgatttgtcaatgccaaaccattaaatgtaataaaaccaaataaagtcattatatatgtgatggtgaataaggaatatcgttgagttaaatttctagcacatacattgtatagagacgatacaagtgcggaaattaaaatcaaaccacttcctagtagactaggatttttatttcctatatcgttcatatacataatatatatcacacctactaccgagaaaataatagctatcttttgaccagatgtagatgtttcttttaaaaatatgctcgcaaagattaatgtgaaaattgggattgttgcttgaatgattccagcttcagatgatgatatattcactagtccaaatacctgaaaagcaaaaaagagagtggggtataaaatagctaacaaggcaataatccctatatcctttttggttacttttaatgattttttcgttaatacttttaagattgtaacccctataaaagcaatagtaaatcgatgtgctaatgcatcaaaaggtgtagcaatagttaatgcaactttgacaaacataaatgataatccgataataatggcataagtaagtgctgctatatatgcttttttcttttcaaccatatgaatgaccccctttagatttacccggccggttatcattatagtaagagaaactaacagtatctacgatataaaaaatacacatctgtatcggtacagatgtgtatttggaggaatactatgcttaaatatgaaacaatttatcaatctctacttcaaaagatacagtctggaaactttccagcaggggcaaaattaccctcaattagaggcttatcgcaacaatatatttgtagtaaaagtacaatattagctgccttaaaacgattagaagagcaagatattatttattccattccaaagagtggttattacgtcgtggaacatcaggtcttcgaagtaccaacatttactgaaggcattgattttgcaacatcatctccaacgtggcatgcatttccttataaagactttcaacagtgtattaataaagcgattgatacatatcaagaagaattgtttcgttatggaacaccaaaaggtttatctttattaattacagaagctaaaaaactcttagaatcttatcaagtatttgcgaaatctgaacagattttcatcacttcaggggttcagcaggcactcgctttactaagcatgatgccatttccaaataacggatctactattttagttgaacaacctagttaccatttgtatatggatatgttgaaaacatatggaattcgtacaatagggattccacgtacagcgcaaggtattgatttaaagcaattagaaaaaatattcaatgaagaagagattaaatttttttatacaatgccacgcttccataatcctttaggaacgtcatatagcaaaaaagacaaagaagctattttacagttagcttataaatacaatgtgtatattatagaagatgactatttagcagattttgaatataacacaaagaatgatcctctttttgcaaaggatattaaagaacaggttatctatttaaagagcttttcaaaaatcatgtttccaggtttaagaattggtctagccgttcttcctaccactattcttaacacctttcaaaaatttagaacgaccatagatatagatagctctatgatttcacaagctgcactatatctttatataaaaagcggtatgtttaaacataataaattaaaagtaagtagtatttaccataaacgtgccgaagttcttcatcaatcactgcaaaatcatctgactaattacgaatcatcatcagaaatagttatgcacggtcatattttgctacctaaacaagtaaatatgaagtcatttattcattatttacatgaacagcaggtatatctggattcagttgaaagtaattatctagccagctttcacaaagaacgagttttaaagttaaatgtttcaaatgttgaaaatcatcgaattgaagagggggtcaaaaaaattgcaagtgctttaaagaaaagagataactattttctttgatttttgatgtagtttaaatatctaacactgtttaagaagagacttaaaagtattattcttgtaataatgtacatttttcttatgcaccatttgtatttattcctaccggtaatggtgattatgttaactaaagttgtatatcatatacagcgtaaaaacagaaaaaaccaccttctctccaaagtggttttttcttattacacgactttatccaatgacacctattggcatcttgagtaggttgttctaaaaatataagattattcttttttcttagttagttgttctttgtcttgtgttccaggtggttgttcaagccatttatgatggatcataatatcagctccatctttcgcatattgaccgatctcaagtgatagcctttcataattgacaacgagatcacttcgttgacttgcagctgctgcagtcgcgtagttacctgttcctgctgcgctcaaaaagctcatatgaaacatcgctagtcgatcagagaagacaggtgtcgttaagtcactaatcgcaatatcatgtggaaccggtggctgaatatgattatctaggagtgctttgccaaagatctgcacatgtttttccgagatttcagcccctcttaacatccatttttgaattttctcgcgttgagatgtctgagcaaagctaagagctagcttactgccgatgatgttggtttgaatgttcatatataaatgcgatatttcaatggcattcaatggacgctctttactaaaaaatgaaaaaccactgagataacttttgctgtctacagtatcaggttgagtagggtaagcaatataaggagctcgaacaaataacccttttgaaagagcgatatctgaactttcatcatataaattggaggcctctagaagtccttctttaaaatataaccgtatatcttttcgagcactcatcgataaaaatccactaaatgccagcatccccacttttgccatgtgattaacatatgtaagaataaaagtatcggtgtacaaacgaccagcattcttattcacgtcatgttcatttttaaacgctataggcagagggattttttctttttgaaataaagcgcgaagtttttctacatgaacagctgacagatcataagctattcgtacaatcgatttaatttctctatcttcgacacattttaagaaataaccaagtatacatttggacatactatcgttcatatagccagtccacgtacaggctatttcggctgacgtaagctttgtgttatgttcggtcatgagcagtttcctccaattgatattttaggttgtcactatatcatttgcagaaaactgctatttttatgccttgtaagagtacatttaatcagattcaagttacttttcattggtttttcatattgaaccaagtatattttttcacttctatattttccaataaggcacatcatgataactaaaaatctatggagtataaaatctaaaatagaaaaacgtcttggtttttttatgatgacctttataacagttttaaaaaaggaccaagaaaaaataaaactaatgtaaatatagcaaaattactagcactcattctttacttacccgacgactgaagatttataaccctctcaaaattgcgtgtttctttcttttctacgagggaatatctgaagtaatacctatttataaggagttgggaaagcagtatgaaactgaaagctcttgtacttaattgcacgttaaagaaaagttctgaagtctcaaacacaggtgcgttaattgatgaagtggtgaagatatttgagaagaatgaggttcaaaccgaagttataaccatagcagactataagattggacacggaattacagaaaaatcagtaaatgaagaagatgaatggccttctatttttgaaaaagtaaaagaagcagatattgtaataataggatctcctatttggctaggtgagcaaagcagtattactactcaaattatagaaaggctttatggcggaagtagtctaacaaatgataagggtcaatatatttactacaacaaagtaggtggagtggttgtgacgggaaatgaggatggcgccaaaaacgtttcacgttcggtcatctacgcattatctcatataggttttaccattcctcctaatgtggatacctattgggtaggagaagcaggtccgggaccgtcctttattgaagctgaaggatataaaaatgatttcaccatgcaacatgtggaaatgatggcccataatttaatacattttgcaagactattgaaaagtcatccaatttctagtgaagggaacgtagtcaatagttaataaaagaggccccattaacgggtcctcttttatacttttacatacatcctgtaactattgttgtaaaaagactcctttttgtgttagcctgctttggttgcaactactattacacgtccttgatctaattccctttcatattgttgagcttcaatatccgataatcctaaagattcgattttagaacgtaattcatctccacgagatcggaatacattggctactaaatcaaatgcgccttgttctgagataccaacatcattcgtctctaatgcttccgttaaatctttggaacgatttttatcatgagctaataaatatacttcatcctttgtgtatcctcgatttagaaattgttcaattgcctcttttgcttggactccgttttctactactcttacatttttcataaaaaaccctcctttgtagttaaattatatatacccattttcaagaaatgaaaatcatttttttactaactgataaaatgctgtgaattttcccaatccacaattcattattcattttcttccccttaaaacctaaagctgtgtttactaaaactcaagcttatgttttagaaggtgctgtacgggaacgaagtaaaataagacgattattaaataaaggaggatttattatgaacataacagaagtaatgacctcaaatattgaaacgtgtaaccttaaaagttcttgtggtgaggtagctaacatgatgaagaatctagatgtaggggttattcccatttgtgaagataataagctaataggattaataactgatcgtgatttagttgtcaaaggattagctaataattttaatgcgaatacgcagatatctgaaatgataaaaacggacgtgattaccggtacaaaacatacgtctgtagaacaagctatggaaatcatgtctcagtaccaaatacgcagacttcctatcgtagaggatggaaaactcattggaatggtttctttaggagatttagcagtaagtaatgcttcaaatacagaaacagggaaagctattgaggacatttcggtccctgctgaacctactaaataaaaatcaggagatttcatctataaatagtttcttttttagtttttctctatctataatagcgattatgataagcagaagttttaatagttatacctagggaatatgaataatagaaatggaataggaggagatgaaaatggaacgaactgcaaagagagttgtaggggtatacaaatctgagcaagaagccattgcagctgtagaagatctaaaaacacagggatacgctacacgtgacatctccatcattgggcaagatagtagagaggtagatagagtaacagaagaaacagataccgaagttgttgacggaattacaacaggtgcgctaactggtggagcacttggagggctaacaggtttattagcaggagctggtgcacttgccatcccaggaatagggccaattgttgctgcgggaccaattgcagccgtgttaactggagctgtaacgggcgcaggagtaggaggtttagcaggggcacttgttgaaataggtcttcctaaagatgaggcagaatactatggtaactcagtcaaagaaggaaatatcttagtacttgttgatgaaaaagagcagtttggtaaaaatagagagcaaaaaccacctctatctggaagaattctttaaatttgaataaaaaaagtttataaaaagagctctctaatagatgaggggactgaccccatagattgagacgaataaaaaaactactggcatatgtatgtgtcagtagtttttttggttaaatagtacgtagataagagccttgcattttagagtttaaacacttcatgagtagtttgctcaaagtttgcggcaactatgcactcttcacatagcaaatttgtagtatgatcttgcatgaatacttaatgtgttctgcaaaaaaccattatgtaaaccattttagtaaaaggcaaataaagctaactatgttaaggtagctttataatttcatgacgtttttctatgcgcttttcaattttatcaattgtctttttatcctttagtaattcttgtttattctcctttactaactcttcaaatgattt

SEQ ID NO: 96 - DNA, 10367 bp, Priestia aryabhattai
  source 1..10367: mol_type = genomic DNA
gttaaataaagaacaagttcagaacatttttgatgaactatctgaatggatatcagccagtgaaaataacctccattgaccctttatcatggtgaaagaagtggcactaccatgggtatgttcaaggtttacaaattggttataaaagaattagcattttttatctaagccatatctattgcggatcgtacaaggaagacttttctttatagacaatgaaaaaatgacattttactttgggatgttgattatttaaagctaattataatcaaaaaataagggggagaatttaaaatgaagattatttataatcctagagagaaaatgactgattttatcagagacaacaaacagaattttgaggataaactcttatcagaggcagttaacgttgcctctaagattaatgatattttagaaaccggaaatattgatcttttaaaaaatgctcagaagctatctctgtatgtcgtagagcaaaaagaagaacaactcattgctttcgctcagcaagaaggggtagcctgggcggagcacgccttaactcttgccttcaaactagaatgggtacaggccattaggcgaacgttgtggcattttctctaccaatatgatcgaataaataaccaatttagcagccgtgaagaattttatgccttggagaagcgtattaatgataggattgatcaatttcttaacacttttctcattagttattccaagtacaaagatgaattaattgcctcccagagggacttagttgaacatctatcggtgcctattataccacttagccaatctgtagctgtattaccgttgatcggaatggtggacacatatcgtatccaaacgattgaggagaaagtattgataggcatatcagatttaaggattcaaacattagttatagacctttctggaattgccaacatggagatgcatgttattgaccattttcaaaaaatactaactggcatttcaatgatgggatgtaaagctattcttacaggtttacgtgctgacctggtgcggacaatgattcactcaggaatctcttttgaggacaaggcagaagcaaaagggacattacagcaaacattaaaagaatatctagaactccaccagatgtagaaggaatagagaagtttaccctacacacataaatgaaaatgagtttatgaaattagaagcgttgttaaaaaaataaataaagtttattttatcttagcaatggttacttagatagccctagagttataactctagggttgttttgcgatagtaccgataagcaacattagggtaactgaaaatgtatggagtatacagcttaaaaacagaaaaaccactgctcccgcgtacagtagttttctgttacacatatcttatgtttaagtactgatgcttcacgacgtcttaattagttttagtatatttaaaactttattcgggttactctaactttctaagatcttttgccagataaagtgttatcttttacatacatttcatagtgtccatttatgtaactagatacctttaaattaagtaaaagagcttttaggttaactattttttcagtatctacctcgcactcctttgctatatcttcaatcccctttttactgatttgtatgttatcttccaaatcggttactgtttctttactgtactggaaaggaacttcatctataacttctgtaattaattgatcatgctcttcatactctagtctccctttgactgcagcatgttttccaattaatacagcctgctcttttatatccgatagaagaatcattaatctaattcgttgattcattagaatagggtgtttatcaaaaatagagataattttggtttgataatcatccatggttgtgtgaagttgatgttttgcttctcttatcacttcttcgcggtttttaataagtatcatacttaaattctcttccctctccgtatcatgcatactttcattataacaaactataagaagggaacgtcatctttcactacctatcacgataaataatgtatataaacaaatattatcatacattcattaatcattaacattaattgtagggaaatataccgaatcataatttttaaagatttacaccaataataagcgacctcattaatttcaattagaattataaggtcgcttataagatattctgattcaatttttgtgttttttcagttcttttattgcaaagcaattgttttatcattaaactcttgtctcgtttttaacatgtttatcaattgtactgagcacataaataaggtgagaatttagtttgaattgcttctctttaataaagtcagataacattagactggtattattagtcactccaatttatattctatccctttctcatgcatggtgaccttgattattcttttgacccatttttcgtaaaataaagcttacaattaatactaaaataattgatccaataactgcggggatgattgcaaatccacctacgactggtccccaattacctaagataagtccacctaaccaggcaccaagaaaaccagcaataatattaccaataatgcctccaggaacaccacgtcctgtaattaaaccagcgagccagccgataattccaccgacaattagcatccatagtatttccattaggaatcgtctccttattaaaagatatagttgactttacccctaaatgagacgaattaatcgtgggatttttttcttgtttagaggcttttctctcagttaagtagaaaatttcacgcggatttctttaaatagttactaagcgctattcctattcaccatatgaatttcctaaacaaaaatacgccatatatcataaatttatttgcttctatgggtcgtgtaattcgttttatgttaactagagatcactaagatatcagcgctaaatgcatatgagcaatgagctgtcattgtctcctttttatttcattcaagtgataagaagaacctattcttttatataaaaaagagaaaaacaatctaatttagaaattaattgtttttctcgacaaatatatagcttctattatctagatattctttttttacatccatatttaattgctttttttagaaatactatctggttgtataactcgttcttagtaggtagatgtctacacttatcataatccgcaattaaacatttaatctccctatggaataggaaacgttcatagttatcgagcatatcctcccctcctgatgttatttcttttacattaccccttcgacatataatgacacttgatttttgataatagcgattatgttaaataccttttaggttcagttcaggggggagtagttttttctgttacgtaattagaagttagtttttgacacctcagggcatcttggctgtttttattattcattttataattattaaatagaaagaaacagacttgttaggaagtctgcaactgcaacaagaaataaagctatttacatacaacaggtattgtatataatcaagcgaactttagcagtctaccctattgaggagattttatactttattgaccttatgtagactagatttgtatacggtatataccttcaaaaaaaagctacctcttatcagacaaaaagaggcaaccattttctatacagtaaccacaatgttgtgttgacgctttgttgcatcccgagtagtttggcccaggcagtaaaaaatatgtatatacataaaaaattgagtgtattttaaattttatttaaatttatgttttgaaatttacaagaaagggaaaagtaacttaattttaataaggatgaattttgaataagaaaagtgattaatatgttgagtgaactatgataatgaatctggagggaaggtatgtcaattaataaagaagttttatatcttggtaaaagatttaagattattcatatttatagttctggttattgtgagcttagaaaaattaacgatcctttcaaagtagaactagctttattaaatgatatactactaacatgataatggttgccgcatatttttattttactaaccaaactgactcaatttgatttttggtgttaaataaacatattaatcattttttgataaaaacagaaaccaaattcctaatatataaaggatttggtttcttataatgtccattatactaactaaagttgcatagcatatacagcctaaaaatagaaaaacctactgcttatacagtaggtttttctctaaaatcacccaattcaatggaagccttaaggcttcttgagtagtttgtttaaactattattaattattcgttttataatcaaaaaaaagaaacagatcaaaaaaactgtttcttgtaaaattccaatccagattaatatattacccttccgattaagaaataaaacataattattttatatggagagttttcactggagagatatttgaatatcagagtctagtgcttgagcaaggttcgatttaattcttatctttttaaatgaaagaccaagtcgaatggctgtttgggcaacttctggtctaataccagataaggtagacttcactccaagtagaccaagggtatcaattaattgaaatatttgatgcgcaaccatcgtatcaaccattacaacccctgatagatcaatgtaaaggtgggcaatatgtttgtcagcacattgctgtaacgtactttctaagattatttttgctcttgtggtatcaatatctccaaccagtggcaaaagcgcgatatctttttttatggtgatgaccggtgaacttaattcatgaatcatttcttgttgtgcttttaattgaagggaggaggtttcttcagctgctgttataaattttaaaatggtaatgtcaaaaattcgaatcacatgttcttcccatgcgtttatcagcttaggttctatagacccttcatatgtatttgcgaattcttctatggaatcatggtattgcttacgaactcgcataaactctttagtaatagatgaaataggtgttcttacatgttcattatcttttgcaatcttattaatccacacttcaaaggcatcaaaaaagtttttttcgtcttccacaaatacattacagatatatagatgaaattcataattttgttctttcaatgtttgaataacttcgggatcattagaagcataaactccggcagcattttttttatctaatgaatcgtaccattcttcggttagtcgtttagcattacttagtaaaaaggtacgtaactgttcattctgattcaaatctattctcctttcaattcatttatttactataagactaattgatttagcgattagtcttataaaaggataaattaggaaggattgtagagtcaagtattctatatatgcaattagttgtacaagaggatagttaaagtaaaagtgtattaaatgaaagagataaaggatattgaataaaagtcaatgtactacatgcaaataaaaggttttaaaatttacacacaatgtagacaaatagcgaataagggacactttttatatagtgacccttattccgattatagttcaactcattcaggtattttttattaggaaatgaatagttttatcgtaggaatattcaattttcatctagatttggccttttgttattcaaattcatacgcgattttttattgtctactaaatgcttaatttctttgaagcttacaaaacgtttattttgttgatctaaaagtcgaaaacgaagagacttcaagcttgtgcttagtgtaatggttgttgctttctgtaatggtggcgtagactcatgcgccttttctaaattatagtttggaactcttggagccaaatgatgtacatgatggaaaccgatattacctgttacccattgtaaaactttagggagcttgtaataggagctaccatcaacggcagctttcacgtaatcccactctttttcgttttcaaagtaggaatcctcgaattgatgctgtacgtaaaatagccaaattccaagtgatcctgctacaaaaaggatgggagcttgaacgagcagaaaagcttgccaaccaataccccaacataaaagtgcatacactgcaacaattgagaaattggttaaatatgtgttcaaacgttcctttcgtttcgcgtcttttcgattcaatcggttagaaatgaagaaaagatagattggacctaatccaaacataacaattggattgcggtaaactcggtaagctaaccggccccagtaggaagctgcaacatattcatcaactgtcatgacccacacatcaccagttcctcgtttatctaagttgctgctcgtggcatgatgaatggaatgacttcgtttccattgttcatacggaaacatggtgataaccccactaattgtgccaaggatattattcgcttttcgacttttgaaaaatgattgatggcaacaatcatggaaaataatgaagattcggacgacgaacccagctgtaacaatagataatggtagtgttagccaataagaaaccgataaactttgataagctagaaaccaaagtagcaaaaacggaaggaatgtgtttatcaattgctttatactcgatttcgtattggatttttcaaaaggtgctacattttttcttaattcagtcgttttttgtttactcatgtgttcctccttacatctttaccgtgtttaatattcagctcttctttattaatttatagtagagcatagcacctggtaatgaaagatataaacgtcaagtaactagtatgacagctgtcatacatgtgtggatgtattttcttaatgaaaggaaaagggtgtgaagaaaaattcatttttattaaagtattagcattattttagttacagctatttaaaagtgctcataaatgtgtacctttccaacagactttgagtcactactttttaaatataatgcgaacaaaaaactacctctactatgatgactaggattgaaggtagttttttcagagctatgaatgttcaactgtcgttcattttgctataaaaactctttaacaatttcatcatgttacgcccagaagttcttgacattttatgattatcttcatcatcaagcgtactcaggtaccagcttcccttgtcatcttcatttaatctatataccttattggttctactatctgtataaaagtctccatccttcagtctcaaacgatcccccctctaccacatatatacccggtattatacccaagatatcaattttataaaaatttcatctacacaaaaacagctaggtctcctaataagcttattatgctacatatgcacaaaaatggtgaaaaccaaatgaatttatttactactagtagattttaaattagtccttttacaatacaattctttacattttgaaaattcatctactttcctgtatttgctatattgggttttatatgttacgattaagttaattatttttgttcggtgtaggattaagagaagagaaatctcttccatagaaattttcatcttaagatagtatggttggacaagggtagtaatacaagtgtggaatattccacaccaggaggcaatattatggaacaaggtacagtgaaatggtttaatgcagacaaagggttcggttttatcgaaattgaaggcagagacgatgtattcgtacattttagctctattcagggtgacggctttaaatcattagacgaaggtcaaaaagtaacgtttgatatcgaacaagggcaacgtggagcacaagctgctaacgttcataaagtagcataatcaaaatgagtaaaaaagactccacctgggagtctttttttacttttaattccactagctagaaaaaccagacttaaaagtctggttttttagacaaaacgaccggtacaagtgtagactagttaaaacacacactggaaatataaagcaaataaggtataccaatttgttaagaagtttaattgtagttaaaaaaatcagaagtttttggtaatttacacaaaaatgtgggtatgaattatttttaatggggattaggagacgcatctaaaaaccgttctcgagctctcattttatggccacacaaaggacacttttgataatttaataagagaaattttttctcatccgaccattacactcttctgattgacattcccaaatttctgttcgttctttaggtaagggctcttgatttttcttcctatggttataatacttaactacatcatccctcctcctaaatagtataccttttaaaaaagaaatattaggaaccatatctttctaaattaaaccgcactttatagatcctataagaatttataaatacacggaagcgtggataaaatagggcatgaattcgtcttgtacagatacgttagaacaagacttccattgataataacactgatttacaatacgcaggaatgaaaaagcgacatctctttttgaagagtactttgctcgtttctgaatttaagtaagagaaggagcacgaaacagttgaaaaatttttctgattttcacttaagtaaggacattgaaaaggccattcataccttgggttttgaagaggctacgccgattcaggctgaagctattccgatagctatgacgggtaaagatttaattggacaagctcaaacagggactggaaagacaacagcttttggtataccccttatagagcgagttgagcttggtgaagaagagattcaagggatcgttctagcaccgacacgtgaattggctattcaagtagctgaggagttaaatcgaattggacaggtaaaaggagttcaaacgctacccatttatgggggacaggatattaatcctcaaattaaggcgcttaagaaaagaccgcatattatctcggcaactccaggacgtcttatggatcatatgaagcgaagaaccattcgtttaaatcatattcgtacagctgttctagatgaagcagatgagatgttaaacatgggctttattgaagatatccaaatgattcttggtggcatctcttctcctcatcaaaccttactattttcagcaaccatgtcgaagcaagtacaaagtttagcacagaaattcatgaacgctcctgaactcgtgaaagtaaaagcgaaggagttaacagtaaagaatattgaacaacagtatgtagaaattccggaaaatcgaaagtttgatgttctttgcaatcttgtagatcttcaagcaccagacctgacgattgtgtttggccgcacaaaaaaacgtgtggatgaacttgccgaagggttgaaaaaacgtgggtatgcagcagaaggtattcatggaaatcttacgcaatcaaaacgtgccgatgtgattcgtcaatttaaggagcatacgattgagattatggtcgcaaccgacgttgcagcaagaggccttgatattacaggtgttagtcatgtgtataattttgatattcctcaagatcctgaaagctatgttcatcgtattggtcgaacagggcgggcaggtaataagggattggcggttacatttataaccccgagagaacgccatcacttaaaagtaattgaagctgtcacgaaaaccagaatgtctagacaatcacctcccacttctagtgaagtaatagcaggaaatcaggaagcaatcattcaccgcgttttgaacgccatcgacaagagagagttcgcggaatataaacctatggcggaaaagttattagaagaagtggattctgttaccttattgtcagctactttaaagctcttaacaaaagaatccaatatggctcctgtccaattagctgaagtggcaccacttcgtaataaaaaggcaaaaacggagcgtaagggaagtagaggcagaaaagaaacagtatggcgtgaaaaaccctatagaaaataatcccttactggtttatgactatgtactttattagtaggtgttgaggtttatcgcaccgtaaggtgtcaaactacaattatcccttcgtgaaccaactctcgaagaaaggttgcttactttttaaacacatatactagaatgaagaaaacctacacgaattgatgtaagtctttctcagctccattataagaattacacggcaactttaattgttaatccttatggttgtggagaactaaaaaaatatcaggcaaaagaactgggtaaaaataaaaaatcttaggagatttaaattatgtcttaagataaatgaaagtgaaatttttattatttttgatacgagagaagatgaggaccgtgagcgtgaaaatatttactaatggagaaatagtaaatataagagtatctaacgaattagtg

SEQ ID NO: 97 - DNA, 10360 bp, Priestia aryabhattai
  source 1..10360: mol_type = genomic DNA
gggtgttataatgatgaaaactgaagtgtgtgaagggcggagagatgcttaacttatttattggctgtattttactagcattaggggtgtactttatgtttaaatttcttttttactctccttctaaaaagaagcgagatcagcaaaacataaacaaaccatcagatgaggcttcagcttcctcccgtacaaatgattcgaatggaataagataaatttttttataaaataccggcgtttgtctaaggcaaaagttatactgctgatatatattatcttatacccttctagttcaatattcccttcattttggtgtaagacaagatgaagggaatcactatccgacttaaaaaatcggatttttctatttagtaaggtaaatagcttcaataaactctgtttgaattcttttctttattcaagtgtacagctgcctcttccacacttactgttcctatatttttcttcccgtgctttcgcatagcaagcgattcattttccacttctttatctcctatcacggccatataaggaactttcagcatttctgcttctcgaattttcagccctattttttcaatgcgatcgtctacttcaacacgatacccttttaactccagctcgtgtttcactttatatgcatattccacatgcggcggtgcaataggcaatagtttgagttgaacaggagccagccaaagaggaaattgaccttcgtaatgttcaatcaagatggccataaatcgttcaacggaaccgtatatagcgcggtgaatcattacgggacgatgaggtttattgtcttctccaatatacatacagtcaaacttctctggcattaagaaatcaagctgaactgttccgcactgccagctgcgacctaaggaatctaaaatatgaaaatcgattttcggcccataaaaagctccgtctccttcattcacctgatagtctaagcctttttcacttaacacagattgaagcgacttttctgcttggttccatgtttcaatatctcccatgaatttttcaggtcgtgtggatagctccactttgtaatcgaagccaaaatgtgagtaaaagtcatggataaacgctaaaatgcggctaatctcagcttcgatctgactaagttctacgaataaatgagcgtcgtcctgtgtgaatgaacggactcttagcaatccgtttaaagacccagaaagctcgtgacgatgaactaatccaagctctgcgtatcgaatcggaagttctcggtagctccttcgcttgctgttaaacaataaaatggctcccggacaattcatcggtttaatcgcatagttttgtttgtcaacatttgaaaaatacatattctcatgatagtgttcccagtgccctgattgttcccagagttcctgtttcatcatgatgggtgtttttatttcttgatagcctgctttataatgcttttgtttccagtagttctctaactcgtttcgaataatcattccgttaggtaagaaaaatggcataccaggagcttcttccattgacataaacagctccagttcttgacctaatttttgatgatttcgcttttctgcttccaattgttttgacatgttcattcctccaatatgtttttattcaacaaaaaaaccgcactcatccctagtaaagggacgaatgcggccgtggtaccaccctaattccgtaaaatacccatacgtattttacgcttaaaaagataacggttttaccggttgcggtttcagtgtatacacattccccgccgcagctccaaggtggtaaattcatttcgttttctaagggttctcagccagtgaccctactctctgtaaagaaaattcaaaaatgattcatgtccttttcattgcttgtatatttttttctacataaaaaaccgcactcatccctagtgaagggacgaatgcggccgtggtaccaccctaattccgtaaaatacctatacgtatttcacgctcaaaaaagataacggttttaccgattgcagtttcagttatgcacgttccctgcaatagctctaaggtggtaaattagatgatttcttaagggctctcagccagtgaccctattctctgcgaagaaaacagcatctaattcgtgtccttttcattgccaaatactgtttattagttgttaaaagcgattatagtgtataaatttaacagaagtcaagaagtaattttttattttttaatggtatagaattactttatgcttgaattattgaaaagttacttaagaatacacagacttaaaaagttttttattatactattaacgactacattccattcttatttttacctttttttcacagcaataaagcgcaaaagaaagataccataagtccttatttgttctatctaagcggtattaacgaagttaaacccaatactatcccaaatcagaacaagtaacatggcagaagcattatcaggttttttatttatatactaaaatattaaatacatctttttctgctcacccaaatagttgacttcaatccgcagaaactattttttatctatctttagagggaagctcatcatgcatgcttccactttgcggaaaaatccgttttttcctgatttgttctttaagaataacatcaggctgccgctgaactttccttgtttcatttgtcgaaaaatacgggtgagccagatttactgtttctaacggatccttggtcaaattgtacatttcaatttgatcgggaacacgtgttgttttaagggtagtaaaacttacagggtaaccttcatattgctctcggtgaatgaattcatctttttcgtcagctgctgaccaaaattgcggattatcatgatagcgagcgtatttccaaatttcctttcctgccgctgacgaaaactcaacaatgaccgcttgaatgtgattaggctgaataactgacgggtagctttctcctaaaaaaatttgtttggtgaagtccttttgtcgggtcatcatccgtcatgaagaaaatcggtgtttgctcttgctcaagagacgattcacctcgaagtatacctgacaggtctcgcccaacaaatggatgtacttccgtatgacttttttgtaattgcttttgaacagcggaagcatcgatattagctaaactaagcatggtcgggatcaagtcaacgtgactagtcatcaggtctgtacgttgataattgggaaataaacatttgttgtgaatgagaagcggaacgtgaatagattcttcatacatgttgtaccatttttgatgtagtcccccgtgagctccaagcaaatcaccatgatcagacgtaaaaataataattgtattttcatagaacgaagattgttccatggtccgaagaacttttaaaatttgtttatcaacatttttttgaagctgataatacaagcgccgatagaagctagaatttggcgttggctgcagcgattttggatagatgtatttatagctgctttgagcgctaggctttgtttgcaaagattctctaatggtaggtggcggatcgatgtttggaatcgtctcatcaatagaaaactgaaacataggaagctgtttggtaatcgctccaaacagcgcaatgtcatgcgggttcacaaacgaagctaccatgagccaaggctgcgcagtcgcttgatgttctaatcgttgaataagctctatgatttcctctgcatatatttcgtctcgtccacgataatcaacaaaaaattaggctgcttctgcatgtttactcctccgcgtgtttatcaaattttctgtattgataaactatgtaaaaagcactttttttagaagaacggagtacgattcatgtctttttatgcccaaacaaaaaagacttggaggatttatctaagtctttcatagctcatttcaatacgatattccttattttttgtatgcttttagctgctgatttggtttataggtgccaacgatactaggtatacctacaattatgcttatcataaaactccacatcatatagcgccaatcccctgtaaaaagcgctactcccataaaaaaaacgagctgaccagcaagagctaaccatgaagctatccaagcaaacatcatattctctttcacgttatcacctcatatttttaattatgaatgacttcttatattttactatgaagttctaattttaaaggttgttctactgtttattttatgtacataactaaaaaagctaatagcagcgcgcagctagccattagctttttcatcattttgcaaatacatgatgtcctattttaattgtttcttgtttttggcgcagccattgatctcccgttttatcaggattaaagaagaataatgaaccttttccttgaccttggaagttaattgcttcttctacagctttttttgaatctgtgtctgcaggtttattaatttgaccgttgctgaccggactatactgacctttttgataaataacgccttttacagtgtccgggaatttgctgctgtcgactctatttaatacaactgtcgccacggctactttgcctgcataaggctctcctttggcttcagctgatacaagacgagctaataattctttatcatttttatttacttgaatgtgctgttcatgggcgggcgctgcagcaaatgctgagtaacctgcaccaaaacttgggataagcattgctatagcaatcactagtttctttttcataaaaataaaaagcctccttgctatttcttgacgtggttcatatgctagcagaaatataggagtctttcattacaaaaaattatccagttccaaaagaaattggatgttattgtcttcttcaaacaatctttagcttataaaactgggccttttatgattacgtattagttgcacttctaaatcttaaacaaattatcttttttctgtttgaaatataaagtttgaactgtatatttccttaactactgaagaaagaatatcaattcctttctttaactcctcatctgcagcagtaagacttatgcgaatgcactcccggttgtgagaagaagattggctgccgtgaaagaatgatccgcctggcactacaatcaagttttctgcttttaatttattgtatagatcactatcactgaaaggcaaaccttctaaccaaagccaaccaaataacgaaccttccgctttgtgcaaataccaaggaatatcatccggcatacgtgtagttaaaaggttttttaaatagtcatgtttttgtttataatgagttcttatatagttagctgaaatttcggctaactgcccgctctttaaggtgttaaccaccatccgctgacctaacctagaagagtgaatcaaaatatttgattgaaatgcttccattacttttatgaagtcaccttttcctatagcaattcctattctctctccaggcaatccggctttagaaagactcatgcagtgaacgatattatcatgtatgatgggatccatttcaataaaattaatagcaggaaaaggcggtgcgtaagctgaatcaattagcaatggaatgtgatagtccttgcatacttgggatataagctgtacggcttcttcggaaagaatgttgccgcttgggttattaggccttgataatacaacagctccgacgtctgggtcctgagctattttatctttaaatgcttgtttgttaaattcataacgaaacgtatgatgatcaagctttgagaggataggaggaattccttctattacaccttcctcaagcgcgactccactatacccagcgtaatctggcagcataggtattaatgctttttttacttttccttctttacttgtaccgcaaaacgaatttaaagctaaaaaaaagagattttgacttcccgaagtgatcaagacttgttctctgtccagtttaatacgataattcgtaaagaagtagtctcttatgcaatcaattaattcatgcgtaccgtaactagaaccatattggctaatcaaattttttaattgtttgtcgttcacaatatctcttaaagcttcttcccacatttcataaacttgagggaggatggcggggttgccagcacttaaattcacatattgattaagattggaattgagcacttcttggatgtcatgcataatagcgcgaacgcctactttattagtcattttgtttcctattttacttaaatgcaaagcagtcactagtgcaccgtctccttaaagattatgatcatcgaatagtaagtatggaacttcaatcttcttattttgctgattaataaagtaattgtccgggataataaatttatcaccgttctcactaggtaataagtattttcgaacataatgttcagcttcttctttatagtcaaggtcactttgaatcgtttcaagttcttcaatttcttttactaaaagatccagttcttttaagcatatgtctaaatctaaataagcatggtctccttttcgggatagtgaacgcccatttgcaactaaccagctaaaaagaaaaaatcctgttccagaatcaaagtttcggggtgcattatgctgactagggtatcttaaaaggcgttcaaagagaacaaattccgttatttcttcccaaaaaggatattttcttttatgaagagtcagcaccgtctggcaatctactttaacttcttctagtatgcctgcaaaaaaattcattttcgcctgtatatgttggtcaaaaggtttatttccgcagtgatggtaataatcatgcagatatccccagatcacccttgcctgataggtgtcttctctattcatagcgcgagatttaaggttaaaatcaggaaagatagaatacgctctttttaatgtatcctcattgtatatgctgtgaaatttattaaagaaaaatatcgcgaagttttgacttgttaccttttcttttgtttttacattctcagggaaaaatacaatacacttcccttccataaatccttgagtaccagccaacagctttaaagattcacatccgtttttaggatgaggaaggtcggcttcaatggatttcatgatttcaggttcatcgcgaacggcgataaaggcttctaaataaaaccctctttttgtagggccattaggcgttacaatcggtcctaaaaagaacgtcgcctccccgtttgcaggcgggctataagcaattaacgtttgatcaaaataaggagcttgatcgagtcctctttcaatccaatcacatacgtcattttttaatgcattccacacttctggtaaatttaaagagttatatattgtttcagtttcagcaactacttttaataagagctctctagctttttcgtaatttcttttgacctctccatttgagccctgatattttcttatctcatatagagcaggtactattttatcgtttaataactccactaaactttgagtatgattttttgttaacatgattaaaaccctccttttttagaacagctacttagcagaaatatttttagatgatttaagagtagagttatttgtgtttttctctatttgctttttcaagttaataaatataacccctgctattacaaatgctgtacctatatagacctgtttgtttaatgtttcacctaaaaagacaaatcctacatataaggcgataaccggtgaaataaataaatgcgccgttgcttttgatatatgccatttttttaataaataaatattaatagaaaaccccaagaccgaccctataatggccaagtataataatgagataagactaatcccagagaaagtacggtttccattttctacaaataaactaacaatcagtaaacaagcgcccccactgagcatcgaaaaagaattaaaggtcataataggcaaggattttatgcgagattgaacttgaacagttataaaagcagaacctagcatagccattaaaatgacaatcattgctactatttgaataacatttccctgtataaacagctgatttccaaatacaacgctcataccaattaagcacatgactacacctatcttttgtccttttgtagctggtgttcctttaaataagcgattaaataaaagagcaaacactgaaatgctggcagctaaaacggaaacaagcccgcttggcaaatagacggatgcccaataaacagaaccaaacggtagagcaaagtacaaaattccgtttaatgctgaaatgattactacttcttttgaaacggccattttttttgtgaataagaggtagagggcaattattaaactagcaattaaaaacctcatacctgctgaccatagaggcaagctatcttttaatccagtcttttgaaaagcccatgtcgttcccccgatgacggctaatagacaaaacaaaagatgtacatgaatacgggttaatttagaaatcactgtttcaccttatttcttttttaaagttaagcctattttcttccgtggagcgtaaaacacatcggcacttctccaaaatcttttacaactgttaacccctgctcgttagcagctttactcgttgtaatacatgcgtctacctttccttctaagcaatcaatcgccgcttgagcattactatttactaactgaacattaggactgatggaatgagctaaatcaacaggggcaggatgtgaagcaattaacaggttattgtttgttatcacctcttcttttgaggcaagcaccatgttatacgttggcataataaagctatctactagctctaaactagttaaatttttgaacacaatatcatgtaagtaaggatataccgcgcagcctagaagagcagaactctttgtttctttcacatgaactaaagcttcttccaacgtttgatgcaaaaagacctgaccttgtatgctttggcgttcgaaccacaaatagcctgctttttcacaatttgttcctccaggccctaaggtatggataatgctaattttttgaagctggttatttttcttactcgacgactctgcaactatcatagcctttgataccccctatgcgtttactttatttttataaacgatttttactttgttatctaaatagctgtaataccgctcacagtcggaataagagtcatgagtggttaaaataaatccagggtaacctgaaaagtgcggatatggtaaaatgtctgtccctttagttataaattgaataaccctttttacttcagtatctctacgcacgtcttctaagcctcgaatttctttaaaaatcccctggccttgcacagggataatgtagttacccaccactttctttcgttttctttcattttttaatacaggaggttttaaacctaatacatagtaaaaaactagctccatatagttaatacctgtactttcctttacgatataatgagaaattccagatcctccaatgcgcgctcctatttcaattacataaggttttcccgctggatccaggcgtaattcaatatgagccgggccatcctcaattcctaaagcatttgctgctctagctgcttcttgtgcaatagattgccaaacgttttcttctagctgagctggagctatataaacaccttcttcaaagaaaggtcctttggaatttcctttataacctatagaaagtacataaacttctccttctacagaaaacgtctcaatagcaaactctggtccgtctataaattgctcaattaccatgcccgttttattttttgtgaatttacttagatcttcttcatttacgcgtctcactttttctatgctgtcaatcagttcctttttattattcgctcgtgatacaccttgactggaaaatccgttagaaggttttactacaacaggataaggcagtgaaagattctttaattcctccgtattttcaacctctttaaaatacggagtgttaagatcattatcttttaaaacctctctcatcttctgtttgttacgacagttactaatcacaaacggtgataagcccggtaagtttaattcttctgtcagctgagatacaaactctaacgcaggttcatataatgtcataatgccgttaaaaggatttttctgatgctctgctttaataatctcaagagctttgtctgggctgtgaaataaatcaatgggtatgaaattttgtacgcttttaagatgcttaggttctacctcttcttggttataaaaaaacgtcactttaattccgagagcttctgcttcttcaaaaataaacggtagatatgtattttgtaacacaactgctagatgcttattttgtaacggcatttacttcccccctacttttaaacagctcttcactgttcgatgactaaa

SEQ ID NO: 98 - DNA, 8926 bp, Priestia aryabhattai
  source 1..8926: mol_type = genomic DNA
gataagagacacaaaattactcttttaaagtcattgaaagggggaggtaaattactttatacctattatcaatacagttgcttaagtcacttattaaataatacttaggaaatttggaggaaccatgaacatggatattttaaaaaaatgttttgattgggattatgtaaagcaattaagaaacaatgacacctatccatatttcaaatctcttgaagaaaaacttggaacagagacaatggttagttctacaaaaatgattatgattggttctaatgactatttaggactgtcaaatgacttgcgtttaattgaatcggctgcatatgctacagagaaatatgggacatcttcttctggttcccgatttctaaatggatctttaatattacatcaggaactagaagaaaggttagccacatttttaaatagagaaaaagcaattgtattttccactggttttcaaacaaatctaggagctatttcttctttaattggccgaaatgatttcgccataattgatagagatgtccatgcttctatcgttgatggtatacgtttaggctttggtaaaatgaagagattcagacacaatgacatgttagacctagaagaaaagctaaattctataccaagtaatgctggtaaattaattattgttgatggcgtttttagcatggaaggtgatttagcaaatcttaaggaaatcgttaggttaaaaaagaaatataatgcccggctattagtagatgatgctcatggcgtaggagtactaggtgaaaatgggcgcggcacatgtgaatatcttggtgtagaaaatgaagtcgatattatcaccggtacattcagtaaatcctttggtagtttaggagggtttgtagcaggtgataaagatgttgtagattttattcaacacaaagccagaagtatgatttttagtgctagtatgacccctgcgagtgtagcagctacattaactgcattagacatcatagaaacagagcctcaaagaagagcgagattgtggtctaatactaataaattcacgactcaccttcgacaattaggctttaatactggattaaccgaaacaccaattattccaataatgattggcaatacttttcaaacttttttattttggcaagagcttagtgctcaaggtgtttacactaatcctattatttcacctgctgtatcagagggaagtgagttaataagtacttctttaatggctactcatacagaagagcaacttcacaatgttttagaaatttttgagttagtaggtaacaaattggaaatgatacaaactatgaatgaaaatgttctaatgaaatcataaatattaactttttagcccttatttaaaaagtattctcctgcaagtatctctatatattaaagggatacttgcagtgatttatttagtttgttgttctagagtggatttactagtagaagcttctttttccccagtcatatttaatgtaactacaccgatgataattaaagctatagcaacaagctttagagggcttacactttcattaaagtacataaatccaattagagtaataacgataatacccatacctgaccaaatagcgtaagcgattgaaacttctaaactttttaaagttagcgtcaaaaagcatagactacaaatgtaaaaaatgataagcagtacacttggtacgactttcgtaaaaccgtctgataatttcatggttgtagtaccagcaacttcgaaaagaattgctaaacacagataaatccaatgcaatttccttcgcccccttatttttttatagaaatgccattcaaaagaatatctataacagagcttaatatttcactcattgttaatttattttttagaggaaagcttgggtgataaatttgatttattgctcccaaatataactctataaacaattgtaaattgaccttacgtataacgcctttttccattccttcttccataagttttactactagagcccactcttgttttaaaaattcatctagcctaacccattgattatagtgaagcctttttaaatctactaataagcgaatatccatcacattaaattcttctgggacacatacaaggacttgagtaattttttcaagtaaatcgatactttcgttatgagcaatttcttcttcttttttcttgatctgtattataagattttcaattactgattcgattatggcgtctttagagtcaaagcattgataaattgttcttttgctagttcctaaattcttagctaaatcgctaatagtaaatgcaaaaccttttcgttgtattaaataaattgcttctttagtaattcgttcgttcatgaatatcctccgtttggtaccaaagataatttagtggtaccgaatgtattatacaatataaaaaaccaaaaataaacattaaatgttaaaaataaacataaataaagtagttttctaaactttgaagaagtttatgaggaaaaagaagattgataacatttgttttacttacataaccttagcaataatcggaaaaaggaatgatattccattgaataaagaacgtttgttcgcatataataaagaacaaacgttctttattgaggagttattccaatggattatgggcagctatcaaacagagttattatttgcatagacatgaagagtttttttgcttcggtttcctctgtcatacgggggttaaatcctttgaaaacaagacttgcggttgtaggagatgtcaaacggtcgggatctgttgtgttagctgccacacctttattaaagaaagaagggattaaaacaggaagtcgcctctttgaaattcctaaaaggaaagatatccatgtggtgaatccatccatggagagatacatcaaggcttcgaactatatttctagtttggtgttacagtatgtggctcctgaagactttcatgcatatagcattgatgagttgtttattgatgcgacagcttctttgcatttatttgcccgaacaccagaggagctagctcatcgaatacgtaatgagatctatcgtaaaacaagactgacagctaccgcaggaatcggtccgaatctcttactggcgaaggttagcttagatcatgaggccaagaatagcccaacaggagttgcgtattggcgatatgaggatattccctttaagttatggtcgattcatccaatgaaggatttctgggggatctcgtcagctacagaaagacgcttaaaccgtttaggcatctataccctaaaagaacttgctctttcttcgaaagagatgttacaaaaagaatttggcatcatgggacaagaacttcaccaacatgccaacggcattgattttagtcgtatttcggatgtgtacattcctagttcccgttcctttgggaaaagtcagattctttttcgagattatacaagccgaaaagaagtggaattattgctattggagctattggacgatgtttgttttcgtttacgcatgcatcaagtggtggctcaaacgattcatttatccattggctacagcaaacaaacaggtggaggcttctctagacaaaagaaaatggggcgagcttcgaacttaagccaagatattttcccttattgtttaaccattttacataatttcgataatggaatgccgattcgctccattgggatttccttatccaacacaagcattgaagaagaggagcaaatgagcttatttgaggatatcgatcagcgtgaaagagcctatgctctcgccaaaacgatagatgaaattcggctgcgttatgggaagaatagtgttttacgggcttcaagttatctggatcattcaacagctcgttatcgaaacggccttataggaggacataaagcttagtatacaaaggaggaagatatcatgcagcacgatagaggaatgaaaaaatggagagctttcgcaagcatgccgggattgtggcatgaagaaaagtatttaggcggtatttagactataaatgaaggcaggacttgaatggcagttgttattatttgttgtatgattttagtaggacttatctttatctatggaggatggaagcgtccatatgatgaaattagttcggctcctgatatatggatattagaaatcctctttgttattattgaaaaactatttaaggtttcagctgagaaacttatgcgagtctcatttatggtttttgggactgcctggtccgtgctattccttataatattgattacacacgcatattagaataaaaaagaagttaccaaggggtggcttcttttttatgtttggagtggataggaaagcttactgcagtagctacatagtatctaaagaattctgactccattatacctagcttcttcattgcactttgcaaagatcgctattcctcacttctaatttctctctttgattcatttctgagagtgaatactctaaaacaatcttttatgtagtcacatcttcttgcaaatacgaaaagagcaaccatcatatactggctgctctctcctagcaaaaatgcactcacacaaatgtgaatgcgaatgtgaacgtatccatattatactacttcattaataaaaaaagacataatttctatttacctttatacataattaatcgttcttttgctaaattaattaattcctttaactcttcaacagattgcttgttattacaatcacttaataaatctattgtatcttgcagaaattgttctcttctttttacccttttatattcagccctatattcttctgccatccttgctgttcgcgtagaaccctcccgaggagtcggaactttttcaaaatttaaggtacgaggctttgtctctttttcatcaaacgtagcgttgcctggattcctattcctcaatcctgattgacccaaaatactccttgcagctcgttctcttccaatggccattatcatttcccctctctgcaattgatatttgaaataaaccgtcctgtatagattcaataacattaaaataaacccttctttaaagattgagttatagttaaataaaaagacagattctttgaagacctgcctgtctaattaattatttcatatagttgttaactaaaaagtagcaatgttctctagtcatttcgtgtaagattccctgaggaatttgtttatttttatcgataaggttgagtaatagacacttgagtttaaatgaggaggctaatcattcaaaaattacggtttaggctcaatgtaagaaggaaactgggtagggtggttcattcctgttacgattaaaagataggcaaatacaaaaaatattgtaattatccctattattacaacgaaacgaagaagcttcttgatttttctatgcctgcggacttcataaaaattaataacattattcatatgaattctcctcacttataactcataaggtagttttatctcccaatatgccattatttactcttgattatacttataattttaaattgtctgttatttatagtgttatcaacatggtacaccatattaataattagattgtgttacattggatttaataaaaaggttgtaaataatggcaaaagtaagtatattacacgtataaatatatagattataaagagaacactatatgtaaactctataaagtcaagtaaatagtaaaatacttctgctactgataattgaacttacgtcaactcgaaagaaaaagcttgtatctaagaagatacaagctttttcctatgctgtttagaaatttgtttgcccttgtgaggccctttcgttacgtatatcggttcataactaaagtgccttgtgtaagatacgaatatctactttcaatttgaggtaatacgtttgttgaagtcgctgttaatcctttcaaaactaatcagtcccttcataaattaagtatttaccttctcacaacaatcaataatattggtgttgtactatatgtgtaccacataccttaaagttaaaacattgattgtacaaattcttatgtattttttcttcttatatgtatatccaacattaggaggactagataagctacagaggtaaccctttttgtacttgatttaatgattatatagagttcatcacagcaggcagttctctattaagaaaactgcctgctgtaatcttttttaaaaactcttaataacaaataaccagatataaatatataagcacgactgtaatgaaacagaattttgatacaactaaagaatttcaaaaaagttctttataaaaacacttttaaattttaacctttgatctttacgtagaaaaatatgttttactctcggtttgtctttttccttaaatgttttacggtcttggtatttaaacaatttattacctatccactaactctttcttttaaataacctagaaatccattttggactttgactatatggtcacctatccaaatactattgactctaaagtaataccaacttcgggactcacctaaaaattctctaacgctataaccttctttaattaaatgagcttgaatttcttctttccaatcattaaacatcttcttccctcctatttaagattgtaaagactttccttttactaatccccatcttattcaaggggaaaccaatcattctcattattcatatatgccagtatgatttatgccatataagctttaaagcgattccaactacgctgaattgagcaccttcaaaagatctgtagaggataacatgccccttgaaatgtataggcaattactatgaaaaacggagcagtccgtaagtagataaggcagtgaagaacgacgaagggtaagctctgactacagtgagcttatcctttatatccatacatataattttattcacaaaaacaaactttggtggctgcatcagaacatgtgtgtatgacggatagagtataagacaggttttaaaaatgatagacgtggattagattacattacagcttcgtacaaaatagactattattagtcttcataatcgcttctaaaaagtaattcttttggaacctaattatttctctttaatcgattagttattaattatggagtgatatcaattgaagatatgtgaaaaatatttaataggaaataggagcgtaatcatgcatattatatattattctatgtctcaactcatctattaactttgcataaaaagggggcaaaagggaatactgtttgcaaaagagaaaaaataaaggggttgacgttttatggaaaataatttacttaacggaatggatcgagttgatccaaatttacgtgatgaaatgttggctgaattgtttttaaatcaagttatgaatgacttcaaaagaaataaaattctagagaaagttgatcattccttaaagaataaagataaagaagcttttttacgtttaacagaggaacttaaatctgtatcttaataaaaacaatataatatagaagaaactcatgaaaaagaagccttgttgtataaagactaaggcttctttttcctttacatttcaatatatctctttataaggaattaaaatcctagaagttctgatgaatatgttctttctctaaagatacaccctcttaactacgagaagcttttattcctttatcataatagtctttttttatgttatcaggaaccatacttccacctgtgccccatacaatgtgcgtacctttatttattttttcagtaaggttgtgattatttaaataatccattccttgctgatgtaatttaacaggtcctatcatccctgcaagtgctgaaggttccaattgagcattctcagtgtcaacaatttgttttaataacttgtataaatgctcatcactaaccgtgtaacttccacttaaaaaaggttctatgactttgccaacaaaacgagaggctttacctactgctagaccatctgcatctgttttattatcaattccaatctcttgtacagaaatttgatcgtggaggccagtcattaagcctagtaccatacaaggagaatgagtaggctctgcaaagaaacaatgaacatgatcttggaacattaattttagaccaaaggccactcctccaggacccccacctacaccacagggtaagtaaacaaataaaggatgatcctcatctacactgatatttaattctgttagttgtttacttagtcgagaagctgctaccgaatatcctaaaaataaatcgtgtgagttttcgtcgtctacaaaatggcatgaaggatcagcagctgcttgctttcttccttcttctacagctttactgtaatcggcctcatactcaataacattaacatttttacttctaagtaaatcttttttccactgttttgcatctgcagacatatgaacagtcacctgaaaacccaattttgcactcataatacctatactaagtcctaagttcccagtagatcctacaacaattgaatatttggagaaaaactgtcgaaagctatgactgtctaatattgcataatcgtcatcaaggcttaacaaatcatgctcaattgctaatttttctgcatactttagaacttcataaatacctcctcttgctttaattgaacctgatatcggaaggtgactatcacatttcaaaagaagttgtccttgtattgtttgcttgtaatcctgttctagttgttttttcatatttgggattcttatcaaaggagattcgatgatcccatttgattccttagtttcaggaaaaacagtggcaatatagggagcaaaacgctttaacctttcttctgcccttcttacatcctcttttgttactgggctctttataattccagactgaaagtcttcaagattagggtttgtccaaaatagttcttctaaagaaataagctgatttagcaa

SEQ ID NO: 99 - DNA, 8730 bp, Priestia aryabhattai
  source 1..8730: mol_type = genomic DNA
ggaaattagtatttttgcgaagtttttttgtattggaaatctttatagtaacttgaaaaggaaagctaaattatatttttttgagattttaatagatattttaaaaatcataaaaaaactatattcattcaaaacatattttaaattatctccaaccgatctgctcatttaaatttttagtttaaaggagaaccctgcttataacataaaaataattaaatcatactattaggaagagggttatacatgcatagtaaaaaaacagaagtatccaatgagcttcaaagaaatatgaaaagcagacatttatttatgatttcaattggtggagtaattggaacaggcctttttttaaattcgggtcatattatcaatgaagctggtcctggtggggctatattagcttacctcgttgtgggtttcttaatgtacttagttatgctttgccttggtgaattgaccgtatctatgccggtgacagggtcatttcaagcctacgcaacaaaatatataggacctggaacaggttttactgtgggatggatgtactggttgaattgggcagttacagtaagtgttgaattcacagcatctggattattaatgcagcgctggtttcctgatattcctgtttgggtttggtgtgctatttttggaacttctttgtttatcattaactccctgtctactcgcagttttgcagaaacagaattttggttttcaagtattaaaatcgtaaccattttattatttattataattggggcaggtataatttttggatttcttgatactcatggggcaaaaaatccagttcaaagtgtttctaccataatgaataatggaggactttttccaaatggatttagtagtgttttctttgccatgattggagttgttttttcttttcagggaaccgaattgattggtattgcagctggagaatctgaaaatccatatagggaaatccctagagctattaaaaatacagtttggcgaacagtatttttttatgtaatttccatgcttatcctcgttagtttagtctcctggcaaaaagcaggatcagtggatagcccatttgtctatgttttcgacaatgttgggataccgtatgcagcagatgtgatgaattttgttattctcactgcggttttatcggttgcgaattcagggttatatgcatccacacgaatgctatgggctatgagccgcgaaggatttgctgggaaatctttttcaaaattaagccaaaagggggtaccattacgcgcattaagtgtaacttttttagtagcatgtctatccctcttaacaagcttcattgctgctaatactgtttttctaattttagtatcgatcgctggcctagctggcatcactgtttggatgttaactgccttatctcaattaaatttccgtaaagcttatattgcggaaggaaatgatattaatcaattaaacttccgtacacctctgtatcctattgttccaattacctgctttgtactctgtttagtagtcattgttagtatggcttttgttgattctctcagggctgctttatattgcggtctcccatttgcaattgggtgctatgcctactattacttacgtattcataagaaaatagataaggaaaaagatacaataatattaaagagaagttctggggaatagacctagtgggaattacattcttcctttaattaatgaatcattgagtaaatcacgatgttttcattacctctctttgattttttagcagattttatccttggataagatctgctctttaattacaataacaaacattatacaagaattaatccgtcaatcctttttataaaacatatgattaaactctgtcacctgaatatgggttacctctatattttcaaaagacctttatccgtgtattctgaaataaaaagaagcctcagtctttaaaaaagaaggcttctttttaatgaatttcttctatattacatcgtttttattaagatagggatttaagttcctctgttaaacgtaaaaaagcttgtttatctttattctttaaagactggtctatttccttaaggatcttacttcttttgaagtcgttcatcgtttgatccaaaaacaattcagccagcatttcatcacgtaaacttggatcaatttcgttaagtacattatttttcattaaaaatccacccctttatcttctttcctttttaaatattattatcctttttgacgttgtttatacgagattgatagataaagtgaaataatgaatatatttaccccatgtattgataatcctcttgttattctgattgttatttcatacttataaaccctaaagcgagcacaaaaactggtttatttatttgttgaaggagatctacaaactaacttttaagaatataggttttgacagtcatgtttaacgacagcaaaccactagcttaatctatttccctatcagaaacgttcgtaaaagtgtatagtttttagaagaccttcgtaatttattttcaaacttaatcgaacgatgaaaatgacaggttttctatataagagaaaatttcgtaaacatatacctttacagacagtgtatttgattttgtttcaaaatgtccaaatttatgaaaactagtaattcaaaccttgatattactgtaaattcaaacctttccatatataataattaacaaggaggtttggaacatgaaatcaattcaagtcacacaatttggtggacctgagaaattagtatttacggacgttaaagatgtagtagcagaaaagggcgaagtatgtgttcgtttgtacgctgcaggcgtcaatccaagtgatacttacacattatcaggtacatatgcgtttagtatacctcagttgccttatactccaggattagacggtgcaggggttgtggaggcgattggagaagaagttacaaatgttcatgtcggtgatcgtgtatttattgcgtctttaatgggaagtaaaagtacaggcacctttgcacaaaaagtagtatgtgatgcaacgttggttcatccattaccatcccatgtatcttttgaacaaggtgcggcattaggggtacctgcattaaccgcctatcgtgcgctatttcaacgtgcctgcctgaagcccggtcaaaccgtgcttattcatggagccagtggtggagtgggattacaggttgtacaaatggcgaaatctcatggtgctaaagtgattggaacagcaagcaagcccgagggtaaaaaaatggttcagcaagctggtgcagattttgtcactgatcatgtgactgaaacaacgattgaagatgtgttagccttaatggatggcaatggacctgatgtaattattgagtttttagcaaataggaatttagaaacagatttaaagctgattgcaccattcggtaaaattgtaattgttggaaaccgtggttcaatagacataaacccacgtcttgcaatgcaaaaggaatgtgatattttagcaacagctctttggaatgcaccaaaggatgaatatgaacaaagtattcatggtgtaattggcatgctaacaagtggtgcacttcgtccgatcattggtacaactttgccactccagcaagtatcgcagggctttgaacaactagaaaaaggtataggaaatggtaaacttgttttgataattgactaattaatctacataattttaagacattcacttaaattaaatgctgcattagtctactaagtaagtactagaaggaccttacagggtccttttcttaattaaaaagtgaaaatataggtggataggttaacgaagtaagctaaatgggtatgtactattaagatgaaaggagtttttacagtgttagctttaattcttaaacttactatctcattttttgctgttatgaatccactcggaaacatacctattttcattactcttacgaatgattattctattcaagagagacgtcatagtgcaaggaaggctgtctttatctcttttattattcttaccctatttttacttttaggcagttttatcttttccgcctttgggatcaccatacacgcttttcgtgtagcaggaggaatcttaatctttggcatcgcctatagcttgcttcatgctaaaccttctaatacacaaagtcctcattcgcatgaacaaaaagctgcagcttcccaaaatgatatttccattactcctcttgccctgccgattatggctggacctggaacaattgcgacagtcatgtctcacagttcttatttgatagcaactctagggagtgtactcattagttacacccttatattaggagttacttttatccttttctattattctacatctattatcaacaagctcggacagaatggtttaaatgttatctcaaggttaatgggattaatactggcagtgatggctatacaaatgattgcagaaggtgttcacgggttatttcctcatctgtaatcattcaaaaagactgtttctataggaacgagcatatgaataaaaggtgcacttttattcatctatttgtcactcagcccgagaggaaacgttgataaatcaagaatgtataaaaagctgcataatacagaaactttaccctcaaggaaccccctctacgccaagagggttcctttttcatgtcttccggaaagtcgttttatgttaactcattctgtatgtcaactgttttttctttcaaaaagagtaaggaccaaataagaccatattaattcttggagttaacatctttccccttttccaaactatttcgttggatataggcgccataataggcgtcttttttttgcacaaaaaaggcaattcactacgttttcctgaatgtagataggagaataatgaagaaaggaaaggtgtgaatgataagaaagttatctattcctattttaactttagtgatactatggacaattattctttgcatagaaaaacaagttatggtggcctgttttctatggatcgtttatagcgccttgcaattttttcgaagggaataatttttatcttctacctaaaggtttttaggaaagtatatgaattgtacataagaggatttctaatagatctttgtattcctttagcaatattaccaacttaacctccttccataaacaaaagacactggctcttaaccagtgtcttttattttatgctcaataattttcatagaaatgtcattcatgtaaatcattagacacttttcagttccctaggatctgttactttgtgtttgtatttcttttcaaatttattgaacatggatatatttgctagtactcctacagcaaacataagcaatgtaagagaagaaccaccataacttacaaaaggtaacgttacacctgtgataggaagaattcccgttactgctcctaggttaacaaatgcttgaatgccaatcataacggaaataccgatagctaataaagcaccaaaaggatcgttgcatcttttagcaagttttaagccttgtaaaataattaaaaatagcaaccctaatacaagcagcactccccaaaaacctaattcttcagcaataactgccataataaaatctgtatgagactcaggtagataaccagccttttgaatgccttgtcctaacccttcacctgatagtcccccagttcctatagctaggtaggagttaaccaattggtacccatctccttgttgattttcaaaaggatgtagataaccagtaaaacgagctaaacgaacaggagaaaacacagtatcaatatgtcctgttaacaataaaacaactaacataataataatgcctactactcctaataaggcaatctttagcattgattttatcgaaatacctgaacataaaacaatggctaagactgtgcctaaaataagtaggattccaccgtaatccggttgtaaagcaattaagaaacaaataaacaagacaataagaataggtggaataatagcgcgctttaaatcgtttatatactcttgtttattcgcaaaaaccgccgataggtatacaataattgttagtttcgtaaattctagcggttgtattctaatcggtcccagtataagccaactttgtgcattcccggcggtatgtccaaaaataaggaccaaagcaagaagcgtaattactgttactaataagatttttaacacttttttttctcgataaattttatagggaataaaagcagaaatacagaaaaagaagaagcctgctatgagggcaagtttttgcttttgataaaaataatccccttcaacaccgtaacgactaacagccgttaccatactagcactgtaaaccatgactaaaccgataaggcttagaacaattaaggctacaataaatttgtaatcataacattttactattttcttaaacataaaaactcctcgttccttgcaagtgtaagattcttattttcatcataaaaaaaaattcttagtaaattatatagagtaaaaagaacactcaatagtataataacagttcctcgcgctttgtgctttcctacgatataaccatttacaccatgcaatataaaggaggaaattaaatgaataaaaatatagaagaaattgttgtaaaaaccttttttgagaagagaattcaagaaagagtcatgtttgaacttttttcttctaaaaaacgggataaagcattgcatcgccttaaccatgattataaaagaaatctacgtgaacaatatttgattgaaattccggagcctaattcatgttctagcgaattagctaatctacttcaaaagcatggtgcaggaaagcagtgctatgccctttcttttaatggagatattgatgggaaagaactacctttacttactgctttagagcatgcagtaggctatggatttccttctcttattgtatgtattccaaacaaacttgcctattttgaagctgagcaagtttatggccctccaccacgttacattttaaagcgataaattaaaaataaatacaatatccaggtttacatactgcgtgttcttagtaataatgtataaaagcccttttaaagggcttttatatgggatccatttatctattcatttttattagtagcttcttgccaatcccaatatgactgatatagttcatcatgcaaaaactcttcttccacttcgtcttcttgtttttccaccaacttcaaaccaacccaagtaccattatcatcttctaagacaggatcacttactccatcaagtaaacaaaaagcactgtgaaaagcacccatgatattatctcttacaatcttttcaattgctctaatactttcatcttttaacttctgagattctaaagcatctatttcatcttgagttaaattgaattcttcccataataattgctcagtaggttttctcaactgctcccctacctctgtatattctttaataacggtatgtagttcctttaaaaataactgcttagaatccatatttcattctcctatatgtaagcatttgtatgttaccactctctccactcttctgtgatatcctcttcagtctctaagccagctgcatttgcagctttaatgataaactcgcaaagttcttctctttctaatgtttcaatgaaataatcaaactgttcatttaactcgtttaatcctataactacctgttgtacatattctaagatatcttgttctgacattttatctaaagaaccttcaagtctattcatataagtatcaaggatttcataagtggctttaatattttctgcagtgaaaatctcatcatcttccattctttgttgccaagctgctgtcggtttgttattttttagttcttccattgtattatcaccttaatcttatttggatttccatttagccataagcctaatgcttatatgattatatatcaaacttaacctagaaggttgtagatatcttttttatttttagttactgtgagacaggtgattatggatatgaaaaatgtgttaattagtggataaaccctactttttacctaaataaaaggtcaatttcttctcgatcataatccaaaatccaattattatattcttcataaagaaagcgtatagattctttactggaggctaagacatcacatccgcgatcatcgtcttcgtcttcatcctgaaatacactcggcaaacagtgatggtttaattgatatagccgctttttatcttttatgtattttaaataaacgtttaaaggtcttttttgaaggaaaagatctttgttcgtagtatgcacatccgtaacaaaaagaatctcatctccctctccaaataccctttgaaataatgtgattgatctatggaaagcttgattcaaacaatctttttcgtgagatgaaattaatggatctgatatttgaaagcgaatgctatattttcacgaataaaacagagctggccttaaagttaaaccttcacagtattcttttaaaaatgaagatagagtgttagtgctcatgtatttttctccatattttttagttcttatagtttataagtaactttttttacttaaacattaagtaattgttttaattctttttttaaacttttataatgccaattaatatggtcaagttctaactctatttcaattaattgttctataactttctctttatctagtgaagagctgagaagagctttaattaa

SEQ ID NO: 100 - DNA, 8711 bp, Priestia aryabhattai
  source 1..8711: mol_type = genomic DNA
gaaactttattacggtatgaagatagtgaaatcactcataccatttgtagtaaaaataataccttttctctcagttattctaaagaactaaagaattttcaagtgaagaatattgaaacgggccatattaaacattttccggatgtggagactacatctttagctttgtatagaataataagtattgtggaaaaagaagtcactgagtaattatccacttttaaagtttacataatgtactttttatcggtagtagcacaaataactctgtccgaataaatcgaaacagagctacaatgagtatgaaaaatttcctgattaattacagcattttatatatttcaataagattcttatctggatcccgaaaatgtgcaatacgtgatctccattctttacgatcgtgtggttcagtaacaaatacaaccccattttctcttaaataatcataggtcttatctacgttctctacttcaaattgaagtaaaaagtttgattgggattcgccgtctaaagacctattttcctttccaatcacttctgccatgacattttgagataaaagctcgattttcgtttctccattattgaaaagtgcatactccatttcttcctcataccaacttattggaattcctaacagatccctatagaattcagtactttttttaaaatcattaactaatagtctgatttgtagcagtttcaattcaatcccctccttatcatacaattctctttatttaccaaataacctctgtgttttctcctcagtgtaccctacgcattctagttaaccttatagaaattatagatagttgtcttttcttaattgtgattttttaatttttctagcttctctatttctccatttactattacatcaatatggtcagaaataatctcaatagttaaatcccaccatcgaatttctagtaatttattaataatttgttctgggaaacgttctttgattttctgtgcaggatttcctccaacaatcgcgtagggttctacatcctttgtaataactgatttggctgctacaatggcaccatcacctatattaatcccaggcatgatgaccgtatccatcccaacccagacatcgtttccaattatcgtatctcctttaaacggcaattgatttaacgtgggtgtgtgtttctcccaaccttctccaaaaatattaaacggatacgttgagaagccatccatcctatgattagctccattcataataaatgttacgccgggggctatggcacaaaatttccctataacaagtcgatcaccaaaaaattcataatggtacaatacttgatcttcaaaggattctccgtttcttgcatcgtaataagaataatcgcctacaatgatatttggcctagtggttgtatttttaatgaattgtacaacattatttcctttaataggatatttatctgtaggatttgggccgtgtgctttatttgattccataaatattcactgcctctcatggtttttggccaaaactcaatcgacctaacttattacattcctctgcgaaccataaggcttgatcagatccgactacaataccatgtggttccgcattctttgtaggaatagaatattccgtaattttcccattcactgtaatacgaccgatttgattgcttccccattcagtaaaccataaagcatcatcgggacccgttacgattgcatgtggacgggcattcggagtaggaataggatactcgcttataaccccagaagtggtaattcttccaaccttattgccgttaatttctacaaaccaaagtgcaccatctggtccattcgtaatgcctacaggaccagccttttccgtcggtaaattatatgtagttacgtctccttctagcgtaatacgaccgatttgattactttgatttagagtaaaccataaagcattatcagaacctgccacaataaaagaagggtaggaaccaggccggggtagatcatgctcgattatttcacctgatggtaaaattcgtcctattctatttccatgcatttctgtaaaccaaatgtctccgttgtgtccttcagttattccaaaaggtgccgaatctgggttaggtaggacatattccacaatctctcccgttgttgttagttttccaattttattagctctattttctgcaaaccaaatgtccccctgagttgtagaagtgatggatagcgcccctgcattaatagtagggacattaaaatgtttcaccttacctcctacatccattcgcccaatttgattggttttatgttgggtaaaccaaagtgcgccgtcttttcccaaggtaattccataaggcccggaatctgcatgaggtaattcgtattctctgatttttacaatcaattaatttcccccttttttctttttagtaattcgttataagataattagattcctgtcaaagaagtcttttataagacgagcaaagttagttaacataatagaactttccggcacatatgaaaaaggaaaatctttgacgtagaaggattttacctttttaagtcaaagtaagatagtaatagtgacttataaagcaattgaaggatgtagaactggagggaagtaagttgcctaacagagagtatccatactattttataaagttaggtaaattatattacgtatatcattcgtataagaacgtaaaaaagaaagaagtatccagttacgaatttactaatgatgaatcgttagcatttcccattgacgaagagtctgctaaacaattggcagataaatgtggaggtcatattgtaatgaagattgctacgtttaatgattatattagccaaggagaaagatggagtaattttatagatagcaaaaggaagaacatatggagaatctatatcattaattgaatgataaaaccttttaactactatttattttgaagaacaagttcataattgtcgtcagatagagtaaataataagattcatattttttataagctaatttattgtttacttaaataacgaggatataatatggagcaatttaaccctttactttaaagcgttaaattgttaatgtattattagacaatcttttctttagtgttattctttagcccaaagcataaaccatatatagtggtttatgcttttttgtttttatagatagtataaaacctacctaccacgatgagtgttatcgacaataacgtgctaaaaagccctttttacaaagaaagggcttgctcactgttacttgtaaaagttgtaattttccccttcccaaatcatcaatttttaatagcaacccgaattgtaaaaatttgagtgttgaaaaatacattgtaaaaagttagtgtgaaatttatcaatacttaacatggaaattaattaggtgatgatggggatgggaaataaacatgtaacacaggaagtcctattggaagaaatagagcgtattagggaaattatgatatttacagctttaaaggaaggacttgtaagcgataacacggtaaaggtaagtcaaatactggataggaagttaaatgaattagaagaaatttattaaaaaaagcccttactttataagtaagggcttttttgtatgaggtttatgataacctgaaccatgttaactactaggcttttttctcaaattgtttttttacatagatacaatttcgttcatgttcacgggaaaagaaatgatcatgtttataatgtactgtgacttcacacgaagaacagacaaaaaaacccattcttattttatcttgattcacctcatgcgcataaaaatctcctgtggctttaaacgtgaccacatgtctagctttttcggtttttgctcgcataatcatatcctccttcaccatatttttcatctatttctatgataagggctatatactatatagaaagaaaacaaagaaaaaacagcttcccgtcataacggaatactgcttagatattagctattcttcaacttgtagcctttgaaaggataaccatacactttagttagatcaacaaagctcttataagaataagtaatggcaacgggtgtacctccttggactttatcataaagcttttcgatgtccgcattatgcattctcacgcaaccttggctcacgtattttccaatgctgctttcattattattgccatgaatgccgtatgtatcaccatacgtaccgtttgcatttattcctaaccaacgttttcctaacggattgcaaggatcgcccccaggaatatgtgctgtatagtaaaggcgatttttaactttgttaaccactttaaagaatccaacaggtgttttatcccacgtttttcccgttgctactggatcaacgatttcaatataaccattatgaaaacacgcaagcttgttgtaatacttgttaatgatgattaaatctttttgaagcagccagttaactaaccgaggatcaattttgcgctcctttatcagatagtcctttactttgctttgatcctttacttccaactcttttgggtagcgaaaaggttcttttgatgatgaaaccgacggttgctcatgcgactgagaacgctctttataatcgcttttgttaatatctaatacagcttgtggaaacgacatcccataatacatttgagcgaaactgatcgctccataccctgtttcattccggctgttctaagcgtacatatttcctttgatgagtaagctatcatgttccgtatgacgataatacttcccttcttttacaaaggtttcgcctttggcttccagatacgacaacaaatcaatatctcgcactttcataacctcctcctctttgacgtgctttcgctccttcaccttaatccccccttcttacttcaccgtatgaaaaaagaggactaaatataatatttagtcctctttttcttttcgaaattttgccattttttagcattctattccttacgtctctttccgtttttttgaagaaagtgctccattattccgtgcaaaaaactttgtaaatccattctgtgatttctcttcttttttctgcttgtcgtgatcctttttctctctgtccaaagccttttcaagcttcgttaacttctcacgttgagaatcagtcaaattaagctcttttaattcctgcagcacttcttttttcaatttgtacaccttatcaaaggaatgcttttgttcaaattccttcattttggccaaacgctgttctttctcttgaggtgtttcttgcttaagctgtttttcgacaggagctttttctgcttcagcttcctttttcgcttctttagaagaatctttttcatctgatatgcctaattgggataacaaactttgtttaaatagctgcttatactgtgtttcttcactagtttgctgcataacttctagtatttcttgtttgtaatcttcttgatattgatccttttcatgcgcttcttgatctttcttcgcatcatcacgatcaacatactccacatactcttgaaatgctttcttatcagacgtaacaaatttcgttttaagcacgactcctggtgtaacagaggactgattcatttttcatatccctccaataaagaagcgaaaagctcaccccgttttgctatgctataatcctcaacttcttttaaactgttcctcatagatcgttcaatatttcgctccatatatagcaactcttttttaatatgaagtcgctccctctgtaaaagatcctctatatgttgagtaacatcctttacgattttttctattgaatcatcctcttttttctgcacttcttcatgctcctgacatattcgagaaatcgcatcacctacaaatgataagtgatgttctttcatgtaagattgaatatactttttcacttcaggtggtaaagatactttcatacgttcttttatcataatggtgcatctcctcccattaattcatgcattaaactgttcatattctccatagtgactgaacactgccccatcatttgaagaactttctctatcatgttttcaagctgtaattctctgttggtttgttcatgaaaaaaggccagcgtttcaagctgaccttttaaaaattcctgacgagaaatccttttttcttttgccatttcatcaatttttttaactgcaataggatcaacatttcgaattttaatttccattttatccgccctctctcaatttgtagtgctctccccaaaataaagagaagagcataaggggtttttgcccccaccataggtgtggggctaggcagagcctagcaaaaccgtgggtacaagaaaacctgttgaatgtgaacctactgttgacctaaactcctctatgtgaacctactgtgaacatgaaaaactaatgatgtgaacctactgtgaacctcaaaaaaacacatgttgacctactgttgacatgtgttttttcacttcatggctaaatcttgttgcttttcattcaatttttggagcttttcttgcaaacttttttgttcatcttcatagagctgaatgctttcatcactcgattgaatggcatcctttttcattgcgatttttgattcggtatcggctttttcctcgtccacttggtacttcatatcacgttgtaactcgttcatttcttgttgcgtttgatgcttatgtttggcttctactgtgattgctttttcatagtttttcattttctttttgacaaaatttttttctaactcattaactaaaagcgcatattcttgtttggtttttgttccttttccttcttcacttttcgtttttcgttggtcagaatagagtgttgtaattaacgcatgagcatctatttcctctgttgaatctgtttctgaatcacttgttacatcatccacatttaccgtttctttttcttcattttcttgatatagatcaaaggcaagtgcttcccaatttggagataaatcgctgattcttaccacataatagccatcatcttcatacaataaatgaacaggtaatttgatgtttggattcgctttttcttgtgcaacaaaacttacttcctcttcatcggtttgatccattttgatgaccatatccagtgagtcagtaaccggatgatacacacgattttcaatggttacggttcctgttatgttaaaagaaaccgcctcataggtattcgtatgatacaaaggatcttcttttttcaagtagaattttgatgtcagtaagaataaaaaccgataaagaaaaagatcaacgtcactgtatacttccatgaccgattgcgatttaataaattaaatcgataatcttccaattgcttcttaaatgccacctgctccaactcatttcatgatttccgttttcaattcttcgatactataaatcatccattcattctcttcttttcttagagaaactttaataaggaagttctaaagtcatattttaaagcaaaaaataaaagattttattctaacaattaaaaaagcactaaaattcacaactaaacttacatccagacgtcacctaatatagatttattattatttttccaacactaatctaattcaagttaaacttaccacttacttaatacagtttttcaatcacacctccaccttcagttgaacattagttaaacctaacagtgattaaacacagatttatagtcagattttaaaattaaatcaaactcaagttaaacttaacagctacttactacaggtttatagtcagattcctcctctttagtttttatcaacccaaacttaacagctacttactacaggtttatagtcagattcctcctctttagtttttatcaacccaaacttaacagctacttactacaggtttatagtcagattcctcctctttagtctttactaaaactttgttataatgaactgtgactttgaattacctatcctattaaaaatataaaaaagcctgtaaatctaacaaataattcatcattaaatctctcaaaatttaatgtcagttctgttataataacaagaaatttcttgttattataattgagaaaaggaggggttaatttgaaacaaactgaggaagaattcaaattaagtgaagtaataaaacttactgggctttctgatcaaacaattcgaagataccaagaggactttaatattcaaggaattcgtactcaaggtggtcatcgtcgtttcaaaagagaagagattgatatgttacttgaggctaagagattaaaagaagagcatggttactctattaagcaaatccgttcacattttaatggagagacaacatcggaaatgttagagaagaatgaacctatgaaaacaattttcgagaagaaaattgtaaatttagaagaacaattagcagaggcaactgaaaaaattgattctatggttcaggttttaacaacatttatgaaacaaaatggacaaacaaatcaacaaattttatctcaatttcaagatgtattaaaggcactccccgaaacatctacaactacaaacaatcaaagaatattagaaaaagagcaacgcctaaacgaattgaaaattagaaacaaattaaaaaaagaagcaattgaaaaatgggatatgttacctgaagaggaacggactatagctgtgaaaactggtctgtttagtcttaaaagagaagaaaatcataataaaaaacgtttttttattgaagatt

SEQ ID NO: 101 - DNA, 8304 bp, Priestia aryabhattai
  source 1..8304: mol_type = genomic DNA
tcacgtacggttcttaggggggtgggcgctcgtgagagtgcctgcctacccgacttaagtgaaatatgaattattcataaaaataatcagtttgactatttacttctagtgatgacaattggatgaacatcaccaaaaagtcggcttacctaccataaaccaaagcatagtcattaatagaataatgtaaatccaaatagattgctttagcttagttgccagttcttttttattttgcccttcctccttatactttcgaagtgttggtgaaaacgcacgcgccagaaagaacaaggagcaaaagaggaaaatcagggtcattataatccatggagtagtccacgtccatggaccacacataacaaggagtatccctgttataacaagaacatggcctgtatgttttgcgagcctaacgacagattgaaatgtactcaaataggcattcgtttcttgttctcttgcactatgtagtttttttacgagtggcaagagaataaagaaaggaccaatagataaaatgacactagaaacatgaatatatactaatatacggtacaataaatccatttcttttacctatcaatcattaactgatctgaactcatgcacccataccctcatttgcggaagccaaggcatccccggatgataagataaaatagattgcttatattcctctactgtatcatagccttcctggcgagcattttcatctgttaattcacctagtgattgagaataaactcgttccactatgaatttcttatcccctaagatcattatctctcctacatcagcatatcttccatttcggcgagttgctgttttgctgccattgattactttatttacatcatcgggcatcgttacaagtcgattgattgtacatgtttttggtggcaattcactttgtgctttatgattactcattaaaaaaactcctttcatttcttgtctcttatacaatgtatcacactttcattaacaattattatttgaattaattaggttgaaatttcctcttataaattctggtatggtttatcccttttcttattctatagcctacgttcatgacgtaacgtataagaaaactaattattttttatgcgtataataagatttattttatggattaaatagactattttccattagctttcttaacatctaaatgggtgtacctacctttttgtactatatacatgggacagccttaatcctaggttatgtattgtatcctcaataaatcaatgtgacaacaacgctaaaataaatataatgttacatatttttcttccacaatttttttatcaaactaactgtgcaggataatccaatagatttgttgtatagatacgtagcaagtgttatgcaaaaaagaacatgcgtactattctttagttagctatgatttattgaaatctaaataaaattttaaaagaggtgtttttcatggtcttaggaatttatccttatttagtgatgaacggtaatggacaagaagctgttaaattttatgagcaggcattggatgcaaaagttattagagttcaaactttcggagaaatgcccggaaatccagaattccctactcctatagaagcaatagatcgtgtaatgaatgcgcatttaaaagttggtgatacggatttaatgctttctgatacatttccaggtcaaccataccaaattggatcacaagtgacggtagccatcagcatagacagtatagaaaaatcgaaagaagtgttcgaaaaactcaaagaagatggtcaagtaggaatgccccttcaagaaactttctggagcccatcatatggacaagtaacagataaattcggtgttacctggcaaatttcaacacaacttgctgataataagtaattgatgaaaagttaattttttaattaaattaaataaccttattgaactaaaggggcagcagttcgataaggtacatctaaatataatcaaacttcattttaaagtagcctggatcctagtataaatgcatgcttttttcatttttacactctgtagaaagatttgtcgtcatatagagtgtaaaataaaacctatatttttataacatagtttatatatttacttctcattgataataacgttgattacgtattcttaataaaccttatagtgctttggtcgttttgttgtgaaagaaacaaaaactcgttatactgtatacaaattagggaggagttagtatggataaaagacagcagttaatgagtgaacttatggatttgtgtaatgagataatctggcgtaataaaccggaagtagaattggctttaaaggactataaattgagtgaaatagaattaatcgaaaatattgctctaatcccaaatgcaaatgtaacaagacttgcagctgcaagctacatgactcgaggtgctatcagcaagcttaccaagaagctgatagctaaaaatattattgagagttatcaaagtgttgaaaataaaaaggaaatatattttcgattaacaactaatggacaaaaaataaatgatatccatcaaaaattacaccaatcttttcttgaacgtgataaagaagtatttaagcacatgaccaatgaagaatttgacactatttttcgtttcattggtagatatagacatcatctgaaaaatatcactgagtaagtggtgtttttttatgttgttttattgttgacgaggaaacaataaagggataaacttatatttgtttcctgagaaacaataactttaaaggagaactatcatggatacttcaataaataaacatgccctaacgtttgggctcatcactgtcttcttaactggtcttggattgactatagttagccccgttttaccttttttagtaaagacttatactagtaatcccagcagtcaggctactgcagtaacattacttacgtctatatacgctctttctgtctttttggctgcaccagtcttaggtgcgttaagcgatagatatggtcgtcgtccagtattaattattagtctaatcggctctgcccttggttattttatctttggacttggaggtgcactttggattctcttccttggtcgtatcattgaaggtttgacaggtggcgaaatttcagcaatttttgcttactttgcagatatcaccccttcaaatgaacgcactaagtactttggttggattagtgctgttgttggggttggcactgctctgggccctataattggaggtgcacttgcgactttcggaaacagtgttcctatgtatgctggtacggttatcacattgcttaatgccatatatggctattttttaatgcctgagagtcttaagaagtctagacgctcttgtagtatctctgttagacatcttaatccatttatacaattatccaaggttttttcctttaaatctgttaaatggctgctaattgctgggttcctaatttggatccctaacggatcattacaagctatcttctctcagttttcaatagatacctttgcatggcaacctctatttattggtctgacattttctataataggtgtactggatatcttttctcaagcaatcattatgccacggctactcaaatttttgacagataaaaaaattgctcttttaggcatgataagtcaaattattggttttatccttattttgatttcaacccttacagctttttatttagtctttattgttgggatggttttcttcggattgggtgattcagtctttgggccatcatttaatggcatgctttcaaaatctgttagtgacagtgagcaaggtcatatactagggggagctcaaagtattcaatctctagcccgatttagtggacctatcattggtggtcagctgtattcagtagttagccacgctactccggccatcatgggtgtggtactgattggtatctctgctctcgttttatcaaaaaagcatcgttatatttaataaaaagcaaccattaaacaagaacagaagaactgcctcttcatcgatggcagcttttttctgttttataactgtataccttataagcttttagttaacataaaacgtattataggtaatatagcaaaacaaccctagagttataactctagggttatcttagtaatgattaccgatatataatcccctttatttactttttcaaatataattctaattttccaaacttatctatatatttatgtgtagagaaaacctctctacttattcttcctacaatcggttcagttctaaatactcttttaaagtttgctgtaacgtccctttggcttctgccttatcctcaaaggagattcctgagtgaatcattgtcctaactaggtcagcacgtaaacctgtaagaatagcttcacatcccatcattgaaattccagttagtactttctgaaaatgatcaataacatgcatctccatgttggcaattccagacaggtctataattaatgtctgaatttttatctctgagatgcccattaacactttctcttcaattgtttggatacgattgatgtcaaccattccgattaacggtagtacagctacagattggctaagtggtataatgggtaccgatagattttcaactaagtctctttgagaggcaattaattcatctttatacttggaataactaatgagaaaagtgttaagaaattgatcgatcctatcattaattcgtttctctaaggcataaaattcttcacgaccattaaaatggttatttattcgatcatattgatagagaaaatgccataacgttcgcctaatagcctgtacccattctaatttgaaagcaagagttaaggcatgctctgcccaggctaccccttcttgttgagcgaatgcaatgagttgttcttctttttgttctacgacatagagagataacttttgagcatttttcaaaagattaatatttccagtttctaaaatgtcgttaatcttagaagctacgttaactgcctctgataaaagtttatcctgaaaattttgtttgttatctttaataaaatctgtcattttctctctctgattataagtagtttccattttgaatacaccctttattttttttattggttatcgttatccttatccttaattagtatacctaaatgaattattatcaattttcattttcagtctttgtataaaaccgaaagtcttccttatactcatgacattagatgcgtctttagataaaaaccaacggagatcttatagagaatttttaaatctggatatattcatggtcgtacttatttttttcaacatgataaagggttaattaagatcatgtttgctagctgctactcatttagatagttcatcaaaactgttctgaaattgttctttatttaacgtgttaacattctcccatgccctagtaatgtaagtctctagatagtttggctaggaaatggattcagtaataaaaactttacaaaataagactccttatattttcaccctcaaaaaatgtatttcaaatccatcttttatatcaaatgtatccattttcgaaattgttaaattactgaaggtaataacctataagaataccctacattaaaatagattaaagtttaattggtaacatttctttatatagtgagaaggcgaatcagtgatagatgacactaattaaaattaaaaagatgttagaaactttattacagtacgaagatagcgaaattattcataccatttgtagtttacataatacttctcccttagctattctaaagaactttaattgaggaatcttgaaacggatgagattgaacatgttacagatgcagagattacatctatagctttgtataacataataaatatgtgggaaaagaagttaaactacttttaaagtttagataatgatttttttagaaaaaagatcctgcatcatttagaaatttgctctttttgatttgagtatataaattcctttatttctacaattgaaagacctagttgataagcttcctgtataaggctaatccattcctggtcaagtttattctcttcttttagcacaggcttcctcccaactttcctaatttagattgatgagattttaacattcaacaatgatacattagaaatcgatactatttattcaacatatttcttcaaatttcctgcaacataagtctttttagataattaaataagatttagtgtagaaaaaaggaaattcaaggaatcgttattgaagctctgagcaagctaactaaggtgcaatacagcaacacctaatgactattgttaattccacttacagaaaaagaccatctcttttgactgggaagagatggtctttttttgtgtatagtatgataattaccataatcacaactctcagaattaaaaaaagagccgtttgttataatacggcttcttttactaatttgtatacttttgatagttgctgctcctattaataagttatttattatacgtcgtatcggtatttctataattattagtgttaagaacatgtttatctagatacttatgaaagaaccactcaccgctggttataacaattgctgatactataaagtcctgaataatagtgctgttattttcaaaaagggatgcgcccattatccagattactaaaaaaattaaaataagatcaaaaattgtagcgatagtgtttcggtttttgtagtctgaatcatcatcagcatttcaatatactaacaaatcgtcaagagcgtaagcgacaactgtgaggaccaaactaatcagcatgctgttactaaaatcataattataaatgcctgttagtataatacctaataccaaagcactcattacaaactttataataagagcctttagatgtttcattttatcttctcccttcctttaatttgatttttagggttatatacctagttccaagaagaataaccttttttacactaaagaaaggattgtctataataagcctaattttcacctggcataatataatatcctacgtcatctcaatcaacatagtgttccttattgttgcatacaaaaaagccctttcaacaagagctttttgaagcattcttatgaatttttaaagtgttacataccattaccaactagaattttttattaattggattactctccttttaaaacctttctatttggcgcttgaggtggttgttctagccattgtcggttgaccataatattaaatcccttttcggcataaattaatatttctccaattactttactataataagtagctaaatccagcctcatagataaagataaagcatgtccaataagtgtcacatcaatggaattcaaaaaattaaaaagcgcaaagataagtttgtcggaaatgggagaaacggttgaattcgttacttccatactaacaggaatcgtgccaagaagttcttctttttctaaaagctcattaaagaaattaatttgtttttctgatatttccattccatcttttatataatttttaatttctttatctttaatcacttgtaacaagcccatacagagtaacaccgagaaatagttacgctctatattgaagaatatttcagtaagttcgactgcatttaaaggtctcttttttcccatggctgctactatataagattgtttttttacatattcgactttctcaggataggtaatcataggtggtcgatcgtaaatacctttagataacattaaggttgtagattctgcatagagttctgtagcctgatttaaggctttagtgaagaaatcaagtacatctgcccgagcaacagtagaagtagcaaaccctaagttaaccattgacatgcgattcattgagtagacaaaactcagagcaaaaagatcataaaaaagagggggagccaataaattaatatccttttccataaatccatcgggtaaagggatactttcctcagaaaaatgtccttaatttggtttaaatatgtttgagagatatgtaaagatttttgcaaaataggctttatttcttcatcttataagtgaggaagaaaatactttaacaaacaagtagacattgtttcttgaatataaactccccatacccctccaatttcaggacttgacaaccttatattacgcttaaccattgatgcctcctaattacatgtatttatcttaagtattgtattttttttctaaattattcttttcttaatcttcagcaggctaaagaacatctttacttatagttaccataatcataatggacttgtaagaaatgaatac

SEQ ID NO: 102 - DNA, 8050 bp, Priestia aryabhattai
  source 1..8050: mol_type = genomic DNA
ctcttttactcaataattcctttacaatttaattttctaaatacttaagacaagttaactgaaaaaggttaaattatccgtattcatcttatataacaaaaattaaccaatacacaataagaaggaggaaaaaatcctatgataagcataaaaaaagttgcttgtactcattatggaataagaatggatgtttttaaacctgatgaaataattagctccaatcatatgcagttcagaggatatctcacctgtccttattgtggcgatatcgaaatcgctcatgaatgccaagaaggaaaatcaaggtttgtagttgctgctaatagagatcattctcaggattacctctctaaagagtcataaaaaatgagtaactctaaaagaatagatctttttagagcaactcattttatttacaaaaaagtcttttcaaaacggcatattttatagaagaaactcgtcaaaaaagtagcctttgctcaacggggaccaaggcttttttcaactcaggaaatttggaaatactttattggtttaggctaaaaatctatatacatatttttaaaacaatatagggttaaattttaaccaatgattcataatcaaacttcaatggagttcatttagtcgtagagtaaatcttagtataattatccctaaaaaaacaggggttcctcctccttttcccaaccttattaagtgacaagtgtgtagaagctatgatatcttagcatttctacatattatctaaaaataagaagatgaggtgtttgaatatgaataaaactgaattagtagatgcagttgcaacaaaatctgaactaacgaaacaggattcaaaaaaggctgtagacgctttatttgaaacaatttctaatacgcttgcaaaggaagaaaaaattcaattagttggatttggtacatttgaaatacgtgagcgctcagagcgtacaggtcgtaaccctcaaacaggtgaacaaatgaccatcgcggcctcaaagtctcctgcttttaaaccgggaaaagaattaaaagcagctgttaaataaatataccttataagcaagtcccctctagagctagacttctaaagggggctattttttatggtgaaaacttctaaatacctacgcctatatattatctaatcaagttttctattttcttgcgtcgtcttagagttagaggtaggttctttgccaagtctaggtttccaatgttctaacttattttttaaataatcctttaaaaactcacgtttcttttttcgtcttttatctctatttttcataaggactcaccaccttcaggttacttaatagatgtaatttctccttattataattatgttgaaaaatctactctttatgctaaatctttaggtaataagtagttcatcttactagtaaaagatacactattaagtaccgtcttaatctataataataaagaaagaaggttaataagtattaaccttcttttcaaactgaccaaacaccttttaagttctcgttagaaaggatggtataatttcgtagaagaggcatccttgttctcagaggtagaaactttcctttgaagttagttagacctactgtatgaaactaacaccctatgtttctagagagtattttttgcattagaatccctattttggcaatacttcaaacgctaagaattgggttacttggttacgattgaaattgtcatctgaaactagaactaaactgtcatgtccatttggaagctttggtccccaggatatcccttcaatattatccagtaccgataaacctaatgttgtcaaatccagaataagacgctttttcacaagtttaaatttttgtccttgtagtgaatgaatattactaatgtcactggctccacgtgtatctaattcataaatacggatataattttcaaatgttccatcctcgctttgtacaccagaacgttcaatagttagaagtttgtgtttatttacagacaaaatttctgataccccgttatctgcatacttaccaggtccaggcttcgccgggatggaatcaataggatatgcatattgtgctaatagctttcccttacggtcatattgtgtaattcgtgacagcgcaccagtagttgtagtaggtacagggccatcctgatataaaggggcttccatggaaatccataaggaattaccgtcgtttgcaaaagtcagtccttcaaaagttaaattatcacgtggtccaatctcgtgttctggcatcatcttaaattgtttcgctacaggtaaagtatctaaatatttaccttccccattcgcatgctttatgaaaggatcaaagccaagagaacggctcccctcacttgtataccaaacactcccgtcttttggatctagacgtatagattcaaaatctggtacttctcctccctttacggcatattgcgtttgattaggatagtttgtaccatcggcttgctttaaaaagttcattcctgtcaatttaacagaaccaaaattcttattatcgtagttcaattgagctgtataaaaacgggctggactgttatccgatttgtcatcacttatcatcatccatgtaccttgcttagcattataggcaagtcctgatagccctcctacaacagtcccttgaaattcttccttaaaagggattctttgctccccaatcatttttaaacttccaacattatgcgcttcttttatatcttgtttccaatgtttattttggaatagttgaacagctgtttctttattattttcagctgcatttgcagaagaagatatagctaaaaaagaacttaaagctgtaatactcaagactttaaaataattcctcaatggttgcttcttcatcatagcctcccgaattttcaaaaataagatgggacatatattatacgatagcaatcagatatgtattttccgttaaagtaacattaatccattgtaaagtcagttcaagtacagaaacttagaaataactacaataacttttttaaaacgtaaaaatggtactactagtactctcaaaaaagagaggttagtatgtaaaaatcaagatgtactgtgcaagaaaaaattacttttgggcatcttagtcatatagaatttgtttccatctaaatttccgtaggaaaagatgtatgctcaaagtaacttctagctaataagatagttatcagaaggaggtacctatctagtggaaaaagcaaaaattaatggaagtcaactttttacgttaatgatgctatttgaatttggaactgccttccttctccctattgctatagaagcgaagcaagatgcttggctttccattatgtttggaatggcaggtggttttgttctatttttagtctactatcaactctattgttactaccctgatttattacttgtagaattcacacaaaaaatcatggggaaatggattgggcgcctcatttcatttctttacattttctactttgcaaatcttgcttcccgggtcattcgggattttggagacatgttattgacatttgcctatccagacactcctttatttattgtaaatgccctactgatgcttgttgttatctataccgtaagcaaaggaatcgaggtattggcaagatccagtcaacttctgtttattctgctctacctctttgccatttctggattcttgctaattgtatgttctggtttgcttgactttaaaaatttaaaacctgtattggaaaacggcatttggctacctctgaaagtttccctaactcaaaatatatattttccatttggtgaaacgattgtatttttgatgattttaccgcatgtgaaaaatgtgagtaaaggaattggcataagcgctattggattaaccggtatcaatttaatgattaccatgattataaatgtcagtgtattaggagtaagtcttactgcgcgctcacagtttcctcttctaagtacagtagaaagtattcaggtagctaattttttagagcgtcttgacgtgtttttcatgcttacagcagttattgggggatttattaggacaagtgtacttttctacgctgtcgtaatagggacagcaaatctatttaaaattaaatctccatctaaactatgctatcccttagggcttgttattttattttattctctgtccctagccaataattatgaggaacttatacaagaagggattaaagccctaccattttacctagacattccacttcaagtcgtaattcctcttttgcttctgacggtggctttctttaaaaatagagccaatcttaagcaatctgatgtcaaattgcataaataaactacatcagcttaatttactcaaatcaaaccgaccttcttaaataatccctttttaagttgtagatcgtatacagagttaagttaattaccataatggattttctaggaacctaatatctaaaaacactttttatctcatgaaggatttttaggtattttaaacgtgtaaaacagaatgaatatgtcaaagtatgttaattatggattaaagatgtaaaaaacgttttttttcactcccgtaataattccataggagaacatacatgaaaaactatacaaacgataacacagcaagacgctatatagctcacgttagtatatttggaaccactcagattcacttaagaaatccctacatcatagcctggtggtcagcagcctttcctggcttcggacatttacttttatctaaatatcttcgaggatttgttttatttatttgggaagttgttattaatctccagtcaaatataaacgtggctatgattcattcctttcaaggggacatagacatggcgaaagagtcactaaacactaggtggcttctcatttatattcctgtttatatctttgccatatgggatagttatcgaacgacggttgatttaaataaaatatatctcttagctgaaagagaaaatcacacctttaattcctttagtatgggagctatggagattaactacttggataaaagaaatcctattatgtctatcatatggtccttatttatgccaggtttaggtcagctttatattcatcgaataattgttgctttttttattgttacttggaccgttgttttcttttactattctcatcttcttgaagctatttctcttctctttttaggcgaaatccagaaagctaccaacgtattaaatccagaatggttactgtttttcccttctctttatgggttcgccacttatgatgcttatatcaatacagttgaaaataataagcttgctgaaaaagaacaaaagaactttctagagaaaacctatcaaaacccagaattttatatcgaaaagggaaaaaagtgacaagatgacatgcagatctttgctacatttatatgaattaaaacatcgtaaccagagcaaactacccaagattttattaaacatcgactcatacagctaaattctgcaacagaaaaaacctacctcttttgactgggaagagataggtttttctgtttttaagctgtatatcgtacacatctttagttaacataatcactcttctcggcagtaaaaaagcctttaaatttaagagcttcttattactaatcattagaaatagcatgctcaaaagcccttttatcaaggttctttgcagcctttaaattgtaacaaaagtaaaacgtgaagaaaaaccagatgacacttacgtatatcgtaataatcaataagtaagagtagaaaaagcaggttaacatttattaacctgctttttttagattgctgtgtaacagaacctttaaaaattttataagtaaaaagttatgacagatattttctattacgtctgttgtagatttcaagtaaataaatctttagacttgcttcaatattataaaaatccagcctataaatgtgaatttcgtttaatgattttctcttattgatttgctggtaaggatgcaatccagtaagaaataggatcaatacttgataatggcccagcctgagatattaaaagtgctaaattatttctgcaatgtctttagcttcataagctcgtaacttaaaggaagctggatttctatgtgtctaaaggatagtttttacaccaaaacctgaatgtatatattgtatacatatttatctacagagaacagttttatacctttcagactactattttaggatggattctatttattcattactcttctaaaccctatctcttctaatgcttgttctagggtagctttcgtattaatttttctaaaatcaatgcctaatcttacacttgtttgagcaatttctggacgtattcctgttagggttgtttctataccaagtagtcttaatgcttgaacaagattaaaaagattatttacaatcattgtgtctacaatttgaacacctgaaatatccaagattaaatggctcagttccatatgggcacttttgtccaagcctgtttgcataattaaggtagaacggtgagtatcaatctctccaataattggcatgacagctactcctggcgtaatcggtacaatgggaactgataattcttctaatgctgtataagcaatatctattttctttttattctggacttcataaatttgactaaagatgtaactaatttcatctagaaaaggatcaataattttactaacagaaagcatagttatagcagaaagtcgattctgttctagttcctcactgaagacattccatataacgtgacggacaaaagagattgatttgatagcatgctttaatgaaattccattttcagcgataatttttcctatatatgtagctaaatctgttatttttttgataacagttttttgatctttaattaaggactctccaatatactgaattaatttcattgtccactctataatatggtattcttctataccatattgatggagctttttgttatattctatatacataagttcagaaaggcttttagctaatttatcattattcttaacaattttctcacctatatattgcaattctttcttcatctactcttgccccctgtagtatgtcttcgttccttgttcttcaatactataaaaaggttttcttaaacgtggaatacattcatttggaatccccccttcatcaataaaacaaatgcttaccagatgacctggatatttattgatattaattaaaatatcgggttcagaggaaaaaactttgattcacttgtaagcaacctctaaagcttgaatatactgatactattattctataaaaagtgtttgatcggtatggaaaagcaacgttttcgtaccagaacctttgttggtttattcagctagaaactaattgtttttcctataaatagatagttttacaaaaaagaattttcgttatattctatatttaaaaaaccaacaaggagctttaatatatgtataatagtcaacgttttagagatttagttttacaatttgaacaagtcttatccagagaattgactaataaagaacaagaattattagtttggattacaaaagaagagcaaagaattgctcttccaagagtacattaattatcaatgcctatccttttgaacaataagggataggcctcttcttttcaattcctcttctagaacgagaataaaatctttatctaagtctaattcaattgctttaaaatacgattctatcaatagttgatcagttatttttttcatatcttccccttctattcctttaaaaccacgcttaaacatataataaaatgaatttaatattaataaataacaatgcaataaattcaaaaaaataacataaattgtggtgattaataattaacaaaggtagtctctagcctagaatatggagtaatcttttttgcaataaaattataggattggtatttattctatattcatcctacgtaaaacgacttaaaacgacatcattaaacgcaatatatatttagttttcctatttaacataaatatagttattaaatctaatatgtacaaagtaaaatt

SEQ ID NO: 103 - DNA, 7916 bp, Priestia aryabhattai
  source 1..7916: mol_type = genomic DNA
taatttttgtcgttttctgtatgattatatagttactattataaattaaagatacgatttcgttgagaaaaaatgaaagcgtttaatattagtttaccttttcttaattctactttaatggagtgaagatatttataaactaactacagaaaaaaattgctctcattgtatccttattaatgacctaaaggagtatcactatctcttaaagttacgctgatgtatcaactccttttgaagctaagcagactacgatatctactataatccttcccttactaagaaagggactatggagggtgtaatagtctttctataattactacaacttatatgagagaggttaaaaaaatgaatcatttacagcgtaggatgggaactttttctttaacaatggttggactaggttcaatcattggttcaggttggttattcggagcatggagagcagctcaaattgctggacctgctgctattatttcctggattatcggtatgattgttattttatttattggactttcttacagcgagctcggatctatgtttccggaagcaggaggtatggttaaatatacacaatattctcatggatcgtttcttggatttattgctgcttgggcaaactggattgctattgtatctgttatcccagttgaagctgttgcctctgtacaatatatgagttcttggccctgggaatgggcaaagtggacaagtagtttagtgaaaaatggcacgcttactttacctggattaggcattgcttctgttttattacttatttatttcttactaaattattggacagtaagtcttttttccaaagcaaattcactcatcacaatctttaagatcgtgattcctggcttaacaattggatcacttttatttgccggttttcatagtggaaattttacgtctgaagaaggcatcgcgccaaatggttgggcaagcgtactgacggcggtagcaacgtccggtattgtatttgcatttaatggttttcaaagccctattaatatggctggagaagcaaagaatcctgggcgttctattccattagctgtagtaggatcgattctaattgctaccgttatttatatcttattacaggttgcgtttattggagcagttgacccttctatggttgttcatggatggagtcaccttaatttcaactctccatttgctgatttggctattgctttaagtattaactggcttgttattgtattgtacgctgatgcatttgtttctccttctggaacgggaataacctatactgctaccacatctcgtatgatatacggtatggaaaagaataaatatttacctggtgttttagggaagttgcaccctatttatggtgtgccacgtcaagcaatgtttttcaatttagccgtatcattcattttcttatttctatttagaggttggggtgtattagctgaaattatttcagttgcgacattaatctcttatattaccgggcctgttacagctatgacgttaagaagaacggggaaagaattgtacagaccattacgtctaaagggattaagtattattgcaccactgggttttatatttgcgtcattaactctgtactgggcgaggtggccacttacaggacaggtgttattcattattatgatgggtcttcctatttacttttattatcaagcaaagttgaaatggaaggggttccagaagaacttcctagctggactttggatggttacttacttattatgtatgatggttatttcatatttaggaagtgaaaagtttgggggaataaatgttattccatacggttgggacatgcttatcattacatgtttgtctcttgttttttatgtttgggctgtaaagagtggatttaaaacagaatacctcaaggaagccaccaaagtaaatgaagaaatgagattaagggagagaacaataaaatctcaattagataaagaaaaagctgtataaaaattggtttctattacaagtattttataagtatgtggagatagttgttatgttgaaaaataaggtaggaaagttaaaaatctttacggtagactattctatattaaaaaataataaaataattaataattccatagtcatgcaatccattaataatccagatgaaattgtaaggttagctaaattggatatatctacaaaggaaagagtgttcattcaaaatgtaaagattttaagatttaagtccatcccatctcatggacataatttagaatagaagaaactcttccaaaagggaatttgcctacaatagcaaaagcttcttttgacgatgttattgagatattttacttgtcttattagatgcctagggcatctttttctcttttctcatatgttcgagggctataggaaaagtcgaattcctatctatcgtaatgccacgagaagtcaaaacatgaaaaggccgaaaagttttctaaaaaacactgtacattctttcggtctcttgtttcatttatataacaatagtgaaagttgttattttatggaggttttatatgtcggataaagtgccattttcatttatattagttattggtttaatgttatttgctctattcttcggggcaggaaatttaattttcccaccaatgcttggtcaatcagcaggaataaatatttggtcagctaatgccggatttttagtaatcggagttgggttaccgttacttggtgtgttagcatttggtttttcggggaaagatgatgtacagtcactagcgagtcgcgtacaccctgtgtttgctcttgtgtttacaaccgtactttatttagcgattggtcctttattttccataccaagagcaggaaccgtttcttttgagataggcgtcaaaccttttttgtcagaagatgtagaccacatacctttatttattttcaccatcatcttttttagcatcacatgctttttctcacttaatcctgttaaaactgtcaatattatcggaaaattcctaacacctattaagttaacatttattggaatacttgtagcgacttcttttattcatccgattggggctttccaagcacctacgaaaaattataaatttcattcatttttcaagggatttcaggaaggttatttaacaatggatgctcttgcagcttttgtttttggaattattattattaatgctattaaagaaaaaggcgcaaaaacaaaaaaacaaattatgactatttgtgcaaaagcaacaggaattgctgccattatcctaataaccatttatacagctctttcttacatgggtgcttcaagtgtagaaaaacttggacacttagataacggaggtactgttttagtaaaagtctcgaattattattttggagcttacggtggaatattattaggattaatgattacggtagcttgtttaacaactagtgtaggacttgttgcttcttgttcttcattctttcataaactatttccgcaggtaccttataaaatacttgctattagtctatgtggttttagtgcaatcgttgctaacatcgggttaacgcagttaattgctatttctatacctctattaacagctatttatccattagctattgtattgatattcttaactttttttcatcctttatttaaaggaaaaactgaagtttatcaagggagcttacttttgacatttattactagtctatttgatggattaaatacgggtggtattcacatttcatctattaatagtttctttattaaaattctccctatgtacaaagtaggactagggtggattgttccagctattattgggggattaataggttttagcatagtacaagtaaaaatccttcttaattacaggtcatctagactgaataaataataaatattctgatgcaaaggttacatccatttgaaaataggagaaaatcatcaaaaggaagctttgttcttattgagcaaagctccctttttgacgagtttcttctgtcttgtatggggttcattttgtcttagagcaaatctcagcatctagtttattagataactttttaaatcatcaaatgagtgctcatgtttgaacattttataaagactgtgatatgttctacatatacatactatatatgcagtaagaaatgaggtatttacatatgaaaaaagctgaattaatcgatgcagttacaacaaaatcagaactaacgaaacaaaatactaaaaaagctgtagatgcattgtttgaaacgatttctaatacacttgctaatagagaaaaaattcatttgattggattcggcacatttgaagtacgtgaacgtgcagctcgtaccggacgtaatccccaaactggtgaagaaatgacgattccagcttccaaagttcctgcgtttaaacccggaaaagaattaaaagaagctcttaaataagtatagggtgaatacttttcagaaagcctcaaggttattccttggagctttctttcatttttgacatcaaaataagcaaagttaaacttgaaagcttacttcgttgatcctgacgctccataatctttaatcattaatttcacatcatagttaattggaacttcactaaatgtttgatcccaattgtctttaaccctcatccatactctgggcctcttaattctcaattgatttccgaacccggctacatcgactttatattctttttgcatcttttctaccgtgtttcttacgaggtgctttacttttttttctgagtttttttgcaccttctgtaaaaattgattttttaaaggatttcctgagaccacccaattttcagatagccttccctctgattcaatatgcacattgaaggaaatgctatttcctttaacatgaggttcaatatggcttttcatagattctatttcgtatacaatcagctgaccggtcttttcatcaaagcttttcactagacctcctttcccttttcctgtgatccaggtcagaccatctagttcttcttcattcaaaaaaccaatcattttgtttgttttccctttaattatggcagcacccgcaaatttgatttctccatttgctgatactacattttgcaacagaaaactagaccgtgattggattttgctctctagtttaataagcggcataggaggtaaaattctcgttgttcgataggcattttctaccattgaagacaaacgaaatgctgggatctctcctgctgtttttgattcgagtgtgtcgcttgctctccctttactaataaacatcagacaacttggtctaaaatcattgtcacgaagactttgatccactaattgttccaaactatacgatcgtgcaagggcctcaccgataaccatcactttcatatggggactagttaaaggagtatcacttcttaaagataattcacgaagcatttgaaaagcagaatctcctgtttcagacacattcacataagatttctgttgaggacctccttgtttagtggttgaacttgccacttgtggggtgataagttgataggttgacgtaatcaggttctttctcgcatatccccctccttgttcatcaaattctttttcaatcatggacttcttccccttatcgagcgccacacctacccctaaacttctttcttcaatttcatgactactccagcagcccgtcagaggaacgagcaaaaaaacagagagaaaaaccaataagaactgtacgtgattaaaggtttgtttcatactttctcccctttacttttgaaataatgagaagaagcagcggcaaaaagccaaataaaactagggcagcgttaccaaccatatcccctactttaaatacatcattgatgtttttggggatcatggaaataagataaataacgggaagcacgccatacataaatggatgaatgttcttttggaaaagttgagatagtcctaatgaagcagcgtaatggttaacagtaaaagaagtaaacatttgcataatccataccaccagcaacagagaatcaaatcgttcaaaaatcaaaccggtcagctcaaaacttcgtatcaaatcaagtgtgggccatgttcttgtaactactccatcaaccgataacgctccgatcaccattacaacagtaatcacataaatgaataaaggaatagtaattccaactagtacagcttttcctgctttgtgtggttctttcataaaagctaaaatgattaacataatttcaggacccgtgaatgcaagagcagttgtttttatgccttttagcaccggtgtgatacctgaacctagtaccgggcgcagattgtctacttcaaatattttgatactcataaaggcaacaagtaaaaaaagaataaccgtaataggtaatataatctcaaatagacgagcgattggatttatcccccctctgattaggtagagacttgcccacataaagggcataataatagcccatttaggggttccttccaacaatagatatcctgttacttctgccaatgaacgggcatgaaacccaccaagtactaaaaaataacctattatgaagaaactaaataacttgcccatccatttccctacaatttcttggctgtattgataaaaggttttttcagggaagcgttgacttaatttcaccataattactcctgctatcatggcaattattccgcctaaaataacacttaaccaaacatctggtgtttttacttgttccgtaactgtccggggcaaggtaagaattcctgttccaagtataaaattgataacaaccacggttgcttgaggtgtcgtaatacgatcgttcgaattgatcattacccacagttcacttccttttatcataagctacccttttcgtagaggatttttggtatgcatcatccttggacgtcgtttcatcatcataagaggcatacggaccttcaagtctttccattcacttaaacgataaggaacagctggactcatataaggcacgccaaagctttttagtttcactaaatggctcatcatgaaaaggaaaaataagatgaccccatataatccaagtatggcagcacaaagcatggctacaaagcgaagaatccgcaatgtaatgcctagactatattgcggaatagaaaatgttgagatcaccgttaacgccattacaatcaccaaaatagggctaacaatccctgcctgtacagcagtttccccatactaatcaccctatttatctttatattaaggaggctctagacacaaacatccttaaaatatagttatttactccatgggaaattcttttatttaccaggtagtattattcttctgtttatttcttatacaaagggaagttaatctgatttgaatataggagaaatttatgaaaagaagccttttctcttgttgagtaaaggcttttttgacgagtttcttctatattatattatttttattaagatacagattttaatttctctgttaaacgtaaaaaagcttctttatctttattctttaaggaatgatcaatttcctcgaggattttacttcttttaaagtcactcatcatttgatccaaaaacaattcagccaacatttcatcacgtaaatttggatcaacccgatccattccgttaagtacattatttcccataaaacgtcaacccctttatcttttctcttttgcaaacagtattcccttttgcactctttttatgcaaggttgatagatgaagtgagacatagagtaatatgtaatatgcatgattacactcctatattccttttagatatttttcatatgtctacatcattaatgactaattgattaaagagaaatgatagtgagtaacaattaattttatttactagagaaaagataaaaattagcttttgatgatcaattttttattaattac

SEQ ID NO: 104 - DNA, 7503 bp, Priestia aryabhattai
  source 1..7503: mol_type = genomic DNA
aacttttgccataatgtcttcttttgattttgttctttaatcaactctttttgagtatgagtaaatgcatttaaaaggtctgcatctctttcttttaataactcttttagattagtatttatcagttcttcaaaattctgtttgttttgatttaactcctgttcagctgaattatcttttagcgtttcttgagtttttctaatgttttcaagaagaattttatcacgtttttttaggctgttttctatgtatgcttctaagtctttattttctgtttttacttcaatcatttgctgctttgttgctgcaatttctttatttgcaatagccaactctttttgagtagaaataagttcctttgttagaagctccaatttttctgaaagaatcctgttaaattctatttgttggttctgaccttcaattaggtgatctatcttcttttctaaaatagaccgttctacgtggtcattaatagtcatttcttcaccattacgccattgtttcacttgatcccaggaccaaccttgctcatgaattttcttctttatactgttaagtgtctctagattctcttttgtaaaccttctatgaccttttccataatcagtgcctgtccactctgtaataatattgaattcttcgcaccatttacgaagcaaatctccagagatacccagtatatttaccacttcttttggtaagtacaatttttcagacataactacacctccatatgtcaattaataattaatataatacaagaatcatgcaattgattttgaagtgaaacgtaccatgggattattaacgtagattctaataacattgttcttatctcattattgattctatattaactgctaacttcttctatgtaaatcttaaagcaataataatgtaataactaattcctgaataagattattgttttatcttttaatcaataactatcattatcgattaaaatgaaacggaaaaaacttattattgatttaattattgtttaaatacatttaagttaatcttaagttcaacaaaaatgcattttaactaaaaaataaattctttttttattcacaaacacgaattcttttttttgaattcaccttaagttcaactcagattcaggtatcagaacacgcaaatggggtaatagctctaaaatagcttcattcaactaatgatatatcaaagataaaatgattaagtttagcagagccaaaaggaaagttaaagcattctttttaatttaaggacttataataatacaatcgaaaacggaaaatgaaatcatatagtagatgagctatatgtagaaagtggctttcaagataaatagacagcaaacaactatgaaaggggacaccttatagttgtttgctgtctattacgaataactagcaattcttagctaaaaatgctttatttttgatattcatagataacaggaactttgtccattttaacggttttggccacaatataacgacgatagccatcttttaagacctttgatcctttctcaatcgttaacggcttgtcaaggtgtcctgtacgcttcacaaattcaatgacttcttctgttttcacagggtttggacgtgtctttaagaaggcttcaggaacgataatgtcatcaaagctcacgacatcccgtgtcccttttggttgagtcggcagctgcttcttttggggcgtagcctttttctcttttacaggcgtttctttcacttctggctgtatagttttcgtttctgttgctacagactgagaaacagaatcttgcttttcctcctgcttggtagctgcaacttcttgttgatccttagaaacctcttgtttcgcttcttttttatcttttgaatcattggcttctttatcgtttttattcgggagaacggtaatctggaagcagataacacctatttcgccagggcattcatcaattggaatatctaacgttggttctccttgaattaagactttctcatgcataatactcttttttgttagtccggttttattaaaagctttcttcgcaacaaacacggtatacgaaataaacgtactcttctttaaccctttaggcgcagaaggtgaacctttttctcgcatatcaaaggcaacgtaacgatcatattctcgtaatggtcctgtcgcagatcctgttaaggttattttatgtggcatcgtgatctcctcctgcatagatttatatattgattatttagaagtatgttctaaataataatactcttactaaacatcagcttctaagggatttcttcactttttgattacgaaacggtgtcctgtaattgggcatattcgtgtaataaagcttgttgctctggtgttaaggcttgtcctagatcctgttttagctgcgccatttctaacgaactatacgtagtactgtgttcctgcagcaagctttcttcttctggcgttagttcttgccctaaatcttgttttaattggatcatttcaagctgttgatccagagaaatagctgtttcttgtgtagactttttttgcttctgttcagcttgtaaccaagcaggaacgatttccttacggatgatatgtttaggcttaggtaatgcttttgtttgaacttctgtatgtatgtctgactcagacgttggttcttctgtattccctttaagtagattcgtaaattgattgtaagcaatttgataaacaagacgacacatgtcatccagtgataggggagtacccttatgatttgcttcatggacatatttatctaagcctacaatggctgtataagcgacttcatgtacttgttctttgataatctcaatctctgtatctcgttttactgcttttgcagcatttcgaatgcgagcataaaagtcttttaattgatgaccatatttccctacgtacacatgatttactttcttaggcacacctttgatataagcaaatgactgtgaagcagatattaaatgattatttaaatgatttctaggtaaatcaaggttaataaagggggacgatgctttttcgtcctcaaagcttggtgtatcaacgtttttagcactttctggacttgtcacaggagttgtcacaggagttgtcatttcttcttgttgaagcgtttgaatacctgttgtatcgtgtgcaaaaaagatttcctcacaaatttgatcaaaattcttatgacttttaaggataaacacatagctatcgggatgagcacctgtcgtatcttctttaatataacgggccacgatcataaacggtgttgcctttaacgatttcacaaagcgagaaacggtactttgggatacatcaaacttttccataagtgttttggagtgaatcgcttgaatgcctgtggcaacaaggttataaatcacgtaatctaacatttccatccgttttttagggaatactttatgtagggcttcttgttgttgtttaaagtatgtacgaagggtttctaaaaacgcctctttctttttacgaagggtaggcttttctttccataaccatttgaatcgtccgttgaaggtatttacatcgggtaaatagcaagttaatatcttgttcatttgttcatcttctcctttagggaacacaaaaaagacactgtttccctgaagaaaggaaaacaatgccgtgattttgatgaactaagcccttgaaatagatgtcaatttcatataaaataaaaccataagttttattttatagaaaaactaactctattaacaagagacttcgacaagtgttttccctactgtaactagggggaacggtttaagagtggtggtacactacttaaacagttgaagtcttttttctatccgcacgtttttgttagttttattatagcgttaagtcgtctcataattcaataaaaattagcaaaatatatcaaaacaagtatttttagctacgatccgtttgttatttctttaggagtcgacttcatcatagctgaatttgtagaatctggggaggggtatttttttacccctccctaaatagctaaaagtatgctatgatgtttagtttttattatttttggaaatttaatgaatgaatacaacttcaatgttaagggtaaatgggcattctgggtagtgccattttttatagtcttttttctaaaaagggactataaaaaatgacactatgcaaaattccaaaagtatgataaaagcagcttctacttataaatgtagaagctgctttttttattaatgtgtgaggggaaaatggtcctattggaaaattaggagcctctagtggtgagcttacttatgagaaaattagtgcagtttcattctttttttgtttatatttgaatctattacaaatctcagatatagcgtcgccaggatatctaattttgtttttaagcatgtaatcttgaatgtattaatatgtgactatatcgagtgaagtcgtccggcctttctattcatcatccctatatttcctcatcaatttttttaacagtagtaggatcaatatttcttattttaagttccatattttatttgaaattcccaaaatagtggtgcccttttaaaaatagagagaagagcataaggggtttttgctatcacagagcgtgataggctaggcagagcctagcaaaaacatgatatcatgcaaaatcttcaaggaaccccctcaacgtaccctcaaattaagggggagtcccttcatggacccttcatagtcgataaatgtcccctcaagggtcacttcattttgaagtgttttttgaaaaaaataagacagaagcaagcgatctttttttgtttttttcgcacgttcatagtcaaaacggccatttctttttgcttactatacaagtgatttacgcgtgcttttttatgatttatgaatctatttttattctataaaagattaccgttctaaaaaaatacacgttcacaagacgtcgatatttattttttttatgttcacatgagttggaagaaaattttataaaaaagaaaatgaaaagctatggaaaagtcgagacagaatcaaaaattgcgatcaaaaagatacgattcagtccagtgatgtaagcattcagctctataaagatgaacaaaaaagtttgcaagaaaagctgaaaaagttgaataaaaaagaataggatttggccatgaagtgaaaaaaggcatgttaacagtaggtcaacatgtgtttttttgaggttcacagcaggttcacatgcccaattttcatgttcaccgtaggttcacgtgaaggggtttatgtcaacagtaggttcacacttaacaggttttcttgtacccacgattttgctaggctctgcctagccccacacctatggtgggggcaaaaaccccttatgctcttctcccttttgtagtggggaatcacaatttacaggaaaggaacgaatgtcatgaatatgttttgacaaaatatcaatctgattgttgttgaaaaaacagatgaaatcttagaaagaaaagaacatttctttctaagaacttttagaaattaacttaaaaaggagggagttactgagagagataaagagttatgacaaaggaagaaaagagaatttataaaatagatttacgaaattttttgcacggaatagtggagcaaaattttaaaagaacggagtacagtataagaaacggaacgttaaaaaaagcaaaagtttgaaggggaagcgaagaatgaaaagtctattttttcatatttggaagttaaaagaaggaaaaatcagcaagcaatcgaaagctgttttatgattcctcttttttataattagttgagatatcccatataacacaaacgggatgtaaaccattatacaccccgccatgtgaagaaggaaaatcagcttttaatgcagtatatgatctttaaggaacaccgcatttacgtaattgcattgcctaatgaaacagtaacttgaaaaagtatattctctttaacaaacacctcatttaagcattgagctaaaaaatatataatatgaacgaaatcgttcttggtctgggacaaacacctcatttgtgtagttataaatgaacattattgtctacccattatatatattcttactacgttcatgactaccatccccttatgaatcaaacatacatcgatttacaataaggttttctgaaatatgtctgctttagacacctcatcccaaatgtaagaagctttgcaacgattagttgtaatcaatcactttttttccttcttcgctatatagaatatcccaaggacttatttgtaattcagtaaagtaaaaggtttttttggattgaatgtacccttatttataaggtaggttaaacaatgaagtcttatggtgaatagatgaaatttgttaaaactggtatttagttactattaatcttactatatggtacactccacataacttatttttgttcggtgtattgagaagagaaaaacttaataagaagttttttctctttaaagagtatgtttgggtaatattggtaatacatttgtggagcattccacagcaggaggcaacaattatgacagaaggtacagtaaaatggtttaatgcagaaaaaggtttcggtttcatcgaagttgaaggcggagacgatgtattcgtacatttcagcgcaattcaaggtgaaggtttcaaatcattagaagaaggccaaaaggttacttttgatgttgagcaaggtcaacgtggagcgcaaggtgctaacgttcataaagcataattaaaaataatcacaaaaaagactcctgtaaaggagtcttttttacagttttataagtgggaaaatatgatttacctattattacttcagatagaaagtaagtatggatatatgaatgaagttgtttatgtataagcaatgtttaatctttctaaagccataggcgtacattattttttatggggattacgtgagattttatcaataaggcgtttttcagttttcatctcacttttacacaaggggcatttctgatggctatcataagagaaatcttttctcatccaacctttacattcttctgctgtacattcccaaatttctatttcttcttgaaccggaggttcttgattttttctactataatacatattgatcactactcctctctttataagtatgcctcataaagagggtataaatactttatatcttttacgccgtccatattgtagtagaaccaatcttatagttaaaaataagagtgaaaaagtggaacatggatagtaaagtataacaatccgtgtttggtgaataattgttatcgtggtgtgtaaaatacaacgagaataaaaaacaatgtttttttagaaaaactattgacgtttcatttgatatgttttattattatagagcgtcgttgaaacgacaacttattctacggaatattgaactttgaaaactgaacaaagcgacaaacgtcaacattaatttttattttttaattgagcaagtcaaacattta

SEQ ID NO: 105 - DNA, 7318 bp, Priestia aryabhattai
  source 1..7318: mol_type = genomic DNA
ctcactaatctttagtattctaggtggaaccattctagcaaagaaaatactctctaacattcaagcgttaacattgacgatgaaaaaaataaaaacaaatggacttgaagaacgggttccagttaatgaaaaaaacgatgagtttgcccagttaggcagtttatttaacgagttaatggatagtcttgaagattcctttgtacaacaaaaacaatttgtagaggatgcttcacatgagttaagaactcctttagctattattcaagggcatttaacattgttaaatcgttggggaaaaaatgatgcagctatactagataaatctctgaaatccagcttgaaagaagtagagcatttaacgaacctggtacaagaattattagagttatctcgtgctgaaaatagcctgataaattctggggacgttgcacctattaatgtgctggagactgtacagcatgttgtaaagaattttgaagtgttgcatagcaattatggttttagaatagaccattcacatgaaaatctttatgtgaatatttcttctcgacatctagaacagatattaatcattttgctagataatgcagtcaaatattccacaagagaagagaaagaagtaattatagactgttctttaatcaatgaaaagatattccttaaagtaatggataaagggatcggaattccagaagaagatattccgtatattttaaatagattctatcgagttgataaagcaagaagcagaaagcaaggagggcttggcttaggactagctatagccaaacgatgggttgaaaagtacaacggtactatcaacattaaaagtaaagaaggagagggaacaaacgtaacactcgttttccctttgtttaaagactctatataaatacgacaaaaaagcagcaaaaactgctatcaatataaaaagagtttttattatatttcatcaatgttagcttgctaaaagacgtatattagaggtgtctagtaatatgaagttaaaatctcaatttacacttgcttttatgttaagtgtattgtgccttatttgttttagtgggatggctattttaattagtggatcaaagattgttgcatttgaccatgatgtcatatcgtttattcaagggttcgaagcgcctacgttaacgactatcatgaagttttttactttcattggttccacaccagccgttgcagtgatttctctcttgagtttattttttctttataaagtattaaaacatcgaacagagctcattttgtttattgccatcattataggttctccaattcttaatgggctgttaaagctgctttttcatcgtgcacgccccaactttcatcgattaatcgaaataaatggttatagttttccaagtggacatgccatgagtgcatttgccatttacggcattctctcattcttactatggcgtcacattcctactcgtttggggcgtacatgcttactatctattagtactgtaatgatcttgacaataggggtgagtcgaatttatttaggcgttcattatcctagtgatgttattggaggctattttgctagtggctgctggttagctattgctatttggttctatcaacgctatcaggagaagaaatttgagcaaagaagacctaattaaagtgaagaatgaatataattatatataaacactgaaatagccatataggttacaagggactggatgaataattaagtgggtgaagagagtggattatcaaaaatcaaaagtactaatattaacgggaagttatggagctggacactatcagactgcacgagcaatagaagcatctattaggttaaagaaactcgaccttgatccacttattgttgatataactaattataaacatcggcttgttaacaatattagtcgccggatttttatagaaggagtaacaaagttcccaaccttttatgattatttatataaaaaatcaaggaacccaaatcatttttcatcttttttaaagatagccgggcgaaccggagcttgggaagttcttgaattaataaatacacttcggccaagtattgttattagtacatttccctttgcagcaggtattatgtcatatctcaaaaaacatcatttaaccagtgttccgacgcttacgattataaccgattatacagttcatagcatttggatttatccacatactgatcaatatattgtaggatctgatagtgtacgaaatggcttaattaaatatggcgtgaaagaggaatgtattaaggtaacgggaataccaatacatcctaaattttctaaacgttataaaaaggaagagcttaagctaaagtatggattaaaacataacatacctactgtacttattatgggtggaggatgtggcttaattagtagtcataacaagatacttacttctttggaagaatgtccgtttgagttacaagttattattatatgtggacataatcaaaggataaaaaaatcactagagaactctctggcttattcaaaacaccatataataattatggggtttgttgactgtatagatgaactaatggctatttgtgatgggatgattacaaaggcagggggaataacaatttcggaagggctagctcttaatattcctatccttctttacaaaccacttggaggacaagaacaggataacactaaatttttagtagactctaatataggtacccttattgaagatgttcatgatctaagtaataaaattatagagcttttaaaacagagatatgagcatcaatttaaacaaggggatttatctataacaaatcgacaaaagaatgcagctttccaagctgttactataattcaatctttaattttaagcaataatcatcgtttttataaggtaccacttaaataataagaatgtagctaatctttatataaaatattagcaagaagctgcctgacgcataaaaaatctatcttcattctgaaaatagatttttgctatttatatccttactttgaagtaagatttctgaaaggtgattagtttaagggtgtcccttgtacgttataaccgttctctataggagtatgagttcttttgccgacacatttatagcccatggcagaggcggtatacataaaaaaccactcaataggttatcttaactcataacgttttaaagaaggggatgcttatgagacggatagctttgttggctggagtatttttatttacctttttcataatgagtggaaaaaaagttaacgcctattcattgacgagtccgatattttctgtttctctatctcaagagcatgtcattcattctattcctattcaaaagaagaaaatagctcttacgtttgatgatggaccaacatcagatgaaacggtacaaatcttagatcttttgaaagaatacgatgcaaaagcgactttcttcgtcgtaggatctcgtgtagaacgttatgcatctattgttgaaagggaaatacaagaaggtcatgaagttggaaaccatacatttcatcatttgatttggactcgcaatatttccgagaaacaattgatcgaggaaattgaattaactcaggaagctatttctaatataagtgggtatcagccttcattatttaggcccgttcaaggattttataaccagaagctcgtagacgtggtagaacactctaacttgcaggttgtgttgtggtctcaaaagcatgatacgcgtgattgggatcgacctggggtgaaatatattgttcaaaatgtattaaatgacatagaaaatggagacatcattcttttgcacgaccatgtgaatggaaaaagccagactattttagctctcaaacgtattttgcccgccctaaaagaaaaagggtatgaatgtgttacaatttcggagctattaaaaacatttgaaagtacgcactaatatttatgcattccctcaattttctatgtgactgatctgttgtaaacgtcttcctttttaggggggctgtaaagagacatttgtaaacaaaatgaagattataagaaaaaaaactcacctttttaggtaagcttgaaaatggaaaggggaatatctatagaaaatgctttatagcatgattaacaattaagttatcatttaatagtgaaaaaaagatgaaaaagtaaacatactataaccgtagttgtattaaaggattaagagtttactctaaatgaagaggacaaaagtgaatagataatacaaatagcaacatactttaccactttaggatttaatataatcttcctttataaatattaaaagtgacaggaatggtttctctagaaagtctatatatccgttatcatatttaatctatattttctttgcttgttcaaagtgtttcatagttacctcctaactgttgccttaaaatatagtactacggcaaattatatttcaatatgtaaaaacatagttagaatacaacttaaatgtgagcttactcgtttggtacataatacactagttgcgtggatatgataacggtgaatcttgttgaaagtagaggatcctatgtcaattactttgaaacgaattttacatgttgggaaatttttatttcctttttttatactagttattgtagctattgaggctcgaaaggaacttgcaacgttatccatccgtaatgctgtacatgttattaagaacattcctacaggtggtttttttttagctatcacagtaggtatacttgccgtctccatgatgtttttttatgattttcttatgatacgttctatgaagatagatataactatacggaaaatattccgtgtatcatggattgccaattcatttaacggtatttttggctttggcggccttgtaggtgctggcttgcgcgtcatgctttatcgttcttacgtgcaagataacggaaagctggttaaaaatatcgcatggatgactactgcatttattaccggactttcttttctgtcattcttaggattgatcggtgtattaaatatagggtttttattacaggagaagccttggctttggcctgctttacttattttcgcctttcttgtccctgtatacattggaatttcgaaggtgaagcgcaagaaagaaaaggatagagaaggaaaaggtagcacagctgttttatactctctcgtatcacttatagaatggttgtcagccagtattgttatgtatgttattgttttattgctgggtatagagatgagctttaggcaaactctaggtgtgtatgttatatcttccattgcaggaagcattagtcttgtaccaggtggcctcgggtcatttgacctcatttttttaatgggattgaagcaatatggaataagtgcagaaacaatcttatctgttcttttgttatatcgtctcgtttacactgtattcccgtttggaataggacttgcgtttgcagcattcgaaatgactgggttaacattgaagaaagtagaggataggccatttattgcccctactttagagacaaccggtgtcctatgggcattaagacgacgttttttctctacgttaagttcatggtctttagcaacgttgacagccttgacgggatgtatcatcattttatccgttttactccctactgcggctaatagagcacatgaactacgtattcttgtgccaaaacagctcatacagatttcatttgatttgtctctttcatttggagtacttcttattcttttgacaaagggagtttatcatcaaacgaaacgatcctattacatgatatgctttgtgctgataggtggggcagtgtttaatgcattaaaaggaatcgatttagaagaaacatttctactactcatcattcttgcagtgttttacgcattaagaacacgatttgtaaaagaacggatagagcttacattagtagacgtaggaagggctcttgttactttacttgttattttatatatatacgattcacttggaacctggatttctgaaataacaaatacattcgaaccgcattatgttgtccgaactacagctcaagtacatagaagtaccctattaaccgcaattgttgtgcctgtttttttattcggaggattattatcttttaaacgttcacgaacgaatatggtgggacagccagcttcttctgtcagtttacaaaactttttagagaaatatggggggaatgtattaagtcatcttgggtttctcgaagataaacgctttttcttcagtagtgatggacaagctttgattcaatttactcgttcaggtgatcgactcgttgtattaggagatcccagtggcaattccttatccttttcaaaggcggttggggagtttcttcatgaagcagacaagtttggatatacctgtattttctatcaaattgagagcaaatggatggggttgtatcatgactttgggtacaatttctttaaacttggagaagaagctattgtagatgtaaatacgtttaccctttcggggaaaaaacgagcgagccttcgtgcgacagtaaacaaatttaaacgagaaggttatgtgttttctgtgattccccccccttttacaaatgagttatacacacagttaaaaagagtatcagatgcatggctcaatggtaaaaaggaaaaaggattttcacttggctatttcaatttagattatattaatcgtgcaccagttgccatacttgcagataaagatggttatattgttgcgttttatacccttatgccggtttaccagccaaataaaatttctatcgatttaatgcgatacattcctaatgcccctagtggtgtaatggatgctatgctgattcatcttttagaatgggcgaagcaggaaggatatctctatttgaacataggaatggctcctctttccaatgtaggtatttcccctcattctttttggtatgagcgcgtagcagcagctatttttaataacgtacgttatatgtacagctttagtggtttgcgattttttaaagacaaatataagcctgtatggaacggcaagtatttagcctatcgaaaaactcgtacgctaccaggtactatgcttgttgtaacacgattaataggaaaacgaaaaaagcagtaaggaaatgaacctttactgcttttttcatttatctatattagacaggttattcagataatgtttaattatataaatatgaggttccctgttcttttggttaacattatacggaacatgcctattacataatagagataaatatagttttaaaagacgaaaatatgtcaattaaataacagggataaaaac

SEQ ID NO: 106 - DNA, 6963 bp, Priestia aryabhattai
  source 1..6963: mol_type = genomic DNA
tttttctatgactagtttctataacattttaatgactgttccattaggttttggtttaccatttataacaaaagcttcttttaagaaggtattctttgttgggttatttgctggaattttatttgaaactggacaattattatctgcattatatgccggttatacttttagatttgtagatattgatgatgttatatttaatctttctggtgccttaataggttacttaattctctttaaacttttcaaatttatatttaatttttgcgtaaaaaagtttaatttgaactctaatgcaataattaatcatattcataatacctaacaaatcgcactaattttagtacattattttgtaaaagtagcaaagcactaacattttagagattgctattttctatacaagattttcaattgtttttcagggaaatcaattgaaaacctctgcccttttctccttgtgctccaaatatgggcaggtttaatcatactgccaaactcaacatataaaaaacgagcttttatatattataagctcgttttttatatgtgttccggaaatccgttttatgttaactaagtttatattcgctgttaaagaaacaaaaagagaccaaatatttacttggtctctgcctaattatttctctggtttaatataaggaaccatttgtgccgtagctcctacagaagcaccacgaataaaatctttattttccaacggtttaaaattttgtgtttgccctgtcaccattactcctaaaattttaactttatcaaatgatttatctttatttgatgctaaaaatttctgaattgtttcatcttcggcatctgtattgtactttttaaggtttttggtaaattcattataagcatcttttggcgaatcagatggatcaaacccataaacaggcataccagcaggtcctttactttcatttgcaataggcgatgccatatacaaccatacaatgtttaaattattgggaatttgtttttgtatttccttcaatgtataaggatgattaaaagagatagctacttccgcaacataatttttcatttgtgagactgcattcaagtcatttttcacgcctccatagtaattcttaatagatggatgataaaaaattccaaccttctgtttagtttgtttatcatagtgatagagctctttaccataccgatagaatcctggcactaattcatttgtgtcgatatgagacctaaaccaatcataagagcttgttagtgtactccattggactacataaccatcaatatttttggaacgatttgttacaatgttaccttcaaacatcgagcgactacttattgcttgggagtcaatttgaatattaggaccagaaatttcattatttaaaaaaagtgcgtcatgaagtcttgcagtactcttggctgcaaaatagcttccagctctataaagggttgctaatgccacaagtacaacaataattgatatgaggacaattttaaaaacttgttttcgtttagctttttgtaaagctttttgtagtgaactctccattaatattttcctcctgcttttgagtgaatcaaattacgtgcacgatataacttctgctttacactatttattttaacgtctaacatgaccgcaatttcttcataagaaaaaccatagtaatactttaaaaagaacacttctttgtactcttttttgatgtcctttaacaaatagaaaatttcatttttatttaaaatggcatcaagttcacagtctgtatattgcaatttagaataaattttttctgttaaatagatattctgctgctccttttttcttttgaagtctatgtattcattaagtgcgactctaaaaaaccatggacgtattgtgttctctcttagatcacctaatagtgtatataccttataaaatgtattctgaataatgtcctccgcatcttctttcgtcgcacccttcgttattaacagtttgagtacttcctctcctaaatcgataagataggaggcgagtatgtcttcttttttcatcatttatcctccctatacttatacaacgaataagtaacaatgaatgtatacacttaaaggaaaaaatagaaattttttattataaataaaagaagcactggctctataaccaatgctccttctatttactacttataactgtgattatgttaactggatttgtatacgatatgtatataatttgaaattttttatttaaaaccttgtaatacgatgtatatagaattacaatgtattagaggtggttaattatggataaggaaattatgaaagggagtattgatatacttgttctctctgtcattgcacaaggttatacatatggttatgaaattgctaaaagtttaaaagataaaagtaatgacttatatcaaatgagcgagggtacgttatatccggctttgaagcgtttagaaaagaagggatatttagaatcttattggggagattctgtagctgcagcaagaagaaaacattataagttaactgacataggaaaagaagaactaaatagaaaaacaaacgaatggagacaagtaaatcgtcttattcaagtatgtacggagggattaagttgaataaagagttaaagaactatatcaagcatattgttgaacaaacagatatgtcagatgtagaaaaaagagagttagaatcagaactccaagatcacctattacttctcacagaagagtatatcgttgatggatatagtgaggaagaagctatcaaactggctactcaagcatttggaaatgaaaaagctttgagtaaagaattaaataaggttatttctccatataaaatgcctttaaaaatcctaagtggtgtgttgttttccttttacgtatttgttgtatggatgattttaataggtggaccaggaaggtcgtcagctggcgtatacaatccatataattggaagatgaatataaatattatcccttttaaatcaattatgtggtatgcaactggcattgatcatattaatttaagtacgattttatataacctatttggaaatatagctatatttgcacctttaggctttttcttaccggtattatttaaaaagtgtactaacgtaaaaaatgttcttatttattcgctcttagctagttttattattgaggttatccaatttgtagcacatagaggacaaagtgatgttgatgatattatcctcaatgttgttggtgcttatataggctatttaagttataaactattgagaactctaagcctgaaagctgtacaattggtttcttttaaaactactcataaataacatcaaagaaaaaagcagttgagatagatatgttcaactgcttttttattcctagaaaatggttttatgttaactacaaggcgaaaaagccatctttaggaaagatagctttttctactgataaatattaggttgtaaatggagtcctgaaagacttctcaagtagtttactcaaaggttgcaccagttatgcaatctttacatagcaatttcgcactaccctattgcgtaagtgaaagttttaaaaatgtatctatattttcattttacgaaacagatacggaaaagtatgaagatctttattaaaaactctcaaataagagagtttttttattttttgtataaaaaacacaactttttttgaaaaactctcgtctaagtaacgaatattggttaaaaggatggtcaagatattggaaaatacaaaaaaagaagaaatcgagcgttggtatgacgaccatagcgacgccatattaaaatttattttaatgctggtgaaagattatcagcaagctgaagatttggcgcatgaaacattcgtgaaagcttatctttcttacgattcctttcagcaaaactctagtgaaaaaacgtggctgtttcgtattgcacataatgtcaccatggattactttaggaaacaaaaacccttaagtcttttgaaagattttattctttctaaaacagacaatacacctctacctcaagagattattgaggtgaaagaaacctctctagaactgtatcaagcgttagaaaagcttaaagaagcccacagaaaggtcattttactacgaaaagtgcaaggattttctgttaaagatacagctactatcttaagatggtctgaaagcaaagtaaagtctacacagttcagggcaattcctgctttgagaaagcagttagtaaaggacggatatatatatgaagaaacgatttaattcttttagggatgatagttcactagaaaaactgaatgaggagttggtctggaaatcaaaccaaaaacaaaaacagaagcagcgacttttagaagccattgaccaattagagcgatcagaatcagtaaagcctggaaacgatatattacctataaaacaaaatcgtcttctaagaaatgttgcctactgtggcattgcacttgttattttgggtggagcattgattagttcagcatttgtttctccagcaatggctcaagtagcctctaaaattccatatctgggccagatttttaaaaaagagcctgtaggtactgaaattatcaatacgttaagagaaaagggttataaaattgacctcttaggacagacatattacggaggcagaaaacagattgaggtgcgtgttggtggatcggagaaatacttcaaagatgttaaatctgatatatatcagattacaaaagatattttagaggcacgaaaatacaatacgtataaagttaaagttacatggtacgattcttctcaagacatttacaaacccgatcctctccatgaaaaatacaataaaataagcgaagaaatcaatactgaattgaaaaaacacgattaccatgtgttatctgctagtttagggggcttcgattcagaaatgagagtagatttagaagtatctgatactgaaaaaaatcttgaagatattaaacaagtaattaaagatgttcttgctaacaataaggaagaaaaaatgcctataaaggtatataaaataaatctcaaaaaacgtgaacaagaaggtagatggggaaatatccttgatgatgttggtgaagatttattaggaaaagaggcatatcatgtgaagatggtcgggtactctgttcaccctgaaccacaagtattcatctatacctcattaagttattcggaggagaataaacagtttgctaataaacttgaaggagttattgatgaattccttcaaacagaagacatgaaggtcaaaataaaagaggatccttataaaattattatttacgctaaaggaaagaaaaaactaaattaaatagattggttactaccctaaggaataggcccactatttctctgggtatttcttttttatctatatcaaacgaagtatgggctataacctactatgtataagtgaatttttctcaaaaatagaaaactattttgtttttgaagcgtctaattaacgatgtcaacaaatctatatagaaatggtgttttacaaatggaacgtaagaaatcagaaagctttaattatgggcttgctttcacccttttgttattttttatcattagttgtgtcgctatttttaatgcccaacaaacaggacagtacacaacaaacttcgtcgttaaacaagtggaatggtacattgtaggcggagtcattatcttcatgatgatgaggcctgatgaagaccaattgaatcggatcacgtggtttttctacggttttactatttttattcttattttgctaattatttcgcccacaagtattgctcctcttaaaaacaatgcgaaaagttggtttgtgctccccggtattggttccatacagccatccgagttcatgaaaatctccttaatattagcgtttagtaaggttattcaacaacataatgagaaatttagagtcagagatgtcagaagtgatttgctgctgattggaaaattgggtgcaactctttctatcccgatacttttgattatgcaacaacccgatttgggaacagcactcgtaatgatttttttattttttatgatgttatttatttcaggtgtcacgtggaagctcattcttcctatttttacttctatgggagtagtcgcttctatcattttatatatggtactgaatcatgcggcaatcctagaaaaatatcttcatttacacccctaccagtttgatcgtatttatgcgtggtttgatccagaatcatatgctggaagtctttcctacaactacttgcaggttgtaaaggcaattggttcgggttctatatcagggcgagatacctcccattatgctgtgtatgttccggaaaagcattcagatttcatttttagtgcaattggagagaactatggattcgtgggaacaagtttggttctccttttgtttatggtattaatttatcaaattataacggtagcatttcatacaaaagataaatattctacgtacatttgtacaggaattatatccgttattttcttccatgttcttgagaatgtaggaatgtgtataggtcttctacctattacaggcatccctttaccttttataagctatgggggcagttctcttatgagcagcatgtgtttaatcgggctcgttttaaatattagttttagatcaaatgtatatattttcgatcaaaatgagaggtaactagaaatgaacaaagaagtgaaaagtaatgaactaaatatgacgtctcaaacacgtctacatatattcaaatatattttatttgtctcttttggattcttgtacattggctttgttatgtggtgtttgtagcctattaacctggtccaaatattttaagtacaataagttaaaaaagtaagttcgatttataatttcataattaaatgaacaaaaaagaatcctttgcaaatatgcaaaggattttcaaatttattgga

SEQ ID NO: 107 - DNA, 6929 bp, Priestia aryabhattai
  source 1..6929: mol_type = genomic DNA
aatatggcaaaggattcttttttgtgtaagtcattctaaatgaaagttgttatggaatttatgtttaattattgtctttttaataattcatttaaaggtaataagaaataatagtgagttatacaaagtagagatatttgttttttaactacaatgaatgtttaggcgaaacacaaataggcgacttattccttctattgagaaagatcaagtcacctacactttttttcatccatcattagtaatcctttcaacatttaaaatttattgattcacatgttcctgttttaactaatttactaaattagtctagcattactttagcgctttccattttaaacgtaaaagtgattgtagtttaagaaagtaataagacatagtacgatgttttacacacttattaacgaagcgatagtataattgaaagatcttgtaagtgaaattcatgaacattaaggagtatcttatgaaaaaagcaggtagcatccttcttcttttcctgtgttgtataaatcaaagggttgaggctaccaatcaacctgtagtagagcctatacatcatgaaatctacgtctctcccgcaggaagtgatgaaaatgaaggtactaaaaacagtccctttagaactttgaaaaaggcaggtaaagtagctaaacctgggacgactgttaatattcgaggcggtgtctatcacgaaaagttaatgattagtcgttcaggcaataaacaaaatcccattatcttcagaaactataaaaatgaaaagcccattattagtggaaaggaaataaagagtggttcttcagatggagggctagttactataaaaaacaagagctatattacaattcaaggtctaaatatagggcatttttctactttgaaagaacaaaatacaccatgcggtattttagtagagggaagaggcaaaggtcttcggattattaacaatcatatttttgatgttaagactgcacataaaaacggaaatgcacatggaatagctttttatggatccgaagcgccacgttcattaaataacattgaaatatcgggaaacttacttgaaaacttaactttaggcttcagtgaagcgctgactctaaatggaaatgttaaaaaatttgtagtccatgcaaatacgattcgtaacgttgataatataggcattgatgtaattggcttcgaaaagatagctcctgataaaaaatttgatcaagctcgtgaaggagttatcagtgaaaactctatttacaacgtaagcagttattccaacccagcctacagacatgaatattctgccgggggaatctatgtagatggaggaaaggatgttgttattgaacataatatttcaagtcataacgatttaggaatagaaattgcaagtgaacaccacggtaaacaaactagcaacattcaagtcgtacgaaacatgatttatgagaatcgttttacaggaatttcaattgggggatatgatgaaaagcgtggagggacaatgaatacttctattacgcaaaatatcttatatgggaacgatacaataaaaatggatggcggccagttattaatgcaatatcatgcgattcataacatcatcaatgataacattatggtttcagtaaaatctaacttacttctagccaatcttcattactcaaataaatataatgagcttagcaataacgtatatctaaataaaagtaggaacacaacgaatcgatggatatggaatgggcaagaaatagaaagttctacgttcggatcccacaggttttttcaataaacttttcttttaaaaagatactcttgactaagctttttgttgaggttctaccttagactagacaattgttcactacattatatgctgagtatacttttaaccttttagaaaatttaaatcatattctttaaagcactgtagcagatttttatatacccttggtgtcataaggtttcgcttaggaatgcaagtcaaaaaaatgtataagaagcgcaccttttatacatatgcgccccctctaaaaatggtgttttaagagatatatcacattatttacttgtagttatatttagtactttataattgtgaattctgataaaaagctatctcgcttgccaatgccagtgggatttttatttttgctacaattctgagaaaggggtatttgatgtttataaaaacaatactaacagcaattataggaggtattattttttctctaactaatgcttactaacaaataacaatacgaaaggagcaaggggctcttataaattatgaggcattgcccttattttgtagagattcccgcatagatacccatacacttgcctatccgacaactctgcatttactaaatcatcatctccatcaaggtatggtattattattttgcgaaaacattaaaagggggcacccaatgaataaaacagaccgtttgttagccattgtactggagctgcaacgtaaagaagttatacgggccgaaaatttggcggctctattcgaaacgagcgtgcggactatctaccgtgacattcaggcgctgagtgaggcgggcgtaccgattataggagcccccgggagaggatactctctgatggaaggttattttctgccgccaatcggcttcaccgtaccagaagccgtgagcttgctaattggaacggactttattgaacaacaatttgatgatgattatcgtgccagggctcaagctgcccgcggaaaaattgaggccattctaccgaagaacattcttaatgaaacatctcgtgtacgcaaggcaatgcgtttgctcatttctgataaacaggtcagggagtcaaaagaaaagaaatatctagaaaagattcgtggagcaatattaaacgtgcaaaagatcagcattcgttatgcaaaaaaacttgaagattccgaaggtaatcgtcatagtgttcgtacggttgctccctatggattggtgctcattcaaggatcatggatgctcgtggctcggtgtgatctgcgccaagaaattcgtcattttcgcttatcccgaatgacggaacttattagtcttgaagaacgattcgaaccaccgacgcattttaacttaagcgagtatactcctccggataatagacagttgctagttcatcttcaatttaaccatgacattgcggataaggtgaaggaatcgaattatcattacatagagggtatggaagagcatgaggatggattgcatgtgatcttacgtgttcatcaactggacgaattgttgcaatgggtacttggctggggagcgagtgtggttgtgttggagcctgaatcactccaaaatcgaattcgtgaagaagtaaaaaaaatgttagaacgctactgacatacagttgtcagtagcgttcttttataattagagaaagtaaaaataaagggctgaaagatacatgcggagtatgtcttgcatcaatcgattaatacacccaattaacatccacggaaattaattcatttcactttggatcaatggagcagcaaggcatggaaggatgatcatagaaccagcgaacctcagttaatacccaaagtagattacttgaaactgaaaaagtaaacctttaaataggctgtttaattcttgagaaaaggaaaaggttctaaaataattgtcgttggaacttctgtaacctattttccacaaccactttttcccttactgaagcttcgcgggttctagcccaaaatgatctgatacgatatcgtatcatttattataggaaggatggtattttatgaattttgcttctgtacgcattattaccgacgatgtggatcgtcttgtcaagttctatgagaaagtcttaggtgtttcggcggaacgtcccgtccctgtctttgccgaactttttgtgccatcatgcaccttggcaatcggccactctaagacagtgccactgttcggcgctggttccgcagtggcggcggacaatcgcactgttatcattgagttccacgtccacgatgtcgatgctgaatacgagcgcctgaaaccgtttgtcaatgagtgggtaaaggaacctactttaatgccgtgggggaaccgtgctatgttgtttcgcgatcccgacggcaacctcgttaacctcttcgagccggtgaccgaagaagcaattaaacgtttcaaccgtagaaattgacaaacacttagacctattgaaaagatgtaacctaagaaacataattgttattcagcaaaagggcgtaattctacatcaagaattacgctctttgtttatgcatattgctaatataaaagacttaaattaagaattttttttgagttttgagcaaactacacaacatggagagtttccttttataaaccctactctctccccatacacctaacaaactacctcgatacctttccaaacggcttaggggtagtttgtttttttgaaaaaaacaagtcatagaactttaaagacaagcatataatctaaaaaaggacccaacaacgtccctatgaattgaactagcagataacccatgaatacatttattcgtgggttatctgctttttatatgaattaaaacatcataaccagagcaaactattaaagatgttttcaagaaaatatcgccttaaaaataatggtaagcacgacagaaaaactgtatataatatacaaacgtagttaacataatgttgtttctaggaatgaaagagaaggttaagaactatcaacctagctcttaaccttctctaatgttctggaatgattaaagcagatggtaattctatattacttaaaaatagaatatggaactttgaagaaactaataccgttagcataaggtccgtattcatattcaccaaatataattacaatgccaccgttcgtgtaataaaactggtcttgagttaagttcactgatttgaaatcttcaacccagaattgagcgccttttttattacgagcaatcatttgttcgcggatatatttatttactttatctaattgcttttggtttgtaatgacatctttcaaactaagttgtttagccgttaataaattataattgtaagtatcaatccaagtcataccatgtgcaccgccagagtactgatcattcgtaacagaaatacttaaaatattatcttgattgtaaggtacagagtatttcatattttgataataaggacctggtgaccaaccgttttcgctgtccttcttttcctgttcttttaattctttatttgcttgctgagtttctttagcaatgtttaagaattttctattaaaactagcctcaaatggtttattaaaaaggcctgatgcttctggatagctaatattgcttgctaatgatttttttgtaacggttattcccaaggcctgtaccttgtcactaggtgctctctcatacttgatgctagacgatttttgagcatataaatctttggatacaccgtaaatcccatcgtattttccagaataagaataaacacgatatatttgatcttttgatacttttttagctgctactaatttattatttttaatattgtacaaactagtatcctttaacattgtaacgcgccctatttgtcctttgacgagctcttgatttccccacattactttggcttctgcctttgaatatggaacaagaggtgagaataatacagcaaaaactaaaatagttgctataactttcttaaaacctttcataaatgaacctcctgaaatgttttgtagggttttgattcattctacagaacccaatggaatataacacaaataacagtaaataatgattatttatatttaaatctagttaacataatcatttttttcgaacaaaagagggttctggtacaaagtacattcaataaatggaaatagtacaatttgtcctatattttatagacaacactttacttttaaaagttaacagaggaaagaagaacatgttttcaagaaacagctaatatgcaaaaaatcatattctctcattcattaaatggatgagagaatggtgattttagaactctcttacttgttcgttggcaacctcttgttattttatttcaattgccgaggctttgttatcccaatccgaagccatattagcagttttaccataccaatccgagtgtctaaacgaaactccttttccgtatccttgagatgaagtatgctcccagagagttgttgaatagcttgaagaaggtgatgccgtgcttaaggacgaaatcctgtcattccagttagaaggcaagtttttaaaaccgtctctccaataaatgtactgacctcctttatttttagactcgtagaaatccgtacaacaagaaccactacccatcgtagtgactttgttttgaagtctctgtttatccttttcaataaacgcgttcaaagcttccctgctcgtaaacccgtatgccaaccaagcgccctctttattctgtttaggtagaaccatggttacttttatatctttgttagaaatgctattcattttagcttgagaatctacatcttttccatcgacagttacataatcgaatgttttaattgtatagtctttttctgcatacgcgccgtttgcaggtcctgttgtaaatcccatcacaacaaaaagaaaacatagtgcgaaaaggaaacgttttacttgcaagtccttcactcccttattagttacattttgataatatggttgaaaaagcgaaccggtgttaatatccatgtgtaaaacctagatgaaatatctaatttttcggttgaatgttatagctagttaccctaaatcccctataccctaaatataataaaaatttgaaatgtaataaaatgctaaaactactaaatttaattttagttaaaagtgagtgtttttaacattaaatgtaaattaatcgcgaaac

SEQ ID NO: 108 - DNA, 6906 bp, Priestia aryabhattai
  source 1..6906: mol_type = genomic DNA
ggatgaatggaaagcgttgcattggcagccagagaatcaagcgcctattttcccttccgttattctgattacacctgttcgttatgcggtttcttcagaccatattcgtattatacaggtaactagtattcatgagctcatggagaaatataaagggtcttccaaacagccaagaaatacaaatcaaagaataccccccccttcttctggtggaattaaaattaatctcacataataattaagaacataaaaagctatctcggcattagcagacgagatagctttttataggattgctaattataaagtaccaaaatataaccgcaagtaaacgatagcatattcttgccataatggctatttttgtatggatcgacatatgtataaaaggtagtctttttatacgccttttcttcacacacacctggagagatcaccgtcatatcaaaggtgtataaaaggctgcatatccgattaaaggcatccacgagagaacccttttcctgtaagggttcttttgctttcttgcttccttgaagagtgtttatgttaactagctttgcatacggtatacattaactacaaccactttataagggaaatagtaattgcataatatagtcataaaacagccctacaaatacgatacagcctaacattaaaaaagcactccaaagaaatataaaatactttttctttattatgtagcaatataggcttaaaaacgaaaagacaataaataaaaagcccaaactaacaaatagccatccacctaagctatgattagacataaaaaactgagcttttatcaagataatgaaggttaagatcataactaaaataaaagctgctacaaaaaagttaaaaacttttaaacgaatattgttcatagatagcttcttctgtaactgtttatctgattttattagataatccaagctaatattatatgcttcgcttaattggacaaggttaattatatctggaactgatttagatccagctgaaggtggtaaacggggccaaattgtaaccttttggcacgattgggaagaacgtcaggttgtatccgatagtttagagaaatggtttcaccaaattgtaacacaccttaaaaatggtacttacaagcttgttaaagaagatggagagcttatgtttaataactatggctttatagaagaatagaaagctttttagcttcttacttatttctactatatttcgacttcctataatacctgttatgtaaattaattttattaaataataaaaaaaccttcatgttctaatgcagtaggttttttttgttttttacaaatatttatatattgaagaaatcattaggttgcttattttcatcaatttttttaatagcatccattacccttttcaatacttttggagatggagaataatttttttcattacataaagttgaaatggttgtctttgatacgtgacttttttttgcaaattctgtttgagtaaccccattcttgtccaaaaaacgtccgaatttacttctcttcggatttttccaccatgacacaatcaaccactcctttttatacacatcctttcctgttctgaattattttatacgattctggttcattttgatttattttggtcataatggacaggctaattccatatcatctattaagagattagaatactgcataaacataacgaaaaaatttaatacatatatttagaagcattcagaataatgtcgatatttttgtcatagacatatagcatgaatacagttaagaccgccttatacactaatacataatgggcggtctttgttgtgaatattcctttgcaagtgaaaagtttaacgaaaaagagactgatttctatactctagaaaccagtctctcttatatttgaaaacgaataattcccaaaagcgcatatcgctttttctgcgctttttagcgctttgaacgttgttattatagggatgtgtgcgctttttaatccttcccaaaaagcttctggaacagtccttttttcccttctacttgtgaagcatttatttgttgtttcagctctttaatttcatttaagatgatatctgtatgttcatttttatagtcatctttattatcatcgttaatgctcgtttctattgcctctttactagcagcaacttgtaattgcatcttagtgatcgcctcaagaagtagtttatctcgcttttgcatttcttctaaaaataaagcatctcgtttggctatgaaatcactaaatttcctttctaaattatcaatataattatctaaatcactcttagatagcgttatagagttctcatcttcctctttttctgtaatagcgcttatcgctttttctgcgcttttttcctcaataagctttgttgctacagcctttgttgcgctttctaaactctctctttgagccaaaagagtctttaaatttgcaagtgcgaaaatctcgcgctggtaataaatacgttgtcctttatggtttttctcaaattcatacccatgactctcaatcatagaactccagtttcgaagggtcgcagggttgatatctaggtgcatatatacttctttagcgaatacaccgtatttgttgttcatattcttcctcctgaatacataatatctaatcttattctctatatatgtatagaatcctttttattatatcatagcgctatttgtgcgctatttagtttaacttgtgtttaacttacaagaaataggtttttgttcacgaataataagttcaactcaagttcaacacaaggtgagcttgagttgatttagtggttctttatttttaaaaggtaaaatgcctctgtatagaataacatacagaggcattttaagattattatatatttgtagtatgatactcttttgaatacggagatctataaacagtagtttttagttttaaatgtacttctttaaaaatttcagcaatttactttcatttgcactatcatgctccaaagatgctattttttcttgaaaaggaattgtagtgagattctctaataattcagttggatgagttaaatctaactgaattattccactattctctgttgagtatagttttatatcaaagctgttcttttcataaaaggagattaatctagagatgtgaccagaatcaaaatgagacaaacaccccgttattcctaaataacctttgttgatagaatgtgtaattaaagcgcgcattgccactgatccatagcctttattcacgccacctggatttttgatgtcatgaatgtacacactacacttttcttttacttcaaagtaaattatacataagttatttgcaggtgaatcatgtaaaggtgattgtcttacgtatatggttccacgttcatcttccctctcatgataataagggtatactacctgtccatttttttgcgaagtcttcattcatagcttccataagaaaaactcctttgtataaagattattttcttgaaaaagaaccttacaactaggttataaactatttttgataatcataaaccacagggactttgtccattttcacggttttagctacgatataacgacgatagccatcctttaaaaccttcgtttctttctcaatcgttaacggcttgtcaaggtgtcctgtacgcttcacaaattcaatgacttcttctgttttcacagggtttggacgtgtctttaagaaggcttcaggaacgataatgtcatcaaaacttatgacatcctttgtcccttttggctgaataggttgctgcttctttggttgtgcagcctttttctcttgaacaggtgtttcgttcacttctggctgtacagttttcgcttcttttgctacaggctcttgtttttcttcctgcttagtagctgcaacctcttgttgtgccttagaaacctcttgtttcgcttcttttttatcgtttgactcattagcttctttatcgtttttattcgggagaacggtgatttgaaagcagatgataccaatttccccagggcactcgtcaatgggaatatctaacgttggttctccttgaactaagattttttcatgcataatactcttttttgtcagtccggttttattaaaggctttcttggcaacaaacacggtatacgaaataaaggtactcttttttagacctttaggcgcagaaggtgaacctttttcacgcatatcaaaggcaacgtagcgatcgtattctcgtaatggacctgtcgcagatcctgttagggtcattttatggggcattgtgaactcctcctacatagatttatatattaattatttagaagtatgttctaaataataatactcttattaaacatcagcttccaagggatttcttcacgttttgattgcgaaacggtgtcctgtaattgggcatgtttgtgtaataaagcttgttcctctggtgttaaggcttgtcctatatcttgtttaagctgcgccatttctaacgaactgtacgtagtactgtgctcttggagcaaggtttcttcttccggtgttagttcttgccctaaatcttgctttaattggatcatttcaagctgctcatctagagaaagagctgtatcttctgtacactctttttgctcctgttcagcttgtaaccaagcaggaacgatttccttacggatgatatgtttaggcataaatagagctgtttcagcttcagtatgtatgtctgaatcagatgatggttcttctgtattcccttttagtagattggtaaattgattataaccaatttgataaacaagacgacacatttcatccagtgataggggagtacccttatgattcgcctcatggacatatttatctaagcctacaatggctgtataagcgacttcatgtacttgctctttgataatctcaatctctgtatctcgttttactgctttagctgcattttgaatacgagtataaaaatcttttagttgatgaccatatttccctgcatacacttgatttacttttttaggcacacctttgatataagcgaatgcctgtgaagcagatattaaatgattatttaaatgatttttaggtaaatcaaggttaataaagggggacgatgctttttcgtcctcaaagcttggtgtatcaacgtttgcagcactttctggacttgtcacaggagttgtcacaggagttgtcatttcttcttgttgaagcgtttggacacctgttgtgtcatggtcaaaaaagatttcctcacaaatttgatcaaaattcgtatggcttttaaggataaatacatagctatcaggatgagcacctgttgcatcttctttgatataacgtgccacaagcataaatggtgtttcctttaatgatttcacaaaacgagaaacggtactttgagatacatcaaacttttgcataagtgttttggagtgaatcgcttgaatacctgtggcaacaaggttataaatcacgtaatctaacatttccatccgttttttagggaatactttatgtagggcctcttgttgttgtttaaagtatgtacgaagggtttctataaacgcttctttctttttacgaagggtcggtgtttctttccataaccatttgaatcgtccgttgaaggtatttacatcttctaaatagcaggtaaagagctttgtcatttgttcatcttctcctttaaggaacacaaaaaagacactgtctcccttatgaaaggaaaacaatgtctcgatttagatgaacgaagcccttgaaatagatgtcaatttcatataaaataaaaccataagttttattttataaaaactaactctattaataagagacttcgacaagtgttttccctaccgtttatagggggaacggtttaagagtgtgtgtgcactacttaaacagttggagtcttttttctatccgcacgtttttgttaattcaattatagcgttaagtcgtctcataattcaataaaaaattagcaaaatatatcaaaacaagtatatttcgctacaattgatcctgtattgctgcaggaatcacctttatcatatatgagttttttagagtaggggaggggtatttttttacccctcctcaagtatttgaaagtatgttataatgctacatttttaataacgtcgaagatttagtgattcgtacaatttcaatgataatcgcaaatggttctcctgggtagggtgattttttgtagtccttttttgtaaagagggtgagaaaaaatcaccctatgcagcatgctgaaaatatgataggagcagtttctactccatgtagaagctgcttttttgttgaattgtgaggggtggaattttcctatatcattggcattttgtacatacttgtgggtattgttaacgccaagttataattttttaagttccttttttaaagtgtttttcaactcaatagaaacaatttctgtaatggtttttacattccattctttcttttgcttgtaactgaatttgatacaaatgtcagatatagcaccatcaagatatctcatttttgtttaagcatataactttgaatgaatggatgggtttcttcatcgagtgaaatcattcggcgtgttttattcatcatcttcatattctccgattaattcttttaacatatcattcaggttttccattcaagttgtacactgtcctatcgtcttaatgtgatcccaaagcaaacttccaagaggttcttctgggtaagagtattgactaaaaatagctaatgtgtgaacttgatttttttaaaagctgctgtcaggattagtcatgtttctttactaactcaacaattttttagactgcagtagaatcaatatttcttaatttaggttctatattttatttgaaactcccaaaataatagtgccctttt

SEQ ID NO: 109 - DNA, 6830 bp, Priestia aryabhattai
  source 1..6830: mol_type = genomic DNA
gaattatgtgcaagatatatatttgttatccaattattgaatatattgtaaagtaaattaattgctttttaggatctggggcatgcaattaagcagcctggtaagcggttgatgtgaaaattgtaattcagcttacttcaaaagttccgtaaaaggtggcgttttcttacgtgaatgtcgtgactgtggcatgaagaagagcatctaagaatagaggattatatagaaaaaagagaagggcttacccttctcttttttatttgcctttatttacttatctttaggatctggaatatacaattttttgtgcttacactgatcctcattgcgttctactttagtccttgggacatctttgaatctctcgtccatttcatgaaaaatataagccactaggccaatccccaacatataaaaaaccattacttcttacataatcagctaccccttacctactgcagtaagggttcttttttatttttcgactggacaggcaagcatactgaagtagctacatagtatctaaagaattgtaactccattccctaattagtatctagttcagtatcgttactgcgttaatacaagctgtatacgcctcatgaagccttccatcgaacctgtaagggagctgagccgaagaggcgaagggggcgaccggatgcggggagctgaaaaaacaggtacggaaaaagcaaaaaaattaaaagagtgaaagaaggtatcaacatgagaaaaactcattatagtacttttcaaaaattctttcataaaccatcctttaaacctttaacaaaacctcgtcccttcagggcttattcctttgttccttttagtccacttgccatgcttgaccccactatcttaaccataggaggcattatcttaggaattgcaattattgaacggatattagaacgttggggtgtcattgatcttgtagatcagtttgcaagaataatgctctttatcctgcctgtcaccttttatggggccttattttacttctttgcgacatttatgttttgaggagggtttagatgtttgagaaactaaaattgcgtggaaagcttattaaagcgtttcgtacagcagaaatttatcgggtcataaagcgtggggatcgtacctcctatcaattcccgaagatccatcggatcgatcatcagcacacctacactcggtatgcgttttccttattgaatggcatcgatcctgagctgttgaacaaaaagagatgggcattacgacaagtattaggcagcaatattgaagtaaatggcagtttaaagaactttagtatcaccgttcatcacaaaagcctacctaagatgcttacttacaagtatgaagttattcatcctcatattgagaaaatggagcttcctatctgtatcggtcaagatatctatggaaatctcatttcatgggattttgctgatttagaaaccttattaatatctggcgaaattggcgcaggaaaaagtagcctcatgcgtgtgatcctcacaacatgggtgaaatatacatcgcctgatgatttgcgtttagtcttagtggaccttaaacgagctgatttaggattatttcatggaattgatcacgttgatgcactttgttttgaagccaaagacatgcggaagccttttgccttactgcgagctgaaatgtatcggagaggcgatttattgttagagcatggggtgacacatataagcaggctaccttttaagctgcctcggattgtcgtagttgtagatgaaatgagcataatcaaacgagaaacggatcttgtggagatgattcaacagtttgcgagtcaaggccgtgcgttaggtgttcataccattattgcgatgcaacgtcctgatgcggatttattaaattcagcgttaaaggctaacttacgagtaagaatctccggaaggcaagctgatgccacgaatgcaaaggtggcaggcgtatttggggcagaagaaatcgatgccgcagccagggggcgcatgaaaattaaaattgatgacgtgaaagagtttcaagcgtatttcttagatgaaggagcttgtaaggaaatactttcaccttataaaacactcgtgaaagatcctgagccccaactcgaggtcatgtcacagtctatctttggattattagagaaggaggaaccgcgatgagcttccgtttatctcagcgtgataaagacatcatcggatttatcaatcagtttcgggctgtagatcgagactcgttggttgaattgttctttaaacagcttaaatcgcccgtaaatgcatgtaatagtgtcatggtacgtttatatcgattagggctcactgatcgtacacagcagtattatccgaccgtctatttgcccgtggatgcaaaaatcaaaaagaactctcaaaaaatattacatttcctttctatcttagatgtgtataaacaaatgtgtacgtatagcacacctaaacacgtcattgtagaagataagcccaccggacgaaaaggaggaattgaaccggatctgttttgtatttttaaaggatctcctttttggattgaaatacaacgcaatcagtattcagaacagaaaatgcaagcgaagatcaatctctatgaagagtttttcttttcagatgagtggaagtcgttgcactggcaacctgaagaacgggcacctatcttcccttctatcattttgattacacctgttcgttatgctgttacttctgaccatatctgcattatacaagtagcaagcattcatgaattgatggagaaatataagggttcttctaaacaaacaaaagaagtaaggtcaagaaccacatcctcttctgggggaataaaaatcaacttaacatagagtgctagaaaagtgtttgtaatcacacaaaaacaggctacctcaaaacaatgaaaggtagcctgtttatacacctttcatccgcgcatttgcaaagggttctggaaacagcgtaatcattaacatagaaagaattagataaagttgaatcaatccaggcgtctgcaggagacgaaactgtcatacgcggagaaggcaatagatttgcgtactggtatcgaatggagttaattcgtataataaaagagaataagtagcaataccaaggcaaccgaggaggtgagcgaatatgagtctacgagaagaactactggcgcaggaatatgaggaaagaaaaaagccgagaggattcgtatactttacagacgctgacggacaagttgtcgctaagacttgccgtgaatgcggcgaattaaaacatgcaaagaactatcatcataaaagcgatggatttggtcaacttggaccatactgcaaaggctgcgtttctgttcgcgaccgagattattacattaaaaatagagagcacgtaaaaagagttaaaaatgcttattaccataggaaaagatctgagcaactttcttttaatttatttggaaatagtgagtagtatcacggcggccaataaggtcgcttttttgtttacatactggtaaatttctagaaaccgccattaaaaatgttagtgacatgtttgagcaccccaggatgtaacgagtagcgatttgataggtaggaacgttctaaacgcgaattaaaaacaggcttttaagctattaataaagcctgtttttatatacttggagaaacaaaccctctaaaggaatgaaaaggaattgtaataagcatatttaaatatcccagaaatcttcgctcttaatattaggatcaattcttcttaatgcttgtaatatctttttcattgttctttgtgtaggcaatctttcggagttgtttactaaatcaccaatcgtacttctacctaatcctgactttcttacaagccattcctgattaatgtttcttttgtcaatccatttaccaagtctagttcgcctttttcctaacccgaacatgatagatacccctttactttttattactctagttatgtccaaatttcactaaaaataaaacattaaaaatgagtcatagtggacaagtcagtaccatatcctttattaagacatcaaaataaaatataataaggaaaataagcagaggcctttaaaatcctttagaataatgtcgatatttttgtcataatcatatagcatgaatacagttaagaccgccttatacactgataagtaatgggcggtctttgttataggtatgaatagattttgagtataatggaaaataaaaaacagactgcctcagagaacgtaagaacatcgctaacaacagcaattcataaattatcaagccagaaaaaacaatttaatcagtgaaggagaaaagagaactccatctatccttatagggtcctctcctttacggaataaaacaatagataatagtaaagtataaaacataacattttcaagcataacctaaatttctatgcttctatagagctacctttcttataaaaaaagctgtttcacaaaattaatgtgcaatggaaaggactaatatgtgggaccagtaaaaacaatcacaaaaaggtaggatttattgaggtaacttctttttccgtagtcggtgtaatctccgttgaattccatgagctgatctaccgattagttggccaatttcttgttgagtacgaccttcttgataaaacatgtaccatagacgggcatcttcctcttcagtccactttttattttcatatttaggccgattaaaataatcatattttctttgttcctttacccagtcgggttctggaataagagtattcagggataccttagaaaaattaatcagttgcttattctgttgtgcccacttccaaaaggctgctacgtcaattcctaaaaatgttcgtgtgtttgctctcaagatgttatagggcaattctcttttctgaatccagttataaatggtatgaacatcaacttgcaggcactctgctagttcatatactgtaacatttcccaaatgagctcttacgccatgtatacctaaacgatataatctagactctaatgcttgtatacttcgctgtaaacgtctagatatttggtcaagtgacttaactccataccattttaccaagtattcatcttctttctttgtccatctacgtaatgacgtttttcgtactaattttaacagtctaattcgattcgcaacagaagaagggctcttgcctaaatggtttccaatctctcgattgttcatcctattaatatttacttttaagaaagtatcttggtcaggggaccattttttgcgtatgccattctggttgttgcgaagttgtagtcgtgagacccttttattaaccgattctttactacgatttaaacattcaccaattttttggagtgtcatccgcccatattgttcttttagaaataaatcttcttccttcgtccacagtttttgatttttagtcactatatctccctccaattcgcgacttagatgtatagaaagctacgtatagagaatagtagtgaagatgttcatcttacctcaacagagattaaattctgtttcatttacctttttatccattggacataggttatcactttgtttagtctgtttttgtctaatttgtcagtgaaactataaacaatagttactttttctttgagtttttacttttgatactcatatacaacaggaacttgatccattttgactgttttggccacgacataacgacggtagccatcttttaagacgtttgatcctttttcaattgtcactggctcatctaagcgccctgtacgcttcacaaaatcaatgaccttttgtgttttctcaggatttgggcgtgtttttaaaaactcttcaggtacgataatatcatcaaagctcacaagatcctgtgtgccttttggttgattcggtagggttttcggttttggctcagcctttttctcttgtacaggtgcttctttcgcttctggctgtaccgtttctgcttctttcttctgttcatttgctacaggttgaggaataagttcttgtacttcttcctgtgcagtagattccgtgttcttttgggcttcagaagacgcagatgcttcttgtttaggttcttttttcgcatctggctgattcttctctttatcatttttatttggaagaaccgtaatttgaaaacagatgacccctacttcaccagggcattcatcaatgggaatgtctaacgttggttccccttgaattaaaatcttttcatgcatgatgcttttcttcgtgagccctgttttattaaaggctttcttcgcaacaaacacggtatacgaaataaaggtactcttctttaatcctttaggcgcagatggtgatcctttttcacgcatatcaaaggcaacatagcgatcatattctcgtaagggtcctgtagctgatcccgttaaggtaattttatgtggcataattgtttcctcctacgtagatgattagttattgtttatttagaacacagttctaaataaacagaatgtattaaaacatcagcttctaaaagatttctattcaaaaattaggaagctgtgtcttttaactggttatgctgacgcaaacattcttgttcctctggcgtcaagacttgtcctaagtcctgttttacctgagctacctccaacaagctatacgtggagctgtgctcctctagcaagttctcttcttctgtcgtgagctcttgccctaaatcttgctttaactgaatcatttcaagttgttgttccactgtaacgtctgtttcttgtttaaggtggtcttgctgctgttcagcttttaaccaatctggaacgagttccttacggataatcct

SEQ ID NO: 110 - DNA, 6828 bp, Priestia aryabhattai
  source 1..6828: mol_type = genomic DNA
tacagcttatcggaagatcatttataaattcttggcaaggtttttccattcactcaaatacattttatttcttacttctaattcaacaggtagtctggaaatgaactctaaactattcttatctggatcatcaaaatatacgactgcatgcgcttgatcaggaagaacaattggttcaatcggttccatatcaaagctctttcttggattaatccctttactctttaaccagtctatggatttttctaaatcatccatatcaacttgaaatgctatatgtcgaagtgatggatgatatttagtctgatactcatcaccttcccacaaacctagccaactttgaccttctataatccaaaaaaacgcaatagaaccataccttttgtataattttaaacctaaggattcataaaataagattgattcctcaagattactaaccggcaaatgtgactcatataatcccttaatcataaaaaatcccccactccattcatcaaaaataaacactctaattttatcatggatgttgtataccatataaaactctagttaccataatgttttttatcgggatttatctgtatatacgtaaaagccatttaagataggtcttaaatggcttttacagtggttatgttatttcatttactcatcaataattatcgtatcagcgtttatatcctcgaaacaaaggtttactgttctttgcttcgctctggttctatgtacggttccagctggtataagtaacgtatcattaggctttaaaacagcagtatccttatctttaaaatcaattaaaagttctccctctaaaaccataaaaagctcatccgaattagaatgatagtgccatttgtattcgcctgaaaatacagctatacgaaggcagtgattattaatattcgatacaggaaaattcacgtgttgatctttaatatcttttgtaatttcttgaagattaatcttttctagctctaatttctctaccattacaattctccctttatattttctctataataaattcaatttaatttccccatatacactaaaccatttgaacgatttccattcatagttgtatattctaatctcttgtattctaaggtttcaaattgatctatccattctttcacacgttcttcgctatgatggcgtaaaatagccccatctggtaactcaaaaaccccatatgtatgatacttggtgagtcccttttcataacgtaatttatttctttcatcactatttagtagaaagtcattgatgtaaataatacctcctggctttagtacccgtttaatctcatttaaaatagcattttgttcctcacttttatgaacacatgttaaaactgcaaaaagtaagacagcatccaaagaatcattagaaaaaggaagattcccactttgaataacttgaaaatcgatttctgagttatgagacttagctcttttaatcatttcttctgaaaagtctacaccatgcaaattgttataatcgtaacttcttaattccaataaagtccgtccatagccacaaccataatccaatatggcagcattgtgattaacatgtgttaggaataattcaggttgaaaaggcgtagtaaattcttttttattagctacttcattccaatattcgtcttgtttgatcatctttatgaaacaaccccctattgatctatcaacttttattgcatcatagcatgtaaaaacataaaataatgtgagatatctcatatttttataatagtaggagaaaaaatgaaatttttaaacgaccctatgcaaagttactatatcgagaaatactctattcaatcacttttttcctttccaattactccatttattcaggtctgcgaatttgaacgtggtgaatttatctataaggaaggctcctatcctcaatatatttattatcttgttgaaggtaaggcaaaactctatgttacacacgaaaatgggaaagtgtccttgattaattttttacaagctccaacatttatgggggaagtggaactattaaattcacaaagatattctaaagctatacaaactgtcactaaaaccatttgtttggctattcctattaacacctgtaaaaataagctcttaacagatgtaacatttctcagatatttatgcagttttttaagtgagaaagcaactaaaatttcagcaaagtatacacaaaatcaggcctatccactcgagaaccgtcttgctgcctttataatattgtcggctgatgataacttctataaagaaaaacatactgaagtatgtgagtatttaggtgtatcatatcgccatctgctccatgtactagctcaactatgtaaaaaaaatattattgaaaagcagtcgcaaggctacatcattaaagaaagagaatatcttgaaaaactagctaaattaaattgaaaatacttataataattttgcttcaaaataaagataactatatgtataatccatacatttttaattaacataatgtgctttatcggaaataatacactttaataaaccgatatcctcaaatatgaaggagaattctaataaaatatttttagacggatcctattaaaatttcagttattttcaatcttgtttaagtgggtctctttttattaaattgcgtccaagttatctttacatatccttaacctttttcttaattaaacttaatacataaaatctaagattaagttagattaatagttcaatattaaatttaaaagaatgaggttgagaaaatgaaaaaacgtttaattggcactgctgttttatctgttgcaacgattgctgcattaacattcaatacgactactcaatcggatgcaaaggctgctacttctttaaacaatggaaaagctaaaaacgtgattctctttgttggggatggtatgggaacggatcatcgtgatgctattcggcttgccacggttggaacaaatggtaaacttgctatggatgacatgccggtagaaggaagagttcatacttcttctggaagttcatttgtaaccgattcagctgctgcagctacagccatagcctcaggtgtaaaaagctataatggggcagttggcgttaatatgaaaggaaaaccagttcaaaccgttctagagaaagcaaaactgtctggaaaagcgacaggccttgttaccacaagccaagtgacagatgctactcctgctgcctttggtgcccatgtttcaaatcgaagtgcccaaagtgacattgctaaacaatatctcgaaaatagtaaagtagatgttatcttaggcggtggagaggattattggtatccagctggaagtccaggttcttatcctgatgctccacctgaagacaaagaagaaggtagtaaaggaacgaaggggaatttagtcaataaggctcagaaattaggctatacgtatgttgataatgctaatgaattgaaatatgcaaaaggccaaaaagttttaggcttatttgcgaacgaagaaatgttccaacaagctcctgaaggcgaaggggatgtctacaacccaacggtttctttacgagacatgacgaaaaaagctattgatacgttgtctcaaaacaaaaaaggattcttccttgtcgtagaagaagagggaattgatgaaatggctcacaataataatgcttcccttacaatcaaagctggacaacaattagatgatacagttaaaatggctaaaaaatatgcaaaaactcatccggatacattagttcttgtgacggctgaccactcgactggtggtctttcacttgaaacaacagataaaaatgatgagtctggtgatggcgtttctaaagaagacggtcctttcaacattgctaattctaaggaacaatttatggtagactggactactgaaggtcatacagcttcggatgttccacttaacgcaatgggcgcaaaatctgaactctttaacggtgtgtatgaaaatacgtatatccacgatgcccttgttaaagcaatgaaacttaaataattatatacgcatagtcaaaacagaaactactattgaaaaagattgggagttatttctcaatcttttttacttataacatttgtatagatagtaaaatctcctttagtgcagaaaatgataaatagcaacctaataaaaagactaacttacaaaggagttggtctttttataaaccttctataccaactttgacagtcataatatcatagcaaacaacatacttaatgataacgtgaaaatagctgttttcatcaagataattacgatattagtttagttcaaaaaagaatggtcaaggaaggggatgaaaaagtgaattcaaacaaaaaagcagcaaaaatggtgggggtactgtttatacttgcagccgttacggcaataataggtcttattttatatgaccccatcttaaacggtcccgattatctcactagaggttctgaatatgcaaaccaggtgataatgggtgcaattatggagttaatccttgtggtatcggccatcggtacttcaactataatgtttccatttttaagaaagtataacgaaacgatagctctttggcatgtttgcttcagatttcttgaagcagttattattactgtgggtgtaatcagcgtactgtccttattgaccttaagccaagaatttgtagcaacaggaactcaggatgcaacctcttttcaagcatcaggaactgtattaaaagccttacacgattggacatttttacttggaccaaatatcatgctaggtataaatacgatgatgtacagttatatattttataaatctaaacttgtgcctagatttataccaatcttaggtatgattggagcaactcttgtttttatagcaggcctgttagaaatgtttgatgtattttctcaactttctttttggggtgctatattgtcgctaccagtagcagctaatgaaatgatattagctgtatggctcatcgttaaaggattcagtgaatctgcacttgcttctttggaagaaaaaaagaaagccatgagataatagcgataacataattagctttataaagaactatacgtaaactaacggtagtttgacaaacatttatgactataaatttaaggggtatcgtatgaaaggtaactaaatcaaaaaggagcatcctcatgaattaaaacatgaggatgcttctttttagtttgcatgatagcattttatagttgaattacatataatcataaacagagtcatcaaaatagagccagtgataatattcaacctgtggatctgtcatcttcgaaatttcttccttattgaatttttggtaatcaattaatttctgctctttggaatttctttctacttggctcatcttaaagcctccttatagtttgagagtaacaaagtatttaagttttgaaagcgttttcttttttattcttgtttttattatatatctcaaggtgagattaaacaaatatcaaatatagatgagttttcagaaaataatatggaaatgttatttatctacacactttgaagccgttaaagaggcaagatctaattgccacagcatgtgttttgttaaaggttatggattgaatccaataagctggacacaaaaaagtaggaattatgctgttttttagattgtataaagcatttatttctagttaacgtaaaacgtattatcggaaatcaaatggaaagaagcccttttaaaataaaggacttctgcctatttgatttttatttaatatggttagcatatggatcatatattccagttaacaatagaatgcttgtaaataaggcaattgttcctactaccaacaatgcactacttataattctattcttttgcttacctgagaatagcccccataaaataaagataattgcaacgaatattaatataactcctaaacccatattcaaaattctctcgcctcctggaatataataacatatgcctttgtttctagttaccataatgttttttataagaactaaaaaggctagaaatgtgatgtttctagccttttcaatctttacttatatcgtcttgctgaaaagaattgaacaatcggaaagataactaatgacagacatatagctgcaaataaagatatattgccgaaatcatttcttctgacaaaaataatgcgatctgctacccataaaacaaagagagagattgttaagatatgataacttgttttggcgcttatagtagcaaccttcttacccatttcatctttttgaacttttctatcgaatccccaagtagcaaattgaaatatgctagttaaaactacaactattcctataacaccagttactcctatactatatccatttttaaaatctgtaatatacatcgtgattagaaaaaaggcgaagcttagcaaaaccacaatacccaaaatataatttctttgcacattcttcattacgaattcctcccactttgatataaaaataattcatccacacttacttctaagttttctgctagctgaaatgctaaagttaagcttggatcatatttgttattctcgatagcattaattgtttgcctagatacttcacaagctttagctaaatcctcttgagacagctttttaaatttcctaagttctttgattcgattatccatacttatcaacctacctctgaaatgtaaaagactttttacatttatagtatatggtaatattttcattatgtcaaatatcttttacaaaacatctaaatttttatgtatatcgcacatagctttagttaacataatatttcttatagaaagtaag

SEQ ID NO: 111 - DNA, 6797 bp, Priestia aryabhattai
  source 1..6797: mol_type = genomic DNA
atttcgtacccttttcataagactatacagtttatttatacatagaataagttcacattagtttaaaaagggtaaattatccactcatctcttatatactgaaaatagaaagctactcaacatatataggggagtgatccaaagccaagtgtaaaagaagctgtatatattcattgtggaacgaaaatggatgtttttaaacccaaagaaatcacaaaattcagctacagacattccagaggattttttgcttgcccaagttgtggtgtgaaagtctttcataaaaatcaaaggagacacccaacatttgttgtcacatctagtaatgctcacgcatataactgtatttataaagaataggagaaacttgtcaaaagagtagcctttgctcaacgggagcaaaggctattttaaactaaggaatttagaaatattttattagtttaggttaaatttaaaatatacatacctatttttaaagaaatttaaggatggattttgcagtgacataatccatcttcaacagattttatttcttcacagagcaaatctcagtataaatatctaggaaaaaaaccaaagctcatcttcctttacctaaccttattaagtgacaagtgtgtaaaagttatgatatgttagcatctctacatattatctaaaaataagaagatgaggtgtctgaatatgaataaaactgaactagtagatgcagttgcaacaaaatctgaactaacgaaacaggattcaaaaaaggctgtagatgcgttgtttgaaacgatttctaatacgcttgccaaagaagagaaaattcaattagttggatttggtacatttgaaatacgtgagcgcgcagagcgtacaggtcgtaaccctcaaacaggtgaagaaatgacaattccggcttcaaaggctcctgcttttaaaccaggaaaagaattaaaagaagctgttaaataaatatgccttttaatcaagccccctctggagatagacttctaaagggggctatctttcatggtgaaaaacttctaaatacctacacccaaatattatttaatcaaggtttctattttcttgagtcgtcttagagttggaggtaggctctttgccaagtctagggttccaatttcctaacttgttttttaagtaatcctttaaaaaatcacgtttcttttttcgtcttttatccctgtttttcataaggactcaccacctttaggttacttaatagatgcaatttctccttattataattatgttgaaaaatccactctttatgctaaatctataagtaataagtagatcatcttactagtcaaaggaatacttttaggtattgtttcaaagtattccaaaagacgcttcccattgtaagagtaacaaaagtagaacgtgaagaacaaccagatgatcctcatatgtatcgtcataatcaataataaagaaagcaggttaataaatattaacctgcttttcagactaacgagaacttaaaagatttctcgttaaaaaagactttatggtttcgtagaagaagcatcctcattctcagaggtagaaactttatcattgaagttagatagatgttttccttgcacatcattgatatttgcttcatcagaagtatatccagcagtattaaatctgtcatcccctattgcaggctgagaattgttagagtgatttttcatcgtgtacctcctagtttgggttggataggtttagtgtgctcgtgtttatggtatttcatgaggtgcacttaatgttttatctctattcagtcgaaaaagttggatatttagccaatataaaaaattaaaatgtttcattaaattaagtgttagttattacatataatgcacaaaaagaaatcaattttcctttggaattaatgaatgataattggaactatagatagcataatggctactagaaaagtatttacaaaaaaagtaaccttaccttactgtctgacatatgtgtaaggtaataggttactctttttaaatattcaacttatgaagttctgtacgcttaatttaaaattaaatttataattaatacgcctgctagtccaacaagtgatgcaatcgttaccataacagaccacgttttaattgttttaccaattgtcaggttaaaaaattctttgtagatccagaatcctgcatcattcacatgggagaatgtcatacttccagccccagtggctaaaaccataagttctggactaacatgagttgccgcaactagtggagctgcgataccagctgcagttagaccagctacagtagcagaacccaatacaacccttaaaattgcagcaattaaccaagccagtattaaaggagacatggttgatccctccatcaaaccagcaacgtacttgtccacatggctatcaattagtacttgtttaaaagcaccgcccccaccgattattaataaaatcatcgcaatgctgcttacggattgtgtaatagaattcattaattcgggcattttcttaccacgattaagaccaaacgtgtaaatggcaacaatgacagcaatcaataaggctataccaggattacctaaaaattgagctgtaggaaccaaagcagaatttggcataacgatttctacaatagcttgaaatgcgataagtattactggtataagagcagtaaatacactaatcccaaaaccaggcatttcttcttctgtaaaatgtttaggattaaaaagtccttttgggatctctacttctaaatcttcttttttgaataattttgtatataaaggaccactaataataacagcaggaatagctatgataattccatataataaagtcttacccaaattagcatcgtaaattccagcaactgctgttggtccagggtgaggtggcacaaaaccgtgcatggttattaaagcagcaacaactggcatcccgatataaagaataggtacacttgcctcagctgcaattgtaaatactaaaggaattaacactacaacacctgtctcaaaaaataaagcgattccaacaataaacgcggtaagcacagcagcaagctgaactctctttttgccaaatgctttaatcaacgttacagcaattcgttgagctcctccagagtcagccattaatttaccaagcatacctccaaatccaagaactaaggtgagacttccgagtgtaccgcctaatccggatgtaattgatgccattgcttcattcggtgacattccctccataatacccactagcaaaccaacaataactaacgaaatgaaagcgtttaacttgaagaccaccattaataatagtaatagtacaacgccgatacaaataaatactattggcatatttgttcctcttccccttttgttttttagagaatgctaattcactacgcaaattagcattctgataaaacttctttctaaaagataaaagttattttcatccattatttaaagtttgagtaacctcttttaaatcactttttgtaccgacattccctggaaaaattacataggacatgtctggatacttactttcatttcctaatttccatacaggaatccccggtctgatttgtccagctacagtagcacgttttaccttcaaacccttcgttccaacatcacttgaagttataccaccttttgcgattaaaaaattcggtctaacttgtaatcgggtgacaatactggtaacagcatccgaaatagctacagataattttaactcttcttcttttttgttttccccaagatcgagtcgttctctgcttgtataaacagcaactgttcggccagagcgaattaaggattcagtcatttcgatcactctatcacattccttttggaattgatctggatgtaaaactagatgactattaaactcaataaattcaatttcatttaattttttcaactcttcaagctgctcagtagtctttttaacatgggaaccgataattattaagccaccattacctgtttcttcctccactaattcttctctagtaagtagtgctttatcagtaactcctccaatgacttttggaagtgcagctgcacttctaaataggaagttctttccttgattcatggcttgtgctaaggcgatggtaaatatttttacatcaacttcatctacagcatttacaactactttattaaaatggtttacctgaacaagctgttcaactattttttctacatttagtgagcgcaactgttcaatggagatatacaaggtatttttggctttatattctccatgtgacttttcttcaatccattcacctaaatctgattttgaatagccaaatgtgcggtcttttgcaaattctgtgtcgcctgctgggacaagttcttgaccatactgtacataatgaatattgttaacagttaggcgccctccttctttaaaaaatggtaatattacttctccatccaccgtcatttcagagcccaattcgattgtttcctttaaaacgcttgtttctagtggataatgccctctaagagttgaatctccacggcttataattataaattctcgatttagtttcgaggatactgataaaatattttcggcaatttttttgtgtactttttcagtttcctcagctgtaaagcctctcgaatttgttaagataaagaacatcggctgtttttctttaaagcctttttcaatactttccactgaccaatcagtaaatacagatatatcatgcacagtttgaacacctgtggggtcatcgtctagaacaataatttttttatctaaactgtttaatgcatccttcaataatacatctacatcctggcaattgactgttggaagagattctaggaattctataggtaatctaagattttccttcataacttaacccctctttacttcaacatttgctaatttttcataatatcttacaatacttccgtgatcatcatttattttcccatctacctttaaagaatgaaaaatttccaacaattggctagacaaaggaagtggtacaccaatctcatgagctgtttccattacatttgtaatgtcttttaggttgattgcaatactaccaccagcaatgaaatttctgtcaagaatcattggtacctttgcgtccagtactgcacttcctgcaagtcctcctcggattgcttggtacattttttcaatatcaatacctgcttttgctgctagggtaagcgcttcagacattgcagcaatgttaaggtttacaattatttgattggctagtttcgctgtcactccgcaaccattatcgccaactaaagtaacttcttttcccataccataaaaaaaggatttaacgctttcaaaaacaggttccttaccaccaaccattatagctaatgtgccatcgatagctttaggctcgccaccactcacaggtgcatcaagcatttctacaccctttttcataacttctgttgcaagctttcgtgaaacgtcaggagtaatagaactcatatcaatgattatcgaaccttcttttgctccttctaatactccattttcacccaaaattacttcttttacatgtttagaagcaggtaacatggtaataataacattgcttctttccgcaacttctttaggagaattagcagcaactgcaccagcctctactagactgcttactgcctcttcattaagatcaaaaacagttagtgaatttcctgccttaataagatttaaggacattggtttacccattattccaagtccaataaaaccaacattatgttccatctttattcctccttgatattttagcttagtatatttagcccttataaattaagctgattccacttgtataaaacaacgcgttttctgtggaatcgctttcaattaatgaatacaatccttattgtacacatattttaattttttgtatacaataaaataaaaatgtatacaaaaaaatcaataatgtattctatatttttcgggtaaagtttggtaagatacatttagtaagtaaagggatatggaggtaaaaattgtgtttaaaagtgatcgttctcgtcctgctgcccgtcaatcttatgaaatcatccgtgataggatcttaaatggagaattatctgctggtaccaaaattgttgaagagaaaatagcagctgaattaggtgttagtagaacacccataagggaatccattcggaaactggaatatgaaggacttattgtaaacaaaaaagtggtcaagcccactgaaaaagacttgagaaatatgtttcaagtccgcattttattggagggttattcggctcaatgtgctgcatcctatctaaatgagaatgagctcgattctttatatgagtgtgttaagataggaagaacggggactattgaagaaattatgattgctaacgaacatttccatgagattattgttaatgctagtaataatccagtcatgatcgatattattgatcgtatgcagtctacaatttacctttttcgaaaaacagttgttttctatcaacgtcctcatttaattgatgaacatgagcaaatttatcaagcaattaaagccagagatggtcaaaaagcagaattgttgatgaaaaatcatctagaggctgatttaaacttttgtttgcatttaataagtaattaggccatccatttacatgatttagtgtagcttaagaatacatcttcctacttaatagaaaggtgtattcttgtaagaaaatggctaaaatattttcttgtaaaaggactaaacagctgttaatgctcttat

SEQ ID NO: 112 - DNA, 6758 bp, Priestia aryabhattai
  source 1..6758: mol_type = genomic DNA
ttctatagcgatgagagttagtaatcctatagagataataagaagagatatacatacctaggataggctccacaaaaatagtgaaaaaactattttaaattggaaataatactattaaattgcaatcgctctcaacttattatagattagagatatcgaaacgtttcgcctggaggtttttacatggctacgatgaaggacatatctaaaaaagctaatgtttcactttctaccgtgtcggctgtaattaatcaatcagcatacgtcagtccggcacttaccaatagagtgatgcaggcaattgaagaattaaattataaaccaaatgcagtagcacgaagcttgaaaaagaagagaaccaacacggttggtgtcatagtttcaaatctttcaaaccccttttatcccccattaatcgagggtatagaagatgtatcgtttaataataatttcaatgtaatcctgtgtaatgtatcaaatggacacaaaaaaattttgacttatttagaactaatgctggaaaagcaggttgatggtctcttattagccaatattgctaattcggaggatttaaatgaagttgaaaaaacaggattaaaatatgttttaatcaacagaaaaccctcattttatgataaaaattttgttggagttaataacccactctcttctgaactagcagttaatcatttagtaaggcaaggttacaaaagaattgcttttttcggaggtgctccggatattaatactgcaagagaaagaaaagcaggatttataagctgcatgactcaaactggattagatattgatccaatgcttatctatgatggagaatattccttagaatcaggatataccaatgtgaaaaagatgattgagcaggtgaaagtattaccagaggccatttgtactgcaagtgacataatagctttcggagtgataaaggggctaagagattctggtattcgtgttccggaggacatttcggttattggaaacgataacaattccttttctgaaaattttcttgttcctttgtctagtattgaccattctacatatgacatgggtaaactatccatggagtttctattagaaatgattaaagaaaaagatgaaactcgggctagacaaatcatacttaccccatctttagtagttcgtgaaagctgtggatataaaagaaataagattgataatctttcttaaatcgatcttagggcaacaatgaaagttaaagggattaaattaatttaatttaatttaatcccatagatactatgaagtaaaaacacaaccatgacttaaaagctaaaaatcggttttcaaaaacttattcatatattcgatggacgcgcctctataacaaacgttatagaggcgcgtctttaatgtgtcttaatatttaacagcttgcttattaatttttctttgtaaaaaagtgtcgtagagctaaaccacagaataacaatcaataccaacatacgtattcatctttttatgattattaaatcgcttgatagtcctggttcttttaatattttgtaggtatgatgtcaaagaagttcatgctgattttcttgtttttatagactctaaggtcctaaattttcctaggaaaacttcttatattttataagcaatggtacgtaatatacataactaaactagtaaacaaatagagagcatcacatacatctgcttattatttcaatagtagagggtaaataactaacgatattctgaaaattatttagaaaccccttgattttgtaagcgttaacaaattataatgagtatcaacgaaacgtttcgctattttatgtaatggattttaattatacctttttaaaatccattaaaatagccattaaataaagaaaactccatatttttttatgatttatgtagttttttcattgtgttttaatcgaaacgtttcgctagaatattagtaacgttaatcaaatggagggattattttggaaaaattaattattaccgttgctccaactggagctcagacaactcgcaaacatactccttatgtaccttttactccaaaggaaattgccgattctgtttatgaagcgtggcaggcaggggcgtccatagcccatattcacgtaagagatgaagacggaaataattctcttgatttgggtacctatatagaagtcgttaatcgcataaaggataaatgcgatattattattaacttaacgacagcaggtggagtggccatgaacgatgaagatcgacttcgagtatgtgaattaggatctgagttggctacttttgatgcgggttcaatgaattttggtagtgatgtatttcttaattcacctaattttctggagcgcttggcaaaaaaaatgaaggagtatgagataaagcctgaaattgaaatattcgatgtcggtatgattgataataccttgcgaattgctaaaaagggcttcatcgaaaccccatttcattttcagtttgttctaggtataaggggagggatgccagctacacctaaaaatttattatttttagctgaaagtattcctgctggttcaacttggtcagcaattggagcaagtaaagatcaattagccatcaacacaatgagtattataatggggggacatgttcgcgtaggaatggaggacagtgtctattatcgacagggtgaattggcgaaaaccaacgctcaatttgtagaaagaattgtagatttatctaaaactttaggaagagatgtcgctactccgaaccaagctagggaaattttaggtttggataattcaaagcatttgaagggattaagtagcattggtaaataacctaagaaatttcggatgctctttgcttttccaagcatcaatccaatcaaattcttctaatcctccttaaactgtgtaaaaggagaggatgaacacctctgaataaaaagtaatattgtagattgaatgattttcgacctatcgtgtgggattttagaagacacaaaaaaggcattaaaagagattgttataattattgaggaaatttaaattttaatagtctctttatttatcaactttagtagaagaaaatgcacttaataaatttaagttcattcaataagtcaatcattactccagggaggaatacatatgagaattgcaataatgggttcaggttccttaggaactataataggagccttaattactgcaggaggacaaaaagtagatttaatcgatatcaataaggaacatgtatctgcgctcaatcatgccggtgcaaagattactggctttatggatctttgcgttcctgtaaaggccatgttaccccatgaaataactggtcaatatgatttagtttttttattaactaaacaggtttacaatcaggcttctttagaacaattgcttccgcatcttcactctactagtatcgtttgcacgttgcaaaatggtatacctgaggacttcgttgcttcttatattggacatgaaagaactattggtggtgttgtaggatttggtgctacctggcttggtccaggtgtttccaaactcgcaacagaaactcgaattttaaaaaaatatgcgtttgatattggtgaattagatggatcaataactcctcgaattaatgaagtaaaaagaattttagatttagttggtcattgtgatatcttttctaacatcatgggaataaaatgggcaaaattattaatgaatgccacatttagtggcatgtcagctgcattaggctgttgttttggggaggttttatccagtgagtcggcaatggttagcttagcctgcattgcagacgaaactataaaggttgcccatgctcatggaattagattagagaggattcaaggaaaagatatggaggttcttgaactccaagatgaaaatgatatatctaataaaatggatttttatcaagaggtttggggaccacatagtaatacaaaagcaagcatgttacaagatttggaaaagaaaagaaaaacagaaattgactttatcaatggttttatttgtagaaaggggagggaggcaggaataaaaactccgtataatgatttagttgtaaaattagtgaaggaagctgaaaaaaaaggtagttctccaagatttacagacaatataaagtactttaatcccaatttatcaattatgagtaaaatgagtttcaaagaatagcgtgctatatagtctgaagtgaagcctccacggatttatagaatagggaagaggagcatccagtaaatagattgtgtattttataggagtttaagtagtagatgttatatcacttataggctactgaaaacttcgtaaatggtattgtttcatgcattttatattatagaaactaactatttattaaaaataaggaggattgtatggatcttattgttattcttttatctttaggactgcttatgtttattgcttatcgagggttttcagtaattctttttgcgccgctttgtgcgttgtttgcagtcttgttgactgagccatcatacgttctccctttcttttctaatatttttatggaaaagatggttggttttgttaagttatattttccggttttccttttaggagctatatttggaaaaatagttgaaatgtctggagtggcaaaatctattgctcaaactataatcagttgggtgggacctaaacgagcaattttagctactgtactactaagtgccatactgacttatagtggtgtaagtctgtttgttgttgcttttgctgtttacccgtttgcttctaacatatttagtgaatcaaatattcctaaacgcctgctccctgcaactattattttagggggcgcaacatttacgatggatgccttacctggaacgccacaaatacagaatgtaattcctactaccttttttaagacggatatttacgctgctccaatgctagggataattggcggggttattgttttttctgttggaatgatttatttagaatcacgttctcgaaaggctcgcaaagctggagaaggatattcaggttttggaggtaatgaagtagaaacggcagccactcttcaggctgaagaagagaattattcaataaacctcaagacttcaaacagtcgttctcgtgaactttttgcatttgtaccattaattcttgttggggtcactaataaatttttcactacaattattcctaagtggtatccaaacgggtttgatttctcttccatcggcctggattcttttgggaaggtcgaactttcccaggttacaggaatttggtcagtagaacttgccttattgtttggaataatttctaccatattatataactggagagaagtacaatccaaatttaaagaagggataagtatcagcattggtggagctttactagcaaccatgaatacagcctccgaatatggatttggcggtattattgctgcacttcctggctttagcattgttcgagatggtgtttcgcatatatttacaaatccacttgtcaacggagccgtaacaactaatgttttggcgggaattaccggatcagcttccggaggaatggggattgcactgagtgtgatgggtgaaaaatatatggaggcggcagctcaatataacattcctccagaggtcatgcaccgagtaattgcaatggcttcaggagggatggattcactccctcacaatggagcagtcattacaatccttaccgtttgtggtttaactcatgttcaatcgtatcgtgatatttttgctatcactattttgaaaacgttaactgttctcataatcattggaatttatagtttaactggaattgtataatatttcgtttatagatatattgaaaatagaggggaatagcgcctttttctaaaagatgtataatgagtgaaaaattttttattccatatattaatcattacttataaagcagtagataattaattgtttttgaaatatatgtatataaaataatagttattttcagagaagaggcccttatgagatttcaagggcctttttactgatcaatctctataatatccattatgttaactaaaaatatatgagagagactttgataatttaacaaagtacctcaactgtaaatcctccaggtgcctctacataaaatgtataaccatgtaattgttttggagcttcgacattaaatccatcttcttttaacctttgattaattttatttacctgctcttcattctcttgggggaatccaatatggaaggtctttggataattaacttcgctccccttcattaaagttagtacaaaaccatcttcatcatgcattatagcaaaacctttacccctgtttgccctgcatgtcataccaaaataagtttccaaaaattcttgagtagcaggaacatctgtaactgttaggttgaggtgatgaattttcatgttttcaccctttcttaaatacattcaataataagtcttgtgtcgtatactataaaaatcattaattagatgaatagtttactctatgaatttaaatatttatctatatctcttttaaccattcgttttacttcttcaaaagcttttgtttgcccttcgtaaaatatggagctgtttaaatcctttcttttttccgaatccttagaccatctttccgacctttcaattaacttatcaagtacctcacccaacttctcatttcccacgaataccccacctttaactggagatttttacacaatcaattatccat

SEQ ID NO: 113 - DNA, 6561 bp, Priestia aryabhattai
  source 1..6561: mol_type = genomic DNA
ccgccacttaaatttatttggcttggagattcgtagtattggttatgttcaaaagaagcaagcagcagagaagaaaaccgttaaatcctaataacgtaggtgataggggatgtcagagcgtcaaaacgcctttacgattaagacaaatcgattgagtgatgaagtttataataaactagctaaatatgctaaatcgcgtaagttaggggactatatttcatctttaattttacgtgatctagatgattcatctaatggaagaaaagcaatagaagacaaaaaaacctacgaaatgcttgaacatattaagaatgaattagctgatttaaaaacattagcaaaaacgacaagttttgtaggaaaccattccttcaaagaagaagagccttcaaaggtttcccaactgaaagaaggaaagattgcagatttagaaaatatatctggctcattagacgatgacgacttagaagaatataacgatttttaaacagtaaaaccactagaatccatcctagtggttttttctgttttacatatcactacactcataaggtggtgattcattcatcttaggtagtatataaaacatttatgtagcaaaagcaggcttaaacctgctactactttggcgagttcctttatttatcataggatgtagtattttcgtgtgataaagagaataactcctttaagtcgatgttttctatgtccgtcacataagctataatcaaaaaaataaaaataatccagtatatgatttttttcaattcccccaactccttcactaaaaacagtattatgagaaacactcagaattgcaataaatagacatttaactgcgaaataaagggtattttttctggtagcttctcagtaacaacatttcaacacttttgcatcagaatccccttaactttgtatagttaatttatgattgagattgtttaatatagatagtcctaaaaggtacacctttttagacggtaaaaaacgaatgataaaacgtctatttaatcttaaaaacaagcctttttagatgtattaaaaatactaggccttattgtacgcttggtttacgtctcttcccagctgataactctcagcattatttttggagtttcgaatagttatttaattcagaaaataattataagaatacttatttcgacacactttgacacccattatgtagtaagattttatataaatttacatattcagataaaggaaaactagttgaaaagctaggacgcaaaggtacagatctaaagtcaattgactatgacagctgggctacctaaaattctggaggaatttatttttatgagcagtgaaaatgaaataacaatgtcaaatgtagatcaagaatgggtcagtcttatccaagaggctaaggaaatagggctatcggttaaagaagtaaaagcattcttagataataaacaaacctagtgataataaaaaacattagataagcaagctatctaatgtttttttgttatcgtattatcttgagattttacttctagaaactgtttaaattcttctttactcacatttgaattcattgcgtcttttactagtttcatccactcttctggcagaactgttatagaattcttcatagtagtatctccttaaataaatactttttatcatttaccatttgttttcagcttaaaaccctattttatagtgaccatccactatattacaactaaatagttagtttctttactttaatcgactatagatagctgtttatgtagtgaaaaatatcgtcttcatgtattgcaatatatgaatcaaaataaacattccaacaaacaagttgtaacggctaacgctaaatctaaaacggaagatataataaagtaaagagtctatgtatgtaggaggaatattgatgatacaacaaaacaaaagaccgaactttaaggtttcacacgttctccggcttatcttaaatacagcattgattttactagctgttactttatccgttttgcttggtaaggaaattttccatttcattcatttttctatttttaatcgaggaattgagactcactacaaaattcttgaaagtatcttagttttctttttgtactttgaattcattgcaatgatcgtaaaatattttcaagagaattatcactttcctctacgctactttctctatattggcattactgcattgatacgtctggttattgtggagcatgataacccagttaatacacttttgcacacttgcgctattcttgtgttaactatcagttacgccattataaagttttcatcaaaacaaaaagagaaactataattacgttttttttaaaataggatatctttttgttgtgcatttttgtggagaataccagtaagaaggctttcaaggggatctatacatttatatacataagtcacttccgaaaattcacattacgttaacccgcatagtatggaaggactcattgaaactacaccaacttgtctttattgtaggagtgttgttcatccctctattatctacaataaacgatctaaatgaaaaatctcgacattttaccatgtcgagatttttattaggcgacgatttctatatagtctttttttacagcatcccattggaatcttccttcttctacaacaagaggagcctcagaatcccaagggaaatattgtttagccatatctaaacgtaaatgttcaatactcgccggaggaagctccctgtctcgtttatttagtccgataaaataaataccaccttgcgctaatacatctggatgtaaataaacaaaaaccggctgtagttctgttttttccattcttaccacccttttcaagtactttttaataacttagtgtaataattaattagaatatctactttttcatgctattgatttaatattaatttctcttatatttattttcagtggaggattcatttttagttttcttcttatttctttcatcttgcttttctatctttaactcttcggttggtattggatcaactgtctcttcagttttgaattggtcaaatagagttttattctccgtaggatattgctcagcatgatcccttcttttggtctcttgaggatggggggatttctttcttgactctgtcattttaatacctccctgttccgaccatataaaaccatatacatctcctcctataggtgaaatagtttctttacttttatcctaacgaagatgatctcaaacctatacttatagaatttttgattcgattataaaggtaaataaaatgagagaagagaccttaaacaagaaaaaacaccatgattaattggtttttgcaaaaaaacatttgagtttaaattagatataatcacgagataatctacaagttaaattgaacgatctgcttttaaaatttaataaatagccttcaagcttacaactgatacctaaaaatacaggtttgttaagctatcacatagggaaaatggttttaaaattaaaataaaaatagagaggagtaagtagaatgcgacaaaaaacacttatttctggtcttgctatttcaacagtaagcgtagggattacaacttatttattgaaggataaatcaaacttagataaggtaaaagggtttgttcgaagtgtaaaaaaagctatttcatatgaatcatcgaccaaaaaattggcctcatttcccatacacaaagcaggtcatccagaccctctggacattgaagataataaaatggtctcagaaggatctatgttccctgtgcaatattataatgaaaagaaacaatgaattatcagttcatattattgactatgttaatacaattgtaaaacacttcagttgtatcttggacagatattgctttcatcataatcatatgtactatttcagagccaacaaacatattcatgggcctcataccttagtctagaatatctaaagcgtagttaagatgttctaagaaggtagcaagttattcatattataaacttccattaaatagcctatgattaaggaggttttttaatgaagaaaataagagtggtaaaggacggctatgaagtaaaagaggctattgaacaatttttaagcctaggattcagaaaagataatatctacttattagcccatgaaaaagatcgtactgaagaattgataagtgcgttaaatacaaacgatagtggggtatccaaattaagggataacaatccaatagcaaattcatttcatttttacaaagatgaactacactctaagctttactctttaggattatcagatgaggaagttcaacactatttaaaagaattaaattggggccgtatactagtttttgcattaaaaacagatgattttactactaacgaataatatcagtaaaaaagctatacaaactctctataattaacaggtaaagagagtttgtatagcttttttagaattatatacttttctaataatagaacaaaccatatatatagacatcaacataccaataagtacgacaaatctataaataaggcaatataggacaaccttaagtatgcttataaagggctgcatacttcataatagagcccccttgaaaattccttgagacgcacaaaaaaatttttttctgcttggttcctttaaagcacataatgtaaacttagataaactaggctaaaacatttatatttacatattcaatgaaaattgtgtaaaatatatatcattttctgcttaacagttgtaccattcagtatccttagaaggagttatatatattatgaaaaatccaaaagtaagtttacaagtagattcaaatgaatttatatgggataaaaatgaaggtttgtttactttcgatggggcttctgccttattattttgggactccgcgatcgaactcttttttaaaactattgaagaggtttcaggaagcgacgtctctataactgtttttgaagctacaggattccgtatgggtcacttagtgagtaattactatcaagatcgctttgatattctagaagtaattgaacaatacaaggacatctatagaaatgcaggctggggaaatgtcgagattatctatttttctttagaggagaaaaaggtgattattcgattaaagaatagttgggaacatcgaatattccaactgatggatagagaacaatctggggtattactaccaagccattgggctggggtatttagtggacttttaaaagaaaacatgtggtataaaaccaaaaaaattcaattaaggggtcatgactatgatgagattgaaattacagtttcctctactactccctcttcaaatatacataagttagcgagaaagaaagaacaacaacgtatatgtgaacttgaaaacaaagtcgaagaacggactgcacaattaacttcactcgtgaaagacctatcatcaccagtgattcctgtactagatggtatccttgttattccgttgataggtcggtttacggaaggacgcttcgaggaattaattgaaaaagcgttatatgaattttctagaagacaggctagccatttattaattgatttgacaggaatgaatcaatttgatgagtttactattcatggattagaacgtttgatacaggcgattggtttactcgggggagaatgtactcttgtaggagtatcgccatcccttagtattcaatttactaaatcagaaataaatctaaataccttaacctcattttctacattgcaacacggtgtccaatatgcacttgaacaaagtggcttagaaatagttaaaaagaaaaaaagaaatactctttgactatttttatagggctaagcatattggagatggtacgataaactggacactaaattaagagaaaaaggtgattcggtttatgggtagaaaagtttgcgatcgtcaatttaaaatggctgcagttcagttggtactggaagagaacctatttgtaaaagaggttgcgaaagaattatctattcatcctaatacgctatatcgttgggtaagtgaatacgaagaatatggggaaagtgcgtttccaggccgtgggagcgcactttataattcccagtatgaaatgaaaaagcttaaacgtgagaatgaagaacttagaaaagagcttgatctactaaaaaagttccgggtcttcttgaagaaaaagaatgtgtaaggtttcaattcttaaaagaaaataaacacaactataacatcaagaaggcttgtaaaacgttaaacatctcacgatcaggttactatgaatatttacagagaaaacctcctaaatcaagtttttcacacagacggacaaaataaaatatgggtcggtgacattacctatatccctactcaaaagggtactttataccttgcggtatttgtggatatgtactcgagaaaagtgagtggctggtctatgagtacacggatgaaagattctcttgtgatagacgcttttttacaaagatataacaaagaacatcctccaacaggattaattatccatacagaccaaggatcccaatatacgggtaataac

SEQ ID NO: 114 - DNA, 6559 bp, Priestia aryabhattai
  source 1..6559: mol_type = genomic DNA
caaaagtaaagaattggccgggaggagatactaacttgttgctttcaaaattgatagattattatgttctacatgatttgcataaagaccgaagtgaggagaatcaatactatattgattctcctcatataccaataaatatagataaagaaactttttttgaagtaccagcatcactttcagatattggattaaacataactcctacagacaaaggatatagcatgggtgaatttggatttgaaagtttgataccttctggggatgatcttaatgactacgtaagaggagaggctttcttaaatgaatttgaaagtaagcctaatgttatttttatacatggttggcgctggtaagtatataagacaggacctagagtctcatggagtgaattaaaacgatctagcgaaatattgggaattaactgagccaaatcaagccattccaaaaatgaataaagacaacatactactaatttctgctaaagaagatcagtacgttcacattcatgatgcagatctgttgtgggagtcctgggggaaacctacacggtatgtctacaattgtgggcatgcaggaatagttcttaaacgaaaaaaattgcaaaagataccatttcgtttctacaaaataagctaaagaggtaatggacatatgtttataatggtagctttactatggttaatgagttcaattcttttttttagaaatcctcaaaatgagaaaattagatgggcaagtgttataggattttgtgggggctttggagggataggagctttactaggaaaagggatacaacgaccagagtgggtattacaattggatgggatatttacatcgataggacactatttcactccatatggtatgttgatttttggaatagtttattcagatgtcattggtaatgtacgaaagcgaaacatatcaaagttgcttctgctaactccaatttttataatgtattctatgttttaggcgtacccagagtttagatttgattttcgtattttagcgatttgggtagtaccatatgtaatagcagctaatattttatttatatactccgtatggcgtgaaggtcgtccaattattaaaagaagaaaaatattaacttgtgtgtttgtatcaaaattaatcatgtttctttgctggctcatcaatttttttaacagtaatagaatcaacatttcttattttaatttctcataacttatgtcaattctctaaaatagtggtgccccttaaaaaatagtgagaagagcataaggggtttctgctcccatagaacgtgtgggactaggcaaagcctagcaaaaggtacaaagaaatgtttgcaagaaccccctcagcggaccctcaaattgaaggataatcccttcagaggcccttcagtaatcacaacctttgtgccagaaaccccttcgccgcaccctcatatttgataaatgtcccctcaaaggtcacttcattttgaagtgttttttttggaaaaaataagacagaacaagcgatccttttttattttttttcgaacgttcatgatcaaaaaggccatttatttttgcttacaatacaagtgatttacgcgtgcttttttatcatttatgaatcaatttttattctataaacggtgactcttctaaaaaaatgcaggttcacaggacattgatatttatttttttatgttcacatgagttagaagaaaattttgtaaaaaaagaaaataaaaaactatgggaaggccaatgcagaatcaaaaatcgcgataaaaaaagatgcgattcaatccagtaatataagcgttcgactttatgaagataaacaaaaaaatttgcaaaaaaagctgaaaaagttgaacgaaaaagaacagaatttagtcatgaagtgaaaaaagaaaggggacgcaaaagggactaagggtaaaattatgggatttaaaggaaaaaagagccctgaaaaatggggtgaaatgctgaaaaagggacgtaaaagggacatgaagagcttttctttgatatcacgatttcgctaggctttgcctagcctatcacccaatgtgatagcaaaaaccccttatgctcttctctcttttgtagtggagaaccacaatttacaggaaaggaacgaatatcatgaatccgtttttacgaaatatagatttagttgttgttaaaaaaatagtgaaattgaaaaataaaaaaaggtttttcgccaaggattttaaaaatgttggtttagaaaggaaggaggtactgagagagatgaaggattatgacaaaggagagagatagaaattataaaatggatttatgtaattttttgcacggaatattggagcagattctacggaaaaaggaatacagcacaagaaatggaacgtaaaaaaaagcaaatgtttggaggtgaattaaaggataaggagtcttttttttcatactggaaaggtagaagaagggaagaattagcaagcaaactaacgaatcaagatttaattattattaataagtactccaacaaccttgcttatttgcacaatgactatattgaaattcttaatccaatggcaacgggtaaaacgtgggagaaaacacctggtagcttttttaaagtagtaaacaagattaaaaattgtccatattatacaggtcatatatataaggttttatgtaatgtctcctttccttcatcctaaatattttttctactctttgttttttcgacattttttataccttttcttttttataatgtaaagtgcatagaaagcataagacaagaggaggaacgcagatgaacatggtagtaggtgtagaaacaagagaagaaaagacgaccctaaatgatgaagagattgttcaaacgtttcaaaaaggcgacgaagatgttttcaatgtactcgtaaagaaatatgagtatttggtctgttcaaaggtaaaaagctacttcctagtaggaggagatcgagaagatctcttacaagaagcaaggctaggattatataaagctgcccgtgattttaaaacagaagggaagagttcatttagaggatttgctgatctatgcattacacgccaactcatcacagctataaaagcgagtgctcgtcaaaaacattcccctttaaataatgccctctctttaaacatacctaagaattcaaagcgattggaagatgatttgattcttatggagatgcttcctcatccacgtgctgtaagccccgaacaagctaccgtagaaaaggagaataaaagagaaagggaacaaatgttacaagaaatactgtcacctattgaacaagatgtattcgctctatatcagaagggacaaacgtatatgcaaatctctcagaacctacatcttcctcaaaaaacagtagataatgcgctttaccgaatcaagaaaaaaatgaagcatcaaatgcagtacctgtatttacagcagtcatcctgacagctacggatacgtttctataagctagtcgttctaaatttgtacaccccttactattacgtaggtaattcttttttcttttatatgttcttttatttatgatgaagataatggtaagtaagctaatagaaggtgatggaatgaaagaacaacaatggattacaatgtttaatgatgtaaaagaaacgatacaatcaattatctacacatggaatccactctatttgcatgcttctgaggaatatgagtatgaagctacatggatccttcctatggtatacaaagtagaagatgttgaaagtctggcgattgagataacagatatattaaatcagtcatttaatagtacgttaacaaaagaagagtgtataggaattgcgcagcaaatctgggagcaaataagagaatagataaacgcatgcccgtagttagataggtacctagaaagaaaagatttcttcttcctaagtaccactgccgagacgagttatgatatacacctttagttaccataatcattctttctagaacatacaaaaaaagaacccttctgccaaagagttcttataaggttgcacattcccctgttatgtagcttttcatatatccttgatataactggcatttcacgttcaacaaaagggaagagatgtataaataggctgccatatatatatgttagtccctataaaatagtctttttagaaaaattccatatttagtttcccttatgagctatctctctttaatacacaatagaagaaagctgtcaaaaaaataattatttatttttaatggattgattatgagtgaaactaatattttgtagaaatttcgggttagaaaagcattgatttattataaataataaattatcctattactagtaaaaaaaggaagggtggacgtaaaacaatgattaattaatcctattttctaagaaaaaattcgttaaataatacgattgtttttctgaataggattagactgtacttttacatacaaatcaaattgatcattgtattcctttctttggaaatgtcatgtcaatattgttgttgtactgtacttcctcctgttcagaaaatacgcaggaggttttttgttttggaagagaaattacccgtaaaccattcaaccaacttgtttggaaaccgtgtttttcaagctattattatctctgggttatttttgcaaatagggatatgggttagaaattttgctgtacttcttttcataatggaaaagacaaacggcgacccatttgcagtatctttgatatctgtagcagaatttgcaccaatctttattttctcttttattggcggaacatttgcagatcgctggcgtccgaaacgtaccatggtatggtgtgatattttaagtgcaatatctgtatttgctgtgcttgtcacgcttatacttggatcttggcacgttgtttttttcgcaactttaatttctgcaatcctttcccaattctctcagccttcagggatgaagctgtttaaaatgcatttaccggaggagcaaatgcaggttgggatgtcagtctatcaaacggtctttgcgatattcatggttctaggaccaatactagggacatttgcctttcaagcctttggtataaacctctctattgccatcacaggtacagcctttttactatcagcagcagcgctcacttttctaccttctgatcgaaagatggaagaagagaatggaactacatcactgctaagtgaaatgaaaagtggcattaagtatgttttggggaagaaagagttgagcctgttaggtctatgctttttagcagctggactaggaatagggtttattcagcctctctcaattttccttgtaacagagcagttaggcttagcaaaagaaaatctccagtggttacttacatctaatggaattggcatgatcttaggcggagcagtggtaatgatttttgccaaaacagtagctccgcaaaggctgctggcatttggaatggttggtaatgcaatagggtttgccataatggggttatcagtaaacctatggctgacgctgggagctcaatttctaaatggtctcatgttaccgtgtattcaggttggcatcaatacgatgatcttacagagaacggaggctgcttttattggcagggtcaatgggattctaagtcccctttttacgggagccatggtattgacgatgagtatagctggtattctaaaagagcagttttcaatggttgccatatttgaggcagcagcagtcttatttattataggtttgctttttatattacctctatataatttaaaagaggagacaaagcaggaaagtataaaattaggggagtaaaaaaactctttataacttcttatcgaaatatccacaatgaaaacaaacagtttcattataaaagtacaaccaaaggaaattagaatgaactatggtatgttttaattctaaaaggtgtggtacacatatagtacagggccaatacaagcatttaagaggctactgtgaaaggttaaatacttagcttaatgaagggactggttcggttttgaaagacgtaacagcgacttcagcaaacgtattaccccaattgacaagtaggtattgtgatttaacgaatggcactctcgttatgaaccgatatacgtaacgaaagggcctcacaagggcaaacgagcatgagaattattttattgtaagagagaagagcctgcatcatttttgatgcaggctcttgccatgttgataatataaagtaaggtacataagggattgaatcccaatattgtttgtagataaaagttctacttaatttgaataattgttgatagatgtaatgttttgtagataacttagttgctctcacatattgaatatttatcctatatcaagtacaataagttgaatataagttcaacttaaaaaatgaggtgtttataaatgaaaatttcacgctttaataaagactgcggtaactctgtcgatatgaatattatggatggatatctatttgatttcccaacgaatgtagtcgaactgcaaaaagatgctgctgattcgttctttacagatgcagtgacag

SEQ ID NO: 115 - DNA, 6454 bp, Priestia aryabhattai
  source 1..6454: mol_type = genomic DNA
tagacattattaaacacctacttttataatggccgtacttaaataggtaacgagcttgtgtcagaaaaatttatattttattgtagataaatttttctttagagtgctactgaagtgaagaaataaaggaaacatttatttttttaattttttagtggaacaaaacagttcgtataagtatatgtgattaggtggacgttcgtaatgttgtttaaaatgtaaacgaacgttaaaattgatagtttcatttttaaaacctcacgtccgtaaacgtatacttttacggacttttttcagtctttttatatctttttgttgattataacaactggtctacatgaggtctagctataattgacgatcaagataaatattggtaacatgaactgacgaacgttcggaaggagatgaggttatgacatttaatcagcttaaagaagctgcactaagacaattcgcactaaatggttatgaaggaacgtcattatcatctattgctagtgaagttgggattaaaaagcaatctatatatacatattttaaaagcaaagaagagctttttgttcactcttttaatgactctttgtcatgcgaactatattttatagaacacttttttcaaggaaccaaccgtacgttacctatagagaatttattatataagttcttaatagagtatttagatcgttatgaaagaaatttcaacacaagcttttttatccgaacctcatatttccccccacagcagcttagggagctgatagtacgtgactcttaccaaataacaaataatttggagtgtttattagaaacattatttaaagaaaaagagcatttattaaattctcaatttagcgctgatactgctacagcagcctatctgactatattagatggtttatttgtagaaatgttgtatggaggaaggtcagaacgtttagataaaagaatctcttcaacttggaatgtcttttggcaaggaattaatggtagtaaacgagcatagacatcaagcttttttaactttcatttacgtaaatctttattcctaacaaatgaaaggaggaaaaatcatgaaaagtagacaagaagccattaattactgcatgaaatataggaatgtatttgaagatcagccgtttcgagataaaaattggactaccattaggcataaagaaaatcaaaaagtttttgcatggatttttgagagagacgaccatatttggatcaacttaaagggtgaaccagaagtaaatcgtcatttacgcgaaatttatcattccatagtaccagcttatcaccttaataaagaacattggaattctatcattctagacggtactgtaccagaaaaagaaatatatgaaatggttaaaacaagctatcatttaacaaaggagaggaaaacttatgaaaacaagaataactgaaatttttggaattcaatatccaatcgttcaaggaggattggcctacttagcttatgctgaattagcttcagctgtctctaatgctggcggacttgggcaaattacagctgcaactctaggaactccagaaaagcttcgtgaagaaattcgtagagtaagtgccatgaccgataagccatttggggtaaattttgcaattgcgagacatgatgggcattataaagacttgctagaagtggctatcgaggagaaggtgcctgctatctctataaccggagggaatcctcaacctgtttttgaacggataaaaggagaaaatattaaaacgcttgttctagtttcaggagttagacaagcacaaaaagctgaggaacttggggctgatgccgtaatggcagtaggacaagaaggaggcggccacttaggacgggatgatattggtacaatggttcttatccctcgtgtagttgaatctgtgtcaattcctgtactagctagtggaggcattggagatggaagaggcttattagcagccttcgcccttggagcagaagggatagaaatgggaacaagatttattgctacacaagagtgtgtacatgcaaaccctgtatacaaagaagcacttgtgaagggaaaagagacagatacagtcattatcaagaaaactttagggagtcctgggcgtgttttagaatcaaaatatactagcgatattattgaacgtgagcacaaaggggcaacttatgaagatttaaaagatatggtcagtggtaaggcaaactgcaaatatatttacaacgggaatgaaggagagggatttggttgggctggacaggttatcggactaattaatgatgttcctacggttcaagaattatttaatgagatgatttctacagctgaacaaggaaagcagcgtttgataaacattttagaaacaacaaagaacttttaatagtgttccagctttaagtaatatattaactaaaatcggaaattttagattatgcttgtcttattatcgttaaaaaaataaaaagccacctctggtcgtcgatgaggtggctttttgaacatcatcattatggaatttatcccttatatattagcatttttttctaaaaaaagctatatctactgaggtgctgcatatgtataaaaggtgcacttcttatacattagtttctcaaccacctgctgagaaaacgttgaaaaataaacagtgtataaaaagctgcatactccggaaaaagaaccctcggcggaaccgttctgcgacaagggttcttttttgggttgtgttccggaaagaggtattatggtgcgacaagaagtcgctttcttacagtgtagctaacgctactcatctagacgcaaagatgatctccatccgaaacggcatgcttggtaacgagtctgtcggttgcatgaggaaatgcggaaacagaggacaaatgcatggtccagaatactgctaggagaagataggtatggtaaacgaaagtgaaggtttgtaagcttcgttactcttagcccaagataatgcatagattggcttgggtcttggtaagaggaaaagtagaatcataaggctactctaatgtgtcccgcatcttacccggagtaaagaacctacctacccctatcgcatctgtaggatgtggaacttggtaagccctatgtcatctgcacaagcagtaggatgactgcaaagtcaaacgatgtggcagagggtatgggatatgagaaaaagcgaaagccgttaccctgaaaagggagaggaaagcagaaacattgtataactggacggatactgtcgtctctattgacaatgacaggctcgaaagagcgcccacttctcattggtcttcaacacgaaaataaatttgtggctatcttctaacgaaaaggagcgtgctgttatgaatacctctctacgagcgtcggcgcacgtctcgcataaaggttggtactctattgattggaatactgtacaaagatatgtaacgaagttacgacaaaaaatttatcgtgccgaacaacagaatcagcgaagaagagtaagaaaacttcaacgtttactccttaggagtaaagcaaatctactactctctattcgcagagtgacgcaacaaaataccggaaagcgaacacctggtgtagacggctatacagtcttaaaaccaaatgaacgtattaaactatatcaacaactgctaaaatgtaatgtctttcagcatcgcccaaggccagcgaaacgaacgtttatcgctaagaaaaatggaaagctaagacctctcggtattccgacgatacgagatcgagtgtatcaaaacgtagtaaagaatgcactggaaccgcaatgggaagttagattcgaagccacttcctacggttttcgtcctaaaagaagcacacatgatgccataagtaatctctttaacaagttgaacacgaatagtaagaagaagtgggtatttgaaggagacttcttaggatgtttcgatcatcttaaccataattggatagtagaacaaacatcttcgttctcaggaaatactctcattaaaagatggctcaaaatgggatacatagaacagggtacgcttcgtaaaacaacagaaggacctcctcagggaagtattgtgtcccctcttctggccaatatcgcgttatgtgggatggaagaagagattggtatcgtctatagaaagacatacaagtcaaatggaggatataaaatagatccaaaatgtaaaataggacgtattctttacgcagatgacttcgtcatcgtaacggaaacgaaggagcaagctgaaagtatgtatcagaaactcatcccttacttacaaaagcgaggaattaaattgagtgaagataaaaccaaagttacacatatcaagagtgggtttgatttccttggtttttcactccgacaatacaaaacggaacaaggcaataagttattaatcaaacccagtaaagacagtatcagaaaagcaaaaagtaagataaaagatacgttcgcagtgatgcgaggacgaccagtaaaagaaattatacatgtcctaaaccccattatttgaggttatggacagtattggaaacatgtcgtgtcgaaaaagacgtttggttatatagacaactacgttttcttgaaaataagaaaacaccttagacaattgcatccaaggaagtcttggaagtggattaataagcgctattttaagaaaccccaccacggtggaaataataaatggattctaacatgtccacttactaatattcaattgttaaagatgtcttggattaaaatagaacgacatgtcatggtagcctacaagaacagcccagatgatccgaatctaaaagagtattgggaaaagcgagaccgtaaggtctttaatagcgaaaatactttagataggatgaaactcgcaagaagacaaggatatcgttgtgcactgtgtaaatgcactttacaaaatggagagaaagtcacagtgcgaaacctagaggtttctacaggtaaatttgctaaattagtacatgtaccatgtattaaataagttgttcggataaaaagaaggcttgagccgtatgacgggaaatctgtcacgtgcggttcttaggggggcgggcgctcgtgagagtgcctgcctacccgactaaaataaaaacccaactagaaatctattcagttctaattgggtttttattttataagcaatcttcaaatgagatgaaatattaaatttcattataaaacttaccttaatgattaactagccatttttagaccaatcacccctattaaaataaaacaaagagatataagttggtaaatccctaatttttctttaaaccataagatgcctgttaaagtaattcctacactcccaacacctgtccatactccataagcgactccagcaggaagtatgcgcatagcattagataaacaataaaaagaaaaagcaaaaccaatgaccataacgaacaatggccccttctttttaagaccatccatatacttcattgcaattgtagcaataacttcttcaataccagctaatattaataatgcccaggccatcattgttcacccctgctctcgtgttcgttagtaaatgttttcattccgacaattcctgttagtaaaattaataaaaagataatttgtgtaatagagaaaggctcacctaagtagacccccataagataagttcctgccgttccgatgcctacaaatacagtataggctgcagcaactggaatctttttatatgaataaattagtagaataaagcttactaaaattaaaataaaggtgataatccattctaaaagtgtatcggcatacttaagacctgaagcccacaaaacttctaaaatcccagcaataacgaccaataaccatttcattttactcactccctaaaaatgactgactgtcattcattatattttattttcaagatactgtcaaaaggaaaatgattataacatttcactatttttcagtagtttgaatgatacttaatatttaaaatttttaaaaatatcgcgataaaaaagaacccttatgacaagggttcttttttatttgattcctagagtgatgattatgttaaataattatacatatagttcagtgtgaagtgaccccatgaattatgtcaaatctgtttcttttataatatgttagaccctgtaaaatttaatttattataagtaaaggagagtaattattatggctttagaagtgaaagctcaatgtgagaggtatacagccaaccttgataaatattcaattgcttatatctgtttacatgaatgtactttttttgtagattgcacaaaaaatatgagtcatgtgtgccctaattgtggaggagaactagttagaagaccaaaaatgggattaattgaagtaagctatccaataaattagtcaataacatcgctaagctattgtaaattaaaattcctttttaggttctaaaaatcgtgaatat

SEQ ID NO: 116 - DNA, 6395 bp, Priestia aryabhattai
  source 1..6395: mol_type = genomic DNA
tgctcgtctattgaacataatatcctcttattagtttattctatttaaacattacccggaaattcagggtattcataaactttagtaagatctatttcttgctgctgtttctcttccatgttgagcactcttttctaattgactcttattagactaccacaaaaattgaagatgaaattattttatgtaaaacgaacatcaattagtttacttaacctcattttgttttttaactcaaataattcatcgataaaaacaaacaaattccccagggaatcaacaaattgtatgaatcctgtttcggttatacgctgaccgttcttataaagcgtaaattagcctttgtagatcaagtaatctggaccatcaaagatttattttggaaacgaaatatgttgatttaaagtgaagagcgattaatggaatctcatcataaaacatacatagatggagggagatgaattaaataaaaagagagtaaatcatcttttttatttgtttgtcctgagagaaagtattgatcatagatagggggttctgacgtaaaagtgttaaaatgttgaaacagcacccctgaacgggtgctgtgaattaaactagttcatcgttttgtttttttaggaacttgttttccaactctaattgcttcattcgtcgttgtaatcctaaattctctaagtcttgttctaactcagacgataaatcagttcgttctttagcattctccatttgttctctagtagttgcaaacctcttttgttcttttgaattcatattaacagcccctttcccgtgactttctaggttcgatatagcaggtgggaaatcctgcaaaaaacacatttacctaggaatgcgaccgcattaccacacaaaaaaacatccgtttagataggatgtttttattctactcttatttcgttttcatctttatagcctgcccctggcgagcttcaattttttccatgacctttttatcctctagtatgttacgtctgttttcattgactaggttttgaaaagagggttttaactttctcataatggcacttctttcttactgtttagtttagtccgtagacaagtacgattataacgattaaatggaataaagcaattatttgctatcaatacacctgtactttcttttatctctatgcgtgaaatagcctttagaaagacatatgaatctttagtagtttggatgcggattttatgggattttggctttatcgtcaatgagtttggcgcgattactatgttcatggataacgcccaatggactttattttaaagggatttttcttcctatgttgaaagtgaaaatcataggccgaaaggggggaaatacaatgaatccatacgaacaattactattaaataaagaactagaagcgattgccaaacaacgaattgaaattcataaaaagcgaataaaattatctgaggagttagaacgagactttgataataaagatcttcaaaatagaattattgagttagaggaagaaagccaaaaacttaagaaaaaaagtgaaggtttacagaataacttttaagcatcctttcgggatgctttttttgattaaactaagtttaatcaaaatggataattttatcgaatctacatatgttaatttgaacgaattactgctctcctacgttgcctctaggatttttttcgcaaatttctaacatcacttattttgctaggatgtcccacaaaataaaaagcacaaaggacgttacttccgtgccccaaaagattttaccttattatagaatgtcgccttcttcatttaatactgggaattataaagtgcgctttcacggcctggaaacgcactttccgcatatgcttcatattcacttatccaacgataccactgaacggcagccattttaaattgaagatcataaacttttctacccataaaccgaatcatctttttctgttctcgtaaggaaactagaagattagcattaggatgcctcatagcatcttgagtagtttgctcaagaaataaggttttatttacaatgggtaaggttagggaaatgtgaatttacaccgataagcattttgatatagtccttataaaacagtatcaaaattaatttagagataatttgaactttatcttattgagattgtgagggcttctacttagactaacaaagcaggttaggccaataaagttagtattaagtgttctaattgacaatattgaaacaaaatattatcatgtaagtagtaagtagtaagtagtaagtagtaagtagttgattttgaatgactcatcactttactctttaaaataaaaggaagtgtttttatgaaaaatatagaaatttctcaaaagtatttattactagtactaaatgatagaggtggagttgctcctattggcagtctacgtattcgtgcatttatggttgctagtggaattttggaacttgctctggatgatattgtttcattgtcagataatcaagtgacagtaaaacaaaagttgccaagtgataaagagtatttgcgttcaatctataataagatttctacaggaaaatcaattcatctgaaaaaattagggagagaattggtttctaaacgtgaacttttcaaggagttattcaactcagttggtgactctttagttgaattagatatagtaactaaaactaacggaggtatctttggacaatctaatcactatataggtagtgaaaattctaagaagcaagttgtggagcaaattcgagcagagttattagaagaggggccagttacaactgacactgttgttctctcaagtttgttaataggtagtcgtgttttgaagaattatttcagtaagtttgaggacaaagatcttaacgacaaactaattatgcttcgcaaagatacaaaaaataaagaaatttttgcaatgatagatagtatatcacacaccattactacgatcattgcgtccgtaggttaattggagggattgtagtgtcaagaagacgttcattagaggatattctacaatctgaatatgtatctatcggagaattatctcgaataacagattcgagatacagtacgttgaaatattacacagaagctggtttaatccaatttgaacaatcagatgaaaatttaacacgacgatatccaagagaagcatcggttcaaagaattgagacaattaaacgattaaagaaatctggtttgtccatctcggaaattagtgattgggtagttaataataattaaaaaatattcattatgaaaagggactgagactagctattagtttgcacttgaactaaagatgctttagttcaagaacttcaattgaaaaatacgtatcctgaatgcaacataagtgcaaagaaaccccaaagaatctataggtttctttggggttctgataatattttttcattattggcaggttaacttaacatctattgagtttcttataatattgtttataattgaactataatattgtgaactgttcaaatatgaacaatatataagggaagaggaatctattatggaatttagcaatcaggctatagaacaagcagcagaagtggttcaatcttttatatcagtgaataaagcaattataaaattcactcaaagtaatgcttctagtttaggactgacagttcaacaaatgggtgttttaaactggatttcctcaaaaccaggaagcactctaaaagctgtaacagaacaactgggtatccctaaaagcacggtaagtgtgagcatagatggattagttaacctaggattagttgaaagagagcaatcaaaagaaagtcgaagagaagtaaatttaaaagtaacaaataaaggaagaggcgtatcacagaaatcaattaaaaatgcatcatcatataaagccatggcaagtgcattagaaaagttttcgaaggaagatgtcgattcattattacatatgcataaaagcttattgtcttctttaaaagaaatcgattcttaacaaatgagtaatccgattagatatcagattgggttactcatttgcatacttagaaattaaattatggtaactagagttatcggcagaatatagactcctattcaccggtcattttttaccgtatttcataatatgaggaataaataaacaaatgattactccatatacgttataatgtagaaggattctataccacatgaatagacacctctcgcatctcttttttcattagataatagaatccctgataaaaaatagtgaaggagagggttttatgatgagaactaacaagaaatgggtaataggtatcatggttgcatttttatcttgtatattatcaattcccacgatggcttcagctgcaggctttcaccatcctgaacattgggataaaaacacggttctcaagcaaggtatttctggtacagaggtaaagaacatgcaatacattttaaatgaaatgtctttttatacagaaacaggaattacagatgctgatggttcatttggaccgaaaacaacagctgcggtaaagaagtatcaaaaaggaaatggattaactcctgatgggatagtaggccctcgaacatggaagagcttttctcagtatattaaacgtaagaatacatctacctacggagctggtggctatatggcacttagactagaatggatatacgacgatacgtcagatgcttctccttcaacaacgaatgtttatggtaatggaacggataaaagtgatagttatcgattattctctaaatgaaaataaccttttgatatcaaatatctgttctgatgcaaagtttgggttcacttccatgtaaatctttaaaacttatagatatttataaggttagtccaaaaggagccttgtatgagtatgaaaactaaggctgcaatcggttttagtatgttatacggttcatcaaaagagcagtttgcaaatgcaaactgctcttttatttacgtatcttcatgtgtaatactccctgggcgttattctaaaggaatccctctttttatgtcgaaaattagtaagtattaaggagggggttagatgtctaaagatttagtggaacacctgctagataaaggctttaaagtagtagatctgaaatgtgtaggcactataaatatcatttcagcaaaggaactgtatttagaagaaataagtactgacgccatagttgacatgttatcactagatgaaaacagcattaagttttcccttgatgaaacacttccttattttgaggcaagtaccaaaccattagctggatatatcaattcagaaagtgaactgcccataatagaggatgcaattattgactacaaagtgtatgttaaagaagcaattattcagtctaagtagttagcaaaagagaagtttatatttgtaagctgctcttttatttatgggagataatcgactgcttttttcttaaactcaatgtcgaatgttctcctctttttccacataaaaaatcccttccatagtagacaaactaggttgctttcttttatttatctactataaagggagcataccattttagtggatgtcttttttattaaaatggtaataaggttgaacccttttcaacctttaaatgtacaatttcgcttatcttaattgagtctccattcttaaatggaacaaaattatccatattttcctgaccttcaaagtatgctgttaattgagtttgaatttgactttcatacccgtaaccagacatctcaatggagccagacacatcaaaattctgttttgttttgacactaattaaatactgaacttctggttttgctgaaggttgttcaatgtttataatttcttgtaatgtaatcattgtatccctcatttcaaggtatgttttagcttcaacctacaattctatttgccttcttacattctttttctaattcatctctctaattatatattttaccagaagattgagaatactaatataactaagaacgtctaggaagtgagatgaactaaagaatgggcatttctaaatttgataaatgtgttgtaattgaagaaacaattattaagggaagaatcgaacaattttataaaattatcaatgaaacgatagataaacctgatttagataaaatgatctttgctacattacacaatatcgctttttgtgactatctattgggtaaagaagtgaaagataataaacggctcaattcattacttgatgtagttaataaaagacgtaagacagattatcaattatccgatttttatattcgtttttaactccataataaaaaaacgttcgtaaaggtatatgtaaataacagaacgtccaaaaattgtttttgaacttttacggatatatataagtagaaattattaat

SEQ ID NO: 117 - DNA, 6278 bp, Priestia aryabhattai
  source 1..6278: mol_type = genomic DNA
cctattgtcatatgaggaattctattcatttcaaatattttatagatatcagggtttttcttgtttattgtttgtaaatgcttagaaacatctacctctgaaaaaacgatacaatccattgtcgttgatcgtaaataaaacttatatatatattgttttttactatcctttatataacctaattgacttgtatcccaattaagaaaacgggaagttgaaatgggtttaactacaatgaaatctgtagaaagttcattaagcagctctttttcatattcgggaataattgcataaatgtagcattctttcttataaaaagaagaaatttgcttaacaaactcctgctcttcaacttcattgttaagcaatatctctactttgcgtgtcagtttatccattttcactctcctaattgcatagattacataattttcacttcttagtagaagcttaatcccagtagttataaagaacttcccctaaagtaattggtgtccaatatgctatttgtgctaattctgcattatttagttggttgtcattttttattagtacagatccctttttacgggtgtacattaacttttcattcagtgactctgcatatagaaccttgtaaaaagccgaaaagaagaagcttagttctttgtcattaataaagatgattctttcttcattaacagaagagacaaatgcaacaaacggataatgcttatttagtaatacatagatctctttattactaattcttaaaatactaaaaagaaaattggaatgaacgtctgtatcgttacattccaatagttctccattataagttcttgcagcttcataactatgtattctaaactgcttaagactgctctcaggaggtttatccttgaggtctatataaaacccagttacgccatttagtagttccataagatacacccttataactcattttatttaaatattattactaaaaagaagttttatatcttgttcttcttcaccattgatagtcaaatgttcaatagcttcaatgtctataaacctttttccatcaacaaaaccaaatgagtccacttcagatataactacagtttcattctcaataatttcttttacaaaaccagtggttgagtactcctcactatctaataacataagtgagacaatataattctgtgctttagcaaattctaagccgcctataattaggtcctcagtgtctcctgtatatgttggatgaacttgtttcttaaggtcgtagagatttttaatctttttcagatattcagtttcagtagctactgaaacaacgctttctgtagaaataacgtagtgtccatcatataaaccagaagtcccaactgttgctaacagtgtgtactcttcattggtttgaagaatataggcgactaaacatttgtttacgtcaccttcgcatgtataaatctccagtaaatctgtgcttttaaacctacctaataagtgtttcatataatctccccttaacttaactgatatatgtttttctattttttggatattgaaaattatatcatatggttattcacttgatttgtccatttttctatatcagtccgttcatttaagcagaaagtttaaataaaaaattctaagctgggtctctgcattcatacacttcatgaggtttcaaatttcttactttaaacgacttcatctcccaaccgttagtttgataatcttttctaatcgtcactttgaaaatatgagaaggtgaattatgaggaccaaagtatgacatgccttcaagtattgcttcaaacatcatggaacctggatggtccaattttttaatggataatacctgctgacaatcaaaccgtactcccttactattttttgcgccgtagtatttttctgctgcttgtgtcctttgactatctaataaatcaatcacagcatcttccaaaatgttttcgcgagttgcttttgtcttggtgggtaagtccctcgttgcataagatgatgattcgtttgatactagcaacagagtaaatatagttactataatttttctcacttttacatttaccttcctacatacgtttaatttgaaatcatggagtttgcaattttgagtaaatcatttgctgtaacatctttttttgtagctttactaatgccaactgtatacattagcttcccttgttgaaacagcaattgttttgccggaaagtaatttggctgatataaagcttttgttccgttttttaaagtgtatggaacatctttaatacctttacgatcctccagagagtgattagtctctgctacctttagctgaaacaagccacttaacttatcgtttcggtaacgaataattagcgtatctttatcttgttgggtgtcgacatgtgtgacttcaaaaggaaaagttgtgggtttcagtatatcaacatgatgtcttttctcgtatttttcaatggctttgatttcattcataaaagggttagatccattgtatacttcgtttatgtctgtaatttgagttttagtaaatgagactttccaaatgaatgcgattctctcatttgctacttttttatcgttaaaatacccaataaggattagttcattttctttggatgaaggcaacccttgtatggtaagtaaaggcgtgtcttcacgtatttctggaatatctacgtttggagatacgtgtttttctgcttgttcacttcccattctcgtcaaagaatgaacgaagttgtacaaagcaggtctagtatccgaataggccgaagccattggagtttctgaaaataggaaaccaatagcaagaattaagcatataaactgtttcattttctgtacattccttttttaaaatttacacctgcgttgttttttatgtttataaaagagtcacttacatagagccattcttgcttgcagtataggaggaccaagcttttctgtttttgaattcgaaagacgaatctgtattttcacattcttcatatctgctgtaattaaatcgaaacgtcccgcccatgtaggactttcatcttcgggcgtgggatacatacggaacctccaacttacttcattaggtacagaagcaacaccgtcatatccatcatagcgtccgtatgaagatggtttaggaagatgaacgcctaaaatactaatgtttgtccgtggaaaactaggaggactgcctaattgaacgttgtaaactaatgctgaccctttggcatttttaagatttttattgacaggttctaacgcaatcgtacatggcattttatcagcatgtgtttgaagtggatacgtagatatgatgaatatcgtcaaaattgttagagtcaaaagcttgatgacaaccatctccttttttagtaggtttcttataatgaactgtatctatacagaaaagctacctttttacatttattgtaaactcaattatatgaaaacaaggtaacactaacctcatatgtagatgaaaaaggaggaattacgttgataaacatgttccaattcgtgcaccatcatactaaaacggttagcagtaaacttatcttgtttatatagaatcactgtatattccaacacaaaaagctaccatacatgggactttccccattgttatggtagctttttatataaactttcaagtttgatttttaaaaactattcacttaatattttacttattgactccaatgcttagggttaaggagctcaataaaaataaattaatgtcattctatgcccctattcaattcgtaatagttttgagcagtgtaaataggccaatcccaaaagttggaaccttgagatataatgaagcgatcaaaaaataattcgaaatttaaatttaagggtctaaattcaaaagcaggatttcctaaaaacaaataattaggattacccttttttatttcttcaatattaatagttaaatgactctcagacacataacctataggtacaaattttttgtctagatatgcatcctgtaactgactttgaatttcgacgagagaatacagttgtaatccccctccaatattagtatcacccagtaagagctcaaagatttttgcaccattatgatgttttaaaaaagttatataatctttaggtaactcaatccctatttctttttgaaatgatgttagcttttcatcaggtataggagaattaaaagagcacgacacagtttctgtgtttccttgttctgatagaacttgaacaccttttttgttattaaattttgaatgtaatgtctccaaagattgttctataaataacacctttaattcctccttaatataacttagtagttaacccaccaaggagagacaacctgttggtgcaactctctagtcagtggatataaatttgaaaaattatttgtacctccatattctcttgggaccacatggtgaatatcagcagttgaccaatcccatttaggatccccataggtatcaataaactttttaatgtattgtcctcttaacgtattgttccaaggtactctcttttcaattggtactgctttcatatctgctctttcaggaataggcatggattttttcataaattcagtataaatattaggataaaattgtgcttttttgtttgttaagacaggtcctgattgtgctgtatcagtctttggatttcctcctgcccatcctgcagtaataactgaactagtcatccaaaaatttgtagatgttacattatatactttggatgtttgctgccctacttttatttgtgaacctgtccattctttttgtagaccagctactttattaaatccccctaacacagctttattactatataagttgtaaccagttataataatgattggtggtgtacctattatcttattaatagtcgctgtcaaagtaatattcttcttattactatcaaatgtagctgaagtatttacttctaaataactggctgcagttgcttggggagacttgatttttttattgatattgttagggcttaaggtagctttctttgaagtattataaattttattttgtcgatgtttattatattcttctttagctttcgcttctgcattcttaaaatcttgtttagtaatagttttagtttgaccatcttttttgtattctaagtaaatattttctgttacatgatttactttcttgtctactaccttatatccgtctggactagctacattttcggcagctaaacttactcctgtaaatgaaaatgtagagactaaaaacagtaatacaataagtgacatataaaaaaactttttaaacaactctttcaccctttccaaatttttgaattaacaaacattatttttcgaccttttatgacgtgttccttctttttgtaacaaaatagttaatttatcacggaaacagaaagaaaagtgttttaattattacttatattattaaatagctacattttttagttttttgttagtatatttttaaacttacaagacagtttggaaagtaataaagacgctgacctttgcagtaactcctttttgacatgtgttttgaaaagagggtttatgtaaattagaaatgaatattatatacaataaattttcttcaaaagcatatcattgtaggcaacttttgatgatttaattctgtgaaaaaataaggtgaggagtgaatcggcatgtgcgaaaagggaatcgcagattgagaagcctaggtttgggtatatggacaattttcaaataaatacgtatatgaaatctttacggatgagagagttggattttggttcaatgacgattttaaagaagaagaccctgatgataatttgaagtcgcaagaggttttccttgaaatgtgtaaattcttagatacatatcttgaaataggtacttactttgaggtctatgtctggtggataggagaagaggaagaagaaaggaacaaagaatgtgaccaagctatcaacctaagtgatcttgatattaagaaagtgtaaatttacgaaaagacattgttaataataagaaaatagattaacaagaagcacactatacataactgtaattacgttaagtaaatagtaaagtattttacaaaaataaaagttttatcgtttactctacctaacgacaaaataggaattattctctctgtgtataaattttataatatcacgggaaatggtaagagattaaaagaaacagaaatttttaagtaagtttaatttaatgttattaataagagtaatagttaacgcattttattaaaaat

SEQ ID NO: 118 - DNA, 6239 bp, Priestia aryabhattai
  source 1..6239: mol_type = genomic DNA
tttcttttgaaagtgtcaatcctttataaaaaggagtgtgctctcatgcctaagataaccaaaaagagtaaattaggaaaatacttaatgaacaaaggctataatcaaacagaaatagttaaagtaactaagatggatagaaaaacagttagcaagatttacaatgattcaaattacatcccatcaggtaccacgattaagaaaattatgaatgtcttaaaaaaaatcgacccaaaactgaaagtagaggacttttttaatttataagccctattgtgggtgaatagggcttatttattgtactaaggacaaaaactttataaaaaggagcttttataaaagtttactagcaatctatatacagaagaaaatgagcatactactccaagttttgataaaaacggtagattggaaattccatgatttcttctttttcctcatcaggaagagtagcaaatattctcttcgcttttaccttatttttcaacaaaacttcacatgcaaaacatattgtttgctctttattagtctgtgctctttcttgcatatcataaaggtcgatttgttcatcttctgataattcatgaccttgtttaagtttaataagatagatgttaacctttgcgatattatcttctggatacttagctaagtatcgttggtttaaatcaagagcaagttctaaataattttcatcgagggttttatcataaaagtctatatagcctaaagaactagtaattgttaagtcagcttgtatatcatgatgtccatcggcaaaagacaattttactatttcgaaatcaaagtttgtatctttcaccatttcttcaatttttcgagaagcgaaaatgcttactttttggtcataattttccttattatcaggtaacataacaggttcaacagtatcctgcccgtggttactagctacatctgttatagatgaatatctatccattatttttaacgcttcttcactataaaggttaaggaaacatccatctgcatacactaatgctagtttcacatatttagaaagttcaatattgattatctccgttttttctagtttttcttgatgaatattcagcaagctatattgtttatttttaaagatattgattatagtattgaatagggaaggtaaatcttctttatcatcgaatatataatcttcacttattccaatttgagtgcaaatatctatcagttctttgtaagattcaatctcttcctcaatttctttgagttgtccctttaaatttaatgttccaccagataactgtaaggattgaaaaggaaacttattgcgctgtatgtaatagtttattaatcgtaaacatttcatataggagccgaggctttttactctttctagatggaatagaccagacttctttctcctatcaaaatccaacgttaaattatcttctataacgaccttgaaccctttctctgtttcaatgatttgataagtaacaagggtggattcactgttcatataaaccacttcggtttttctaatttttaactcatctgacttagcttcctccactggtaacctaatagcgtcgtctgggataccatatacggggatcaaccttccaaataaattaaaatcttccttttgcatgttaacaatatctactttgtaaggcgtagatccttttttttcggatgcttcagtaaaacgcttttgctgtttgtctacctcttctataaatgtgtgacataaaggctctaaatcttcatttttcaattttttgaaatcaagggcaatagacttcttttcatttgaattaaggtgagataagagggatctcacttctagtggggctaatattcgataatacgctagttgttcaacaattgttgtatcagtttttggatcttttgctgcaatcttttttttggtctttgttgtaaccattcaattctctccttcttcatgatgaacatttaagtccgttaaaaactcatcgaatcttagtatagcaataataggacagcattcgttaggtaaattaaaaccaacagttttgtttctatgccacctcttgttcaatgaaatggttttactatcgaacaaaaaagtcctgttatatacaggatttttaatcaaactttattttaaacaatacaagtacaaactaaataaaataaaaaagggcatttctcctgatagagaaacacccccttgctacgataaatcattcctacctttattatatcatgggttgccctcaaaaaataggggggtcttatcatggatcaaagcgaaaaactattaatgggtattgaaaatatcttgagtgtagcatctgatttagttgatgaagttgcttgactaaagagtgtagaagaggaatgtaaaatcctgaaagagaaagtattcatgaaccagtttagtcaagcagaaaaagaagtctttgctcttgctattgatggtcattctatttcagaaatacaagacattctccataaagaagagttcacgattaggaatcaaagaagaagtatcttaaagaaattgaatacaccatctatgatataagctgttcaacagtttcagaatttgcatcaagagacctcacaaaaactaatacgtacttcttaaccatagaatagcctttaaggctataagagcaggcttaagcctgctttttctcttactcatgcaataagatattgcaaatttgctatgtagaggttgcatcagctatgcaacctctacaaaaaacatgatgttcattctgttgaacacaacgttcaccaaagctgaacatatatgttcacttccggttaacataatgtctctttcttcatatttttccgtaaatgtaatagaacagacttaaacctccttgtatgtgaaggaagtttaagtctgttttattgatgtatattatgtacatctttactttaaagcgttaaaatgatagtcttttagtggttattttaacttttatgtttaactagcaaattaattgggggatgagaccaatctgatgttgaaaaataaggtggaaaagctaagaaaattcgaagtggaatattctatatcaaagaataagactatcgttaataaaaccttaattatagaatcaattaacgatgcaaataaaattgtgaaattagctaaattagatatatccacaaaagaaagagccttcattcaagatgtgaaaattttaaggttcagggctatatgaagctcaaaataaagtagcaggtctgagcctaatgtttatgccatctaaaaataattaattatatacagagaaagagcattcctctaaattgagaaatgctctttcctataagcatgattttggttatcaaacatgaaaccaccgttaggctgaccacttatatcttactatctatgatgtcggaggatgtataaaaagtgcacgttatatatgtatgctcaagatcatcttatattgatttatttatcaaattattataaaattattcagactttttataaatcagtttaggaattccctcaaaagctacccgtcctgcaacgatggggtagctttctttttttatcagaaagcatattttcttagtatcctatgttaagttaattttgattccatttgaggatgaagatactcttgatcttccatctctttgctgtttagctgtacttctgtatttttccatcaattcatcaatacttattacttgtataatgcgaatatgttctgaagatactgcataacgaacaggcgtaatcaaaataacggacgggaagatggctgctcaatcctctggctgccaatgcaatgctttccattcatctgaaaagaagagcttttcatagagattaatcttggcctgcattttctgctcagaatattgatttcgttgaatttcaatccaaaaaggagatcctttaaagatacaaaacagatctggttcgatgcctccttttcgtccggtgggtttatcctccacaatgacctgtttaggcgcactatacgtacacatttgtttatagatatctagaatcgaaagaaaatggaggattttttgagagttctttttgattttcgcatctattggtaaataaaccgtcggagaatactgctgtgtgcgttcaatgagccctaattgatataaacgtaccatcacactattacaggcatttaagggcgatttcagctgtttgaagaagaggtccactaatgagtctcgatcgacggctcgaaactggttaataaacgctatgatgtctttatcacgctgagataaccgaaagttcatcgtttttcctccttctctaatagcccaaagatgggctgtgacacaacctccagttgcggttcaagatcttttacccgtgtcttataaggggaaagtatttccttacaagcctcttcatctaagaaataggcttgaaactctttcacgtcatcaattttaatcttcatgcgccccctggctgcggcatcaatttcttctgctccaattacaccggctacctttgcatttgtggtatcggcttgccttccagggattcttactcgtaagttggcttttaacgctgaattcaacaaatcggcatctggacgctgcatggcaataatcgtatgaactcctaacgcacgaccttggctggcaaactgttggatcatttctacaagctccgtttctctcttcactatgctcatctcatctacgaccacgacaatgcgagggagcttaaacggaagcctgctgatatgagtcacaccatgttccaataataagtctcctcgtcgatacatttcagcccggagtaaagcaaacggttttctcatatctttggattcaaaacaaagcgcatctatatgttcaattccataaaataaccctaaatcagctcgtttgagatccactaagactagtcgcaactcatcaggtgaggtgtatttcacccatgtggtgaggatgacacgcgccagactgctttttcctgcgccaatttcgccagaaatcagtaacgtttctaaatctgcaaaatcccatgaaacagggtttccatagatatcttgaccaatgcataccggaagctccattttctctatatgagggtgaatggtttcatacttgtaggtaagcatcttcggtaagcttttatggtggacagtgatactaaagttctttaggttgccgtttatttcgatgttgctgcctaatacttggcgtaaggcccatctctttttgtttaaaagttcaggatcaatgccatttagtaaggaaaaggcatagcgagtgtaggtgtgatgatgatcgatttgatgaattttcggaaacagataggaggtacggtctccacgtttcatcatccggtaaatctctgccgtacggaacgctttaatcaattggccacgcaatttgagcttttcaaacatacacattccccctcaaaacataaaggtcgcaaaaaagtaaaataaggcgctatagaaggtaacaggcaagataaagcgcatcacctttgagaactgatcaacaagatcaatgacaccccatcgttctaatattcgttcgatgatcgtaattcctaagacaatgcctcctatggttaggatagtggggtcaagcatggctagtggactaaaaggaacaaaggaataagccctgaaaggacgaggtctcgtaagagatgatttgagggttaaaggaaagatctttcgaaaaggaaacctttgtgtttttctcatgttgataccttctttcattctttaattttttgtctttcaggtatgagtaatttcagttcaccgcatccggtcgcccccttcgcctcttcggctcagctcccttacaggttacgtgaagtgcgtcattacacgtataaagcctgtattaacgaggtagcgatactgaactagctgctaagtagataatgaagttatgattctttagatactatgtagctactgcagtaagcttgcctgtctactcgaaaaataacaaagaacccttaccgcagtagggggatcagtagatggtgatgtaagaggtgcttggcttttatatgttggggattggcctaatggcttatatttttcatgaaatggacaagagagcaggggatgtcccaacgactacagtagaacgtaatgagaatcagtgggaacatgacaaattgtatgccccagatcctaaaaagtaattaatttactttacaatatattcaataattggataacagatatatgtcttgcacataattt

SEQ ID NO: 119 - DNA, 6082 bp, Priestia aryabhattai
  source 1..6082: mol_type = genomic DNA
taagtccggaaatttatatttttacagactttttatgatagataatcttaagtaataattatgtatcatatcttcgatgaattaatatgacaaaaaacaacattttccattatgctaacgaggtagtttagtacaataggaatatcactaaataatgagtgaaagaatggagttagcgacttatggagttaaaggaataccttaatatcaattttccaagtcttattttgaagcctagtctttatcatcaatggcctataggtattcactttgaattaggaaatgaaatttatcaatttaaaagtgaaaaggaccaggtaaatcttaatcgatttgaacaggtatacagtcaagctttatctatctttaacgatttattttcgctacatgacgaaataattcttgttacaaatgtttatcagtacaaaacctctaaaaacagaggacagcgaataaaggtttatgatcgctatataaaagataaagacttaaaatttcgtttaaagcaggaaactttaccttatgtatttggtgaggaagaagatgctgatgagtatagcacctcccaattttatttacgctgtcgtaaacaagatattagatacaccttattaattaaagctgtttgcaatgaggattttcccttgaagcctaaattaggtaaaatagaaggttcgtactatccagatttatttttcgtgaatgtaactaaaaatcttatcttttttatctacgacgatagaggctgtgaagttattgcgagggataaagagtctatacgctcaacttatgaaaagtactatcacttagttgatgaaaattatcgaacagagattaatctactttttaaataaaggattcttgagctaaatgcgattaattagaggaaaagtattcataaagcataattattttaggtagataaattaattagaaagcgagggaagtacatgggacttgatatggagatgtacggtaaagaagatcagtatcttgattttaaagaaattgaggagtcactacatgatgctctgtttcacacaaataataactggagaagttatttgtatttaagaaaaattagagattactatttgactaatgtagaatttgatcgagacgaaattgataaatttataaaggatttagagaacataagaatatttatccctagagattatcatccagcattgagtaaattaataaaaatattgagtaatcacgaaatccaaaaaatatctatagcaggagactaaaaaggcatattggaggtaattcatgaaaatttgggagctgaaagatactgatcagttggaaaaagaatctgattggaacacagcaagggataagttatatcataattggaaagaaaatccccatgacttgaaggtttttctgaaacttagctttttatgttggtatttagttgtagaatgggacgtagaaaacacgagtaaagtacaagaaagtgattatgatgactataaagaattgctacaggaactttatcagtatgggatcatccattttaaaggaaatgcgttttttaatgctgtttttggttttatgattgagttgtttccagaatactttggagaagattacgataaaacaaaagagttcggtgaatcattgattaataaatccttcaatttgaacaaagaagatccatttatagaacttatttacctttccggacgaactccacccagaaatccggcttttagtaacgcagtagaaaagcattctaccactgttaagaatagccttaaaggaacgggtgtttttcaagaatattttagctacatgctgctatctaatggaaatcaactttagtatctaatcgagtagaaattatgatgtattaacatttaaaacttctggaatatataaatgcatctttttatacattacttatcaattcgcaaaagttcgaaacgttgataaatcaacgatttatagaaagatgtataaacaataaatttaacacttcaataagcccttctattacaaagtcttgttgaagtgccgggttcctataggaggtattatgataactaaaattaatatatgattttgtatacgttgaatgtattataaggaatgtaaatggaggtattttatgttctttaaaaaattatggagtaataaaaactgtaagcatgatacatataaattagaagccgatttttccacagatcctatttggtgtaataactgtggagaaaaccttgatattgaggatttctcattgtctaatattctccaagaagaacttgagtgctgggttagtgattatggggattggattgactttggtgatgattctttaaaggaaaaaggaattgaaatggaaaacgagcataataaaaaaggtttagagctcttacgaaagataaaagaagaactaggaggagattatcctattatatttagtccttctacttccggagagctatatcaaggtgtaaaaaaataagactggtagggtttacgaagggtggagtttgatatagataaaatgaagttaattaacgatttaaaacaacttgaagttgaattgtatcattcatttcctcacgacgaggttgataaaatgaaaaatgaattcaatgaaaagtttcgagaagatgatgtgctaactgcggatctagacagttattgggccaatatagctgggagtttaagctatgttttaaaaggcaaaacgaaaaaaattcctcaacatcaaataaatgaattgaaattgaccttctttgaagtttttcctcaatattcttttctagaaaaagaaatttttaggtatccaactttttatgaggaatataaaatttatgaaaaaactagattgcttatgttaaattatttatttaatgcaagccaacaaaagaagcgctgataaattaatttatcagcgcctcttttgttcttagggacagtgtaacctctattagaaatttaattaaagcagattactgtaataaaatgaaatgtaataaatctatatatctatcaaatttcatatattttctttattcatagtgctatattgatattaaaaaggaaaagatatacattttatgataaagaaaagaaaaaagattttggccattgttatcatctcattgttattggttggttatttcaagctagcttatactccgtctccagatgttgagggatttcctatacctcgtgaagctcacttagtaaaaacaactgtggatgaggactatattggtgaaaaatataaatggtttattgcatctaaagcaggaagtattcctccttggtatgaaataagcatctggttgtggggctggagaaagggagaaacaatgggagcagatcaagtttataaaaaaggctctagagaagttattctatccacctttgacaatgagttttaccttagtaaataaaataaagatatagaaaaggacttaatttgaccgaggaatccttaagaggagccttttttattagtaataacatttgttatgtgaactgactttatattttttataaattcatcaaatatttgtactaaaattgaaggagtagagaatgaaaaaaatcggatacgtatttttaggtttattgctgttaattggtacaatctattttttattttttcacgaacgaagaggaatggataccgtatatttaataccaaatggctataaaggctgtgttggtgtcttttataacgtaaaaggaaagccacctttaaaagtccagaatgataaagttattcataaaatttctaaggatggaaagttagaaacatcttccccccaatcttttggttggtattctacggaagattcaggttggcacaactcagtatattattatgtgaatggtcaggggaaaaaagtgaaaaaattgaattgggagagggacattaattgggaaatgacggctgaagatgaccacaacggaaaatattttaccttttttgtaggtgggaaagacgatgctagcacacctcaacccgaatgtttcagtcaataaagataaaatggtttcaagaaggaaattctaatcatattctgttcattcttcctgttgcttttgctactagttgggcagtttcttatatttaataaaaaaagatgtcttaattgaacgtctttttttattagatactgagaacatgaattatggtattttaaaatgtatgcttttacggacggggtgtttgactttatttcaaaaaattataggtataaacatcctattgttaattgattttgtctttatcaggggcattcttaaaaacattttctcctgggtcaaatccctctggtctccagtagtgttcttcgtacttaccttcttcaaatatctttctgagataactgatagcatcaaaccatgtactaaataccaaaaatgaataaggaaggctaccttcatcattccatacaatccacttatcttctttagattgtgtaacaaggtaagaagcatcgggaggcattttgaatatctcatatgtattctcaaggacatcatcccaagagttaaagcctaattctttagcaaaagtttgatattcctttaaaaatatattttttacgaacctagaaacacgccccattatctagtctcctttcttttacttaaatatcaagtagttggtcattaatttgtactatttttgagtcttctgggaaagttgagcacacttcttgtatagatgaatatctatcctcgtttgaatacaagaaaaaccctgctccatcatagaaaatagttatgaatgtagtatcttcttccgtcttaaaaatagggatagatacgtttttccatctgccccattccttaactctcttgagctcaaaatttaaattttgagaataagaaagcgaataaaattcgttcatattagcaaggtaaaaggtatgttctaatgctaaggataatgtacgcgcgtctttaattggtaaagtaaaacatctagggtgataggtaacccgtttaaaaaatgtatagtaagcttgtttttcctctaataattcatagctgtattctatacctaattcattaaattccttttcaaactcctctgccatcatatcatcacaaaggaatgtaaggtataaaggatatctatcctgcttaattaagaaagcgagtaaaaaatccctttgttcatccctatcgtcaacgctttccattgtttcagatataaagtaaacagaatcaataggtccttccaattgaacataatgtcccaccatttcatcaaactccgcatttaactgttcttcttgaatccaaatctcactcatataaaacctccttcacatataaaagacctgcagaagctaataatttttcttatttggctttaaagatttgttgcatattgtatagaaaaaaagttaaggttcaaatttgttgtctaaaatagccatgcaaataacatctgggggagtagtaaagtcctttatgtacaagagcaaaataaaaagcaacctcatttttgtcataggagtaaggttgctttttaggattcacactcgttgaagaatgaatgccataaccattaaattatatcataattttccaatttatttatatttttcttgatgctgcatatgaataaaacgtgcactttttatacatcctccttccatttgggtatcgagtaaacgtagtcatatcaaggatgtataaaaagctgcatactccggaaaaagaaccctctgcggaaccgttccgcgacaagggttcttttttgggttgtgttccggaaagagtgattatgttaactaactttgcataccatatacagagtaaaaagagaaaaactcctgctgttgaccaggagttttttcagtaacgtatcaagatattaaaagtgatacgtaacgtatctttagtagtttgctcaatatgtataaaaattaatcattatataaaaacagaaaaaactccacaggaggtcgggagttttttctgttacttggatgttatgcaattagtttttatgagtggatgcttcacagcgtcttgggtagtttgctcatagtattcataataattcttcgaatttcctttttttctacaa

SEQ ID NO: 120 - DNA, 5987 bp, Priestia aryabhattai
  source 1..5987: mol_type = genomic DNA
gtcttttttgtgcttgtactcgtctttttctttatatttatcttttttgtctttagactcatatttgtcttttttgtacttgtactcgtctttttcttcatgtttatcttttttgcacttacagtcatgtttgtctttgctagcgtcatggatgacttttaaatcgtaatgctggccttcttttttgtttttgtaagatttactcatattgctttcctcctttcatattatattctatttttctacagtaaaattgcttgtactatacggaaaaatattcaacattacagcctattttttaatttttccggagagtcatttttaaatgtctctccggaaagattgttatttatagagattgataacttattatatatatatcaatctattcctaattccctaccccaaattgctactttttccagatgataacctagtaactcgcctccacggttatcaaatattcttcgtaattgggtgtgcaatcctttttctaatgttctttgtaaataagccattttgtaaagatctcttggatcagttttaaatttaattccatgctttttcatttcattaacgtaagttactatacaatgatttcgaatttcttcggcgtatttttgccaatctgctctgaaccctaataatatttctactaaaactaccatatcaaaccatgttggagcatatcttgctgactcccaatcaatgaactgaatattccagggataatcttcggtaacatctttactacatatattttgcatgtgaagatctccatgtgtaagagaagaaccactttccaatatttcagggaaaaaatccggacctttactatatagttttattaagggcttataataaggttttattaaatcttttgttctgtcatcgctaactgcctcatcgagaaaaacgaccgttttttcaatgtatttttctcgttcctttcttgctgatgcggaatcataagttggaagccaagaactccaagcatcgttatattttttgaatttgtcttcgaatgtgcgagcatgaagtttagcaaccgtgggaataatgtagtctaaatgttttggggtaaattttaattgaccgcgtatttgattaacgaattccataaatacccaatcttcatttagattcctttctacgaggtaaatttgaggtaaaaattctttcagcagtgggtgtagtttcttatatatattaatttcaacttcatttttttgagttgttgaactatagaccttaaaaataattggatagtaaccacttttttttcgaagtaataatttatatatgctacttcttttggttgatttcagacactctattttagttggatcaatgataactttttcgcccatggaataagaaagcttttcggaaatctttaatttcgtaaatagtttgtataataatttaggttcatacacaattttcattccttcctttgttgtttccaagcgttaaccaagtgagaacatgtacttctaataaatggcattgggtcattccatgcaaatagggcgaactctttttttccttgaaaacctttataaaaatcaataaaactcatttcttttctttttcttttttgaagaaaagtcagataatatcttactagatatatccatttaaccccgtctatttgatagaagatgggctcgggatcttgtttagttaaatataaataatacatatagacaaaattaataccagaaggttctgttaagctgtgtgttagccagaaacgtggatttatttcaatgaatttgtaaacaccatctcgaggatcctttttgaattcagccataccaatgcctttaagtccaatttcttcaaaaaagggtaaacatatatcaaaaagctctggaactcgcttacttataatatgtgcacccgttccaaactctgcaggaaattggtgatttttttgtaaggagaacaatgccattaatttcatattgtcatcgtagaaagtagcgactttataaaagcaattatcatctccaggaataatttcttgaatgagtagctttccatattccctgtaggtctggtaatcagcttttaactgatctaaatcatttattaagatagcttttttgttaatattttttctgaattcatggccaagaactggcttgaggatacaaggaaaatcaagattagcaatggcttcttcaaagtggtcttcattttccacgatatatgttttagggcatgcgatattatgctttaaagccaattcatatgccttctctttgtccaaaacttcttcaattaaggagtgatccggaagtaagaataaaaagtatttagacaattctttgcggttttttgaaatgaaaacaatataatcatcagaacctgcgtacaatacaggtttttttcctatacttttggaaagattgattaaaaacgtaagcaattcattttcttgggttaaagggttgggacatatatcacaagtcgctaaacgggatcttcctatcttataagctctctctgtatcaaaagcatatatttttatcccttttttagataaacttcggattattccaaccccatttgcactcaaatcaagtacaactgcacaatgttcatgtttcataaggtttagccacctttaaaatttattatatatactttctatttttcttatcattccatctgtggttaagtgtgtcttggcaaaattgaatgcattagtactagctttatctcgagcttgtttattaacaatgaaaaatcttaatgcttgtgctagttcttctgtatccccaggttcaacaacgattcctgttttaccatgtttaacaatttccggaatcccaccgcaatttgttgaaattattgccgtcccactatgcatagcctcaataatcgcaattggtaagctatcgttaattgttggaagtacaaaaatgtctgttttgcttaaaatataaggtacatcgtctcttgaacctaaaaaattcaccataggtaaatctaaggaatgcacttgtttctctaaagtttccctcatttcaccatcgccaactattaatacttcaacattatttgtatattgcctaatatgtgataatgcactaagtaaatagttatgcccttttcttggtcctaatctagcgacacatgtaattacaagtttttcttggggccccagctttttcttgtagtatttttctggataattaatacctgttattactgttgtcatttttgcgtgttttgctcctaattctgttaatgaatcacggaatgagtcactaagaataatgagctgactagcaaactctattgctttcctctctagctctttataataggtttcttcaatagaacccttttccattaaattgaattttaatcttttaaaagtgaacattccatgaggggtgaaaaataaaggcttgttgtaatttgcattaaatcttcctagaatatttgctgtaaatatatcctgtgcatgaaagatatcgtatttctccaaatccattttttgaagcatctgttcatatacatataagagacgactattagataagatttttttatcataacttccatatcttctaaggaagaattcttttaatttaggggtaatatgctctcgtaaattttttactgttgcactagggaataaattaggggagataacgtcaaccttgtgaccttgtttttttaaacctttactaagctctgtaatataattggataatcctcctatatgagggtagtcccaaaatgtagcgattaatatagtgagtttctttttggagggccgtttttgagggcttttctttgttctatagtcttccctaacttttactggcgggaggttaggtttatagtattcatccattttttcaatgatataagggtaagggaaaataagatctgttatcatttccaaacccttcttatcacttcaaaagcttctgcatacggcacaccaatagtcatgcctcgaactttgcctagatgtttaactccctcgtaggaacgggggtgagggaaatttcgcatttcaacgtcataatatttaagtgcattaatcttagcatcaatattacttgtgatatcaacaaaataattcggcttaaataggttatcagaagttgagacattccattcactagaggatacagtttcaaatgtaattaactctattggttccttattagggagaggtctagttgctgttaatactgctttaaatgtaatttgatgatcaatatttagatcgccataatgatgagtaaatattttactaggtttatatttttcaatcaatttttcaatttccttcgttaataaatgaagaggaattgattctaactctaaattgggatgcccaaggaatatcacttcatcaataccaagctgcttgtttgcaagctttcctaattcttgaatgtggtgtgcttcttcttttcttcctaaagccacaacgattgaaattacttgatggccttcatctacaaatctttttaaggttcctgctgttcctaatagttcatcatcaggatgggctccaattactaatatacaatctctcattttctttcctcctggttccgtattatatttaatatatgaggtacttgtacttttagaaactgtcattggcggagactaatagttataaatttagaaatttcctcgatgacagtaacctagaacgattgtatatttttaaatttttacataacaaataattatgagtggaaaaaaggaggaaattgaaaaacgttcgtttttaaacaatggtttaagtgatatatataggtgcttttttataagcactaaattaacacgagaaatatgtaatttttcttggttatcccttaattagtctaggagcacacaaaaaaagccagggctctccaaacctatggctttttaatccacttacataaaaattaaatttaattttggcgcgaatcttatagtatagtagttaactcttatttacttactatatccagagatacgctgcttaaaaaggaattttgtgatacctaattaaatggtattttaatacaaatattatcaatatacttataataacatgcccaattttatatatttttgtctaatcattaaattgttactccttataaattttataaagttagattattctaaagaaaggtcctcatcgatgttagccataggagatgttactggaacagtagcaactacaatattagttagtccatcaattacagaaattgtattttctacttcatgtgtcacatagatctgattattggatgaattaacctctataccggtaggctgatttcctacaggaataatagccattacagtgtttgttattgcatcaattacagaaacagtattacttcccttatttgagatataaattcgattagtggccgaatttatacctataccagacggttgagattctactaagatcgtggaaattacagtattagttaacccatcaattacagaaacggtattcttaaattcatttgttacgtaaattcgattgatatatggatggacatctatatcagttgggtaagtttctactgaaatcgtggaaattacagtattagttaacccatcaattacagaaacggtattacttcccctgtttgagatataaattcgattgatatatggattgatccctacaccggccggttgaactcctactggaatgatagcaattacagtgttagttgccccgtcaattacagaaaccgtttggctccccccatttgttacataaatccgattgttatttggattcccatttaggctaactggctgatgccctacaggaatagtagaaactacattatttgttgttgcattaacgacagaaattacgttattattctcatctattacatatagctgatcgttagaagctccactatcgctaaaattaacatttattttttttgctttcttcgccattttcaccaactctt

SEQ ID NO: 121 - DNA, 5976 bp, Priestia aryabhattai
  source 1..5976: mol_type = genomic DNA
aaccttgtatatcatatacagtttaaaaacagaaaaaactgctggtctcaacagcagctttttttgtttcttgaaaggtagtcgtaaagtgatgatccaatccatcttgagtagtttgctctagttattgtactttatttataataggcaaaaaactgtttataactttgattatgatagagtaagagtagatacataactattttgtgatggtgttaatttaggagatataactaaaagtgtggagaggagtcgaggaattttttcataaaaaaaccgattcttatttttatcgttgggaatcggttggtggatcagttttatattccatatagattttcaactaaaatcatccttactttacttttgtttttaaaattgcatttccgtaactatccattgatttactatatacttctcttacgttagaaactaattcaattatttttctcattttgttttcctcctttatgatttgttgttctcattatgtcatgtatggccttatttaagcaaaggcactgaaaacggaaacaacgaccatgaaagcgaaaatattggcaatgaaagcgtgtaaaatgtagtgttttcttactatttcgcgacttttctctacttttcagtataattcgaaaattaaaatggagcttcttaagtttttttctcttttagtatatattttcccttggttatatcgagacctcaataagaagaggcagaatggtatctactgttgtattaagttatttacttctgataatgcttgttagagtaactaaaataagaatcctttttttcattgaaagaagaatttcttaacttctttttaagactttaaaggtttccagacaatctaaaaagcctaatcctgatttagattaggctttgactttaattaaaaaagattaatcacttcttaattaaattattaactccgactagcaaacaggtaaaataataactggttattccttaataacgacgagctcaatattattttctttagcataatcttgataactttcatctagaatatcatctgttattaggtaatcaatctcttctaatccgcaataagtaaccatagcatacttgttaagtttagtatgatctaccaacaaaaaaacgtctgcatttccttttactattgcttctttcattccactttcaatcggcgatgaatttgtaactccatttaatattgatacacctgttgaagccatgaataccttatcgaaattatatttcttaaaagaatctgcgcggctataactagaaaatgatttagtatcacgttcgagcaatccgccagttgaaatcacagttaagttttcaaaaggtaaggcttcaattataatatccaggttattagtaataatagttacttgtttgttttttagaaatgtaaccatttctaatgtggttgtacctgaatctataaatattacatcttcattttctacataatcagctgcagttttagcaattaagcttttttgaagctggtttcgtgcttttctctcgttaaatgattcaagttttgcatggtttatagctactccaccatatactttttgaatcatcccttctttaatcagctttcgaatatcacgtctaatcgtggtcttagaaacaccaaaaacagtaccgagatcctctaatgagacagattggtgttcaaaaacatattcctgaatttgttgaattcgctttgtttttaacattatcatcctcatcctcatcctcaaattataaatctaaaatcaatttcctcgatgaatttatagttatatctgttgaaggtctctaattttttattatttatcagtgtacctctttcgagtgagaatcatttactgcaccaaaaggtgttaagttaatgattggttatccagagaataaaagactaaaaaaatgctttacctcttaattgaagtaaagcatattttcaaattttaattgattcctctatgcatcagttatatagaatgaattgaatcacctttaaaagttattgatactctacccaaacagcaccattatcagcagaacgtacacaattctctacccatcgaaccccttcaactcctgccttaatatctggataccacatattctctagtgtttccccacgatctgcagcatccattgctagtgcgaaacgcgcgtatagatttgaccagccttcaaatagtccctcagggtgtcctccacctatacggtcgtcaaccaatgcttcagggtaaaggtaatccatgcctcgatctaaaacctgagctggcttaccttggatttcatagcgtaattgattaggatgttcatcccaccattcaatactagcttttgaaccaatcacacggatagtttggccatgcatagagccagcatttacgcatgatgaccaaacggttccaaccgcaccattatcatattccataattgtaaaagcattgtcttcaaggggggcgcgactttctacaaaactttgacgagaacacattaatttcttgatttttagattgggcaacattacctcagacaagtaaagaggatgagttcctacatcacctaatacataactaggtccagctactttaggatcaacacgccattttgtacttgcgttaccttcctctactgcggatgaatggaaaccgtgagcaaattgcattttaacaattctaatttcacctaaatctccatttgcaatcatttgacgtgcttgttctatcatttgatgtcctgcataaccatatgtaacccccacaacacggttcttctttttcgcaagaatctccaattcttctgcctctttactcgtaaagcataatggcttttcacataccacatgtagaccagcatgtaacgccgcctttgtaatttcaaaatgtgttccatttggagtagcaattgagacagcttgaatgccatctttacgtttagtttcttcttcaaacatggtttcataattagggtagcaacgctctggatcaacatgtaaattgacaccaaagtccttcccacgtgctggatcgatgtcaaatgctccagctaccaattgaaaattattatctctcaatgcagctgaacggtggatataaccaatttgacctccttttccgccgcctaccattgcccaacgaattggtttatctacctttttctctccgtaaatcattctctacatccccttttctctcaatcaaattcttattaataacccacactttttaaataatcaacgctttgtttaacatcacgtaaacttgtgtcagagtttctaggatctcgctcttgctcaattgtgatgtatccatggtaattgatttccttcaacaatttatgaatcgaattgtaatcaatgacgccttgtccaatcgggcacataacccctttagcgcaagcatcgaaaaagcgaatacgttcttccattacttgtttatatatatcaagatcaatatctttaaaatgaatgtaatctaatcgatctgagcacttttgaagccactctaacggatccatttttgaataatataaatgccctgtatctaggcaaagtcccgccatttcataaggtatatcttctaaaagtttttcaatttcgtcttcaaattcaatataaccacctgcgtgtgggtgaatgacagaacgtacgccatattttttccatgccctttctgccagtgcacgaatatggcccatcatattaccccagtccctttcagataatcgtactgccttgtcagggtggcccgcgtaataatccctctcatcatgtccccaatcaataataactaaatagggagttagaaatttttgttctttttcttgcggagttgaaggtagctttgttattaatgaacaaatatcatcgacctgatgtaataaattttctaagttagactctgatactaaatcatcaaaaattgtccctgctattatcgttaaatcatttctagagagctctgcttgtactctttcaatattcatgggtatatatccataaggtcctaactcaattcctttataaccagcttgtgaagcttcatttaaaactttttcccaaggtggaagatatggatttttaggatcatcaacgccccaacaacaaggcgctcctgaaatttttatactcatctataacactcccagtttctatatatttatttaagcgttttcatattgttttttagatattcttataaatcccacagtttacttctactgagccttatttatcggagtagtattactcttcttgtcgtattttgaacgaaactcttcttctagttcctcaagtgaacggccatttgtttctggcataaatttatatacaaaccaaatgcctaataatccaaggaatacgaaacttaagaatgttgcggacaaaccaatagagcttagtaagacggggaatgaaaacccaattatacagtttactatccacaagaagaatatactgatgcccgaaccaaggcctcttaatctttgtgggaatatttctgcaataactaaaaatgttactggacctatgcacccctgcatgaatgcaagaaatataacagttaaagaaagtacaacatagggaagtgaggcagagccttcaagaatattagaaaatattgaaataagtaaaagtgcagatgaagttccagaaagcccaacaattaacatcgggcggcggttaacttttccaaccagccatataccgaaacaaacagcaattaccgaaactagcccgttagcaatgttagcaatcaaagctgcttttgtaccaaaaccagattcctgaagaatctgagtaccataatacataattgaattaacacctgtaatctgattaacaacagccactccaattccgatgaataaaatacgcttcagccaaggtgtagaaaagtctttaatggaagctttcataagcgttgaatctcgttttactgcctcttgaatctcttcatactcagcttcagcttgattttcattacgaatttgttttaatacccgtaaggcctcatcttttcttcctttggaggctagccaacgtggactttcgggaacaatcagcataccgataaacaacattacagcaggaattgcacacaagatcagcatatatcgccagacatgtccaacatctccccatactacaccaagaatagcattaaaaacgtaggccagtaattgacctccagtaatcataagctcgttctgggtaaccattcttccccttttctctgctggtgccatttctgctaaaaaggctggtaccattgaagatgctccaccaacagctagacctagcataaagcgaaaaagtaccataactggaatattaggagcaaaagctgtaccaatcgttgcaatcaaaaatagtaatgcaagatttaaaattgtttttcggcgcccatagtgatccgccagtcgtccacctaaaaatgcaccgattgctgccccaaaaagcaatgaacttgtaacaaaaccttctgtaaacggtgttaaattaagttgatcagttctggacataaaaggtaaagccccattaattacccccgtgtcatagccgaataaaagtccaccaaacgtagcagaaaccataatgatttgtaaataactcttatgattttttggctttttaattgcttgattactcatgcattatcatcctcattggtcatattttattaactccaattaatgcattaattcgtttgtccttatttatcaaactaataagagaaaaaatatagtttttaataacgcgcaaggtagcgctttcatttatcttaataaaagtaaatcaccactcactttaaataaaactgaactatctcaaataaccttactctacatccctattttcttaaatttttttataacaacttactctctataactatcaattccattccattactaactatgtagtaggtagattatatagcatttgttccctcacttttatctcactttttt

SEQ ID NO: 122 - DNA, 5933 bp, Priestia aryabhattai
  source 1..5933: mol_type = genomic DNA
accgaacgttaatatgattaagggggtgagtggtatgagttttgtaactttgtaataagtgatattaagcaatcggaccagtttatggagaatctgaaacattactttgggtaaaatgaaaacatcaaaaaaattggagggttcatatatgacagttggaggtaaggatgatattgatgggcttaaggaaattggcaaaatcgttgctttaacaataagtgaaatgaaaaatcagacacgtgccggaatgacgaccaaagaattggatgaaatcgggggacgttttttaagaagatatggtgcggtctctgcaccaaagataacctacaattttcctggtaacacatgcattagcattaaccatgaggttgctcacggaataccagggaatcggaagattcaagaaggtgacctaataaatattgatgtctctgctgagttaaatggttactttgccgatgcaggtcattcctttcagatccctttatataacccttctgtaacacggctctgtcaacacacacacaatactatgatgaaagttatttcttcacttaaacatggggtgagattgaatgaaatcggaagaattattcaaaatgaagcccgaaaaggtggttacaaggtaattacggatctttgcagtcacggcattggaaggtctttacatgagacacctgaagatattttacctatctatgacaagcatgataaacgggtattgaaagaaggtatggttattactgttgagccttttttatcaactggagcagagtatacagttgaaagttcggatggatggactttatgtgtgcccgataatagtctttgtgcacaatatgagcacacaataattattacaagggatcaaccgataattacaacgatagcttagatattgttttcagatgttaggtccatagatgtttaagaaagttcatcaaacgggcgcttttgttgaataaagattaaaagattaatacatattagtcatgtacaatatgtattaacctttatttcctatgtttttttcgatttgggtcttgataataaggtcagtggcagatgcgacaactgcaattcatcttacttcaaaagttctgtaaaaggtggtattttctcttacgcaaatgtcgggaatgcggtatgaagaagagtatctaaatatagaggattatatagtaaaaggagaaggatttttacccttctcctttttatgtagatgtagttgtgtttactcatttttagaatctgaaatatataccttactacactgccgatgccttttattacaatctactttagaagttaaggcagccgttgattgctcttctattaccctctaatgatcacctactactgcctgttctgtcatcgtgaaagtacgaagtttccgaggaataaaagctcttatctcttcttctttatatccgatttgcagtattttacgatcttgtatgataatagggcgtttaagtataaaaggatggctctttatcaaatcatacagaccctgtaacgacagtgcatcaatctctatatttaacttttgagggatctttgaccttgtagaaataatttcatctgtacccttttctgtcatactaagaatatttttaatttcatcttctgtaataggttcatacgatagatttctctcaatataatcaatttgatgttcctcaagccaagcctttgcttttcggcaagaaacgcagctggttgtcgtatatagattaatcattttttacacctcgtctatatgtatttttttctatctttaattaatcaatgtaaataaaagtatatagatttctaataagtaaaagccacttgtatactacaagtggctttttgctacgttgaacacattaggtaattcacgtattattcccatcaccattataacatagtttgtgcatctgtttaatgaattttcggtcttaatatgactaaaaatttgagatatatgattaagaacgatactaaccttctatattttataacaaggaaatgaaacatataattccactttttacagcgcagcaagtgtgttaaagaaggagattgaaatgatgtaaaattggaagataattaagctttatctttaatagtgaggtgtgtaaaaataaaggccaagtttatcttacatactacaaaaagggacaatgtattacagaaaagggattcatccaatctgttgattccctggggaatttgtttgtttttatcgatgacgtattcgaattaaaaaataaaatgaggttaagtgagctaatttatgttcgttttacataaaataatgtcaccttcgctttttgtggtaagctaataaaaggcaattagaaaagagtgatcgacatggaagagaaacagcagcaagaaatcgatcttaacaaagtgtatgaatatgctgaatttccggataaggtcagtggtaggtgcaacaactgcaactcagcttacttcaaaagttccgtaaaaggtggcgttttcttacgtgaatgccgcgaatgtgggatgaaaaagagtatttagttggtactgattgaaagggttggggaaatgaaagatatttgggatgatggatacagtcaatcaaaaaaattaacagaagaaatggtcaacgaagcagaaaagaagttgggtgtgaagttaccaaaatcctatattgaattatgtaaaatacagaatgggggctctttaaaatattgtgactaccctacctccgttccaacaaattgggcagacgatcatgtaaatgtccctgagatttatggaatagggaaagaaggcattttatccagtgattattatatagaagaatgggagttaccaaaagatattgttttactatgtggagagggacattggtgggttgcatttgactatcgagatacaaaagataaccctcctataatttatatggatttagaatggggaacagacatgcttatttttgaattagctcctgattttgagaccttggtaaatggcttatttatttatgaagatgaagaatgactacatttatacaatacaaaggaactggcattcaattgtcggttcttttgtattagtttcatatgatttgattcaccaagctctcccttttcctcattacattctactttagtccttatgtctcgtccatttcatgaaaaagataagctattaggccaaccacatattttttatgtaagatgtttgaattttattttcatcatctacttcattacgtaaaagtgaatcccacgtagcttcgcaaacctatcgcttcacatcattatttcagctttattaatcagggttacatgttatttttccatatctcaatgcatcataaatagcacgtccatcgcttgaagttgtttctgtaaatttaataggcaatagtgagaagacaatataataaacagaaaaatagacaaactggtaagaaaagagacttgctgaaaggatgtcagccataactaagccatttataaggaaaatagaggctaaattagcaatggcacctccagcatagacacaggcatgggtaaatcggttgtcgtattttagtttctcatatacacaaaaagaatccaaaaagtaaactgattttattttaactttcttccatttaaaaatggtttttccttttccaattgtaaaatccactctccctccgaaaaagattgccatgatagaatgacctaattggtgaacaagagatacaagtggtagtacaagtaagaaagaaaacaagaacttaggcatatcactgaatccaaacacacttccatctcctttattataaaatgatttaataaacagttagcttattaagctagataaattctttttgatagtgaacagacttttccacacagagggggcgcctttttaatcatatgtacagtccttcgtttcgcacttggaaaggtctttaatcaaaatataggaccaatagatttttactaaagcagcagttaaagtgattaataatctttgagcattgcctatagagaaggatatcttcactttatttttaaacattatccataacaataaacgaccctatatattgtaaccaaagttaataaggtcgtttatgttatattctgatttattatttttttctctttttctttataataaaatgtctggtttctcattaagcttctgacagaacttcgatatcattattaatttgatcgaacaaataagtaaggtaagaatctaattcaaattgattatcttcaacaaaatcatctaacacagacttactttcttctctcatttttaatcactccaatttaatttttttcgatttatcatgcatgatgaccatgattctttttttgtcccattttccttagaacaaagcttacgattaacaccaaaatgattgctccaataatggctgggatgattgcaaaaccaccaataactggtccccaacttcccaagatcagcccacctaaccaagaaccaataaaaccagcgataatattaccaataatgcctccaggaacatcacgtcctgtaagtaaaccagcgagccacccaataattccacctacaattagcatccatataatttccatccatagtaccctccttttaaaatagttagttgactttacccccgactaaaattcattaaccctgttatttttttccttaataaagtttttatctttttggacatctactagtgtctcgtacattttataaaaggaacaaacggttgggacaacccttgggatctaaaagcctagaacaccttacatcattacctactgcagtaagggttctttgttattttttgagtggacaggcaagcttactgcagtagctacatagtatctaaagaatcttaacttcattatctaattagtatctagttcagtatcgctatcccgttaatacaagctgtataaccctattgaagccatttgtggaacctgtaagggagctgaggcgaagggggcgaccggatgcggtgagctgaaataattgatacctaaaaagcaaaaaaattaaacgagtgaaagaaggtaccaacatgagaaaaacaaaagggtttacctttcgaactatctttcctccctctcccaaaccatctctcacgagacctcgtccattcaaggcttactcctttgttccgtttagtccattagccatgcttgaccccactatcctaaccataggaggccttattttacttctttgcgacatttatgttttgaggagggttttagatgtttgagaagctaaaattacgtggaaagcttattaaagcgtttcgtacagcagagatttatcgggttataaagcgtggggatcgcacctcctatcaattcccgaagatccatcggatcgatcatcggcaaacctacactcggtacgtcttttccttactgagtggcattgatcctgaacttttaacgaaaaaaagatgggcattacgccaagtattaggcagcaatattgaagtgaatggcagcttaaaaaacttcagtattaccgttcatcacaaaagcctacctaagatgctccattataggtatgaagtcattcatcctcatattgagaaaatggagcttcccgtatgcattggtcaagatatctatggaagccctgtctcatgggattttgcggatttagaaacgttactcatttctggcgaaattggagccggaaaaagcagtctcatgcgtgtgatcctcaccacatgggtgaaatatacatcgtctgatgatctgcgattagtcttagtcgatctcaaacgagctgatttaggactgtttcatggaattgagcatgtagatgcgctttgttttgaggcaaaggatatgaaaaaaccttttgctttattacgagctgaaatgtatcgaagaggagatttgttgttagagcatggtgtgacacatataagcaggcta

SEQ ID NO: 123 - DNA, 5931 bp, Priestia aryabhattai
  source 1..5931: mol_type = genomic DNA
ttttattttttatgtatattttattctcaattaaagaatcattgcttatatggcttatatgagctttatactcactatctaattccctcttaacctcttattttaacttttccttctctttggttgtgtttctggatccccaatattgcgtctttgtggaactttttcatgcggataatcccatatttggccatccctcaatcccccatttcgaccactgtacttgggtttagcataccacaactttagatttggtgtaacgcactacaccaattttttatcttcgataaaattgggagcgcgctctacgaggtggcggtcggagttcctccctgtgtttgactccgccaaaatgaaaaaggacatcctcaacggatgccctttttcatgaagaccgtggacgccgtccaccacctgtaaggggaactcttccccttaaccccatctaaaaaactcccccaaccccctcactttttgagggggctccctcgccggatggcgtcaaacaaacgtggttgtttgagtgccaagagggtcttggtatagtgacattgtcaattccttaatgctccctacggtccgcttaccattgacaatggccaaacatagctcacttctttttatttttatttacctgatcaattaaagaaataagagctatgcttagtaaaattaagcctataaaggtaccataggaattgggagtttcattgaaaaacataggtgatactacaaagtttattataaatataatcatagcaagaacaactaataatctatttgacatttaaaacaccgcctattatttatttcttaacggaacgataacagtcggtggaagagtggttataaattttataccatatttaccgttatctgatacttttttaatgatgtatccttgcacccataaaaggcctgctactgcaccagcatacgttccaaagctgcccatattttttatagcagcagttataccagcaatagcccctgttgcaccacttgagtcattaataatgttcactattttttttgtattacaggaattaaaagatgcacttattttagaagcagaaacagaaactttctgtgttcctacgcattttgctgctgctaacatcattattccttcactttgagtacgaacacttgaagattcaactaattctggttcactatttcctgaaattaaatatttgtcaaccttaatcgtttcgtctttagtattaatatttagagtagataaaatgtatttataagtttgaccttcctccataatagtaaagacactttggttttcatctgcacttaataattcaaatgaagaatcttgatcgttttcagctgcagaaacagatgcttgaggtaataataaacttaaaagtaatacacaagataatattaaagcaattgacctttttgtagtaaaaatactagttttcattttaaatctccttattagaataatatttaatcttaaatctatctttctccatctcttcaccagattgtaattttgatagatctaacccttaatcattatttacttattctgcactagctggattaacagctatttgacttactagcaggatgacagacaaccctacaaatttgataaattttgaaacaccttgttacctccatatctcattattaaccattatttacaatgtcccccattatacataggtaaatcttagggaatcaatagatatagtaagatttggtcctttttacttatattaagtttataagatttatagtcatatcatctaaatgtattattaaatgtgtgattcaaacactgagattattttaaatatacgggggtatcgcaaaactcatgaaaaagaatatacaaatttttccaatccttactatcttaattactggtttgattggttgcagcgctatgcaaaatgataaagaagtttataaaggcgaaaaattaaacatagcagtagtaggaaaaatacctgaaattaatgagaaagaaagtaccattaattttaaaaagctatcgctaaaagacataaaaaaaatagatcttaagtcatatgatgcagttattattacaaaaccttacttatctaaagcagcaaataaaaaatataaagatacatatctcaatggtcagatacccttcttttttgttgaatcaaaaggttctattttacctttcgtagataattcactaacatataaacaatatgctgatcgtgtaaatgatactcaaagctacatcgtaggggttttaggaaatccaaacggagataactacaatacatggcaatatgattatgcaattaaaaacgataaatttgatagaactgacgtaaaggatatatattctagagtttttaaaactgtagaaaaagtaaaaaaagaaaaaagaagctaatattttaaatcatactcaaagcaaagaccgcccattatgtatcagtttataaggcggtcttatctctatgtatgctatatatctattcgtaaattcccgacattattccccacgaaattacattatttccaaaactcccaccacttctttttttcttctgaggcagcaattgatttttttgtttcttgcatcgatcgtacaatctccatcaaagctagatccctttgttctcttttactttcgctctctttataactctttttgatttcttttatttcttcaaccaataacttgttattctccataagttgctcattaatcgctctttgttctttaaacatagctttcacaaaatctaaagaggaagagtccaattcgtgttcaattgattcatgattgattgattcaacatcaataaaagccttgtaaccatcagctttaagcttattatctatctcagtatcaatcatgttatcaaccacataccatttcctaattttcttcaaaagctctactgaatcaggatgtaataaaatcttttttccttctctcctagtattgaaaaaagcttggtgtttttgtatgtatcttcttacagttggaacaggtgtatcaatcattttagaaattttattaaccgttatccaatccataatacataattacctcccccaattactcaatcgattaatcatcaatcactaaaagaaactatatatattttcgttagatattgagaaatccctactaattgattgatgattgattaatcaattaacctttgttttggggtggagtgctggctaggggtttggggactagtccccttttacgttatttaaaacttaagaaaagaaatattctaggacgattgctctggcggttcggcaggtacaattgctagcacaagccgatcatgattaacttcgttttgggtatggtcggcttggcgatataaccaaacctgccgaaatttttttagcaaggtagaaagagtggagattttttgagtgttcttctcaaaaaatactactcgcaccttgctaaaaaaatagccctttataagatatagaaggagactacgtaaaaacgttgatatataagggttttatagagtaataggttgcatagcttgtgcaacctattgattgcatctagaatgcaacctatttgcaataaaacagtgcatatttgcaatatcctattgcaaatcaagtttccatatgataccttatttgcaataggatattgcaaatatgaaacgtataggttgcatagctagtgcaaccttcaaaaaagggggcatatattttgaacgaaagtgagaaagtgacattggaattaactaaagaagaacttatgaaatttcaaagattaatggaattacacaacgaagaggaagataaaaaatctaaaagagaagaagaagatagaaattctaactttgttcaattctatcgtgatggaatgcctgaaatgagatggttaatgactaatcatcaatttgcaagttcattgctgttttttatacttgaacatatggataatagaaatgctctagcttgttcttatgcagtctttgaagactattttgaaaaacataaaacaacgatttatagaaacttgaaaatccttgaagaaaacggatttatcgatatcttaaaaatgggaacttcaaatgtttacatagtcaacgatgaactagcttggacagataaaaactctaagaagaaatttgctaaatacgatggaaaaatccttgtaagtagaaaagaaaacaaagattataaatatcgcagtaggtttgatagattcaaagctttaagagaaagagaaggtctaaaataatttaaggaggtggtcaaatcgatttggagcaagttaaaactaaataaaacaaaaagggcatttctcctggcagagaaacaccccgtgtgaaaaacataatactatacttaacactagtattataacatgggttgccctcaaaaaataggagggtcttatcatggatcaaacagaaaaattattaataggtatcgaaaatattttaagtgtagcatccgatttagttgatgaagttgctcgactgaagagtgtagaagaagaatgcaaaatcctgaaagagaaagtatttatgaatcaatttactcaagcagaaaaagaagtctttgctcttgctattgatggtcattctatttcagaaatacaagacattctccataaagaagagtgcacgattaagaatcaaagaagaagtatcttaaaaaagttgaatacaccatctatgacagaagctgttcaacagtttaggaatttacatcaagaaccctcacaaaaactaatacgtacttcgtaactatagaaatagccttaaaggctaagaaagcaggcttaagcctgcttttctcttacttattatataaactgaatttgaaggaactagattaacaaagaaagaggtccaatatgaatattgaacttatacttttagaagattccgatggatacgaaactttgggtttctctttttggagaagaaatttgaaaacaacagatgataaaaagaaagtagtaagtatgattgatcacttgtaccatatgcagtgtatagagagttcaatggatgttgaatatttagatgagattttggaggatataagctattcaaagataggttttgtaatggatgtgaacccttctaatcaaaattatgccttatatacttataacgcaaatgaaaaaaaataatacatattatgctgtgtcttgagcaaactacccaagatgatggatatcatctcatgtataataacctttgaaaaaaacttctgattgagcccaggagtttttttctctttttatgctgtataagatatacaaagttagttaacataatcactctttccggaacacacaccaaaaaagaacccttgtcgcagaacggttccgccgagggttctttttccggagtatgcagctttttatacatccttgatagaccaacgttttttcagtaagcgattagtgaaagaatgaataaaaagtgcaccttttattcatatgctgacccctataaaaaatcgcctatatatgaataatatggtatagtttgttttcgatactcgttcatacttggatacgtatgaatgaacccttacacaaagccacctcgcttggccaatgccgaggtggctttttattttgttaataaggttaccttaaatctgttttctttctagctctctaatttgttgccttaattttttattttctaactgcgcttgcattgcaaatgttaaagcaactaatgaaataaccacaggaaataatgtgtaatccatatacgaagccctcctactttcattaacaagtaaagaatttattcactttacgcaaaaaggtactctcttttaaagagagtaccttcaaatgaaatatgctgatgaacgggcattatatcataaacaatttattctcgctcaaattcttgctcataactcttatttgcctgcacagggctcttt

SEQ ID NO: 124 - DNA, 5917 bp, Priestia aryabhattai
  source 1..5917: mol_type = genomic DNA
attcttttgtcctgttaaattttatgtagcttttcacgagaaatcgctatcattttaatgaatcaataatatatttttcagaaaatcaaaaagagctctttataaagagctctttttgatatcatttatgctgtttttaaatagcagttcttatttaaacaaatcaagttccgcagtacgtttgataaggctgattagacggagcagacggtgtacaatactctggctgacccggagattcatatgggctagaaagcacttcaagaagggtttccatgacgctgtagtcttctttttgtgctgcgtctaacgcttcttccactcggtaatttcgaggaatgacagccggattattatttttcataagctcttgtgactccgctttagattgttgttgtctacctagtcttttctgccatagctcatgccactgtgcaaactctttgctttcaaacaagtcactatttcctagcttatcgaaagttaatgcacgaaacatatttgtatagtcagctttataggttttcattattgtaagaagctcttggaataatgcttcatcatctttttcttcgttaaaaagcccaagtttagcctgcatacctgcgagccagttttcccgatagaattttggaaattccgtcacggcgctttgcgctatttcaactgctttttctatatcttgatccaatagcggtaataaagcctcagcaaacctcgcaagattccaacctgtaatgcctggttgattttgataagcgtagcgcccttgtacatcaattgaactaaatacagtttctggatcataggtatccataaatgcacatggtccataatcaattgtttctccactaattgtcatattatccgtattcatgacgccatgaataaaaccaataagctgccatttagcaactagggtagcgtgacgcttaattacttcttgaagcaatgataaatattttttttcattcttttctatatggggaaagtgacgttctaatgcatagtcagctaaagcttgaaggttttcgaccgttccccattttgcagcgaactgaaatgtgccaaaacgaaggtgactggaagctacacgcgttaaaatcgcccccggcagttctttttcacgaacaatggattcgcctgttgttacgactgctaggctccgagtagttggaatacctaaagcatgcatggcttcactaataatatactcacgcagcataggtcctagagctgctcggccgtctcctccgcgggaatacggagttcggcctgagcctttaagctgaagatctactttctcacccgaaggcgtaacttgctcccctatcagcatagcccggccgtctcctagcatgttaaagtggccaaattgatgtcccccataagcttgtgcaagtgggaaagcaccttttgggacactgtttccagccaaaatgctaactccttcttggctttgcagctgttctttttgtaaccctagagatgccgctaaagagtcgttaaatttaactattttaggtgaactcactggattaggatcaagaggcgtaaaaaagatgtttggtaactccgcatagctattacgtaaattccatcctgtttctttttgattagtcatcgtatctccttttcattttgtgtcttaaaatataattcttttctttgttcacggttgttttataagctgagtagccctgctctatcctgctttcttcttggcatcttcaagctcaatattttctttttcatttcattatatcttttattattatatcgcatttgcacataattttaatctaaagtgccttatccatttatttatccccattgtgataaaggactattaaatactcaaaaaaagaggttgaaacattcctaaattattcctatctaaggccgaacaaacgggagtaatgctctagtatgaatcgcctgttacatcgcggttgatttccgtgcaaggctccgctaaaagcagctaaacaaatgaagcctacgttcaccatcccaacaaaaaaagaaccaccaatcaaacattttgatcaatagttcgtcattcacgttggctaaaatacttttgttccagcctcctctatgttttacttccaattttatattgtaaaaagattgtactaggtgtaaaagtgggctatgtggtatgtttatagtgcttaataaatcgcttacaatccttatatagacttttatcattcaaaataaaacgtaaggactggaaagctgcttgcttacttgcatttatgttaaggcttttacatgtctaatatatactataaaagtaaggtgttggataaattaggaggaaactagatgaaagccaaaattagtgatgtagcaaaaattgcaggtgtttcaccgactaccgtttctcgtgtattaaataaccgtggttacataagcaaagaaacgcgagaaaatgtttataaagcaatgaaagaaattaattattttccaaatgatattgcgcgttcattatttaataagcgaacaaatttaatcggtatgattgtcccgcaaacgagcaacccttttttcggagagttagcctttcacattgaaagtatatgtgcttctcttaactacaaagtacttctttgtaacagtcttaatcgaattgataaagaaaaaaaatatgtagagatgctcattagaaatcaggtagatggtgttattgccgttacttataatagaggtatttttgattcagaaagtcaaagtcttcctgtggtagcagtggatcattatttatcgaaagatattcctactgtatcttctgataactattctggaggaaaacaagccacggaattgctcatctcaaaaggttgtaagcatattgttcatattaacggcccccttaaacttgaaactccagctaacttaagaaggaaagcttatgaaaacgtgatgaaaaaggacggaaaacagcctatcacgtatgaaatttcaaatacctttgaccgcaacattcagcgagaaactatttctaaggtttttgaagaacatccggaagtagatggtatttttgcaagtgatgacttacttgcagctttagtagttgcggaagcacaaaaaagaggaaaaaacatcccaagagatttaaaaatcgtgggctatgacggaacggaggccagtcagactttgttacctggtctaactacagttcaacagcccattgaatcgattgctcaaacagccattgatattttactaaaagaaattgaaggagaattcagcaatatacctcatgagatctgtcttcccgttaagcttctagagggacaaacaacgtaaaaatacgttttttataaaataaatatcagtttgttgcatattcttcttcctttattcacaccttaacgttacagaaaggagttgaatacaatggcaaacaacaaaagtagcaataataatgaattattagtatacggagctgaacaagcaatcgatcaaatgaaatatgaaatcgctagcgagttcggagtaaatttaggagctgacactactgcacgtgcaaacggatcagtaggcggcgaaatcacaaaacgtcttgtacaattagctgagcaacaacttggcggcggacgtttctaagacaatttcatacacaccatgacttaaggaagaatggatatccattcttccttttcatatatttactttccatctttatataaaaattattattcttcctcctctttactgactgattttgtttttcctttctttagtacagcgctgattcctaaacaacagacagctactatccatccggagatgagaaaataaacggaagtatttgcaaagagtgtgcctattaaaataaacagccctccgagaataataaaaaaaacgtgaccctcaccatttcttttcaccttcatcacctctccctacctatacaaacgaatgttcagatacaaaagaaacttcttgataaacaagaagttttcttcgtgctttccttttttaataaaaagtaaaggtgttttctttttatttattcaacgaaacccctcaatattcttctcaattacatgctattcaataatttctgcggttttatactctttcataaatacatcaataacatctcctgcttcttcgttctcctcctccatttgaacgagtatttcgttttgtgcatttaccgaaaggattctgacatccgacattcggtttatatccagctgcagttccaaatctcgggcaacttcatcagcttttagtgaacctttgataatatatctgtggcttctcataacattcgctccctttacgttatatgaacgaatatagtttatccaaactaacagcgtacaatgacatttttcttgtatctttcatttaaacaaaaaaaacggcttttctcagccgtttttttgttttgccgttcacttatgaaaaagcatatttatttctttatttgaccgttctctgtatcaggtatcatacgcttatttattccgaatgcgtaaaaactaatgacaacaagagcgaggaaaataacccctacaataagtgaaatacgcgtttcatcattaaaccacatgcctacaagcaccataagtaaaaaagcaatagttatatagtttgttacaggcgcaaaaggcattttgaaaggatgactgtccatttcagcacctttagctttacggaaacgaatttggctgataagaataatgaaccaaggaatcattcctggaagcacgctagcgctgtatacataaacaaatacattcggtggagcgatgtagtttaaaataacgccaattactaatccaatcataacagcgagtgtgctgtaaattggaacaccgttacgagaaatttttgtgaagaatttaggtgcttgaccgtttacaccaagtgtataaagcatgcgtcctgcactaaaaattccgctattacagcctgacatcgctgctgtaataactacaaagttaatgatacctgcagctgctgtaacaccaactttagtaaatgtagatacgaacggacttcctaaggaatctaactcattccacggatataccgtcacgatgacaaaaattgctccaatataaaaaattaagattcgccaaatgatgctttgaattgcgcttgttaacgtttttttgggatcctttgcttcaccagctgtaataccaattagctcgactccttgataagctgcaataacaagagatagcgcaaagaaaaagcctgaccatccgcctgcaaagaagccgccgtgtgcccaaaggtttgataacccgattgcgtctccaccatttccaaatccaaagaaaattaacccaagtcctgcgataatcattaaaataattgttacaatcttaatcatcgcaaaccaaaattcaaactctccaaatgattttactgaaattaagtttgctgtgcctaaaatcaacatggcgataataccaggcacccaagctggtaaatgggggaaccagtaatgcatatatgctcctaccgctataatttcagacatccctacgattacaaattgaaaccagttgctccacgcagccatataacctgctaatggatgaatatatttgtggccaaatgtagcgaatgaacctgtgcttggttccatgtacagcatttcgcccatggcacgcataataaagaaaataaacattccgcaaattgcataagcaagcaataccgatggacctgtccattggatggtgcttgctgatcccataaataatccaacgccaattgttccgcctagcgcgatcatttgaatgtgacgggattctaagcctctttttagctctttgtctgccattccatttcctcctcctaaacttgttatagctctgttaggaaagatactttttgtgtctgatggaacagctatcgtttttaaaaccttccattt

SEQ ID NO: 125 - DNA, 5686 bp, Priestia aryabhattai
  source 1..5686: mol_type = genomic DNA
taccgataattgtgattacgataactaacgttaataagtaagcctctttatgttaaagtgaacatagaaatatatataagtctggaggcaaggttatgaaacgtgcaatagggatatttcttattgctcaagctgtattaacgtacttaactattaatatgaattatactccttatacaactacaacagtgaatgacaacacgggagctgtgacagtttcgtatagttacccttgggtatattggttaggttttattggtttgggtattatgcttatggtgggtacatatttagtttttgctaaagaaaagaagcagatctttaactaagggtctgtttttttatttctagcgataaaatccattatgtaaagtatccctcctataaaacaccacattatggtaatattctctttatacaatgtaacaatttataaaagagatattataactatgggagggatcttcttggggtggttggttggtggtgcaattgctattatacttgttatcgctactagtactattgagagaacattaaaatcgataaaagaacagaacaatacaattattgaactactaaaagaaattagtaataagaaatgagagaaggagcacttaatgtgttcctgttggtgcctagaagctacattatggtaattaaaggtgtatagagcacacactttatatcccccattgatagttgaaattacaactatctaagtacgagccttttccagagcgagttttataccaaatcctattaatatagtacctgttattccctcgataaccttttgtgtcctaggcttcttcataaaagcactaatctggttaagtaaatagatataaaataaataccacacgatagttaatacaatataagtcatcccaagtataagaaacggcataaaagtatggcttccaggattcacaaactgtggtaggaaggttaagaaaaaaacagctatttttggatttaggagattggtaagaaaaccttgtttaaaagaagacgtatttttatacttaattttgacaaccgtttcagttgtttcttgatttctcaatgtccataatgacttgatacctaaataaattaagtacaccgcaccaatatatttgaagatcgaaaataacagagctgattttgcaataatcgccgaaagccctacaatagcagttaatgtatgaatggataacgcgcaacaaatccccatcattgttttaaaacctccctgttttccaacagtaagagtgttttttgtcatgatagcagtatctggaccaggtaaaataattagaaatatacatgtaattacgaacaaataaaagttttccactatgtaatcgctcctcaattaaaatagttctgtatctataattcttaccttgtattatatgttaatcaatttattaattggagataaacgccataatattttttatttgttttttcaactaatggattcttttttacgaattccgaaaaggtacattatgttaattagataaaatcctttactcttccaaaaaaatgatcaaaatttacaaatgaggaaaattagtctaaaatttaattatggtaaattttataaattgtttatttcaacgggggataatattatgagtttaaaagagagagcaattaaagaattccaaagtaaaatggatagtggggaaaaaattagaggatctatttttacttattatgagtctgaaagtggactttcagggcttgttggtgtgccaaatggaaaccctatgccaattaaaggggtattagcttatacagataaaagcttgcttttttatggggaagttttcacgaaattacctattgtattacatattccattttataaaattaaagaaataaaaacgggtaaacaaatctttgcaatttttaaatcaagccctacttttgtagttatccacgacgatcgagaagttttctctacacatggaaataaagaagagtttattaaactagagtcattctttgaaagcgtcaatgaaatgtttctcgctaaataattaatataaaaataagcctagagttaataatctaggcttatttttatatggtgccgataatacccgttatgttaagttaaaatatactaattataaacctttagtaaggagatttgatgagaaaatacataatattagatatgcctataaatgatattaagaaagttatgatagtggacgtcaaagatgaagtaaatatgtttctttataatacctcagatgatgtgccttcaattggagactatagttttgaaacattacaagaagctgaagacttttttaacaaggaagtttcaaaagaaaaagatagtaacgcttcgtggatttatgtacctaatccaactaaggattgtcaggaagatattattaaaccagtaagaattaaggctataaatacttgtaatcctcaatggggaagttatgaggaatttataaacgggaagtggatagacattaagttttagcatacctactacctataaaatagttctatgtaaataagatatacatatccaataggattatagtatcttaaataaagctgaatatattatagattaattgaggagcataaaacatgtttaattttagaaaaaaagagaagaaattttatttagatgcaagccaaataaaacaacttattgattcatatgaaggatgtattgcaaccgataggattacagtagatggttgtaaggttggttatatgtatagagaagaaccctatgaatataacgaagcagatagtggatggagatttctttctggagatgaagatgatcgttacatgaataattctaaaaaacacggtgtttatctggtaaatacaatatgcaattatgatccagatataatgccgtttcttgatgcagaacctggtactgcatatattcgtgatgaaaaaggcaatttcgttcttgatgaggaataaaacctgcctgtcgatacattacattaaacaagcttgtatatgataggctcttttaacattccttgctattctacttatatctacacttttaattgaaaggaattacatatattgaactcaaagagagccgtgcaagtaggagatatctttgctaccccattaccaatgaataagtatggtgcagtcaaagtaatgaatataattgatcgctcttatcttcttggcattacaagttatataggtgaacagataccaacaatagaatctaaaggaattcatcatattttaattacggagtctatagcagatggattggaaaagcctttatttgaatgggtagatggtaagctgcctaaagagttagtttttatcggaaatatccctctaactacaggtgaaataggggtggagtctaatatatacgctggaaaatggtcaaaagaatgtgggatagatgtttactataaatggcgagaagaaacagatcctcaagggtttaaacttgagatgcagaagaaaatagaggaagctgatgcctacgctcataaaaacacgatttcaaaaccaaagaaaatgatggatgatcaagtcttttggggaattatttctttattagactggagtaaggaagatgaagaggcgattatagaggctgctattaaagaactttctactttcactgcatggaaaataagacattttgaagaaactctatcttataagcttttcttattagatacagaagaacatgcaagagaaatgggagaagattgttttgcttcacaagatcaacatttttcacctgaccttttcttatatgcacggtgtgcagtagtggctcatggtaagcaggtttttgaagatgtcttatctaatccttcaaaaatgcttaaggacactgaatttgaaattttactgtctctttcatcgaaagcttattatgtaaaaatgggcaaagaattcgaatatgaaagtggatgtagttatgagacattttcaaataaagaaggctgggcaaatactctttaggaacaaaaagtgggtgcttactatgataaatgaaccttatggactgcattggaagggtcataaaggctttagagctattgaaggtagtgatgtttataatcatcgttttggaggacaagagtggaatgtaccaaaatgtcagttatgtggcgaagatttacatcagattttatgttttgatctaaaggatgatagattaagtgaactcagaacttctaaactagaagaattacctttaacatcatgcttaaattgttctaccttatgggagcctcaactatttcaattaaatcctacaacaaaaagtgttactgttttgattcaaaatgataaggaaaaatggattcaagacgaagaagataaaatacctgttcctcttccttatacgaaattcaaacttatcgatatgttagaagaagatataccagtcaatgaagatgcctactatgatgcatttgacttatttggtcaggagtatatatgtagagtgttgggagcacctctatatgtcaacaagccaaatgatataagttgtccaacctgtaaccatgacatgcaatatgtttccagtatcactcatgattttgaagtagatcttgtatccggtgtggaccttttcctgggagaaatgattatctatttttacttttgtaaggaatgtttaaccctaaaaacagagatacaaggtacataacaacttcattaaccataaaagcccttaaaagggctttttgtacttccacggatgatgattatggtaactaaggatggctaccatgtacaagtagaaattacattataaaggaatatggacttctttcatccaactgcttgttttagacttaatagtaattaattgattgcttttccattttaattcccctaagaatctggcatatacaacttcattcccaacttcttctaccagtagttcattagttattcttaagcctctttcattgtaaacttcacaccataattgaaatccagaatatctatgtacgccctttaacattgctaagagctttcgattagggcttttctttggtgtttttgcagctagaaaaatcgcttcataattttggttaactatttcttctagagctccttctacatacttttgtatagttactaaagaaaatgaagagtatttttctaagacaggtactacatagcttctaactatgttacaaaatgcttgatatttttcttcaacagattctaattctataaataacatataatcatcaggaagaaggatttcaacctcctgaaaagccttcatttctgagtatgatacattcttattggggttggctagacagtataaagtaatgctgttcagttcgtctaattcgaatcctagatcctttaattttctacaaaaaattaattcgaaaaccctgagcccatgtatattattgtaatgttttttaggtcttttctttgcccaatccataatatgaatatcaaacatttaaatggtatcccttcttgtttataaataaaaattaaacattgcttaactaactaccattttaaacattaattctagaaatgctaccaataacttacattatggtaactaaaaatctatatgttttacataacagttagtccaatgctttgttaaaataaagctaaaaaagtggagaactttatgaaactatattatttgggagtgagttta

SEQ ID NO: 126 - DNA, 5581 bp, Priestia aryabhattai
  source 1..5581: mol_type = genomic DNA
gaaaagccctcaaaattaattgagggcttttcttacatgtgtggttgatcatagctgcttttaatagttgataaaagtgaaatatatacatgtacatatctaaaatatcgtattaggttataatttgtccagttaaaaggtaagcaaaataaaaagctacctcgggagcaaggtagtttcttattttgtacttcagaaaaaagaaaatgtgggtaggataaatcctcttttgtagtttactcaatatatagaatgttattcattattgcaagtacgcaatgatctaaaattgaatatgacgtatagtctataaaggttaattgttttttatacgttcataaagttctattttattaactaaatagacgtcatatcgtttgattctacacagtctaaaaaggtgtacctttttagtctatgtatattgaataaagctaaatattaacaaaataaaaaagggatggctggccacccctttaattttttgttccacaaacgcgcccgatttgcttgataaataatttagaaactcgttacgagtaaatataccccagtaaacatcaaaattatatacgtgataatgcgaaatactttttgactaatccatttaaaaaataactgtcctaatataattcctgcaaataaaggggggatagctataagagaaaaaatccatgtctctttgctggtacctccaaacgatatttgcataactaaactaacaaagtaaacaaagagataataagccaatgttgtacttcgaagtgtggttttatctattccggctccagaaaaatataataaaaggggtggacctggtacgccaatacttgtcgttagtaatcctgatattcccccagttatgaagtccttgttttgtgttcgatttatcgtcaactttaaaataagtagtattgttaaaaaaagaataagagcaccaacagtcatttttaataactgaatatccaaaaatatataaataaaaataccaaaaatcagacccatgacactacctttaatcaatctaactaacaaagacttgtctatttcttttctaattttaaaaatcataaaagcagaaagacaaatagagagtataatattaatctggattgccatgtgagcaggataaatcaataataaaaagggagtaccgacaataaaaaagccatagccagtacttgtttgtaacaatgatgctacgaacacaattataataagcaccatttaaacttccatcgtacgatttcacctacttcaaacatcaaggttaacttttttcttctgctgcataaaatcatgtataaactaagcctttatattgaacttagactctatttcattctttaaaatttctgcccctcttggacttaacactaaaccttttgcatattctctattttgaggagtgatgtcacctgtaataatgcattcattataaggcaagtatttctttaagataatttgttctccattaacaaagatttcgatagggtctttttctttaatagcaagaacctttcttagctcaactggaataacaactcttcctaattcatctacctttcgtacaatacctgttgatttcatttcatattctcctcttctagcctcaatattctacttcatttgattttctatgaatagatttatcaatccaacaaaggaaccttaagtgcttctttctacattatataaatggtactaaaacaggcttaagcctgtttatgtaaccttaaggctgtcggacatttaaaatagcaccattctataactatcctagccatcttatgattcatcttttgtttcttcttgcatcattttcttattcttatgaataaacgaagggattttgctaaaatagtgtctctttacttcaccataaggtatccagatttccttttcctcgataaggtcatacacttcatctaaaatttgatctcgtttcctggggtgtaatttgatatgagggtagttgatcgcaccaatatagcgttgccttaattcgttcgttatccattctttctgcttttgctttaatgctgaaaactttttattcgtttgaattaagcgtccattttgataaacatgatttttcatatagtcttcctccttttctctatagtctcatataaaattcttgaatcttcatttacctagtaggctttttttcttaaattgttccttcacatagatgcaatttcgtgtatgttcacgggaaaagaaatgatcgtgtttataatgtactgtgacttcacacgaaggacagacaaaaaaacccattcttattttatcctgattgacctcatgcgcataaaactcccctgtggctttaaacatgaccacatgtctagctttttcgatttttgctcgcataatcatatcctccttcaccatatttttcatctatttctatgataagggctatatggaaagaagacaaagaaaaaacagcatcctgtcataacggaatgctgcttaatcattaattattttttaacttgtagcctttgaacgtatatccataaactttagttaaatcaacaaagctcttataggaataagtaatggcaaccggcgtacctacttgaactttatcataaagcttttcaatgtctgcattatgcattctcacgcaaccttggctcacgtattttccaatgttgctttcattgttgttaccgtgaataccgtatgtatcaccatatgtaccgtttgcatttatccctaaccaacgttttcctaatggattgtgaggatcgcccccaggaatatgtcctgtataataaggaggggtttttaatcttgttcaccactttaaaaaagccgactggtgttttgtcccatgttttccccgttgctactggatcaacgatttcaatataaccattatgaaaatacgcaagcttattgtagtacttgttaatgatgattaaatcttgattcgcttgtttacttgctgcttctgttttcccttgatttactccacagaatgcgaacattagtaacgtaaaaacggccattgatttcataaaaatgttcttcataaaaactctcctcttttttatatttttatagaaaacaaaaaaagcaccttccgattggaaagatgctttttcgtaacaatcacctatctcttttggatagcgaaaaggctcttttgatggtgaaactgacggttgctcatgcgactgagaaagctctttataatcgcctttgttgatgtctaatacggcttgtggaaacgacatcccataatacatttgagcgaaactgatcgctccataccctgtttcatttcggctattctaagcgtacatatttcctttgatgagtaagctatcatgttccgtatggcgatagtactttccttcttttacaaaggtttcgcctttggcttccagatacgacaacaaatcaacatctcgcgctttcatgatttccccctcattgacgtgttttcgttctcccacctaattcctccttctctttcaccctatgaaaaaagagggcttttcaaacttttgccaaatttagcgttctatttcttgcgtttctttccgtttttttgaagaatttgctccattattccgtgcaaaaaactttgcacattcatttttcagtttttcttttattagagctgatttcgttaaggaaacggctccaaagggaattggttgcagctgttcaccactagtactggctcaagttgcataagaaaaagcagaggaatgaatagcctctgcttttttgcatttaactttattaagttacatgtagatgtggataaaacttgttgatttttaaggagtaacctttaactaactcccttattccttacctgaagcaactgatccatattccttatcaggtagagcaattatgtctgtatgtttaggtatataacctaataaacgtaacatagctacaatttggcccttgtggtggaactcatgtgtaatggtatgcatgagcaattgtcgaggagtctttcttatacttttaacctctggtctccaagcaagctccctttcaataatgtcatcaaaattatcaccaaattgttcaaatacaacatccacatatgcatctgcttgttcaaaataacgttgaatatcacttatctgcatattactaattacttctcttggtaaaagaggcgacttcgtttgtaagagaacaaaagaacccagccaagcatggtagcaacctgcaatatgaatcaaagaatctcttacactctgagaaccaaatcctagttcttttgtaaaatcgtcttcatttaattccttacattgtgctaataagatttgacgtgtttgctttacccattcatactcttgtttttccatactctctactcctttatttgaatattcccacttatattattaggttcattgtacagcaaataagaaaagccaacattaataaaatttgatatatacctctcttcatttaatgggtaatcgaccaataaaaaaagagagctttatgctctcaccattctaactttcgactgcttttcttttagattagtaaataattgaataaaggttttagttattttgaacgaaatttatttctactaaagtttaaatccagagatcattttctgctgtttgctaagttctcttatcccccgtattaataacacccctaggctctacgagcataattttacactctgattctgcataaggcttatgttcaacgtttcgtggaatgacaaacatttcaccttgatttaatttcacttcaccatctcgaaattcaattgttaagtgaccctcaatcaccataaagacctcatctgtatcttcatgcttatgccaaacaaagtcctcctgtaccttaactagtttaaactgataatcatttatttcagcaataacttttggagaccatagctctgtgaatttagttaatttttcttgtaaattaatcggagtatattccattcttttctcttctccttttttatcaatctattaaatacataactaatagaaaaccatcgtttgggttaacgataaccaaaaggagtaaatttttacagatgttttataaatcttgtatcttttgtagatattgaacccttacttcaaatctctattttcttttgcgattttatcaatttttttattgcaactggatcaacatatcgaattttaatttccactttatccgacctctcttttgtagtagtgctcttccccctaaaaagagagaagagcataaggggtttttgcccccaccataggtgtgggctaggcagagcctagcaaaaccgtgggtacaagaaaacctgttgaatgtgaacctactgttgacctaaaccttgccatgtgaacctactgtgaacataaaaaatcagtgatgtgaacctactgtgaaccttaaaaaaacacatgttgacctactgttaacatgtgttttttcacttcatggctaaatcttgttgcttttcattcatttttttcatctttttacgtaaagttttctgcttatattcatgaagctgaatgctttgaccatcaaagtgaatcttttatatccttgtttctgtttctctattctt

SEQ ID NO: 127 - DNA, 5556 bp, Priestia aryabhattai
  source 1..5556: mol_type = genomic DNA
taaaattctaaaattaaaaggacggtaatttatattgacaaaattaaacgaaaataaaaacttatctaaacaaatctatgtgtacagtatcgatacttcttctttctatcacaaagatgagcaagcaattcaagataaactgttaaaggcttatggatttagagacagagttaaaaagaagaaacagaaattaagaaagaaaattgagaagttagcaaaagaaggtacaccaatgccaaaaaagcaacagaaagctaaacgtaaaattcatactaaatatcaacgtttcctaaagcaattcattgaagataaccaaaagaaactacttgaacttattgataaaagtgaaggtaaacgtacattgaatgaaaagtcattaaaggacacaaagaaagttggactgtttgattctgtattgttacgctcattagaccttccaaaagatgcagttgatacaaaggatatcattattgttaaatcatactttgagaaagtgttaaaggatatcattacagagggctttgttaatgaatttggagaggagtactgcttcttctcagcaagcgcagggcaaatcagaaataaaaaatgcgttatgattaagaagtctgtatgggaagcaaaacaggatacattaacatgtggactaagcttagataaggttaatgaaaagggtggatgtaacccgaataaacatttagcctatcttgcactcacaaatagctcaagtgttaagtgggaaaagtttgatattaaacgagcaattgttgtagaggatatggaaactcttgtacctgcaaaagttgactacattaatcgtgatacatttgaaattaaaacgaacgaggaaatggatgtacctatcaatcatacagatggatgtggcatgattttggctaacaagaataataagaaagcatttatggtgcgtttaccttggatgaaaggcttgttaatcccgacaccgttcgataagtttgctaaagatgttgctggatatactaaagtaactgatatctatgggaaagagtgggacataatgcaagaccgtatttccgtcatattcacacgctcacaatttaaaatggcgaattattttactgactggaaagagtatcaagagaatttcaagaagtacaaatgtgaagcagctatgttgaatattgaagaagatgcagacaaaattccagatgctaaattaaattatcaaatgttacagacattgcactctgtagagcaacatgaattagaaaagcttgctgaaagtacaaatagagacattaaagaaatcggcacaaacaaagaggtagcattaagagtacttggagcagatgatacaaacgagactaaaaatgcattccaagaagctctatcaatctacaatgagatgttaaacgatgctcactcaaaggaacaacttaaagttaaaaaagcaagccttatcaatgatggtaaagcaggtaaattgaacatcaaaggtaagttcctatttgtttcacctgatatgtatgcattctgtgagtacctattcaaaggtgagaagaatccaaaagggttattgaatgatggtgaagtattctgtaagttgtatggtgaaaagaaccttgacattttaagatcaccgcacttatatttggaacactcaacccgaaaaaatgtaattgatgaaaagaaaaaggattggtttgttactaactgtatctacacgtccacaaaagacgttatttctcgtatcctacaattcgatgtggatggggataaattgcttgtaattgaagatgagactatcgttgaagttgctgacagacatatgaaaggtatcaatccactgtattatgaaatggagaaggctaaagcagtacaccttgataataaagtaatctatgacagtttgattcttgcatacagtgctaatattggtgagatttcaaataaactgacaaaattgtttaacagtgggaacatcgatttggatattgctaagattctaacttgttacaataactttattattgatttcgctaagacgctctatcttcctactatacctgaccatatccaagctaaaattgatgagtatgatagtgaaaagctacctagattctttatgtatgcaaaaggtaaagatgaaaagagagtggctacaatcaatgacagcacagtgaataaattagaaaagattattaagaatcctcgtatgatattcaaaaaggttgaaggtgtatttgattacaaaaacttaatgtctaatccaaaacgtagaacaaacaaagagcgtgatgcttacatcattgaattgtatactgaaatagatagaaacaagaaatggttaaccattaaccaaaagaaagaagatgttacgactaatactaaactatggatttacgagcatatcagaagaaagctgttaaacatcaagagtgatccatattatattgctgatgtattagttaaacatttatatggtgtgaaagacagtgagtttaagtcaactctatggaatagctttggtggagagttactggtaaacttgtacaataatgttggtgaaactaaaatgtgtgaggattgtgaagaacgctttgtgccaactaaacaacgtcaagttagatgtaattgctgtcaagttaagagagacgatgaaaataatgctaaacgccaacaaaaacaccagcaaaaaataaagtcaatgaattaatataacggtgagtttccctcacaaatgttgttaaatcaacgtttgtgagggttatttgcatttgatttatttgtagattgctaggaatggcttggttataggctttgtgagggttttttgaggaaaacgttaaggttctttaaaggaaggtatataggctaaagtacacgcataagggttttatattatactttcctttttaaaaaatgttaagaaacccctgattatcaattcttatactcagtatatatgattaaacattgtgagtcaactgtttttaaaaactttttttactcacgttttttcgtttgctgtgattgggcttcatctcccaaaaccatcctttttattagtagtaaaaggctaggagtataggaactcctggtctatttctttttaaaaagttggttcaatgaaatctaatcagagtatacgagagtgtactactaatacatagaatggatgattttaaatgatgaaaaaagatttaaaggaagagattgtctcaagacaaagaagaacacgaaagtatcgaaaaaatgtaaatgagccttcggtatgtggagttggatatatcggagaggggaagtttgacccaaggaaagacgtagagatttacaaaagatgggtatctatgttaatgcgttgttattcagctaaatttaaagaagctcaccctacatatcaagacacagtttgcgatcctagttggcataattttcaggtattcgcacaatggtgggaagacaaccattacagtttagaaggtgaaagaatggagcttgataaggatatcaaaattaagggtaacaaaacgtatgggcctcgaacatgcctaatcgtgccaaagtcgattaacaccctttttgttaaatgtgatgctagaagaggagaattacctataggtcttcgcttcgatccttcatcgaagaagaacccgtatatggctaagtgctgtagtggaggaaaacaagtttacttaggtaactatgacaatttagagaacgcttttaacgcatataagatgtataaagagggccttattaggaaaatagccaaccaaagcaaaagcaacatacctgaggatttatatcaagcgatgattaattatgaagtagaaattaccgattgagcattaaaaaataagatatatatacaatacataatttgatttagttacaaagaattacaaaataacataataatacatatttttaggttttaaagcaggttctacgtttctctctgtcgaatctggtagatagagaggaggtggaatacataatgggatttaaagataaatttattagtgatttgcctaaagtatttaaagaggatctagctaaaaaaacagctagagagcaaactaaaaagataatagatgatttctttattaacttgagggaagaattagaaccaaccttagaggtgtttcataaagatttggaatttaaaggtgagaatggctcttatacaatacagctaaaaagggctggaggcactaagttaagtgttcattttcataataaaatgattgtaatatcagccctaccatatggatatggtgagcaagatacctttagttttgacgaaaaacagttaaaatatattagaaacacagatgaacgaccttttagtggtgaactattagaatcatacttaaaaaaagcatttgaaactccactagaaaatttgctcaaacaaacaacgtgttaaatcgtttcgaaggacattgtaaatacagtgtccttcgttttatttaatttaagaataggttggttatataatgacagataaactttaccaagaaatattagatggagaaattagtgacgaagagtttttacgtatcaatgaagaagatgatgaacctttaactcataatcaaagaataatgttggctaagtacttaatgagtttacaaggtttaactaagaatgaagcttatcaaattgctttcaagtatgtggaatgaaaatattctaatagtcatatatgtagaaggattattacactttttgtcgaaattataggcagaaagttggtgatcggagaatgagaattcaaattgattttaaaatactaaatgtcatagaaaaaagtggcgtaaagtcctacattgtacagtgcttaggagagaatttccgacgggttattaaagctcaatacgacgggagtgtatatataccaaattaccatcagcaatttcggggcataccagctctaaatcgaacctttattgatattgagttagccaattttataatgaaaattgagaaaagtgtaaaaatagagtgagattacttgtatagataattttgtgtttttagtaagtagctgagtgcactcctagctgtacgtctagattagaatagctaatctttataatggtaaaaaagcatccttgcgtataaggacgctttcaaagtggattggtatttccacttccaaaactaggcgttggagtaggtgttgaattagatgacgttggagtagaagtgttttgagaacccgtggatgaatttgaattagaacttgcatttgatcctgagcttgtttgtgaattggaatttgcacttgtaacgggacatacttgaccgacgttaccgagaataataattccacctgacatattaccaattttaagtgaattgattttagctgacatgtgctttccgcctttcaacgatgaagaaaatagaatacacattagcatatgtttagcttgtcaattatgtatagacgggctaaagaaataggcgaagttattattgttataagtttaggtcgctctgagtgagtggctttttattatgtctaaattactaaatgcgttttataagataaataattttatt

SEQ ID NO: 128 - DNA, 5510 bp, Priestia aryabhattai
  source 1..5510: mol_type = genomic DNA
attacacgtttctgttttagtgggtgcttttgatatgccattatttctgatcatcataatttgaaagaaagtatttaagcgtgtgaatttctcctgaatctagaagatcctctttcattttcataactcgaagttttattgtgtcacccattgccgggaaattcatcatatcaaacctatctcctaaacctaatggaatattttccccatgcatgcttccttcgttaaaaaattcagaggttggaccttccattaataaatttccatttaagtaaaactctactttttcttttcctgtgattttagccatagcttccacctccttttccataagttacttgcacttaatattttatattattctgaatactatcgatacatatttcctatattggtttaaagataagttggataagattgcaggaagtacaaattgaataccgaattatccttaacaaatagatttcttcttacatccaaaagttttttgtatgttaacgagcatgtataatacctatactgttgaaaaggagatgagtgctagttgtattctaggagggtaacgaagtataaccccttaaaaagagataataatggttactttctcaatgatgaatggacttgtttttctgaagtaggagtaaagataaatatggatgagtatttgaaagtggaaaaaaattatattaatgcggttgtaacattcatgaatgaaatgaatattaacaaactttatataaaagggttagaacaatggtctgaagatatagaagctcaaaatgcaactgaatttatatcaaaattatggataggacaatggataagtattcaagaagtaaaagagctagtaaagctaacattacgaaatgcagtgtggtgtaaattagagttaggaaaccagttctttgtccattttggctatgattattatatgtacataggaacctctcacaaatgttctaatgctttagagaaagtagttttaacaggtttacatgttgaaatggttgattctccgtatctataactttgaaaaataaatttctcaaatgtatgttatgtaaagaatattagttaattaatagaatttgtaattattcccttataacagtaagagtagaaaagatgatggagtaatattttacacatgacaaacacaccggctaagtcgatgtcaaattagctaagaataattaactagtactaaactagattataggaggaagaaaatagtatgacaaacaccattgaaacagtagaacagtatatggatcaagtagtgccagacaatcgaaagcatgatttgacccaacttcgcaacttaattattcaaatagtacctaatgctatagaatccattaaatatggaatgccttattatgaactaaacggttcactatgtgcatttgcttctcaaaaaaattatatgagtctgtactttctaaatactcctattctgcaaaagaatatagattctttaagagacctaaatgtaggaaaaggatgtattcgattcagaaatattgatcagctttcgatgactgtcattcagaaaattttagaagaatcagtggaagataacttggctcgttataatgatcattgctaaatgcaatattattggattaatatcatgatgaggaaaaaggtatagtgatagtattactcctaatcacctactgataattcgtgttcgtaactgaatagcagggttatattaagtgaatgcaacaagacaatcataagagatacaatatacaatgctgaaaagagaagaaacagcaggcctgttagacagcctgctgcagaagacaaaatgattttaaggtattggtattagactacctttaatagtctgttctagttaagaagcgctatatctcatgatattcattcttagctctgcgttcgctcagtttaatgaagtcctgtctcaactcccattatacttcctatcttggttgggtttttcaccaaatgaacaaattttaaccagtaactttcatttttcgtaaccggtctaatcgtttttgaatgcccctagcagaacgccccattaattcgcctatttctttttgagtacgacattctccgtaaaacatgttccttaggcgagcgtcttcctcatcgttccagtttttgttttcattcctaggacgagtaagataatcaatatccctttgtttatctacccaatctggctctggaacaagagcgttctttggcactttataaaaattaataagccctctattctgttcaacccatccccaaaaaatcagtacgtcaatcaacataaattcacgcgttttcgctaccatctttttatagggcattttgttattcttaatccagttgtaaacagtatgaacatcaatttgaagaccctcggctaattcgtagactgtaatgtttgttgtatttgcttttgctccatatacacccaaacgatttaacctagactctaaggcttttacagttctttgtaaactttctgatatatgtttaagaggtgcggagccgtagtaatttaataggtactcatcttcttcatccgtccatctacgaactttttctttccattcaagatttaatactttgatacgtgtaacaacagaactggctactttccctaaaagttcgcctatttcacgattactcatggtatcaatgttttctttgagaaatgtatcttgatcctccgtccagtttttgcgtaatcgtgtttcttcggtccgaagttttaatctaccaatacgtttattaacagattctttactccgatttaaatgttcgccaatcttttgtaacgtcattcgtccatattgtactttaacgaataaatcttcttcatccgtccaaattctctgattcttactcaacgttatctcaccccttttcatctaaaaaataaagaagtcgatagaaaaagcgttagtgtgtgtactatctcccttgacattcttaatcattttatggtctaactatgttgtcttcttaaattatccaaattatagatcgtggtatttgatatatttaataatctgtaatgtttctacttaaataagtgcaactttatcatactaattatacaccctttttaagtagtagtatcagtatgacaaagagaggaataaccttttcaaaaaaaattccagcaataaaaccagataaacctcaaatgatatattttattgaataaaaaaagaatttttttcctgaatcaaggaattatcagtttcattttctattatgaatatttaatgaatgttatatctaagtcttgtttttttgtgtacaacaccattgaatccctaatctctctttgctcttaaatttgttttgttagaatttggtcaattaaaccatactcttttgcagaatcggcatttagaaaataatcacgatttgtatctctttcaatttcttttattgttcttcctgtatggtaagccagtaacttatttagtcgattcctcatacttaggattcttttagcactaatatcaatgtcagatgcttgccccttagctccccctaatggttgatgaatcataatttcactattgggaagagaaaatcgttttccttttttgccacctgcaagtaaaaaagcccccattgatgcagctattccaatgcataatgtacttacgtcaggacggacttgttgcatggtatcgtaaattcccaatccagctgtgatagcccctcctggtgagttaatgtaaatagtaatatcccttttgtcatcctctgcttgcaggaacaataattgtgcaatgatactacatgcagtttcgtcattaatttctccacttatccagataatacgatcttttaataatcgtgaataaatatcataagctcgttcacctgttcgtgtttgctcaattacatatgggacaaagttcatttggtcccctccatcttctagaattcagttatttttatttgaaattttgtttacgatgatagtcaatttataatcaaccataactaatatatgcttatcttttaattttaaggattttttaaatctagttcttcctaataaatcaatctaaaaaggtacacctttttatactgtgtaaaatcaaataacagaacgtctatttagtttataaaataaacctttataaacgtataaaaagtattttacctttatagacaatatgtcatattcaattttagatcattgcgtacttgcaataatgaataacactctatatgttgagcaaactacaaaagaggatttatcctcccgacattttctttttctgaggtgcaaatgaagaaactaccttactcccatagggtagttttttcatttgttgttagtatattttttaggaaataggaacaaaatgtagtcgaataccttccgacattggtatttccaacccactttatttaatgaaaagctactgttgaggcacagtagcttttctattttaggctgtatatgccgtgttttatgacgggatgatgcctttttttatcaacaatgtgtcagtagtgctacaagatgtttcattttctatacatacatgtatcaaaggttataggacatcgttctcatgttatactatcgattcatgacaaaacattgtatacgcagcatgttttgttcattttctgctttggagggacaattttattatttgttgttcctcttttttattttatataaaaaaaaggaattactctccagagtactgttatccttaagataagggagttgaaatattatgaaaaaggcagagcacatcaagaggtatgagcaaggtattactagtaagtttgctgtgtacagctttccatatgtttatgacttttctatttatgctattgacatcttttatactgatacaggagactacttctttggcagtgctaagaacactacacttgaaagattctttactcgtaaaatctaccaagatgaactggggtattatttcaagtatgctcaagaaaaagtctatctcaacagttttaatccaataaagaacaataaactacagttagctcaatgagctggctttttttatgctctccaagacaaatgacctatcatatcaccattatgagaagtaaaagctaaaaatatcagcatgattaaacctgctgttttatttgatatgaatacttttcttttattcgaacattctattatttaagagaccctagaatgcttactttaaaatataaaggtggatccaatataaatgaataataaggtttatatggtctttcgtgagatcttcattgtttgcattgttccctttgctattatctttcttaccgactttttggtgcaaataaccagtaaacgaaattgatttatatcctttccccactataaacgaataataaataacaacttgagcaaactattcaggaagtcttatgaggcttcacccacaatttaatttatcagtaggaaatagctatcttcttacgaaggtagttattttctttttagattgtttaaagtatctgctctt

SEQ ID NO: 129 - DNA, 5434 bp, Priestia aryabhattai
  source 1..5434: mol_type = genomic DNA
cgttctgagtcttctacacacttcaataccatttaatccaggcatcattaaatcaagtagtataatgtcataatcctgcttggttgctttgtctaaaccagtccgcccatcgtaagctacgtcaactaaatatccttcatattttagttctaattctaaaaattctactaatccttcttcatcctctacaattagtaccttttggagataaagtattcacctttatctccaaatgaaagaatatagaaacttataaacatttaatttttattttctcacttttttaactcttcatagtttgacttctctttgtttttgcgaataattttaaaagcgaaataaatcccaaaagctataactgaaagtaataaagccaaattcacatatgatccagaaacttgattaattttcctccaattgcttcctaaagtttttccaaggtaaatgaataaaatactccaaggaacgatcgcagcaatcgtatataaaataaagcgagtaaaagccatttttgtaattccagcaggaattgaaatagcatgtcgaatgataggaataaagcgagtaaaaaagactactcctgccccgtactgattgaaccatgcttcggatttttcgagatgccttggacttattaagagaaattttccgtacctcaataacaaagtccttcccccatacgaacctaatacatataaaaatatttgtgcaattaagcctcctattgttccagcaattgcggctcctataaaggtgatttttccttgggagacaagaaatcctgcataggataatacgatttcactaggaattacttctaccattaacgctgatgctatacctatgtagcccagctttgaaaggtaagcaaatgcagctgtaataaatgttttcattatttccgtccttccttaagcacttttcttcaatttatcaaatgaaaattagatttaaataaaaaaaagattaagaaaaaatgaaattacttcttaatcttctttaatgaacgatataaggttgttcttgaaattcctgtggcttcttgaatttggagaaccgtcattttttgagaaaaatataaagaaatagcttcattaagcttttgttgattaactttaggccttccgccgttccttcctctaggtctacctgtttttaaacttgctactttgcgttcataaagaatgtttcgactaaattcattgagaatttctaaagtcttaaacataatcttccctattggtatacgtgtatcaatctggtcctcaatactaacaaatataatgcctttttctcggatataatttgtaatctcgaataattgagtaatggaatctgctagatgctttaatttacatacaacaaagatgtcaccgggctttaataaatctaaaatccctagtacttggctatctttcttttctgatgtagaatttttcgagtggaaaaattgattacaaccatatttttttaatgtctctatttgcaattttaaggtgtaatcatcattactatatcctacatatcctactatcatcgatgttacctcctatataacataggtattacgaagaggagttttaagttagactttctgaataataataaaaatgttactttacatttctttaatcgtatatcctatacctcgaactgtctgaataaagggtgaattaaatccttcttcaatcttctttcttaaatagcttatataaacatccagtacatttgtatctccctcgtattcatacccccacacatttagcaaaataccttcacgcgtaaccgtcttatttttgtgaaggactaaataaaccaataaatcatattctttaggcgttaaacagatatcttgtccagctctagttacttctcttgaatccatattgataaccatatcgttaattaataataacgagtcttttcctattttttctctagtagcaagattcttataacgtagtaaagagcgtattcgcgctaataattcttccgttttaaaaggcttagttatataatcatttgctccatgatccaaccccattaccttgtctagtgttgagttacgggctgttaaaagaatgataggtacgttaatttctctttttcttaatttacgtaaaacctcgataccactcattttaggtagcataatatcaagtaaaattaaatcaaacgtatccgataaggccgtttcgagcccgcaccttccattgttttcaatttcaacttggtaatcctcatgttcaagttccattttcaatatattccctatctctacttcatcttccacaattaaaatacgttctgtcatatgatccctcttttcaagctctacatttatttatagctttctgctttacttgtcgttttttccatcgccaatagaaatatatagctgctacaagccaacaccccatcgtaaaataggaacctataatattactgggataatttaacctaaaataaattcgacttattccaatacccaagatgatgacagaagcgatacacactaagagaaaacgcccccatagtctagaactaggaccccataattgaattactagtattgcgtatacaacgattagacttactgtatgttccccttcgtgttgaaggctataaccactgactttaattaagtgatgtaaatctggacgaccaatcgagtaaaacattttttgtatcttattaagtatgaaagatccactgataatccccaagaataaaataagttcagtcctatatttgaatattttatagaagagacataggcttccaaaagaaagcgttgcaataaaaggggtggaccctagaaacataaaaacgttcattattcttttagatatagggaacctgaggtgttgaacataagataaaatgatgctattaatatgaatatatgtttccccactaattaaaataaaaatcatgtctacaaaaatgattaaatataaacttaaaataaaggccactaaaaattggattttaaaatttatatgatacaatcccttgaatataaattttcagaaatcagaatgtggtgtttcactttttatctattgttcttttgctttaatcaccattacttcgctaatatcattaaaggtggatgagggttttacaacagccaattgtgttaatccatattcatcaggttgtaccttaatcacttttcctaaagccaatccactttggaatatggaactgatgggagaagtttggactttatcccctatattgacctcagcctcactagggatttttctaacaattaaattacccttcttttcatcatagctttctagtgttccattcacatcttttttatcctttaaaattacggccatacgatttgtcctaagatttgagctaattagttcaaccaaagaagttgatgaaaagactttagctactttgccaataactccatttgcattaagcacattcatatctacttttatcccttgcttagctcccttatcaataattaactcattatcccaattacttattgaacgatcaattacagtagcagatataggattataagctttcattccattttggacttttaacagttctgttagttctttattttcatgttttagcttataaacattcgcttcagcctgactttcagtggctagttcattctttagggtagcgttctctttgtaagttgcaaataactgactcaattgttgagattcactccaagaaaccttgtttaaaaaaggcaagctacctttgtataaggtccaaataaaaatgaatgatcctacagtaagaattcctcctactaaaacatatctgtatctttttctctttttttgaaaacgtatcaaatctacaccttcctaccagtagtcatgttatttacaatgttactaactatttcttaaaaatttattaattcactttaattaaacgcacttataccactctttagaaggttaaagagtggtatatatggatgcttctaaagttttttataaagatattcacccttatttttcatggataaagggtacttgatcctttttcgttttagttagataaataaccaagcttaagattactaaaagaaatattgcacttgttcccattgttcctaatccaagtccaccagcatgatgaggctgtgacaggtagtctcctacagaagctcctaaaggacgggttaagatataagcaatccaaaaagaaaggacagcaggaagcttaaaacgatagtaagcaattgttacaattccaattaatacagcaaacattaaggctgacttccaataacccatgtgaaggctttctgctataaagtctcctgctgcagtgcctagcgcaaacgtaaaaagaatcgctaaccaataaaatgcttctcgcttgcgtgtaaaaatagagtgaatagataatgttttttcatttgcataccatacaagaaatgtaatggatagtaagagagcaaaaactatattgctaacctcaagaggcactccaaaatgatcagttaggttatccgtaacaagagtacccacgacgctaattaataggactgttaaccaatagatactaggtatatattttttcgccttaaattgtacaaataacacgatagcaagcagtatacccatgatataggttgtattagttaatcctagatgtaaattttcattcaaaaaatcagcagctgtttctccaactgtagttgccataattttaataatccaaaagaaaatcgtcacttcaggtaccttattcagtattcgctttgttagagaattagaattcgaagtgttttccaattggagcatattcacatcattattttcgacttctgaatcgaaagccatttataatacctcccctatctttctagtgttcactcttatttttccttttttgtgttttaatgtgtggcataaatttaatttaatagacagggatgaaattaagatgagaataaaatgagaatttcataaaaaatatattatctagggatgctaaaatgattgttatattctaggggttcaactaggacaaggtaggaatgtcctttaatagagcaggcttctttaaatatatcgctaccgataaaatccattatgtaaacataacataatgtctctttacagaactaagcaagcaaacgagcccttgatgcataagggctcgcctaaattctaaatttatcatttataaatcgttgatttattaacatttctagactttgctaaataatacgttctacataagaaaggagaactttatgctccatttcattcagagacatcaattatcgacttcgattaatgctcttcaccactattttctttccaacttttttgtagtttccgaatataaatgatttgaccaatgtgatatgcgttatgagtagttaaatttccaagtacctcccaccacttcacatgtt

SEQ ID NO: 130 - DNA, 5191 bp, Priestia aryabhattai
  source 1..5191: mol_type = genomic DNA
actactaatctataaatataaatactatcaagggcgttagtatagattactaacgtcctctttactgtcttcttcactttaagatttctacacgaactggagggagataacattgagtaaaaagcaaaagccatggacgaaggatgaagatttattcctcgaagaacaatatgggcatatgacatttcaaaggattggtgaatatttaaaccgtagcaaagaatcagttaataaaagaattatacgattaaacctccgtagtgaagaaaattgcttacgtaaaaaatggacaacggagcaagatacttttttaaaagaaaatattgatatcatgaataatcgtgaaataggaaaccatttaggtaagagcccttcttctgttgctactcgtataaaaatattaaaactagcacgaaaggaaacactacgtagatggacggagcaagaagatgaatacttactaaagtattatggaactaaatctcttgaacgcatatctagacaactgcagcgaagtataccagcaatagagtccagattaagtcgcataggcgtatatggagcaagagcttatacagggaaaattacggtatatgaactggccaaatgcttacaagttgatgttcatactatttataactggattcaaaataatagatttccttataaaatgacgagggcaaaaacacggaattttataggaatcgatgtattggccttttggaaatgagctgaacaaaataaagaatttcttaacttttctaagatacctagacatactcttattcctgaacccgattggataaataaacaaaggaaatatgattattataatcgtcctaaacatgagaataaaaagtggacagaagaagatgatgctcgtctatggcatatgttctatgaggaaggtcgtactcaacaagaaattggccaactaatagggcgatcaaaacatggggtccaacgaaggttaagtcgattacgaaaatgaaattgacttagcaagcgctacaagtatatatttagcactggtgtaaaaatgcaggatggttaaaatagacatacagatactattattatttgtaaaaaaataattaactaatatggataagaaaaagggaaatgagtgtacttatgccaggtagtctattttggacgttgtatgattggtttttatccaagttcctaataagaaataagcatctaagaacttttccaaaaatactttagcttttcgtatgttcctaactcgcagaagatgacagtagattaaaaacactttttcataaaaaacatattcaaaaatagttaggagaatcaaatttgttatgaatattatacaaaattggcttcacgataaagtatttgtccggattgcgacactccttatcatcgttgttttactaatcagtatacgcagtatgcttcatctgttgttatttacctttatatttgcatttttaattggtcgtgctcaacaaattttgaaacgaaaacttcggattaattccacgtttgtattagtagtaatttatattgccttactaagtttaattgggattgtgggatatttgtatatacctgttatcataattgaagtaacagagcttgtgcatcgactgatgtatttttacaaacatcctcctgatagtacattcgttacatacataattgataatttaaaacgtatcaaatcaccagagaatattcagcaaaatattgatttagcttatgcgtacttatctaatattggaaaagtaagtgctcaactcttcttagctttattactaagcttatttttattacttgagaaatctcctattcatcgtttgtttacacagctagaacaatcacaattaggctgtttttttcaagaagtaaggtatttagggcgtaaatttgttaattcatttgggaaagtaatcgaagtgcaatttatgattgcttttatcaacagtgttttatcagttattactttgtggattttaggatttcccaatttgcttgctcttggtgttatggtatttgttctaggacttgtaccagttctaggtttatttgtatcattaatcccactctgtacaatagcttacagcctaggtggcggtgtaaaattgctatccattttgattatggtcattgtcttgcatgctcttgaaagctacgtgttaaatccaaaactcatgtcatctaaaacaaacttaccaacatttattacctttatcattttaatatttggagaacactttttaggaatatggggattagtacttagcattccaatttttattttctttttagatttaataggcatagatgctgataacagctcaacaataaagtaaaaaaggagcagattcaaatttaaaatctgttccttatccaacctagtataatatgcatacttttaaattagaggtattaaacatttattgcaaaaaggaaacactactgtatctcgacagtagtgttttctaatcaaaaaatgggtttcgaataccaaaagtcggaaggcattctacttgcattttgttccaatcgcataaaaaatatactaacagcaaatgaaaaacctaccttaaatgcgttaaggtaggttttttatttatgcgtcagaaaaaagaaattgtcgggaggattaatcctcttttgtagtttgctcaacatatagaatgtcatgcattattgcaagtacgcaatgatctaaaattgaatatgacataccatctataaaggtacattactttttgtacgttcataaaggtttatagtgaaatttactctatttctggaatattatcttattcaccacacgtaaatacaaaagctggtggaatgttccaaagtactttttctacgtcgatatttacaaagaaagactgaaaaaattgttgcttgaggcgtgtatattggaacgaaataaatttcccatcactacctaacacttctcttgttacctgcaatattttttccgaagtcgccaatggcaagctggtaaagggtaatcctgatacaatatagtctactttggtaatcttatattgctgaacatatttatctgcatattcagcagagccatgaataatgtgtatatttttcatggctccatatttgcttttaagggtttgaacgaattgtttgttgttctcaatgattagtaagactgttgcgctatgtttatgttgaatgagctgttccgtaaaaacccctgttcctggtccatactcaataatacattttgcttgttcaaaattaataggggctatcatgtgtttagcaagttgtctagaacttgacattaatgctcctacagttcgtggatgctttatatattcgtttaaaaaataaaatacattcatagtcatcttcctctctccttgtgagatacaggtatactatacctaaataaaattaagatgcgattaaaaaaacgtaaaagcccttactgtttttctaaaaataaaaaacgtacttgtagagcttctctgtatcagctatgaccttttcactgttagctaaggataagtgaagacaaagtagacaaatcattagtattatggaaaaaaacaacacaaatctcttcaacttagtggcatcgttgtttagtataaaaaagatattattgagtttaaacggtaggtagactgataaataattaaggcttaagttgtagaagaattattattatgttcgttagagtacaatcttatgaatgagaaaaagctcaccttatttaggtaagcttggaaaggggaatatctatgaaaaaaatcattaattagctagaactaacaataattattttaagctttaatgatgaaaaaatgatgaaaaaatcaaacacactataaacgtagttgcattgagcgattaagagtttactctaaatgaagaagatacaaatgaacagaggatacaaatagtaacaatttccattactttagagtttaatgtaactttctttcataaataataataagttccctaaatcaacgcatttcttggaattataagatatcagtatcgagaattaacattatgataagtagaaaaagaacatatttgaataagttaagaatttattaactacaattttgttcatttaaattattattgttaataaccacatctgctttaaattgaggtgtatgtttatctatatagatttttgaagctgcatgatatcttttaataaacatttcttcagctttttcataacttccaaaagcctgttcttctcgtttagcacctctttgtctagctaactcaaagtcagtatccacgaatattttaaaatcatataggtcacataattgtttcttgaataaaaaggtcccatctacaattaaaatcatgtccttactcgctacttgtatatcgggtttaacatactgatctgttgctaattctaaagaggttgtttgataatgaaggtttcctcctggtcctaaaggaattaaaagcttttgcttaaaggattcataatcatgcgcatcttgataatagccaagagccgactcctttccctgtctgtaacgaatacattttgggttatgaaaatgatctatgcttgttctaataacattcttttttctagtttgaagttccacagcgagttcattagcaagcgttgtctttccggaagctgtaattccactgattcctactcgaatgggatggcttgcttttaaactcaatattttatctactaattcagaaataagttttcctcttaacatgtaatctccaatctcctctcaatgcattagtttctatattcttctctatatataaaagtgaattctggtcgcatcataatatgcattcatcagaaattcttaaaaaaatctatttacttattaaaaaagttttttatagcttccaaacgtatgttatggccacattcttcacaagtatattttcctttcatattttctttaacctgcttatatctcaatgtgccttcgtacactataaattttttctacaacatatacaaattaattcataataaaaaatctcaaattccctctgttccgataataactccttctggagcccaactagaaaatgagcttttactgattaaatgtactgtataaaaaacagtacgtttttacatactcagccatactaaaaaatttatttattcatcatatgaatatgatatatttatagagaaactgattat

SEQ ID NO: 131 - DNA, 5185 bp, Priestia aryabhattai
  source 1..5185: mol_type = genomic DNA
ttatgatgggcacaaaattccagcttggatttgttcatttttattttgatattgcttattgtagcaatatcgttcaagttctgcatgacctgaatgttcataacccaaataagaaagccactctttaaaaataactttctatgtacggtcaatcgcttctaaaatggttgatagggaaaagaaatgattgggaggtgtattagcatggaaataaataattcaaatgaacaaattgaacaatcagctgtagctgaacctagagtattaacttcctttgtagcatattgtacttcttgtgcaccacattggaggtctagatgttatgcaactaaaacagaagctcaatcattagcagatgcacataattatgcaaaccatggcggacatgttggagcatcagtaactcaacatgtcgggaattgctaaatccaacaattaagagcattcataagggatgactcctattagtaaatagaactaactggccattcatattagcactgttttttacttctgtccctttcctcatacttcttatatttcaactcaaatatgtaggaggtgactgttatgccagatcaagctcacgaaaaagagaaaataccaacgaagaatggtaattctcgaattgctgaaagaagtcatggcatatacaaaactacacgtaatgaattagacaatagaaccattctaaacaatatagataatagcgcgatgcttaatcttaatgatgatgaatgattcactgtacggcagtagggtattattagatgacaatggaatatgtgctcttctttctgatgttagggattggattattagccttgatttttcacaagatgggcgaaaaatcaaaggatgtcccaccgactgaatacagtaaattagcgtcaccaattgaaagacgtttatataatgcgttggtgctaaatggctattgtgtccaaacactagtaaaatgtggcccttatcgaattgaccttgtaataggtaagcttgcgattgaatgcgatggaaaagcgtctcattcttttccatcgcaaaaggctcatgaacgaaagaaaggtgcttatttgaggaaacaaggatataaagtaatgcggatcagtggcaacagtattgtaaatcgtatgcctggagttttaaaaagagtgaaaacaagattgaattaaaaaaagagaagggtagaaaccttctctttgtactatataatcctctatacttagatactcttcttcatgccacatttccggcattcgcgtaagaaaacgccaccttttacggagtttttgaagtcagctgaattgcagttgtcacatcgtccactttgtttatctggatattccgcataatcatatactttagtgagatctatttcttgctgctgtttctcttccatcttgctcactcttttctaattgacttttattaaattaccacaaaaagtgaaggtgacattattttatgtaaaacgaacatcaattagttcacttaacctcattttgttctttaattcaaatacttcatcgataaaaacaaacaaattccccagggaatcaacaaattggatgaatcccttttctgtaatacattgtccttttttgtagtatgtaagataaacttgtttatttgtatgtaatgcttcaatcaatgtgaaattgatttgttccatttgctcttctgttaaaacaggttgagctacttctacttgcttatttataatttcctttaaccctatgtattgttcgggcatactcgcaaatgggcgccattttttcattttatcaagacctccttttaaaaagctgttgttttgatggcttttatcgatgtagccatgtctacattgataatcctgtttcaaaattagggttcatattccttcctattgtctagttttgaattaaagtttgatgaaattgacaatataaaccttgatatatggacaaagagaaaaagcgtgttttgaaaaaaattgatgaaaacacacttttaatacattcaattgaatctttcttttctaaaaaattggtcattttttacgaccctctattacagcgtccgtttgttgaaggtttttgaatgcactataactggttgattacccttacatacttctcgtaccatttttcccattcctcttttgggaaatccatatattgaccctccaatacagcacaaaacataactagacatacatgccatccagataaatcttttggagtatgatcactaaggttagggatatattcttttaatattaataaacatccatcatctttagaagataactcgaatcgaatccaaccttctccccattcatactgcaagtaggattgttcttcaatatctaagattgaaatatcaaaggagttacctgtcccgtcattcatattgaacttaattgttccgtcttttcgaaggtctacaacttctaagtttggcatccatttttgtaatttatcattctttgttaaagtagcccaaaccttttcaacggagtaattaagtggtcgattatatgtggctatatagccattctctttcttttctacaactgctagcatacgttactcctcctcatctaataattgttctaggatattaacttatctggccagtattttcgataaggtgctaaccagttatcaatttcttcaaggggttctgcattcaaatgataaatatgtttccgagaacccttattgatgatcactagccctgcatcccttaatttttttacggttttcctcagctataacttcaaataaaacggaataactctatatcatgcgtgggtataactagatcttcactttcctctaagacaatccaaaatccttctcttgatgttaaaataatttttgcacttcaatcgttgaatccttctccaaatatatattctatgaatactataggcactatatatttttagtattgttatctatcctacaaagaaacgagaatagatggataacaatctttgtatactttatattcatccttataatatggtattgtttctttcatccctctatcgtgatgcataatatttcctcctttatcttttatgaccgccaataagaccgtttcgataacgagctgttgagtgatccagatagcttgaagcccgtagaacactattcttcccataacgcagccgaatttcatctatcgttttggcaagagcatagactctttcacgttgatcgatatcctcaaataagctcatttgctcctcttcttcaatgcttgtgtttgataaggagatcccaatggagcgaatcggcattccattatcatatgtatgtaagatggttaagcaataaggaaaaatatcttggcttaagtttgaagctcttcccattttcttttgtcttgagaagcctccacctgtttgtttgctgtaaccaatcgataaatggacagtttgagccactacttgatgcatgcgtaaacgaaaacaaacatcgtccaatagctccaatagtaataactccacttcttttcggcttgtataatctcgaaagagaatctgactttttccaaaggaacgggaactagggatgtacacatcggagatacgactaaaatcaatcccattcgcatgttggtgaatttcctctcccatgatgccaaattccttttgtaacatctccttcgaagaaagagcgagttcttttattgtatagatgcctaaacggtttaatcgtccttctgtagctgacgagattccccagaaatccttcattggatgaattgaccataacttaaagggaatatcctcatactgccaataagcaacccctgttggactgtgcttcgcttcatgatctaagctgactttagccagtaagagattaggaccaattcctgcggtagctgtcagtcttgttttgcgatagatttcattacgtattcgatgagctagctcctctggtgttcgagcaaataaatgcaaagaagctgtcgcatcaataaacaactcatcaatgctatacgcatgaaaatcctcgggagccatatactgtaataccaaacttgaaatatagttcgaagccttgatatatctctccatggatggattcacgacatggatatctttccttttaggaatgtcaaaaagacggcttcctgttttgattccttctttctttaataaaggcgtggcagctaacacaacagatcccgaccgtttgatatctcctacaaccgcaagccttgttttcaaaggatttaaaccccgtatgacagatgaaaccgaggcgaaaaagcttttcatgtctatgcaaataatgactctgtttggtagctgcccatagtccattgaaagtactccttaaataaaagaacatttgttccttatattatatacgaacaaatgttctttattcaatagaatatcataccttttcccgattatttctattgcttatacttcatctttctacattttataatttaggtgtcatttacatagtcacacgtaccacgtttcaaatagaaaactactgggtacatattatacataacaaaggtggaattaaatgtaaaaaccagtataagtttaattaaaatttaaggagatggaagaatgggaacacaaaaacgagttgcgggaacttttcattcggagcaagaagcgatacatgcaattaaggggttaaaacgtcagggatatcgtgaaacagatatattggtagtcgcaaaggatagaagtaacactctacagttaggggccgaaacaaatgtaatgatagaagctggaacgccagctgtaagttcattggcaggtgtgatgatggatagctttcttaccatgatgacaggtggaatggctactactacacaagctggtggtctaacttcaaaacttgttagaatgggcatacaaagttttactgcaaaacagtgtgaaagggatgtaaaggaagggaaaattcttgtcctaattgatgtggatgaaactcaaacaattccttcgtatactacggttagggaggttccatacgagacagaggagaataggtcagtgcaacttcgcgaagagcaactcgacgtaaggaaagaacgtgttcagactggggaagtacaacttcgtaaggaaattgtagaagaactacgaactatccaggttccagttatgcgtgaggaagtctacgtagaacgtcgcccggttatagac

SEQ ID NO: 132 - DNA, 5115 bp, Priestia aryabhattai
  source 1..5115: mol_type = genomic DNA
agactttatccagtaatctagagttactagctaacattccattttctccgtttacaaattgattaactgtataaatttcaattaacccctttttatattttctctttgctaagaagaaaagtaataataaacatgcgcaaattactataataaacatcccagcacctctattttattttctaaaatgaatactcatatgcataacaaagaccgcccactagatataagtgtataggcggtcttatctgtatgtatgatatatttctatgcgcaaattaacgacattatttgtagatttacaggtattatctaagatgctttaaataaaaggtaatcctctcattggaacatgaaagtaatacttcagcaatattccaatgacactaactacaatcaaactaccaaacgataaaagtatctctaactttcctacttctttatctgcattcattaaaaacatcccttaacataattttatctatcaatattttaacttgataagatatatattacattcatggaaaataaattaaaagatttatttacttccaaaattgccaccacttcttttcttgagcagcagcaatctccaatcgccgttcttctaaagtagcctgcaaatgctgggttaataggcggtctcttttttctaatgtatcattgattttatgatcaaaagctttaaacatcgcttcgcgttcttcttcaactgcttctcttacagcttcttgaacaatttcttgtaattcaagccttgataaacgcacttcatccttaataacgggtatcgtaatcacgccgttatcatccgttggaaacattgatacaacagccttaacggcgtcatttttactcatattatttgctaagaattccttcaatttctttaacggcatgatatctctttcaaggtaagcacgacggtgatgttcatcgcgataaaaggagtatccctcattttctaaatcaattgaccatcttctcaaattcgatgttgatatatcaaggagttcagcaatatccttcgcccaataagatttcagcgtttcctcttgtttaccgttttccgtcacgttaaccacctcgctatagcattctatgtgactatagaaaacaccttctcccccttcgttttggggtgtgaggctggcttttagaatggtgtctcttcactatgaaaaagaactaaaagttaggacagttgctctggcggttcggcaggtataatcgttcaaccaagccgatcatcattaacttcgttttgggtatgtttcggcttggcgacatgcacatacctgccgaaattttttaaacaagggcaatagagtggagattttttaagtggtttttttaaaaaatactactcgacccttgtttaaaaaatagcccttatatagatatagaaggagagtttgtacaaacgttgatattaaagggttttaaggtttcttatgttcagccagagtgaacatatatgttcaccctagagtgaacataagagagtgttttttgaacatgatgttcacaaaatggttgtttttgtaaaagttatattttataatttgaacatgaagttcttttaaagtgaacacgacgtttaccaaaggtgaacatatatgttcactacgtatgaacataaagggggagtagattttaatgactaacgatgaaattaatattaaacgagatgattttatgaagattttagagatgtctggagtgcctttatcagcagtggaaagaattatcgatatcgaaaaaagtaaacaaaaagaagaagaacaaaagaaaaaagagaaagacaatccaccatttgttcaactctataaaggcaaaggtataaatgctttaaagtggttaattaatgaaagtcagttagctggatcaatatttatgttcttcttagaaaacatgaataataaaaacatggttgtatgttcacaacaagtactagcagaagagtttgagaaaggaagaacatcaatttataaagctataaaacttttagatgaccacaattttattaacatagctaaaatcggtacagcaaatacttatatcttaaatcctgaaattacattccaagcaggaaatgataaaaagaaatacgttagttttgaaggtactgtattactgagtaaagaagaaaacaaagctctttttgagaaatataactatgaaagtattaaagtcttaaaagagaaaaaaagtacaaaggagcactaaaaattctacggatacaattacaattaataaaacaaaagggcactttccctggcaggaaagcacccccacgttgaaattagtacaacgtcataaccagtactaattataacatgggttgccctcgaaaaataggagggtctaatcatggatcaaactgaaaaattgttaatgggaattgaaaatgtactaagtattgctgctgaattagtagatgaggtgtctcgattaaaagatgtcgaagaagaatgcagaatccttaaagaaaaactgttcctcaaacaatttaccaaatcagaaaaagaagtttttgcacttgcacttgatggtcattctacttcagaaatgcaggaaattcttttcaaagaaaaggctacaattaaaatgcaaagacgcagcattttacaaaaattaaacgtgtcttccatgaaagaagcagtagataaatttcaaaaaatctcttgaaaataaggggatatgaaagggactagcctttagaaaacacaaaaaagagaaacaaaacaactagaaaaaacggtgttttggagcaaaaaagggactcaaaagggacatgaagagactttgagtgatatcactgttaagctaggccctgcctagccccacaccctatgtgggggcaaaaaacccttatgctcttctaacttttaatagctaaatagcctttaaggcaaatagagcaggcttaagcctgctctttcttttgttatggagcaaagtttctgagcccaataacaatatatatcccaaatgaaatgatgcataaagaaataaaatgcagagataaaaaaacaaacttttgctttcccttaatgaaaaaagaatagataaatccaagcaccgtaacaagtattaacgtcggtacagtaacgttaatgaatatagcaaaggtacttgattttaaatttatgaataaaggaaaacagagtatcaatacatacaacactattgcgataactaaagagactattgatacttttaaagcatgcttaaaaaagtttttcatgtaatcccctttctatgttcaaaagtgcatcttcactataatacatagacaaaaaggaaacaattaccttttttaatctctttcaaactctattgttttatttcttgtcttttctctccccttatctttgaagaacttctccgctgattcatatccggctttttctgccttcgttaatttgttctcatcatatgcttgcttattatttttaaatctatttaccgttcgattgaattcgtatttagcaaagcctactactctctggaagtcctcaaaaatctcaggtgcccttgattgataacgatctttgatgttatcaaataactgtcccaaacgttcgtattgattcttataccatcttgtttctttttttgattcggtcaattgtttatctaaactattatttctttctcttaaactttcggttgctatcttctccttttcatacatctctttatacgcctcattttcccttttaagagcttcagaagactttgctaaggatttaagactctggaagtcctcaaagctcaattcgacgcttttaggctgttttaaattgaataagctccctttctccttaaaatccatatcatctattttttttacttgagtgacctcttttttcaaatcgtccatttctgattttcgatttgaaatagccaactctaaatttgtttttttaccttctaattcttttacagattgctgtgcttttacagctgcttgttcatgataatgagtctgttccttaaaagtctgcactttttgatggcggacttcttttggtgtacctcgttccagtacatagccccgttcattcatgcgctcattatacttatcttgtaacgatgataaatcatcttttgttttaataaattgatgtctactaatcgttaagacatcttccttccgcctaccgtcatatatctccgtcagagggacagccacgatatgaagatgaggcgttttctcatccatatgtacagaagcgtgaatgattctatcatgtgataagcctatctcatccattacaaattccaaagagtcttgcgcccaggattggatctcggcctttgattttcctttaaagaattcttcatcgctcgtaaataagaactcgcatgccacatcgttttttgcaccgttaattgcttgctcaaatgacttacgacgatcactacgtgtcgtcttcattcgttcctcatgttcacgcctcatgtctagcgtgatttcagaaaaacgcttcaaataagaatcgcattttacaagctcgatattctcgcttgatttctccctatcaatatctaaatttgtatcagatactcggtccgcattatgttttccaatgcccctcaaatcactcaatgttttaatgccctgaactctaaaaatggaataactcaatcatggttccctcctcatttaagcctccccctaatcatagggggaggcgaaggaacatgtcaatgttagaacacactctaatattgacactatcgtatcaatatggtgtgccccttcgggggaggaatagccttgctattccttaaagaccgcggactctgtccaccacctgcataaggaaatcttccttatgaatccatcctaaaaactcccccaaccccctcactcttttgagggggctccctcgccggttggcgtcaaacaaacggggttgtttgagtgccaaaagggttcgggttttgtgagtctatcaactccttaaattctcgacctgacggtcttgcgatttatcgttgacagaccattttacgttcactctccaccatcatccccatcgtctatatctataaaagtatcatcagttgaatcactatcttctcctttttcaaaaacatccttaa

SEQ ID NO: 133 - DNA, 5112 bp, Priestia aryabhattai
  source 1..5112: mol_type = genomic DNA
ggggattttataatgaaagtaaaaaaatctttaatcgcagcattcacaggggtctctattttgtgttttagttctggggcaagtgctgcaaccagtgtagaagaagtagaagctcagtctgatttaaaagatgcagtaaatactgacacagaggctgctgttcttcaaccggacgaatattctgcttcagcaggcagtaaaggatataaaacaaattccaacacaacagtgcacgttcgcctgaccatggcttgggctacttcgtactcaaaggctgaagtagcccaagactacatatatgttaagtgcaaaacttacaatggtgatggatcccttattcattctaatgaagattcagaaactcaatctaagtacgttagtgtaaaagcagataatggaacagcttactatggtaatgattacgcaatgggaaagcacacttacaagaaaaaaggttataatgatctttacaaagaaactaaagttaagtggtaaaatatagaataaaggatatgctttaagcatatcttttttatttatctagaatgagaggtactgctatgaaaaaatattttattgctatcgtcatgttgatggtttttgcccttggtttttatgctttcttccataaaatttttagagatgacaactcaatttcaatctcgcaaaatcaaaaaacatttaagagtggtgataggaaagatgcaggagtggatactatagagtatggattgaatagcttagatgggcagtacattgataatggaagcgtccttacttcggaaaatgatgaagtaaatgtaaatgtctctataaatcataatttgaatgagcaaagagaatacggtttaataatacttgaagattttaaacagatgccttttagtcttgagaatcagaaaaaactgtcaacatattttttcacaatgaatccaaattcatctaaagatattcttgtgaaagttcctgttaaggaacacacgaaagaactcacatttttattgataaaaaagcctagctataaattaaaagaaatggatattaacagagcgtccatactagaagaagttttaagcatgcgttatccagtgaaacctaatatggtggatagtttaaaagaagtaaaacctaatactgtgataaaagatggactaaatgaacaaatgtttattacagatgataaaaataagttgcaatctgtagtggttgcgaaagagggagagaaattattattctctactggtaacaactcaaataagtcaataagatacgcagttattgctcttaaagattggaagcagactaagattattgatgataaagaagtggtatatacaactgttcaaaaagcatcacgtaacctttttgattttacattacctcatgtaaataaagatagtaattttcaattattagcttttccttacccttaccaagtaagcgaagataattatgaaagtcaacaaacgtttggatcacttagaaccgtgatagaacctaataagagtaagaaatagggaggaagaaaaatggaatttggtataattttagtgatcattatagcagtcattatttttttagcaatggcgcagactgtgcgagatagggggaaaggaaagaaatagttttgttacctaacaaatggctcactcagaaatgagtgggttttcttttatttctttttctattttacataatcgtttttcatcccctccttatgtatcaagatcttgatgatatgcctataatcaataagttctacattaagaggtagaatcttgttcgttttatactttgttagtaccactgcatataggtggaatgccgtgaagtaattagaaaattattttcttgaaataaacattcatatttacctacattgtagaaaaatctcctatttgtcgtcatcttgtgtaaatagtaaaactaatgatttttatgaagtactctagtatttacttaacataaaatattttatcagtacaaaaaaagcattaaagtttaagatcatctcattgtatatacttaaagagttatatttgtatcccttttctttctccatctaacaatttcgctttaaaatacttaatatggacattcacatgatatatggaggtataactatgaagaaaactattttattagttcttgtaatgggcttagctttaacctcagcctgctcaaataaaaaaagcaataaagaaaaatatgatgaagcaattaaccaagtaattatttgggagaataagaatttacaagcaaatggaacttataggagcaatgatattttagaaagaaaagatacagggattatggtatataaaaaagggaaattcattgaactactttataaaactccttctaacaaggaaatagaatctttatatgaaagaagtaaagatggaatttataaaaaatattcaaatatgaacttgaaaaccatagataaagatttaaaagaaagtagttacacagaaaatataggaaataaatgattaaaaaagttgaataactcccttattttctatgtatatgatatacaaaggtaattaacataatcactctttcaagaaccattactactgactaagtaacaatatgaattaatattcgcatctagttaacatagttcatgttatgtaaaatgttttatgagctaaatcaaatctaatgtatatataatagaaaaataatccattagactaaggaaagtctttgtttattaacaccttggatattctatgcgcaataaaaaataccttgagaactatagttcccaaggtattttttactttatttatgaatccaaacagctccagctgaattgtcttttgcttcgccaataacgtcaactttaaggccagtttgaggaagaagacgtccggcatcttttattctttcatcaaggtaagacttacggtcgttaaagtttgttattccgttcgatccttttgataggatagaaccccatgatttatgcgtatatgaccaagctggtgacttatcaaaagaaaaggctgcatctgcaatttgatatctagttgaatttgctgtagtactaatcccatttacattaaagtacagaactttatgagcatgggaatcaacaacacctaagaatccttcacctggatgagaacctacccagttatcaagatagctttcatcagcataccacatgaccatacctgtattgtatttggctcctcttgcatactgaagggactgatcgcttccagcatagtttctccattcaaggtaataatagttgtctttgtaactgatcccatttgtcttttcaaaaccatctagtgtcaccttaggtgcactttcagcatcatcagtaaagacagtctttccatctgctattaagctagcattatctaatgcaaaacctgccattgcaagtcccccatcagtaacgtactcgaattgcagcttaattttttttcctttaaatttagataaatcgtaacttttatcttcccattttccattagatgtttcagctgaattatcagcgttgtttgctttgtctccaattgtatctaaaagaacttttgatccatctggcaaaatagcattaacgtataagtagtcgtattctgcctctacctcataattagccttatacttaaaagtagccgttttagctttagtaaggtctagttgaggtgtcgtcatagtcgtatgaagatcatctccacgttgactaaagtaatagttgctaccgaatgcaggtttaatgccttgaactgtctttttaggtaaattaattttcacaatgcctggatttttagatttagtaacactttgatcaataacactaactgatcctgatttattaatatcttttatatccatttccttaatatttgcccagtttcctcccattgtcttttggaagaactctttgttttgcggtgaaaagcttgttggtgcagtatctgcaattttacctgcccagcttccatcactcataatagaccatacacctaccggttctccttgtcctgaatattgagtatcatactcatctggaagacctaaatcatggccaaattcatgagcaaaaaccccaacagcgccatcttcaggctctatggtgtaatcataagctgaaatattggtgccaggtactttataaggttgtcccaaagttgaacgatgtgaccaaatagcatcgtctccgagtttacctccacctgcttcttgacctgttccagcatggataaccattagatgatctactatgccatcaggctcatttcgatttccatctccatctatatcatattggtcaaatttatcgtaatcagaaagctttatgccacttttagcagcagctgctaaagattctttcacaaggtcacgaggtccttttggtccaaggttatcgttacctcccttagggttatcagctccatattcctttgctttccccgaaactgttaaccagttagaaaccgttccatcaatcgtgtaactgcctccagattgctcctcatagtactgtttaaatgttttaattttgctgccatcaaataacttaaagtccttgtctccaaacataagtttttgatagtgttgctgactaaaatctttagaatacatatatcccggttcttgaataacgttgttatgcttaaaatcagcatattctacaagtaatacaagaaccttatcttccctaactttcccagtataccttgcttgttttgcgggttttacgcttacaccatctcccttaccttctgatttaaggcttgagaattccttacgttgaactttctctttttgctccgtttgaaactttttagcttttaaatccatttcactattcttgtagccttttaggctttctttatgtgtatcttttttgtttatgtaggtatttaatgctttctttgcctcttgtggagtagctttttgagagatcactccttgatcctttaaagctttagttaatcgttcctcaggtacagtatgcatgtcaattggtgaacttggaagcccttctacctgtgaggtttttgctgatactacatgaccttttccaaataaaggcgttactcccccgatagtaacagttgttgccaataaagaagttcc

SEQ ID NO: 134 - DNA, 5109 bp, Priestia aryabhattai
  source 1..5109: mol_type = genomic DNA
cataaagatatgttatgatttaggggcactatataactaaataaagaatataagtaacttaccatttcatcaatatctatatatttttcaacatgtttagtcctctaatcctcatctattagaggtcttttacttttttggataaaaggaggaaaatcattgccatatatacaacaagaaaaactacatgctattagagaagcaattttacaacgaaaagaagagttagctgagaataaaagagtagatcttgcaaattctcataatacctatacagagttgactacttttcgctttgaccttcttaccacgtatgccgaatctcttttgatggaaaaagaggcagcaaatgaagtcatggaacaatggggaaacaatatggctaatttattagtggatcacggacttcctttaaacctagccttagaggaaattagtcattatcgagatgttattggagaaataataaaagaagaagcaaagaataatgatttttcccttgattctttttaccaaatcatttctcactttaatagcattgtagataatgccattcaattcgtaagtaagtcgtatgtaaaagattacactgaaaaaataaattatgctcaatatgccattgatgaattatctgttcccgttgttcgtatgacagaagaaatagggatccttcctttagtaggtgatttagataccaaacgagcacaatatttgatggaaagtgccttagagaaaggaagtcaatataaattaaaatggcttattattgatttatcagcagttcctattattgatacgatggtagcagatcaactgtttaaagtaatagctgggctacagttattaggaattgaagtcgtcatcagtgggatacgtccggaaatcgctcaaaccatggtaagcttaggaataaaggttgaggaagttagaagtttttctagcttacatcaagctgttcagtatacgaattcatttacagaatctttaatttgaatgtttctatatatcctgagcaaactactcaagatgccgcaaggcattcttcctttgataagatatgtgtaacagaaaaaacctacctcttttgactgggaagagataggtttttctgtttttaagctgtatattttatacatttatagttaccgcaatgtgatttatcagaagcaacttttaaaataaaagagcaggcttaagcctgcttttttatttcacctttactctttaaaacatcttttataaacagctgatataagtaattgataatggatatagcaattgataaagcaaacaactgaaaacgagtcatgtttaccattttataaacctttaatttttctgcaagtgtagttaaaggatacgcgaacatataatcaaataagccataacaaaataaccctagagttattttagtaaggagtactcagatagaacacactttatgttctctttcaaaaaactatttccaattaagtaaattcctgaaatatttgcacctagagaaaaattctctatttctcctatatttggttaagctctagatattcttttaaagtttgctgtaaagtcccttttgcttctgctgtatcctcaaaggagattcctgagtgaatcattgtgcgcactaagtcagcacgtaaacctgtaagaataactttacttcccatcattgaaatgccagttaatattttttgaaaatgatcaataacatgcatctccatgttagcaattccggacaaatctataattaatgtttgaatctttaaatccgaaatggctatcaaaaccttttcctcaattgtttgaatacgattgagttcaatcattccaatcaacggtaatacagctacagactgactaaggggtataacgggcaccgatagatgttcaactaagtccctttgggaggcaattaattcgtctttatacttggaataactaatgagaaaagtgttaagaaactggtcaatcctatcattaatccgtttctctaaggcataaaattcttcacgaccattaaaatgattatttattcgatcatattgatagagaaaatgccataacgttcgcctaatggcttgtacccattctagtttgaaagcaagagttaaggcatgctctgcccaagctatcccttcttgttgagcgaaagcaacgagttgttcttctttttgttctacgacatatagagataatttttgagcattttttaaaagatcaatatttccggtttctaaaatgtcattaatcttagtggccacattaactgcctctgataagagtttatcctggaaaatttgtttgttatctttaataaaatcggtcatgttctctctcttattgtaattaatatccattttaacacaccccttattcgattttagttatctttaattaaccaatatctttaatgaattattatctattttcgttttcatttttgtatataaagaaagttcctccttcctggtactatccacaatagacatgttgttagataaaaaacaacaaagcttttataatgaatctttaaacctacatatacctataatcatgcacatctttttgcatgattataggttaattaagattattttcactagccgataaccatttagatagcccgtaaaagatagtccgagcatattttaactcgtcaacttcttcttaagaggtagagatataactttctaaagaatcaaggtaagaaatagagtcaggagtaagtgctttatagaatataagggtgaccacttcatctagctgtactactcatttgcaaatatttcttgtcctctcttgccactattctttcttcagtaagcttattttctattttacttcaaaaaacatatatttcatatacatcttaaaggaatgaatttctgcctcaatgttataaaatcgaaaattacataaaccatgttacagtaataaagattttatacattttttcaattgtaaatacattattgcatagaggataattatcttataaggtgtttctcactccacacattaggcccttgaaacaacgaatcctgttgtatgtcgtgtattggctgattctgttacaatttgcatcgagatagcgtatgaaatttccctctatcaaaacaaacatcattattaccaagtgccacagcttgctcaacaagacatgaaacaaatgatcaatgcatttgcacctgctcaaggtcaaccgcagatgccaaataacaataccactcattaatataaaagaagtggctaaagcgtagtgtatttgctattcgtaaattatctatatgaatgaattgcaatggctttaacaaattacttaagaaactgtaaaacctctatcctttaatgcaatatatgcaataaaacaaagttcctgattggctccaggagtttttctgtttttaattgtatacttcatacatatcgaatctatataacgttgtttatcaaaaattaagtgtcagtatatgtcgaatgggtaatataaaagaaataacatcaggaggggaggacatgctggataactatgaacgatctctattctatagggagatgaaaggtttaattgcagattacaacaggtgtaaagatttagctattaaaaatgaattatatcatcagatagtacttctcaaaaaagcacttaaatataaacgaaataagatcttgagataaaataggctatgtatttattgaggaaaacgatttatctctcaaattaaattgtttttctctttttttatgtaaatagacttttaatctttaacacgaaataaaatggaataaaaagctacacttaaggtgcctagccgaggtggtaattaacttgtttttagtttatataaaagatattgggcaattgatcacacgattgttagcattagaagaaacattgtaatgtagtcacttatttaacctcgttactacgtggtgaaattttattaagagtttctcctgaccgaggggcagacccttacataagaaaaggcagatgtagtttctttccttagagctgtaaagccaactaaatcttttaataaagaaatgatctttgatgtaaatattgtgaatgttaattattcacagaattaatcggtgaatcgctggtttaattatagggaatgatgttccctttttagtttgttataataaaagtacatataatacggggggcaaaggatttaaacatgatacttattaaaaacactgaagaagtaataagagaagcaaagtatcaacttcacctgactatggatgactatcaaaccaaaattatctctatttttgataaacaacgtattcttgtgaatcaacgaattagattgatgattctcctgtcggatataaaagagcaggctgtattaattggaaaacactctgcagccaaagggagattagaatatgaaggacaggatcaactaattacagaagttatagatgaagttccttttcaatacagtaaagagacagtaactgatttggaaaataacatacaaattagtaaaggcgaaattgaagagctagcaaaagagtgcggattagatacggaagaaaccattaacctcaaagctcttttacttaatttaaaagtatcaagttacataaatgggcattatgaaatgtatgtaaaagataacactttatcttgcaaaagaacctagaatgttaagataaaaacagtaaaactttatatataagtaaaactaatcaagatgtgttgagacattagtactcaaacataaggtatctgcgtaacagaaaaattactatacgaaagcagtatttgtctatatttaagctttatacttcataaatttttagttaccataatggattttctaggaaaaaatatattttatgtttcatttttagtcataagggtaaagtattaagctggattgaattttaaagaaacattcttttcttagtttgtttcttttttttttgataattatagtacgagtaatagatagtaaattaagaaactactcaagacgttctgcaatgtcagctagctattgattgccattcatgaaaaagaaaaaactaccttactctcatgaggtagttttttctttttttacactttatatggtacacagatcc

SEQ ID NO: 135 - DNA, 4954 bp, Priestia aryabhattai
  source 1..4954: mol_type = genomic DNA
aaaggcatttctcgtgtagaagttaataatgcaattgatggatggctgaatgatgatattactgaggtagaaaatgaacaatggaaacggtgttttgaagagatccctgctaggctaagtatgggtgaaaaacaagaatggctaaaaagattaaaagacgtttcttatgcatccgatgcttttttaccgttccgtgataatatagatcgtgcggcccagagtggagttaaatatgtggttcaaacaggaaattctttacgagatgaacaagttacacaggcagcaaatgaatatggaatgatcatggcgcattcaggcatacgtgtattccatcattgaggtatgaattaaatataattagtccaaaagagccaagaccttataagggaactggctcttttatgaccttttcaataatttgtgtgtcgttaactaactctgtatatcgtatatagttaaaacaaaagtattaagcctttacttcttcggctaaattttggattaattctcttgtggttaaaactgtagcaaactcattgtctaaagtagctagtgagacattatgtatttgttcagctgaataatacgtattgtctgccccttttattgcaaatgcagctgttgcatctgatactaagtacgtttcaaatccgaaattaccactcattcgagtagtagttgaaacacagtgtggagttgttaaccctactattacaaccttttctatttggttttcttttaaatgtttttcgagtccagttcctataaatgcactatttactttctttttaaagattggttcattttcagctgggactgcaacatctttaaaatctgaacttggtttactaggatgaaaaatcgaatggtcgttatcagataagtgctgaatatgtataattgggtatttcttttctctccatgtctttaaaaggacttgaatattgtcctcagcattgaggttatttcttatcccccacttttcatcttcaaaagccctttgaacatcgataataattaaagccgtattgctgaaatcttttatcatatgtaattctcctccactcttttctacatattttaacatttatgttagattggtgaattaaaaataagaattttatttaagtatataaacttcctagaagcagtattatattggctagtggtgcatattatatacacttcgaagaaggatagatttcgtaagttcgagctatataatataagattttaatttgatataatattattttgaattttttaccacaaaaatcaatagggggatacaatgaaatgagtaaaaaaacagctttgttgcttatcgatgttcaaaacatcatgttttcttataaaggtggatctttatggaatgaacagcaagtacttaaaaatattacttcactaagggagaaagcgcaccaatctaatgtaccaattatctatatacagcatacagaccccagttccgatagtatgcttagtgaaggaaaagtcacatgggaaatccatcaggatgttcgccccctaccaatagacacagttattcaaaaatcctcttgggacgcattttatcaaacaactttacatgaaaaacttcaagaacttaaaatcggaaaattagtcattgcaggtatgcaaaccgaattttgtttggatactacttgtagaagagcatatagcttaggttataaagagaatatcttagtaagagatgcccatagcacatttgatacagctgtgctttcagcttctaaaatagtagaacatcataataatatgctaggtggcagatttgttacactaaaacaagtaaacgaaattatattttaagctaataaataacttaccacatgaaaaaaaacagcctttaaaggctgtttttttctataatagtgattatgttaaccttgagcttttgtaatatacgtttttactgaaggtggttggtatgtattaaattgatcaagtaacccctgtggctctgtatctacaagagccatcgaacgatacttttcctgtaaaaactgttcttctgtcatatgattaaataatgatacaagtggtgtgtaatagttattaatgtttaaaagtccgcatggcttctgatgtaagcctaactgagcccatgtgaaaatttcaaagaattcctctaatgtacctgggccacctggtaatgcaataaatccatccactaattctgccatcttggcttttctttcatgcatagactcgacaacaataagttctgataagtttttatgagaaatttctctttcttcgaggaagctcggcataaccccaattacatgcccaccttcttctaaaacggcatcggcaacggcacccattacaccgacacttgcgcctccgtatacaagcgtaatattacgcttagcaagctcttttcctagagtttttgctccttcaatataaagatcagatgccccgttacttgagccacaaaatacagctagtcttttcaaaagtatcccctcctaagtaaatcaccgttaatgattatacataataatggatcatttgttaaacttaggttggtatttaaaaatggaaggtggaaccaatcaatggatttaacagaatttcaacgatgggtgaaggactactataagatgagaggttggtcggacctagatatttttgttcgaattggctttctggctgaagaaacaggtgaagtagcacgagctattagagctttagaaattgggagagatagaccagatgaagtagctggtactttagaagaaaacaagagagaattgacggaggagctaggagatgtgttaggcaacttaattgtgattgccaataagtatgatattcctctagaagagatctttcaatctcataaggataaacttgcagagcgttactctagttaaggggtaggaactacatactaataagcgatatgatatattaggcaaaatacatattaacaatggagagacagcatattcagtctctcttttggtatttaattcctataacgtgttttatgttaactacaaaaatgtataagatataaaatctaaaaaacagaaaaaccaacctgtgagctctaaaggttggtttttctgttactgtaatagacattgtggtgaaaaaagccatctattagttaatagatggcttctttaatcagttaacctaaaacatagaataagcatagtaacaaaatatcaataggtaaactaatactcagaaaaagaagcatatattttttaggttcagggcctctttttttgatagtaaagaattctactcctaaattattaatcgtaatgagtaaagaaaacatcacataaagtaaaacattttccttaaacgtatgtgtgaaaagtggagagaatagaatcaaaaaagtaaacatctgaaaagatcctcttgcaaatagatctattttaccgcctaaaaactctttaaaagtgttatcaggattcatgtaatcaccaccttattatgataaacagccagcagcagcactagcacctaaccatacagcaccaactcctgttccaataacccaacctgctggtccacttactccagcaacagtcattagcccactgaaagcagcagtatgagcaaaaccggcaattgaagctgctccacaaccactaattctttgaatagaaactgtatttgaagatgatttactctcacctaattctttaaagatttgttcttgtaactctttaccctctggactatctataatctcattaaattgttcaactgtagctgttaactgattatatgccgtagaatcaaggtcagcctttaccttgtccttatcctcaatgactacttgattttcatcttcatcgaaatttacatactttaaaatgttattgagctgttcaactgaactttctaattgattgtaaactgtagaatcattaagatcatcttttaattcatcttcattaacaatcgtaatttgattatcgtccttattaaattctaaatgctctaatacgatattaagttcttcttgctctgctttagaaagttccgtattttctgctgcatttgcatttaaatgtgttccaaaagcagtagatgtaagtaatataccagcagttaaagtcgtaaatacggaaagtctaatttttttcataaatcgcatctctataaaatcccccaacccctaaaatatactttatatgtattatcctaccagatattaaaaagggtgagttgcattcctgttaatttgaaaataaattactagaaatgttcaaaaataaggaattttattgtaattcttaagacttaaagaaattcatctatagagtctaaaatcaccgaattttaacatataaagagtatctcctaggagcaataacaactttaagttgtttctaattgccttaaggctatttttcgtttaactatttaacagctaaaatctagtccttggtttttcgatttatttatatttgtgcttctcattcttctcaattgatgtctttgttgtgcttgctcttgactacaagtagcttggtgaatagcattaaaaaggttatttagagcgtttatgttgctctcatatgtttttatttctttttctaaccatgggataaccgttttctccattgtgttcatacggctttgttgttgttataaaccttgttgtcctttatagcccagttcttttagattttcacgtccatatttagcttcactttgcaattcttcataatctttgcgagcctttttcaagacaagtcgtttgcttttttctcctgagtttctgtcttcttcctggattagacaattaactacataatatttaacttcctagaagagactttatgtaaacaaaatttgtatgaatatttattttgatatgaaccaggtacagtacgttacttatcatttccttattttttgtttaacattggatgaatagggtaaattttct

SEQ ID NO: 136 - DNA, 4909 bp, Priestia aryabhattai
  source 1..4909: mol_type = genomic DNA
taaggcatgattttatgtcattgtttaaatttttaaaaaattattgacaataaaaaaactaggggataaactaaatattaaggaaagagctttccttaactgttagcttacagagcataaaagggttagttgaacccaaaatatgaaagcgctacaaaaaagaaataacaagaatatggtaactttatttaatcttaagggggaagaaaaatgaaagaagttagaattggtctggttggtgcaggacgcatgggaagttttcatggaagaacagtggctcgtaaaatctatggggcaaagcttaacgcgattgctgatccagtttcaggagctgctgaaagacttgcgaaagaactcggagtgtcaaaggcatatacagatccaaaggaaatgttccaagatccacatattgacgcagtagttattgcagctcctgcccgttcacatgcagatcttgttgttgctgctgctcatgcggggaaagcagtgttctgtgaaaagccaatggctattaccctagaagaagcagataaagccatattggcagctcagaacgcaaacgttcccttacaagttggatttaaccgtcgttttgcttcagattttagagctgctcataacgatattgcggaaggtagaatcggaactccacagttattgagatctttgacgcgtgatcctggattaggggatccaaccccaattccagaatggactatttttttagaaacgctaatccatgattttgatacattactctatttaaatccaggtgcagaaccagttgaagtttacgcagtagctgatgcacttgtacgtccagattttaaagataaaggtctccttgacactgcggttgttaacatccgttttgataacggagcaattgcgacagctgaagcaaatttccaagcagtttatggatatgatgttcgcggtgaagtatttggttcagctggaatggtgacagctgggggtgttcaacaaacaaatatgattcgctacacggcagaaggaataagtagggatacatatcgaagagacactgaattattacatgatgcttacatcgcagaacttacttcttttgtagaatgtgtgcgtaatcagagtactccatatgtaacaggtaacgatgctcgcagagctctgtcaattgcacttgcttgtattgaatctgttaagacaaatgcacccgtgaaaattaaggaaagtgtacagttgatttaattaaactatctcaattacaaaattattattttatctaacctaaaaagaaagcggtatcattagggattaattcttctttttaggcttagattcctgaaatgcagcacttctaaaacaaattaaatgtgtaaaaggagaatggaaatgaaattttcaatttgcagttggacttttggagatatacctttagagaagacaatggaatttgttgcaaaaaccgggtatgatgcaatagaaattagagctgcagtaaatgactataactggcgcgatgttaaacaattagcggaaaatttagatctagaaataagcggcttgacaggcgatactggttggccaaacgaagaacaagatttagctaatcgaagcgaagataatcgaaaaaaagcagtcgcatactttgaaaggcaaattgaagctgttaaagaggtaggggcagaatatttagttgtttgtccttcagcggttggaaaaacagctccaatgggtgacgggggagaggactggaaatgggcgattgactctgtacagaggctaacgaaaaaagcagaggaattaaatattactcttgtaatagaacctttgaacagatatgagagttgcattgttaacacaggagctgatgctacaaagtttgttaaagaagttaatcatcctaaagtgaaaatgttgctagattcctatcatatgaatattgaagagcgtgatcttgaatttcccttttttgatgcacaggacaacctgcatattcttcatgtagctgatagtaatcgaagaggtatggggcgtggacatatcgactttaaaccatttatctctggaatacagaagataaacttcgatggatatgttgtagtagaagcaacagcccctgggccaaacccttttcaagcgaataagggagaaaatatgaatatgatttatacgtttgcggaagaaagtttatcgtttttacaaaataactttaagcctgtgaaacaactctaaatagtatttctttgctaaaaaagattcaactaaaggggcggatgggtggaccatgaataaacaaaaagtgtataggtgggtaatttattgttttggtgctttaggtgggcttttatttggttatgatacaggggttatttcaggagctcttctgtttataaaaaaagacatggggctaacaccttttcttgaagggttagttgtaagtggagttttaattggtgcccttatcggcgcagcatttagtgggcctgtagccgataaatatggaagaaagaaaaccattattatgttaggtgcactatttacaattggcgcaattggcacagctatttcttctaatgtacatactttaattgcgtttcgtattgaactgggcatagcagttggaggagcttcaggtattgtccctctctatttagctgaaatggctccagcaaatattcgtggtaaggtctcttcattaaacacgattatgaatgctcttggtatttttatggcctatcttgtaaattacatgtttgcagcttcggaaaattggcattggatgctcggattagctgtgattccttctgttttactaatgttagggatgttctttatgcctgaaagtccaaggtggctttggcagaatgtaagtgaaaatgaagcacgcagagtattatctctgacaaggtattcacatcaagtagaagaagaaataagaagtataatgcagataaagactgaaaaaaaggtcaatttaaaactactttttgcacctggcttacgttctattttatttattggaatcggtattgctgtatttcaacagatcattggaaccaatacaattatttactatacaccaacgattctaagtacagctggatttggttccacagcagcgattgctggaacaataggtattggagtttttaacattttgtttacgattcttggaatgctccttattgataaaattggccgcaagaagctattgttaattggaaacatcggtatgacaattgcgcttggtacactgggagttggtatgacatgggttgaagtgccggtgtggctattactaacctgcctttctttgtttattgttgcgtattcagcaagttggggtatggtcgtatgggtcattcttggtgaaatcttccctatgaatgtgcgtggtgtagcaatgggggtagcaagtacagctttatggctttcaaacatcgtcatctcgatgtcattcccagtccttgtagaggctgttggggtaggagtcctattcttaacatatgcagttattggcgtcttcgctttcctttttgtcatgaaatatgttcccgagacaaaaggtcgaacgctagaagaaattgaattagagatagcatttaaaaataaacaagctgttagctaatacaggttgattacctaccagaaatagattcaaaaattaataagagaatttaaattctgagtaaaaataagtcacgcttttttataagatgtgacttatttttgtatttatataatgtctcttaaaagaagtagacaaaagaagccatactgaaggcctttaacaagagttcttttgctggtgtatgaaactttttatacacccttgatttttcaacctttctgagataccaagctcaaagcccctggggaaaagtagttattttaatcactctaaattaaggataaatggcttccaggtctttaaagagaaaactttttcctatgtaaatgttatgaatttatttaagtagttccatcttctaaaagcttaacaggcagatatgtttcaagttctatattggtgaattcgccctcaatctgtttagataaaatgtcaattgctacctttgcaatagaatcaataggttgttgtatggtcgttaattcgggtaatatagcttttactgtttctgttccatcgtaaccaatcactttcaattgatcaggtatatcttttcctctttttctagattctgttataacagcagccgcaattaaatcatcacttgcaaaaataccgtctacttctggatgttcatcaaaaagcttagcgattacctcctctcggctcttttgaggagagacttcatatgtaattggtaattttccgtattccttcataacatcctcatacgcttttcttctgaagtttgctggtgtttccagatcaagtgggccattaatatgaataatattttcacactgtttatttattaacaattctgtagcttttttccctccatcataattatcagatcctacaacaggaatcttttcagacaaataatgatcaattgctacgataggtaaattttgtttatgataatccagaactcctcggttgtatgttaccacaatgaccccatctacctgatttcgtataagcatttctaagtatttttcctctttatccatacggtttaaactgttacaaagcaacaatttatagcctagtgaagtacaaatactttcaatataaaaggctagctcaccgaaaaacgggttacttgaattgggtataattaaccctattaaatttgtttttttatgaaataaggaacgtgctaaatcgtttggaaaataattaatttcctccatcgctttataaactttattctttgttttttcacttatgtaacctcgattatttaaaacacgtgaaactgttgttgatgaaactcctgcaacctttgct

SEQ ID NO: 137 - DNA, 4703 bp, Priestia aryabhattai
  source 1..4703: mol_type = genomic DNA
taacttctagtaataagactttaaacttcctttaggaatggactacttattaaggtatatctagaagtaagccctttataagagatttctgtgaaattatttccttttttcaataaaagtgtgtgatgtttatcatctttttctgttaaagtgtaccctttctctttcatcatttcgatgtacgtatctaaatgtcctttaggtactacatacataatgttattatcaacatctgttgtttcagctatatctttatttttaaattctaattggtacatcgctttagcatttgctataggtctggtgtcaccaaagatatgctcccagttaataaagataacggagagtactataatggttgatataaggatagctaaaaataaaaccaaaaccttttttattttatccattattctttcctttcagagacgcttgtttatgcatttttccttcttaccaagacctctcttaacgtttttgttttcaaactcattcctatatatacaattccccccacaaagacacagaatagagatgtagtaatagctaaatgatacatactaagtttcgctgctaaataattcgttacaagatagtttgctattaatacgactattgacatcatgattaccaatgagacaggcaaagaaagtgcccgtactaaagggaatagcttgtaattaattgctttttttatgaggtagaaattataaaataccgaaaccgtgtatcctccgtatgtagaaagaacgggaccaacttctttaaatttagtaagcaaaataaggtttaaaataagtttaataacaattcctaaaaacatacctataatcactttcttctgttggttaataccttgaagaatagaagcagttactgtaaacaaagcaaataagatagccattggagcgtaccattgaaggataacgccacctaaaactggactattattcataccaaagatcatgatataaattggctttcctagtaaacatagaccaatggctgcaggtaacgtaaagaacattaaaatttgaaatgttttattcatcttttctttaacttcttttaaattgccttttacgtaagaagaagtaatgcctggaagcaaagacattccaaatgcagtggctagagatacaggaaccataactaatatctgagcaagaccaattactgaattaatactctcagcttgatcttgtttgtaccctatagactggaataatacgttaatcgtaaatgtatcaatgttttgataaatgggtattgccaatccaacaagaacaaaggggatagcatagctaattaactctttaaacattggtaaaggcttgattctttgattaaagtcactttctatcaattgctttttaattaagctgcggcgtttacgataaatgattgttagaaaacccagaccagctatggcacccacaaatgctccaaacgtgccaatgcctacagcttcagttacactatgaccaaatttaataacaatataagcacccaggacaataaagattactcttaccacctgttctaaaatcgtacttagagcagacggtcccatagattgatttccttgaaagtaccctcgtaagagactcattggtgggacaattaagagggcaaaacttactagcctgattacgtatataacgtcttctagtttatttcctgttgaatcatgtttacttatgaccatttctgccaaaaagggtgcaagtgaatatagaataatgctggataacatccctgtaaaaatcatgagataaagtccaaactttaataagtcttgtcctgcacgataatttcctattccattgtactttgaaacaaatttggaaacagcaagtgggagacccatagtagaaatgctcaacattaatgtgtaggggccataggcatacttatataatgcatagcccgagttacctactaatgctgtaaagggaataatgtagataaaacctaatatcttagaaatgagagtggaagcagttaaaaagaacgtacctcgaataaatttagtatccatgtgaaaattctcctaatttatgaaataaacatatacaattattacataaattagtaaatgtttaaatttatattttagaaatatatccagtcctatttttttctgttaacatattggattttatgagtagaaaaataaataagctaagaaataaggtttctctatttcttagcttgtcaaaatgcatgtttaatttagttttttctttcctttagcataaataatgattctataagaatcaccttttattttggccttcatgtcttctgtttgaaggaattcatcaataacttcttcgagttcattggcaaactgtctattctcttcagaattgcttaatgaggtatagataagtacttgaggttcaggatgaacagaatatcccaccatcttcacatgatattcctcttttcctaataaatcttcaccaacatcattaatgatatttccccatcggccgtcttgttcacgttttttgaggtttattttatatacttttataggcgttttttcttctttatttttaataagaacatcgttgattatttgcttgatctcttcaatatgttgttcagtatcaggtacttctagctccacttttacatcttgatcaaatcctccaatagtggcagataacacatggtaattatgtttttttaactcattatctatttcttcttcgatcttgtcgtatttttcttgacgagggtcaggtttatactcgtattgagaaggatcatatcttgtgatttttactttataggtatcgaaatgacgtgcctctaacatatcttttgcaattttgttgatatcaccttttacactcttaaagtattttgctgaacctgttacagatatctcaatctgtttttttcctccataataagtttggcctaaagaatcaattttatatccttttttctcaagctcttgatacaatacatctgacacaggttcttgcttaaacaactgtcctaagtaagggatcttagcagctacttgggccattgctggagaaacaaatgctgaactaatgaatgcaccacttaaaataacaagcgcaataccacagtagataacatttcttagaaggcgattttgtttcataggtaatatatcgtttccagactttactgattctgattgctctaattggtcaatggcttctaggagtcgctgcttctgtttttgttttcggtttgatttccagaccaactcaccattcaatttttctagtgaactatcatccataaaagaattaaattgtttcttcatatatatacccgtcctttactaactgctttctcaaagcaggaattgccctgaactgtgtagactttactttgctttcagaccaccctaaaatggtagccgtatccttaacagaaaaaccttgaacttttcgcagtaaaataacctttctgtgtccgtctttcagcttttctaacgcttgatacagctctagagaagtttctttaagctcaatcatctcttgaggtaaacgattagggtctgtttttgacagaataaaatctttcaaaagacttaaaggtttctgttttctaaaataatcaatggtgacattatgcgcaatgcggaacaaccacgtcttttcactagagttttgctgaaaagaatcataagaaaggtaagctttcacgaatgtttcatgcgtcaaatcttcagcttgctgataatctttcaccagcattaaaataaattttaatatggcgtcgctatggtcgtcataccaacgctcgatttcttctttttttgtcttttccaatatcctaaccatccttttaaccaatattcgttacttagacgagggtttttcaaaaaaagttgtgttttttatacaaaaaataaaaaaactctcttatttgagagtttttaataaagatcttcatattttttcttatctgtttcgtaaaataaaaatagaggaacattttttaaaaccttcacttatgcaataggatattgcaaaattgctccgtaaaggctgcatcgatagtgcaagctctagaaaaacacacgatgttcattctaataaatatcatgttcttcaaacctgaacatatatgttcacttttagttaacacaaaaccttttatatatcttgggttttcattttgtttaattcattttgttgcttctttttaaacgattcccttcctttttcccattctaaaaggaacatggctaaacctaataacattaataaaataacttttattggatggttaacttggtgagttgtaaatatccacccacagtatgctagataagctcctgggataatagctccccaatatacactagctctgctagataaaaagtattgaaaagcaaatataagtgcaaaaattaaaaaatgaggcattactgtatctccttttcttctttatatttttcaatgattaacttggcatcttctaaactaattctttcttcaatagcaagcttcttaacaaagttaattagttcttctttgtcatgttcctcatttatttcaatcttttgtattaagcgatctaaacgtatacgaacagttggataggatacttcgtagtcttttgcaagctgttttaaagaacctgaatttaatacaaactttcttataaactctaaatcatcactttctaacgacagtatccat

SEQ ID NO: 138 - DNA, 4647 bp, Priestia aryabhattai
  source 1..4647: mol_type = genomic DNA
tgatgttttaatatatcctgtttatttagaaatgtgttctaaataaacaataactaattatctacgtaggaggagacgattatgccacataaaattaccttaacgggatcagctacaggacccttacgagaatatgatcgctatgttgcctttgatatgcgcgaaaaaggatcaccatctgcgcctaagggcttgaagaagagtacctttatttcgtataccgtatttgttgccaagaaagcctttaataaaacagggcttacgaaaaaaagcatcatgcatgaaaagattttaattcaaggggaaccaacgttagatattccgattgatgaatgtcctggagaagtaggcgtaatttgtttccagattaccgttctcccgaacaaaaacgataaagagaagaatcagccagatgcgaaaaaagaacctaaacaagaggcttctgcgccttctcaagaacaaaagaacgaggaatctactaaacagcaggaagaacaaatacctgtttctcaacctgtagcaaccgaacagaagaaagaagcagaaacggtacagcaagaagcgaaagaagcacctgtacaagagaaaaaggctgagtcaaaaccaaaaaacctaccgaatcagccaaaagggacacaggacctggtgagctttgatgatattatcgtacctgaagccttcttaaacacacgtccgaaccctgagaaaacacaaaaggtcattgattttgtgaagcgtacaggtcgcttagatgaaccattaacgattgaaaaagactcaaaagtcttaaaggatggctatcggcgttatattgtggcgaaaaccgtgaaaatggacaaagttccagtcgtctatgaatatcaaaagtagatagctatttccatgttcaatttcttcacccttattaagccattcaaaaaatacatcatagttgcgcagcttgggaatcaagtttattaatcgcaatcaataagaggcgcccaattgaacggtttttgggtagcagtaaagattttagtaacacccttatgcgaatatggtataagttgctgcgaagcatctctggaggagcagggatgtaattttcatagtgggaatatgcttatatctaaagcaattactattgcacagctggtatggggaaattatttataattaaactttcattacaataaaatcaatcttattcttaattttctggcttacgaaggatcatatgaacgtgatctagttactttaaggattgctgataattttaggggatttttagaaaagttaacgtctaagaaacaataaaacgttttatattactattctatgaataataatatttgtaactaaattccttgtttgattacatttagagccaataaaatgataacttttacatattttaaaataacttctatattgatacaatgaaagagacttttcaagtcaataaccctaaggattaactatgttaatcccctgtttccaatttcggcttatttgctaaaaggctcgcattctataatgcgggccttttaatttaataaatctctaatttcatagcatacccataacaaagaccgcccattatgtattagtgtataaggcggtcttaactgtattcatgctatatgtttatgacaaaaatatcgacattattctaaattatctcatgagtttttattacaacttagactgatgtcttaataaatgatatgatagggagcttgtacaaaattcccttttcttaaaaaaatttatttttatttattagtttataaaaagggatttttgtacaagattaaattaaaagggttaaaggaggggtagttttggttgaacaatggttcggattaggaaaaaagcgtagtaagtttggaaaatggcttgatagacatggagtatcacaatctgttctcgctgacagaacaaaactaagtacctcaaccatcagccacttaagtacaaataaggatcgtgtacctaatttgaaaactgccagtaagattattaaagaattaagacgactagatcctaatattaagagtgaagatttttgggatatttaataaacacattaattctgacaggcattttgtaggattccaatttcctagattatattttaaaaatgtttattcatattcagttctaggttaattataatgcttatagaatagaggctttcccttagtttggcttcttagctagcttttacatttttcacgaatacttgctacttgtataatttagaaattatttaagtgtgtaggaatacagaagaaaaaatagctccttgctttccaggttgttactagaacgtcttccacccccctaaaaaaactccttatagagcctgatctgggctctgaacactgattacgttggattctaatccaaaaggatgattctatggagatataaaaaggatatagttcagcctctccttttcatccaatgggcttatattcgtcaatgacattctttggagtatcacgcgaacacaattgtttatagacatctaaatataaaaagaaatggaatgttttttaatcattctttttgattttgtaatctagaaaacaatagattgttagaatttttatttgtggtttttctgcccattaatttcctccgttatcatatctaatttctttttaatattatccaattgttcatcagattcaattaaacttttcaatcttaattttttctatttgtaaatattttaaatgtcgaattaattacatctatagctaaacttaaattacagagatttatatatgcaggatatttaattaggaatcatgaatatatgaacctaaaagcataatgaaagtaggtgacttttatttatgttagtaggtgaaatgcttaataaaattataaataaagaaataacaattaatgaattagctacaatatacagcgttactgatcaaacgatccaaagaaagattaaaaaattaggttatgaatgggacaggaaaaagtccaattacaaatatataggaaaatcacctcaacctttagacactgattttagtacattatttaggaaaaaacaggttagtaattataagcacagtcaggttaagaataaagacaagaagaaagtcagttacagcaagggcactagtgacatactagatgtcttattggtaagaacgaaagcgccacctaaaagagtatatcaaggcttttacttcgataaagacgtattaagcattataaatagtgttcctaaaaattataaatctgaactcgtgaatgaagcgttaagaaaagtattcaaggagaaagggttactttaatgaaaagggagcacccccatgtcaaaaaagcaaggctataggagcaggcttaagcctgcttttttatttataaaacatattttaggaacacctttagatagagtagttttttcaacttttaagatgtatgctatatacatcttaatttaccatggtcactgctctagaaacatattgtctcaggtaaaaaaattcattaatttaaaggggttagaacatggatattagtaatatagctaaatggattcctgtcccttattttcaaattgcgcaagatggtacaattctaaattcttcaaatataacccattcatattttcaacctacttctagtatatggaatattatttataaagaagaccgaaataaagcaatagtaatgctgtcacagattacaaattctcatcctgtaacccaatatctcattttacaaacaagtaacaagttatttatgaatttcaaatgtacgatccaatggcaggacaatataggtcatctcgtatgcacagaagccaaaaatatcaaagttccctctgttttatctgttcaaaaatctttagtaaatactcaaaaacgtttagaagaatcagaaaaacatttaaacaatgttattaagatactggatataagaaaacactaggtttttattttttttacatgaatttttctgttctgagcaaactattcaagaagccgtgaggcatcaatgtatgtatagcacatattgataaccagaaaaatccctgacggaaacagtgatttttcgctttttaggatgaatatgatatacatatctagtttacataaacactcttcaaggaaccaagcaaacgaaaaaacccttataaataagggttctttgaaggtttttttattggatatgcggtttcttatacatctttgatatgaccgatttttcccgttcacccgttgagaggataatgtataagaaacctaccttttatacatatgctaatccatccgaaaatagccatcatggcaagaatgtgcgattgtttacttgcggttatattttggtactttataattagcattctatataaaaagctatcttgcttactgctgaggtagctttttatatctttatcattatgtgagattaatcttagttccaccagaagaagctgatggtcttgaccttgcttcttttgtttggttcgaagaacttttgtatttctccattaattcatgaatgcatgctacttggataatgcgaatatgttcagaagacaccgcataacgaacaggcgtaatcaacataatagtagggaaaatggctggtcgctcttctggctgccactgcaacgccttccattcatct

SEQ ID NO: 139 - DNA, 4474 bp, Priestia aryabhattai
  source 1..4474: mol_type = genomic DNA
atttattgtatccccaaaataagattctagcatttaaagatatgataaatgggtttattgaaccatacgatgattttggacacggtacatttatatctggagttatagcaggaaatgccactaaagaatttagtggcatcagtccgcatgcaaaaatagttgccgtaaaggtaattgacgaaaatggagagtctaaccaaaaaataattggaaatggtatcaagtgggttataaaaaataaaaccaaatacaatattaagattatcaatatgtcctttaattttaagaataaggaatccttatataatgatgaactttctactatgattagaacagctgagaaatcaggtatcctagttgtttgttcatctggtaataaaagtatatatgatgaaaatgataatgccatgtatccttcgaatgtcccaggagtaatctctgtagggtcttcggaatatgtaagctcctcagggattctagacagaaaaaaatatagaatagcaaattattcaagaaaaagttatggattagttaatgatataaaacctacacttatagttccaggtactaacattcggtctttaaattccgatactaattataaaccaggtgataaattagtcatcggtaatacttatagaatagatacaggaacctctatatctgctgctataatctcaggagttttggccacattatcagaggctaatcctaataaagacatgttttatataaaacgtttactattttcttacacatatttagttcctgactataactttagcaatgtaaataaatatatatatattaattaaggtaaaggtgaaagaattgaaaagaataataacattattatgcgtaatccttcttgtttccggatgcagtgacaaggcaaattctatggttttaaaaaaatctgactttaacgcttcacatgaatatagtaaaaaagaagttaaaggtattatcaagttaccaaaagatattattgataaaacaaagcttaaaataagcatgagtatgttagatggcaaagcagaaaatattaaaattaaacctcaaaagggcctagaaaattatagttttactcaaaaaatcccaaaagaaggtacctggagcataaaatacgtattaacttataagaatcaaactattatcaaaaagtatgtggaaaagttcggaaataaaaatacagataagaaaaagattaaaagtatagaactaagtactaaccctgaaccagtggtctctcatagagatacaatgtttaacgtaaacctatttaacaatgacaacagaattattaaagatgctgatgttattctacaaatacaaaacgatgatgtgaatttcatattcaccaaaaaaatgaaaaatacggacggaaattaccaagcaaatgcgctacttccttcaacaggaacgtatgatattactgttcatattaattataaagacaaacatactatggaaactattcaattaccagtgagtaaatagctgatattcttttaaactaatagtcataataggaagaaagagaatggaatatcctatgtttataaaatccagtataatcctcgttctctttgaatttaactataatttagcacttgttataaactgttcaacattttagcttgctctttaaagaaaatcactcttttgagtgattttctctgttaaaggctagacttatactaaaaatgagttttataaaaccaagaatacataggtgaagaatgtatgttaaaaaagatagctttactcttatccatatctttttttgctttaggtgctcctcttaatgtatcagcccacgcagtccttttggatgcatcaccgaaagaaggaagtcaactaaagcaaatgcctgacaaggtatcattgacgtttaatgaacgactaggagaaggtgtttttaatcttcaagtacgcaatgataaaggggagcttattaccactaagaaagcaacaatgaatcgaactcacaaagcgatttctctggatgtgccaccttccacaaaaggtatttataccattagctattcagtcatttctgcggatagccatcctgtacaaggaacgtacgtcttttctataggagaaaaaatggatcaagctattacgaatgacaatagtaatcaaggagcaaacggtaaacagagttctttttataatatttctttttctttagtacagacattttattatctggctttattatggctagtcggctttgtcctatggaaatggtatgttccttatcaatcagatcaacaaaaacaaaagtataaaacgaatgtgaggtacctccaaactggatataccatttttttactgattagtataggagtccaaagcactgcgctattaaaaggttctaaccttttgcaaataaaaacatttgtcattcattctgctacttgttggtcatggatgacttgtatccttcttgcgtgtgtaggatttcttttcctactaaagaataagtggcttgattttatttgggcaggtttactgctagtagctactacgttaaatggccacgccgtagcgtcagacgtaccagtttatacaataattttagactttatccatttggttacagcctctttatgggcagctggtttagtgtatcttttcatgatgtggcgtaaggagagagaacaggctctagcttttcttccgattttttcgcgtatagcctttgtgagtcttatgttattaatcctttcgggtgttctttacactttaaagcttcttccagacataacggcactctttaaaaccacatggggactgttattgttagctaaaatattcatggtcatgctagtagctggtgtagggatcctcattagagaatatctccgaaagaacgattcaccaagccttggaaagtttttgatttccgatgtaagttttatgctcgtgattgtcctgattgtgggaacaattacacacttaaaccctgttccacagaatgaacccttggtatggaaagagaataagcaagacatagagtttcttgtaaaaacgtcaaccttatctcctggcacgagttctctctggttaaaagcatctttaccacgggatggatcttctattcaatcgatagacattgcactttctcctaagaataagggagagcttgcaccaattgacgtgcccttaaaagtaaataaagacagaagtcaggagaaacaacaagtacagtataaaatgtatgaaacaaacaaccttgtcattccatatgcgggaagatggcaaattgcggtacggcttgttacatcaaacctagatgaggttgtgatctataaagacatcgttgtttatgatgttaaataatgattttagaaagaaggaaaagaaatgaaaaaacaagtaacagctcttttatctacattggttctttcaacgattgcatttgcgggaactgcgagtgctcatgttgtcgtatacccccaagaagcaacacaaggatcttatgaaaaatttactgtacgtgttccaactgaaaaagatattccaaccacaaaagtgaaaatcgagattccaaaagatgtagaaatttctcgatttgagcctaaagaaggatggaaatatgaacttcaaaaagactcttcaggtttgattacaagtgtgacatggacagctactaatgcaggtttgtcacctacagagtttggagaattcaatatgcaaggaaaagtaagcgataatgccaagaaaattgtttggaaggcttatcaaacatataaagatggatcaacagtagcatgggaagggccagctgatgcagacacacctgcatctattacaacagtagtaaaaggcaacggagcagagggagattctcatgtatcagctactaacgaaaccactgctactagtgaagcaactaacaatggctcaaatactacacttactactactctttccattattgcattagtattaggcgttatttcgttagccttaagtttacgaagaaagaagtaaagctaatttaagatgatatagaataaaaagtaagctacctcaccatgaaccgccccccgattgttagacaaagaaactctaattatgggggggggcagttcatactgggtggctttttattttgttaaaaataaattttgttcaatatacttagactaaaaaggcacacctttttagacggcaaaaaagccaatgacaaagcgtctatttaatcttaaaaataaaacttttgagacgtttaaaaagtaatagacctttttatcctgcgcttgaaccatctactataattaaggatggttttcaaaatgggaattaatttcgggtatattggtgtaagtatcaatgaacaaaatttatatagacagttagaagtaataaaactttatctaacagataaaaaaatatatacaatgataaggcgattgggaaggacatggaacgcgactgctttcaaaatacgattaaagca

SEQ ID NO: 140 - DNA, 4459 bp, Priestia aryabhattai
  source 1..4459: mol_type = genomic DNA
ccatcctctcatgatccagattttgagactccatcttatcgtgattccgatcttgggacttcatcctatcgtgattcattcctagacaatttatacaaagatggtccatatggtgatataactgtagcctatcccttcaaaaacgatataaccaatggaactaaataaaaaacgtaaacgaaaaagcaattgctgaaaagagggataagttatataaaaggaccgtatccttttttatgtaattagtttagacaaaacttatgataataacaaaaaactaattttttatttatcataagttttaaaaaacatattatcattattagataaagcttttagcaacgaagcatcagcaaaagattacaataaaaaaacagaaaaaaactatctccatacgcaaagatagttttttctgtttttaggatgtatatgatatacaaaatatcttacataatcagtttaatgggaagttcgtttcccaatgaaatttatctattagtttgatttgtatttattacgattggaaggtatgatttttaacggtctcatcatgtcatggtcttcatgttctaaacgatgacagtgccatacgtagtctccagaaaatggatgaaatttcatgatgattcgtacggtttctcctggacctactagaacagtatcttttaaaccaaaatcagctgggagaggagctaccaagtttccattttgatcataacgatcaaggacacgaaaattaaccagatgtacatgaatagggtgaattccgggggttaaattcactaactcccatatttcaacagaattaagtaagggtgtttctgttgctgggtccatccactccttatcatcaaataaaagcataagacgtccaaattcgtcttgcgagtcatttaatgtcaatcgtcttatcttttccactttatttaatggaatacggtcaatatggctcaagagagatggaagtctgctctgatcaggacaagataaaaatttagttacttggaattccattatctcgccagttggattttctgattcaaaaccatcttgtaatattacatttttcccttccaaccctgaaaaatcaataacaatatcgatccgttcagctggtgaaacatccaaacttttcactttaatcggacgagaaagaaggccaccatcagtgccaattaaagcaaaagggcgcaggttacttaattggaactgatatgttcgagtattggaagcgtttaataaacggaatctatatttgcgaggctctacttttaaaaatggccagactttcccgttaaccgtaatggtatcccctaaaaatgaaggaacaattgaaggatatggtaaattaagagatggattgtctggttgtgcaggataaaagagcgaaccgtctggattaaatgttttatcttgaataattagaggtacctcgtatttacccttaggaagtgacagtgatctttcttgctcatctcgaatgaagtaaagtcctgcaagacccgcatacacattcagacgagtaaccccaagtgcatggtcatgataccagagagcagttgctctttccctattcgtataatgataaatttctttcataaagtgaggacctgtttgtcgaaatcctcttgtaaaccatgcttcgggatgaccatcactagctggttctgaggggcttccatgcaggtgtacaacagttcttacttctggattatgactagctccgtgaatggttttatcaactggtaaaaaatgtttttcaggtaagttgtttgcccatctcacatatatgggctgatttttttctacattaaaagtcggacctggtactagcccattatagccccataccttagttttaggtaaatccctatgaaacttgtgtagtgtttcaatcatgcatacatcataaaacggcctacctttatacattccctttggtctgattattgaaggaattggaaggatatcaacaaatttttttaactccaaacatttttatctccttttatctaacagaatatattaatggactatattctattaaataaatatttttttgcttgtatacttgtccatatttattagattaaaaacaattatgtatgcatatactatgcaatctcagttaccataataaaaattataagtaatcataaaacaaaacctttctttttctgtttttagatgcatattgtatataacattagtttacatatgagttttttcagtattaaaagccccttcagttcattaaagaggcttctaatgcgtaataagtagatttagaaaaaaagtaaggtgaaggttaaattaactaccaaataaattatattcattagcctactttaagtaaattgtccaggcaataaaaatgaactaaaaacagcccatgaattaattcatgggctgtttaccctcctagcaaaggatgaaaataaagatagagcaagagatctgtcacgtgtaatatatgttgctgcccattacggagtaaattgtccgtatggataaaacaaaaataatttgggaaactaccgagatggatgaatcattgttttgaggtcatctccttaaaaacagaaaaaatcccttccaaccaacggggatttttctgtttttaagctatataaatctagttaacataatgattgtgatccgagttaaaagtcattggaactaatgattcaaatgtttttttcaatatcagaacatgcccaaactcttttcatttagttgcatattttactagtacaagcactatataactttatgaaaggatgaaaattaatgccctttaactttagaaaaactttaatcgttatggaactgatattccaagatgtgttaaaaacaaactttgtaattcctttatatccaactacgtttagagaaaccattatacctgtccctacgcctttaggggttacagatttgccacctaacatttattttgatcttgataatcgatttaatgtggaacaagaacaaagaatcagagatgccattagtgaaactatgttggtatgggctactcatatgaatgaaaaatggaatggcggaacaaacactggaatttcacaaatggcagcttgtataaacatatatgcaacacagaatttacgccctgcttggtatagtgaatcacctattcaaaatggactaacagctactaatatagctatggatcagtttactcaacttatacgtgataatggatttaggcgttctccacgagcgaaaatcttcgctgctccacttaacaacaatactattgtctttgcattaactgcttttactcagaattttatacctttatcatttattgttgacccaaccttaattgatattgccactctaaatttcatcactggttctatgatgcactcttggctacattgcgcaggatttttcgaccctaatacaactagttatttcaacacggaatgctcaatgtgtgtcatgagagggtttcgacctaaaaatcctgatatgcctgataacctttattatcagtttttcaattaactaaaagtgtacgtataccttatacacttttagttaacataatgaattttattggaaagaaaacttttttaaaaagttatcctaaaggctttccatataggattcagattatattagacaagcacacaagcactttcttaattaaagaatagtatattaagagaaatgagaaaggagggattatagtggataaatgccatgaaaaaaaacatgaacacaaacacaactgtgaatctatcctccagaaagcctttgaaaaacttttaaaagaaatcttcgaagatcatcataaagatcaccataaagatcaccataaagacaaacatgattgtggatgtcatagctaagattaacgttcttataaaagaccttttagcggggacaagcaataaaggattgaattcttgtcttaaataatgacccataacccaaacgatttactcaagatgctgaaaagtatctccaatttagaaccccaaaggaaaagcgtctgttgcaacagacgctttttctcttttagactgtatacaatatataaaactagttaatataatgtgccccacttatacaaaatgtttgtcctatcttaggacaagcatacaaacattttattaatcaatgaataagatatatagaaactaataatggaggtgataaacatgtgtaaatattattgcaagtcaaaagataagaagtataaagaggacaagcataaggaatataaatgtaaaaaaaataaagaatacaagtctaaatgtaaagacaagaaacacgatggttattcttattaattaattaatttattagtgtaaggtctctatttcttataggaagtataacaggtttttaaggaaacctgttatactcatcaaaaaagcctgcctcttttgatttaaaaggggcaggcttttctttctacagtatttatctt

SEQ ID NO: 141 - DNA, 4442 bp, Priestia aryabhattai
  source 1..4442: mol_type = genomic DNA
caataaaatacagaataggattggtattcatataaaagaaatgggggaagaatttgaaggtagctagtgaagtagaagttatagaattaaaaattgaagctcttggtgaccagattgtattaaatcctacatctgaaggggtttcctgggtaaaagtaatataaggttatgccacaaacgggccattttctggaataaccctttaaaggtaaaatagtatttgaatgttaaaatcaaatgtaattgcaaaaggagattcataaatgaaagaaaaccaaatcagttttaccgcgatgatgacagcttatattcgaggtattcactcaaaatatgcaaaccacaaaattttcaatgactttttggcatatgacctaattcctgaagagcaaaaaaaattaatagaggagattatgccaaaagaggctttaatgacttctacagcctctatcacccgttctcggtacacagaagattgtttaatgaaggcgattgaaactggtgtagaacagtatgtaatcttaggtgctggcttagatacttttgcatttagatatcctgatttgttaaagagtcttaatgtatttgaactagatcatcctgcgacgcaaagttttaaacgtcaacgtgtcgataaggtgggttgggatcatccagaaaacctacattacatttctattgacttcactcgagaggatatagtaaataaactcaattcatcactaaactattctgccttatccaaaagttttttcagctggcaaggagttacaatgtacttatccaaaaaagaagtatataaaacactggctaatatacctaaagtgactccctctgggagcatgattgtatttgattacttcagcgtagatgaatttaatgaggaaactacttccactgatttgcaaaggaaagaaaaaatgatgaataagataggagagccaatgaaaacgggttttgatccaactagtatgaagcaagaaatggcagaactcggattgaatttgcttgataatttaagcccgacggatattgagaaacgatatatgacaggattaaatgtgaacttaaagtcgcataaaaacgtgtactttgcactagctgtagttgaataagctttattccgaaagggcgcgattgttgaagatcaatggagaatttgttttcgctgatagtggagatatttaaatcgttgttgacagttaatattactttcgctcatcgaattgtaattttagatggaaaacaaaagttaaacgcgacagacacacttacttataaaataaatatcaaccaatttggaatgccagaagctttaaaagactctaataatcaaattataaaattagttaaatataatcaaaaagaagaatagttatgctgtatgccttaaaaagagcttgaacgtattagttgaggctctttttgctgcgtttgtaaagaaaaaatcctattgctgctccaagtaaggctatgacaacaccaatcctaagtagaggtattataaaatccgataaatccaagtagtttgtttcctctaaatctcctacaataacctctttataagggactgtaaaaagacctaatgatatacctagaataaatccgtacaaaaagcccttttctataaacttcaacaagagtatccccacctacaatatctagttttaatattgtttttttgaatactatatacaacatgagttaacataatcacgattctaggcacctaaaaaaatattccttttgttattttaaatctcatcctttagtcgtaaaaatctattaaaaagttactcttacagttggataacaattttgtgttaataaaatacaataaaggtaacaaatataagttatttggacggatgaaataactaaaggagtgttgaaaatgtctgagaaaaaacatgattttaaacattactggaacgaaataattaaatcattaattgcaacaaaataaaaaaatgtaacttaacataatgtctctttccggtacacatcacaaaaaagagcacattttatacatatgctctaccctataaaaaatagtattaaatgtagtatttctgaatggaagttaactaaattaaaaaaagaatcctgtttttatttccattgagaaacaggaatatggaagtatattatcaaaaatgcagtacatgaaaaacaaagcaaccatgcccagattggtttaatataatgaagcaacaaacctaggaacatgaagatccaaaccaaacatgaccaaaaaaaattccaattattaaggtaggagattagatttgtaaatttgaaaacaccctcaactattatccaaaagatgctccaaattcctatataacccacttgccaaaaccatcgtaattgaaaagggtatctataatgtattttgcactaagggaattaggtaaactgtgcgattaaaagtaatagctttggttgatttgactaatatatatagttgaattagagtatggatataaaatgagtattggacagcaggtgatgagagtggaggatattttaattattgcaccgtattcggagcttgcaaaagatgcggtacagcttcgtaaaaaaacggattttaaattctcacttattttaggcgaatctgagataccctaccaacaacaaattaagccgtcaacacgtgttgtcatttcaagaggaggaactgccaaatcccttcgagaattgttagagcttcctgtcgttgatgtacctgttacaccatcggatattttacaagctattagtgctgttgctaaatgtggatataaaaaaatcgcaattattacacctactaatatcttatctcagaaaaaccatacattggaactatctgatgaactacaattgatatttgaaactgatgtggatggtcaaattggagacacagtgaaaaggttaattcaaaatgaaaaagtagaagctattatcggagatagggttgctacacaaattgctcttctacataaagttcatggacatttactcaagtccagtgaagaatccttacttatggcgttggaaacagctacgaacgttcttcgggcacagacaagagaaagagcgcagattaaagaaatgcaatctattcttaatgtaattaatgatggtgtgctcaccattgatccgaatggcatcatcaaggtaaataataattctgcaaaaagaatattcaacttttctgaagaagacattgtaggagaaagatattctgattgttttacggatccacgtctacttaaagtaattgaaggaaaaaaggaagaacgtaacttgttacatactacagccaatggaaaaaagatagtagttaatcagataccgatctatatcgactctgtcttccaaggctctgtagggatatatcaggaaattagtgaaattcagaaccttgaattaaatataagaaaaaggttaaatgatcgtggtctaattgctaaaaatacatttgatgactttgtaaccatgaatagtcaaatgaagcaagtcatctcagaagctagattatatgccaagtccgaagggactgtattaatttatggggaaacaggaacaggaaaggaattattcgcccagagcattcataatgcaagtaaaagacataaaggtccatttgtctctgtcaattgcgctgcactcaatgagaatttactggaaagcgaactttttggatatgtggagggggcgtttactggggctctcaagggaggcaagtcaggtctgtttgaattagctcatggtggatctctgtttttagatgaaattggggagatttcacctcaatttcaagcgaaattgttgcgtgttttgcaggagaaagaagtaagaagaattggcgcagatcgaattattcctatagatgttcgaattatatgtgcaaccaataaatcattatacgatttggttgaggatggagaatttcgagaagatttatattatagattaagtacgctggaattagatttaattcctctacgccatagaaaagaagatattatacccttgagtgtttcctttttgaaaacagaaatggcacgagaaaaacggaatttatcttgggaaaatgcggatgttttccttcctttgttagatcatgaatggctgggaaatgctagggaacttcaaaatgctattcatcgtttgattatttgcactcaagaggaaaaggttacgcaaaatcatgtttcacaattgatggagcatataaataaaagaaagagaataagaacgactaatacccttgaggtagaggtttccaatgatattagagaaatggaaaaggaaatttggaaaaaattattagatatatacaatggagacaaagaaagtttatgtcaaacctataacatcagtaaaactacattatggagaaagctaaattctgaaaaaaattttaaattccaaaagtgagggagcgattatacgct

SEQ ID NO: 142 - DNA, 4396 bp, Priestia aryabhattai
  source 1..4396: mol_type = genomic DNA
tttttgcttcttataagagtgattatggtaactagatttgtagattataaatatgagataatacagtagattttatagataaaggagataaatttagatgacaaaagcgataaacctttggtcattcgttttcttattgctaagtgtctgtctaactttcataacttttgctcatccatcattattaagattaaatttttatgtagcaattgttgtatttttagttggtattataggattttttggagttcataatttcaaatcagctgtgagaagtgttttaaccactatacttagtgccgtattaattgtacttactggatggattatctttgttgaaaatcttttctcataattagtataggacttagaaatataaagaatagcaaaaaagcctttattatcagtataaaggcttttttgctacctagaaaatccattatggtaattagaaattatatgatatgtaggttcggctattataaagaaaaaataaactaaagagaggaaatcattgcaacggatggtgtggagacaatgaaaataaaatacttcatatactagacacctttaattcttttctttattaaactgaccttaaaaaaggtgtaataaggtgcagaaaaacaacaaatggtataatgacatgaactatttatattataaaaggaggaattaagatgggaaaagttttattccttaattatcctggagaaggtcacgtcaatcctaccattgcattagtggaagaactactaaaaaagggtgaagaggttgtctattactgtatagaggaatatagaaataaaattgagaaaacgggagctacatttcgtccttataaaaattttacacgtaatgcagatctagtgaaaaaaatggccaaaagaatggaccctcttgaaatgctattatatatggtacgctctgcggatacagttatagaaagtgttttagaggacataggggctgaaaaatacgaatacgttatttatgataataatttcgccgcaggatggatgattgctgatatattgaatatacctaaaatatcctcttgtacaacgtttgctattgatgaagaggtcttttcaaacgttatgaaaagtcgaggagaaattgataagacatctccaacatatcaagaacttgaagagatattaaaaaaatggagacaaaaatatggtataacaatcaatgataatcataagctgatgtcttgccctggcgatattactcttgtatatacctcaagatcatatcaacctcgtgctgaaaagtttgataactcttttatttttgttggtccttctatttcaccgcgaaaagatgtagaaactctttcattaaaaaatattcctggtaataagcttatctttatttcaatgggaacgatatttaatcagcaacctgagttatatactacctgctttgaagcattccaagaaatacaggctacagttatactatcagtaggaaaacagacggacattagccaatttaaagatattccatctaatttcattatacgtaattatgtacctcagttagaaatactagaacaagcagatgtttttattactcatggtggaatgaatagtacaagtgaagggctttattttggagttcctcttgttgttatgcctgttgtgggggatcaactaatagtggctaatcggattgaagaattaggagctggtctacaacttaatcgtcaagaactagatgctagtaccttacgaaatacaacagaacaagtgctatcgaactcttcatttagagaaaaaagcttggaaattggaaaatccttaagggattctggaggatacaaaaaggcagtagaagccattttaaagtttaaaaaggacgctaaaatagaggggtttatttaattttatctgatttttaaccctaacatttaaatcagtttaaaaagaaaaattaatgaagatagaaaagaagtctcaatgggagacttcttttaactactggctatattaaacattaggtaaccaaagcccctttattctatgtaggatagaggggctttggttcctgcaaactacattatggtaactaactttgattattggattgtttctactggtagcttataacacatatgcttgttttgatacaaatcctgcgttatctaatttttatggaaattacatattacaaaaaagagcatctaattaacttttagcaagtctaaaaagctttgatagcaagtctctttgtaatattgatgggaatttatatcttcgttcattagccattgaatgagcaatccatctataatggcgcgcatggtttttgaagtcttttctacattaatattctgttcaaacactcctgtttcctgaccagaagtaataatgtcagatgtaatgtcccaacagttttgataaaaactatgattaatttttctatatgtttcattttgacctgcctgagacaagaaatctaaatagaccctataaaattttgcatttttctcaggagcgacaaatactgagtttacataagcttttagtttacccaagggagtagactctgaattcactgatgcaagctcatagctatagattttatttgtaagccactcaaggagctgagataaggtatcttccttattttcaaaataataatggacgactcctttactaacttctgcatgatcagcaatactctgtaaggtaaccgaattataaccttgtactgacatagcttggaaagctgctcttaatatttgattctttctctcttctgcttttttcttcataataaacctccagcaaactaaacgtacaaattagtatacaacattttataaaatttgaacaaaaattattctgaccggtcaaaaaagtttgactggtcagaataataatgtatactagaagtagtttcacaaaggaggaattacaaaatgaaagatcaattcaaagcgctagtggtagacaaacttaatgatgaattttcaataaatgtaaaaaatatttctctagaatttttgcctcagagtgatgtcttaatcaaggtacattattcggggattaactataaagatgggctagcaggtactcctgatggtaaaatcgtaagaaattatccatttataccaggggtagatttagtaggtgtagtcgtttcttctaatgaccctcgctttcatgaaggagatgaagtcattgcaacaagttacgatataggtgtttcccattttggtggatacagcgaatatgccagtattccaggtgattggattgtacctttacctgaaaatttgacccttaaagaagccattgtagtaggaacagcaggctttacggcagctctatctatacaacgtctagaggagaatggagtatcaccagaaaaaggaaaagttcttgtgacaggtgcaaccggtggcgttggcagttttgcggtctcatttttaaactctctgggttataaggtagaagctagcacaggaaaagaatcggagtatgagtatttacgaaaactcggagctcataccattatttcaagggatatgacgtatggaggaaaagttaaagctttagggacacaaaaatgggctgcagccgttgaccctgttggtggagagcctctttcctctgttttaagccagattcaatacggaggttcagttgctgttagtggattaacagctggggcaaaactggcctctactgtttttccgttcattttaaggggcgtcaatttacttggaattgactctgtatactgtccaatggaaacacgtttaaaaatatggaaacgcatagcaacagatttcaagccatctaattttgaagattttatctcacaagaaattaatttaaatcaacttcctactgttcttcctaacattttaaaaggatatgtaagaggaagaacgattataaaattagtctgataagaaattcatattaaggtttcttaatgtcaaaaatcaagcactataaaggatttttaaaatatttgagaagtacaaccaaaaaagctatctttaggaaagatagctttttctactgataaataaaattaggttttaaatggagtcctacaagacttcttcagtagtttgctcaatttaatacactttatttttatacaacatattcattgctttttctaacagtaaaatgtcttctttcatcattactttcatatcctcgaggtctaattgaatatattcttcttttaaacgttctaattccctcacgaacaaagatcaagtgtagtacccggagttttttaacaatacatatctcctttgtgtgcaattactatattcacttcccttttatttagattaacaaccaataaaagtaataaactcaaaaaataatcccttgcccatcaggcaaaggattttcaaatt

SEQ ID NO: 143 - DNA, 4373 bp, Priestia aryabhattai
  source 1..4373: mol_type = genomic DNA
tccagtatgggactatttttatttaaagaaaataaaaagtaaccaactaaacaagtggagaatgtacggagaaattgttgttactcaatggatattggtcatcatattcttagtgtattggcttttgactaaacacacatttagcaacttattttctattaaaaaacctttattttctttagataaagattttttactgtctgcgggagtgggagcaggaattagtattttaatgcttgtttttatgatttctttttccaaaaacacaagagagaaaatttccgaaaaattaagtgatgagagtattcaatttttgttgccatcaaacttcaaggaaaggttgtttttccttttgatagcagttacagcaggagtttgtgaggagatcatttttcgtggtgtaatgtttcattatttcaaccacctcccttttcatttatctatcgttgcgattggaatcatttcaagtctgttatttggaattgtccatctatatcaaggttggaaaggtgtgctattcacttcctatttaggtggcattatgttttttctttttgtggggacaggttctttgtgggttcctatcgcactacatttcattattgattcgaagtttgtctttttgcctaataaaaagagcccttcaagtataattaaagaaaattaaaattactattatcgagaaatacttgaataaattattattcaggtgtttttttattgctttttacttctaccttcgaattttttattccaatagcagtcatggggctattatttgaagaaattataaatgcaacgaccaagcgaaataaaaccaatataaattaaaataatagagcttacctataaagagataagctttttatttcctataatacctgttatgttaacaaaggatgtatgctatatttacttcaaaagacagaagaactctccatttccctagggagtccttctgtcttgggtactattattttcaaggcaatattttcttgaaaacattttgggcagtttttgttggccaagacattttaattcacataacgagctaataaattagagtttcctcttttaaaatacataagtataataagacgaatgatatttacatagggggaacgattttgtatcggttaaaaatgtattttgtattgctttcttttgtgcttttatttctacaagggtgtgatatagaagtaaccaaacctttagaaggaaaatattgtacaaatggtggtagagatacaaatactgaatttggtaaggaatgtcgctatgttattttagcaggatataatgatacagatcattatacgaacctcattggcgatttatatgataataaaaaaagaatatcaattgtcgctcctatttactcatttgaagaaaccaaaagctttgtctatatgattagtaataaggaatacctaatattcgataagagaaaaaacaaattagaaagacacattcagaaaggtccattgtcccacacgcagcaagagattttcgagcgccttgagaaagaaaagacagacacgataaaaaaagttaaagaagaagttaaataataagcaatctctctgtttaaggattttttattagttcatttcttacaacagtgaatatattaactaattttttatagtgtatttcctagattttaaaacgattttgccatacagaaattacaatttacatataggagaaggaatcaaaatatgaaatttaattattacttaaaaggatatggatgggctcaagcatttattgaaattgattctaaaaaattggaatttactccaagctatttatcagatgcttttggagatttattgagaagcctggtttctttattaatacatgaagaggaagttgcaacagtagtttgggatgaagaaccaagtggagtagaatggacatttgttcgtaaaaatagtgatgagttatctattaaaattactttgtatgaagaaacttatgaaataaataagcaaaagggcaaagtcgtactacatacagattgtttatttatagagtttattaaggaagtagtaagagaggctgatcaactactaattagcaatggaattttgggttatcgtaatatatgggatttgcatgaattcccaataagcagttatttacaactaaaagattttttgaaaaatgacatgataacaatagagaatagttctaatagtcgacctgctagttataaagaggaaagaagtaaccttaaacaggagcttcaccttcttcattctttggtaagaggatagattcctgtaaactgttttatggtaagtaaggaggtatgccatattcacttcaaaaaacagaaaaactcccctatctaattgttcagttggtttttttgtggggagtttctctgtgacataattagaagttagttttgataccaaaaggcatctggagtagtttgcccaatccattatttattattcgttgatgaggaagttggatttaagaacggatataattattttcaggaataattcgagtaaggggaattaacaatgcttaatgataaacaaaaattactttttgagaatttaaagaatattaaaagctattgggcgaacactgctgttgaaaatttaagccctaatgctgatttaatagcctctaattgtgaagaggaatatcagtttctatctagaaagctctcctcagccgaagaattacttgcctttcaaaaaatacaaaatgaaattatcgaaggagttattcattctatattagtgatggtcgatggtggagatgaccttgcagacaggctgtctcttgatttaatagatggagaaacgaaagaatcactacaagatgacattgcactatatgaagaattcattggttatttacttgatgtggaagatgaataaagagggatcagtactaagagatacttgaatttcagaacatttatttgaaaataggtattctaaatgaaatttaaatataaaaaagaaaacaggcttaggtctgttttctctggttcttataatggtgattttgttaactaaatgtatatagcgtataacagtattttatccagacaatcctctattttatgctaatatcattaggatggagttaagaaaaagagaaggtaaagagaatgatcattttattatttatagggctagtaattattgtaggtgggtgcttttattctaaaaaaattcataagaaagtattcgctgatgggggccttccgggttcagataatttagcaggaattaccttgctttttatattaatagtcctaaatttttcaccctggtacataacgaaaagtgtaattattctatcggggcttctaatcattttttggactttaaaatgtcacgtggcataaaggggctgctgtcgaattcgacagcagccctcttatgtgtgcatctataagagtacttagggtaacaaaatagaattataaaactattgattaggaggcttgtttatatttgttattattaataaggcttttaattaaattgataggatgaaggcaaatgatatattttatttcagtaggattaattatcttagggatttttattatgtttttttcaatttggttaagtaaagatcaggaggataatgaggagatacagagaaaaacaggtgcattttccttttctttagattttattactttaattttaggtgcaagtaatattcccttatcactagaaataatcttcctaggagttttacttttgatttatcactgaattgtatatcttatacaattcaaataatgttaacattctattgaaataggaggtgtaaaataggcctatgtcacatccatataaacatttggaagggactcctttatggaaagttattgataaaggaataaacaatcttgtagaaaacaatgaattggaagagacaacatcaagggaatacatagtaggttacctttgtaaattgataaatgaggcagggataaaaaataagtaacgctgtgaagagcgttacttattttgtgccgtgaaagcacattatggtaactaaatgtggatagtatatatgagtttcaacgtttatatttcctctatttcttttgacttggtcaatagtaatacgtatatcatagttgttaataagctaataacgcccatcttagcaaaatcacttaaaattaagggtaattcttctgtttcacttacatatgggcttagatagcttaatgtaatcatatatgttaaaaaaacacctaaacctaaccaattatctttagctattctgttggcaacaataacagcaagaacagtagctatataaagaatagtatttatcttggtatgtaagatagacgtatcatttaaccatgtgcc

SEQ ID NO: 144 - DNA, 4312 bp, Priestia aryabhattai
  source 1..4312: mol_type = genomic DNA
aaacaaaatatttcaaacccggtgaagttgctaaaattttagatgtaagtacagatcttcttcggaaatatacagaccattttaatattcaaactgaacgctcaaaagaagatggtacaggctatagaaaatacacaaaggaaaatatcgaagaactaagagaaatattaagactagtaagagaagagaacttttcttgggaccaagttctatcgtggaaaaacggtgatgaagaagtctttgttaaaatagaagaaaaaagtagattagaaaagaagattgataaattgttagaaaaagaagaaaaccaagaaagcttcaacgaaagacaagaacaatttaatatggttctcgcacggaccttagatgaagttatgaaagaattaaaatcaacaaaagagcagctagcagcaagtgaagagcgaaatcgtataatggaagaaaaaattgaattgctaagtgatcctaattcagatataaatcagttagaaaagaaattagatgaacaaaatgaacgagctgaggcacgtgacaggttgttgattgaaagctacaagcaaattcaagaacaaaacaaaagaattttggaacaaaaaccggaattaaaaaggaaaaagcgttttggcttattttaaaaaatcccttatgcgcatagtgacagctacactgtcatcaagcctacatgggtggttcatgatctaatgcgcattgcccaaattgtatcgggtaatggctgagagaatcaatgataagtatctcaacgaaagataacggtgtattagctgaacccttggggggataaggggcttagccatatacaccattataattacccatatgacttaattacagaaagacaagccagtcaccataaagataactggctcccacggagagatcgaatactttgaacaggtgatcataaaaagatatatttaactttacctcatatcttcagaagtctaaacatttcccaacaaaatcttagagatgttcttgttactccaatatctattaaagtagtgagatttttcgtattaaaagactcttcaaccaagtcttaaccttcttgtttttgatattcataggcaacaggaactttgtccattttaatggttttggccacaatataacgacgatagccatcttttaaggtcttcgattctttctcaatcgttaacggcttgtcaaggtgtcctgtacgcttcacaaattcaatgacttcttctgttttcacagggtttggacgtgtctttaagaaggcttcaggaacgataatttcatcaaagcttacgacatcctgtgtcccttttggctgagtcggtagctgcttcttttggggtgctgcctttttctcttgtacaggtgtttctttcgcttctggctgtaccgtttcagcgtcctttttctcttcttttgctacaggctgagaaacaggattttgcttttcttcctgcttggtagctgcaatctcttgttgtgccttagaaacctcttgtttcgcttcttttttatcttttgaatcattggcttctttatcgtttttattcgggagaacggtaatttggaagcagatgataccaatttccccagggcactcgtcaatgggaatatccaacgttggttccctttttcagacctttaggcgcagatggagagcctttttcacgcatatcaaaggcaacgtagcgatcgtattctcgtaagggtcctgtagctgatcctgttaacgtaattttatgtggcataatagtctccttctgcgtagatttttagttattgtttatttagaacatatatctaaataaacacaatctattaaaatatcagcttctaaagggtttctacatttttcaattaagaaactgatccttttaactggtcctgttggtgcaataaagcttgttcctctggcgttaaggcttgtcctagattctgtttcagctgcgccatttctagcgaactgtacgtagtactgtgctcttgaagtaaggtttcttcttctggtgttagttcttgccctaagtcttgctttaattgaatcatttcaagttgttgatccagagaaatagttgtttcttttgtagaccctttttgctcctgttcagcttttaaccaattaggaaccaattccttacggatgatatgtttaggcgtaaatagagctgctgtttcagcttcagtatgtatgtctaactcaggtgtttgatcttctttattcccttttagtagattggtaaattgattataagcaatttgataaactaaacggcacatttcatccattgatagaggagtacccttatgattcgcctcatgaacatatttatctaagcctacaatggctatataagcgacttcatgtacttgctctttcacaatctcaatctttgtatctcgttttacagcttttgcagcattttgaatacgcgcataaaaatcttttagttgatgaccatatttacctgcgtacacatgatttactttcttaggcacacctttgatataagcaaatgcctgtgaagcagatattaaatgattatttatatgatttacaggtaaatcaaggttaataaagggggacgatgttttttcgtcctcaaagcttggtgtatcaacgttttcagcacgttctggacttgtcacaggagttgtcacaggagttgtcatttcttcttgctgaagcgtttggatacctgttgtgtcatggtcaaaaaagatttcatcacaaatttgatcaaaattcgtatggcttttaaggataaatacatagctatcagggtgagcgcctgttgaatcttctttgatataacgtgccacgatcataaacggcgtttcctttaacgattttacaaagcgagaaacggtactttgggatacgtcaaatttttgcataagtgtttttgattggatcgcttgaatgcccgtagccacaaggttataaatcacgtaatctaacatttccatccgttttttagggaatactttatgtagggctacttgttgttgtttaaagtacgtacgaagggtttctaaaaacgcttctttctttttacgaagggtaggcttttctttccataaccatttgaatcgtccgttgaaggtattcacatcttgtaaatagcaggtaaaaagttttgtcatttgttcatcttctcctttaaggaacacaaaaaagacactgtctcccttatgaaaggaaaacaatgccgtgattttgatgaactaagcccttgaaatagatgtcaatttcatataaaataaagccataagttttattttataaaaactaactatattaacaagagacttcgacaagtgtttttcctaccgtaactaggaggaacggtttaagagtgtgagtgcactacttaaacagttgaagtcttttttctatccgcacgtttttgttagttttattatagcgttaactagtctcataattcaataaaaattagcaaaatatatcaaaacaagtatatttagctacgagtgatcctatattgctgtaggaatcatctttatcatatataagtttttgagagtaggggaggggaaaaaagtttcccctcctcaagtattctaaagtgtgttacaatatttagtttttaatagttttggaatttagtgaattaatacaacttcaatgttaaggggaaatgggcattctgggtagtgccattttttatagtcctttttctgagaaaggactataaaaaatgacactatgcaaaattccaaaagtatgataaaggcagcctctacttataaatgtagaagctgctttttttattaatgtgtgaggggaaaatggacctattggaaaattagaggccccaaatggtgagcttacttatgagaaaattagtgcagttccattctttttttgtttatatttgaatctattacaaatgtcagatatagcgtcgccaggatatctaattttgtttttaaacatgtaatcttgaacgtattaatatgtgactacatcgagtgaaatcatctggcctttctatccatcatccccatacttcctcatcgattcttttaacatatcatttaaattttctatagaaattagacaacgttccatcgtcctatctttgactttaattaaatttttaaagggtctttctcggctgaattgttgattaaaaatagttcatgtgtgaacctgattctttgaaaattgctgtcatgattgattatgatttcttgctaatttatcaatttttttaacatcaataggattagcatttcttatttgaagttccatatttgtttgaaattctaaaaatagtggtagccctta

SEQ ID NO: 145 - DNA, 4295 bp, Priestia aryabhattai
  source 1..4295: mol_type = genomic DNA
tcgtcatttaaatttatttggcttagagattcgtagtattggttacgttcaaaagaagcaagcagcagagaagaaagccgttaaatcctaacaacgtaggtgatggggatgtcagagcgtcaaaatgcgtttacgattaagacaaatcgattgagtgatgaagtttataataaactagcttcgtatgctaaatcgcgtaagttaggggattatatttcatctttaattctacgtgatttagatgattcatctactgaaagaaaagtaattgaagacaaaaaaacctacgaaatgcttgaacatataaagaatgagttagctgatttaaaaacattagcaaaaacaacaggttttgtaggaaaagattccttcaaagaagaagagccttcaaaggtttcacaactgaaagaaggaaagattgcagatttagaaaatatatctggctcattagacgatgacgatttagaagaatataacgatttttaaacagtaaaaccactagaataaatcctagtggttttttctgtttttaagctttatattgtatacgtctttagttaccaaaatgtgaattataagaagtcaaattctttatatatgaagaacttgacttctattttttatgaaaaaatgattaatatgtttagtttagcagaaaagattaaatggatttggtttggttaattaaataagaatatgcagcaatcattatcctgttagtaggatatcatttaataaagctagttctactttgaaaggattattaacttttctaagttcacaataaccagaactataaatatgaataatcttaaatcttgtaccgcgatacaaaacctctttattaattgacataccttcccccagattcattattatagtttattcaacatattaatcatttttcttattcaaaatacatctggaataaaatcaaattaattttcccttttttgtatattccgaaacatagattcaaataaaatttaaaatacactcgactatatacatatttttagctgccttgagcaaactacccaagacgccgcaaggcatcatctctaaaatgccaattagagaaaaaaactaccttatgcgcaggtagttttttctgtttttagcctgtatatcatatacaaagcttgtcaacataatgcctcttccggtatacacgaaaaagagaaacctttgcgccacttgggttcagctaagggtcccttttccggagtatacatctttttatacattgttgatatgactacattctttggatagttgaaagaaacgagaatgtataaaaagcgctccttttatacatatgcttgcacctaaaaaatagtatttttgaaaaattataatacgatttttttaccgatatattcaatagaaaatccccttaaaaagctatctcccctacaaagcgaggtggccttttatttttatttctttcttaataaaagcttgtcctctagcttacatacccacttataaaagcatagtaagataagtaaaagtacaggattaagtatagctgaatgccataaattccaccaaccataatgaaaatatccccaaggagccggtaataatgtaagcatttcataaagcaaaatagctattaaccaaaaaataaaataacaaacttgcctaatatagccccttttaaaaggataccaattaagaaacatcatattaacaggtgggagtaacacagtatgaacaagaagtcctttccaatcggcaccgtctgtgaaataccagtacccatgatattttaaatctatatacacatcgaaactactttgaaaagcgattgtaaacaaccagagatgaacaatttgatttgctgtcagtcttttatttgttttaaatgcaataaaattaaatacaataatggcaatagtaagtccaatcatgtttttttcctttttgatttattataccatataattacataaaaataaatttatggtataaaatagacgcgtttctctaaatatttctatattaaatagctttaatcaataacaaaaatatctaacattaaatttaacttggtatttttattacattcattttttaaggaaactgtaatctatagttaacttatgtagctgtttcaatgacctttgaggcttctaaaaggggcatttacaagcgccagtgccaatggtaataaaaatgcaaataaatgagaaaccttaaatgaacgagataaatgagttggaataatgcaaacaaagtactaaagattctactttataaaaaggaagtgtttgtatgtgggttataaagactgaacataggagagaaggcggagggacagttgcgcttgagctagaaagtgaagatggtaagtttgatgtcaatgttagatgggatggttgtatggaaattcacgtttattcgattactgaagaaagccgtgaacttgaagacacttttcatacgtgtgacttaaatggatttattgaaaagttacaatctttaaatggggtatgtacggattatttcggtgagggtagctattgggagcaaagaaataaagtttaaccaaaagttgaaaatgaataatactcttaccttttaaattggaggaaattgcaatgaagaaagcacacgttttgattcttagcagtatctttttttcactaatttttggttctgttaatgctaatgcttataaacccgaaaagctgcctacttctcaatcatcaaatcactggaaagtaaaaatagacaagccagatgttaaagatttaaaagaaaatgaagggaaattcaatctctatagtattgatgttagaaatttaggttcccaggtctacgatgcaacagtggaaatatacagggatgaacctaatacaagtaccaaatacgaattaattacctttaaaatacctgaagcacaaaatttctttcatcatcaaaatcaacctatttcagttgattcaaaagtggtagaaatagttgtaacatggaaagaagaaccttacacggttatgaaggatggaaggaaatctccagcccgtaagtttaaacaaacattcttgttttcacaaaagtgaactcaaaagcttcttttggagaaagaagcttttaaattcacttttaattaacgtaatgtgatttagaggtatgagtttctttaagaaaaatctttacgcatttctcgtgttcgaacaccatcttcaattttttctgcaatgtccattaacctttcaatgtcggaaaaggaataccttcgggtacctgaagagtttcgttttgggaaaataagctctcgagtttcataataacgaacttgtctttctgataaacctgtcatttcagtaacgatttttatagtcataactttctcatctagatatggatgattattagtcaagaatatcctatcctacttccattctttatcagtatatatgttattaacttttaggttgtatatagaaatgaagtttattaaatatcgtacgttccaaaactctttgggaaaaggagtttttagttcctataagtgacattatggaaactaaagatgtatattacatggagaattaacattataaaggttttcttataaataaacagaattatatcattgtaaccagtataaggcggtgattaaaataaatatttcttctaagaaacgggactctagcactttccaacaattagtagattctataaatagaagctctaaaaaacaatctacacttttattaggaattgatggctgtggtggttctggaaaaagtacattagctgaaaagtttaaagaagagtatgctaatgtaactattgttcatatagatgatttttaccttccttctagtcaaatcatccatactcatccaaccaaaaagcctattggtgcagattttgattggaagcgtttattaaacgatgtgtttgatccaattagtaaagaactaaaaggacgatatcagcgatatgattgggaaacagatgccttagcagaatggcatgtagttcccattggtggaattgttatcattgaaggcgtatattcaactcgtagagagttaaaagataaatatgattttactatttgggttgattgtccaagggaaacaagattatctagaggaattcaaagagatggggatgaatctagggatatgtgggaaaaaattggatgatttctgaagatatttatgtaaaacaacatgaaccagataaaaaatcagactttattatatctggaattggcaatgaaagaggataaccttatagttatcttctttttgttgtttgaatgccgagaacgt

SEQ ID NO: 146 - DNA, 4270 bp, Priestia aryabhattai
  source 1..4270: mol_type = genomic DNA
cttccttggtctacttatgaaatagcagatagagatcaacagtttgattacaaagaattgccttcattgcaagctttagaagattattttcttcatcttaaagaacagtaatttatcttatggatacaattattaattattcaaaagaccctctattcatagacttttcttaaaaaaactccctactacttatgcagggagtttttatgtatcagtaatgttaatgttgtgcaggagctatattggtaagtgatgttttatcgtttgttcaagggtctgtattaatctttgttgcaccagattttataatctgaagtaaagctaaagaaatactttcaaggtctttatagttttcaatttgttttgtttctatattttctaattgaaaggtatgtgattccttcgcatagctgagagaaaaggtatgatgttcaccacgaattttatggacaatttcacagttatcataatacaataacgtttttaacatttcctgtattttttctattgtcatttgtccaggtcccctttctcattagcttataaaagtttgttttttatgtttactttattctagcatagggtatacaaactggttactagatagcatcaaatgaaatatttttgtaaaaaataaaagatacgtttatttactgaaataaattctgatacatgtcaatgtatacggattgcatcagaaagtatctttgatgaacactaacataagctttagggagaacattattccttgagaatagtggagcttttgactcttaatgtacgtaaagatgtttacctatataaaaactttatatgaaatgtatgttttgagaacgtataagaagactgaatgaaagaaagagggggtcttacatgtgaataacacaactagatttaagatacacatttacagccccaagtcggggcataacgacctttattcttttacaaaaacgaaagctggctggaaatttgaaaactatcgatgtaaaggtgaagtagataaaggtgggaatccgttattttataaaacgctaaatgctgaatctatttctaatcccgatcatttagcatcttgtatttctgaagtctgggaacaagctgaaacgttagatgaaaaacagattcagcatatttttgatgaactttctagaatgaatctgtaaaaaatactatcattgccagaaactcaataaaacaatggtaaaatgttaattcataaaaaaatctctccaataaaaatagagagattttttagtatgcattcttttatgatttacaaggtggctggattttaagttacttgcatgtaaatacacagcattcaggttctgtggttttacttaagaatgaacggtctatttatccgcatctggttccaatgttttaattaactggtccatagacttaagtaattgattattagattttattatcgcttgtttggtttgtaacacccgttccttaacttttaactgtttttcgaccttcatagcctcagctgttgtttctgtacaaacaagatgaccaatattatcttcccatttaaccgtacatgcaaacaaaccatacaaatcatggtgaatggttaactttaggctgacccttatgggggtagatgaagtagtctgcacaagtagttgtctagctaagagtcgatcatctagatgaacaagctctaaaaaatgattggcaggtgtaaaaaaggtcatggcttcctttgaatgacgaagaacttctccatcggaatttagtttgaaatatggaactggaatccattccatttcatttgttttcatgtgtattctctcctaaatcaagacatgtcttcttgtagctaaattcttattttgttttagatagtaatcatcgataacctattttttacactcaatcagtagagaaaggagtccattcatagttgtaaattatttcttttcctgggcatgatagaatttccgcacttttattattatgtaaattctatatggtcttaatttttctgtccaactaagtgtatccaatccatattatgaaactaaaaatgaagagattttaaagggaaaagaatgattcgtgtggaatacaaagaaaaccggttgcgcaaagataggaaggatataagacatgaatgctacgtttaatcaactcttgtcaatgaaaaatctacgcgacgttcgaaaaacagaaattttggtacagatggaacaagctttaaagaataaagataaagaaactctcttacgattaagtaaacagctccgaagtattacatagaatgtcctatgtaatagaattaacctactaacaggaagtctttacatgagaacaataataagcgacttatctatcctaattcgaacagtaaggtcgcttatcctatttttttattcatatagttaccctttcactttacaatatgtgtacgtttattatgttatatgttcatcttctaactgaatgaaatctttatcctgagattgattgaataaataagtaaggtatgaatgtagttcgaatcggtcttcgtcaataaagtcagaaaacacctgtttatattctttcaacatcttttcctcctttatttatgtttcttacctctatcattacctatctagtaatctcttatacatacaaattaataatgtacttattgattgtattaacttgtatgtatgaagttgtatgtaacacaacacagagttaagaaaaattcattctttctgtttgtatgggccccacctgcgccaaatataatgatagccacacatgctatccacctgattgtaagtaccaaagaaaacctaattcatttacattcattttttctacccctatcaattcattttctctacttatattttctaaaaacacgttaacttattcataacctttttctttcagatgagttctaatgactaaattttttgataaatcgttaattattttcggggatagtttttgcgtctaaccagtggcgtgagccacactatataaaagcgacttcttgtcgcaccataaaatgtgttctaggaaacataaataagaaaagcaattggaataaaaattaattgcctcattgctgctgtttaattgcttcaaccatcctacaattactctttattcgccttatagtgatctcctattttatcaatacgattggtccatatccctcctgaataaccgtctggaattctttttaaatcctgaatagaatcaaaaccagttgaaaactcgcttccatttccccctacgataattgttcgagtatttacctcatccattcgatttaaaaaacgacttggccatccccatagaaagggaccaatcttttctggtatatgtaattctgtcttttcacatgcctttggtacgtatcccgtccaacccgttgctatatatgggataagacaagctttcatagtcgctttggacataacctttaggttgggcatttcctttttcaatgaatcaatcggttcatctccgccataaactgttatattttttaaacgctttttggaaaattgtgatagatacttagctaattgtcttccttccttcggatcattacttttcacatgaataagaaatgcttgatgaggaaaatgctccattacttcattcagagaaggcatgaggttgactcccttcccacgaaaaggatatgttttccctccatcagctgtatatccgtatccaatatctaatttttttaactcagccattgtataatcccttgtcacaccttttccatttgttcgacaatctactgtccaatcatgaaatactgcaaattgattatcttttgtaatgtgaacatcaagttcaaccatatcagctccattctcaaaagcagcttccatagacggaatggtattttctaaaaaattatgttcaggcttgtaaattctttcggctgtacacgtgtcattttgaatatccttcattgtaaatgtttgagcaacacctctatgagcaagtaaaaaaggttgactctctcttttctgagcaaataaagaactattatttaaataaataaaagctattacaatcaaaaaaacaaaccatgtagttttacgtttaaacactttctttaaaagcttcataatatcctccgattagtcataacgtttgatttgttgtcaattctgaatcatataagaagtaattatcattttcaatatttaaaagatgataattttataataattctagagccattacaactaaagataatttgagccactaatttataaactagttacca

SEQ ID NO: 147 - DNA, 4214 bp, Priestia aryabhattai
  source 1..4214: mol_type = genomic DNA
ttctttcttttttacgtccttatacgaatgatatacgtaaaataatctatctaactttataaaatagtatggatactctctgttaggcaacttacttccctccatttctacatccttcaatttttttataagtcactattactatcttacttgaacttaaaaaggtaaaatccttctacgccaaaggatttcctccttcatgtgttccggaaagcgtgactatgttaactaaagatgtatgcaatataaaacttaaaaaagaaaaaactcctggtttagcaggagttttttctattggcagcaagagattcgaatggatgcttcatggcatcttgaatagtttgctcaagatgtaaacaaattaatcatttatatgaaaagataaaaaacaatccgtgggagttggattggtttttcttaaggaaagattaggttgatagttcctaattgtattttatgtttctcactttgcgttatgactacctataaattgttttaagttaactagctatacgttgtccaccttgaccatttaattatgatacggtgaggaagggtttctccaattcttaaggaattacttatcagtagcaataaacttaacgaggtatctagagtagtgaaataaacggaaaatcgaattaattattgttacatgtaaatataggtatttattctgaaaggggctgggactatgagtgtttctatcttaaataatttaatgagaaaaaaagtatctaaaaaggacaaaggggagttcaaccaatggacagaaataaattctcatcaattgcccacagtaaacatttatttagtaacccgataagtgaaactaaaatcaatagaactatagattttcttcagttaaaacctcatgcaaaagtattagatatcggggctgggaagtgtgaactgttaatacgtttagttgaaaaatatggtattggagcaacagccgtagagttatatgaagattctattttagaggcaaagcaacaggcccaaaaaagaatccctgaagaaaaaattacgtacattgtaaaagatgccaaacaagtggtaagtgaatacgtcaagcattttgatgtaggaatttgtgttggttctactcatgctttggggagtctcgaattaacgttacaatctcttaaaagaaatgttaaaaagggcggctttattctagtaggagaaggatactggaagaagaaacctagtcaggcatatttagaagcacttggtggagcagatgaatcagaattaaaaaaacaccatgagaatgtttttatgggagaaaatatggggctcgtgccgatttggtcagttgttgcaagtgacgatgattgggatgaatatgaaggactatatgctatgtctatggaaaaatattgttatgaaaacccgaacgaccctgattgtgacagtatgttaaataaaattaggtcatggaaacgtacttaccttacatggggtagagatactttaggatttggcctttatctttttcaaaatcaataaatttcaacagaacctgagatcccttccattatggaacaaggaatttcaggttttatattttctgtaatccacattatgataactaaatatttgtacgttatacatatttctttcatcaactaacaagccaaatgcttgaagaaggaattaaaatatagaaataagcatttattatcaatatggttaatagtggaaaacaaaaaccagatatgattaatcacctaataaaaaagaagcctttgtggatataggcaaaggcttctcatatttatagacacaatgaggaatacctcagctagttaaacttgatagatgaaatgagagaattcaataccgattttaactgttcacttgttgtgggatctaagatttcaattttattattgattttggttcctacagcaccaatttgtaaagtgctttcttttgggattttcgcttcaatcatctctaatgtaagtaaaatggactcatgagctttatccccacctgatctatgtgaagaagcactaataactgctactggtttattcacaaattctcccgaagatacaatccagtcaagagcattttttagggatcctgggactcccctagcatattctggtgtacatattattacaccatcagctaatttcagttggttacgtaagtccttaacaggatcaggaggactatcagtatctatttcaggattgaaatgaggaaggtgttccaatccttcataaaattgaaaatcaatattttcaggtcttagattagaaatagcatacagaacatttgtattggaagaatttttacgcaaactccctgagatagcgagtacctttattctgtttttatccatggtatcaccctactcccttattgtttatacagttttcatcatattatttaaaatatcataaaccaattggaaagcaataaaatcatcatcttctagaaaatggccgcccttttcaacaggataaaatgatgtatccaattgtttggataaattttgacttaattgaaaaggaacaatatagtcatcttttgcagcaataacagcacgtgaattagttgcagaaattattttttgataatccacttctttatctgtaaaaggatctagtgaagataaagatgataatcgttcagaaaagccagaaacaagaataaatcctccaaaccctggtaacggatttaattgttctacatagttcaatagcgtgatagaccctaagctatgtgctacaaaataagtgttgtcatctaaattctttattttattagccaatgtttccaaccattcttctttcttggggtcagacgaatttggcatgtgaagaaccgaaacttgatgatcatctgccattaatttttcttttaaccatgggaaccaatgactagttggtgaagctccgtatccatggataatatatacttgttttcccattgctattctccccttcttttatggatgtaaaaacagtatattactaatctaaacccatatgataggacaaacacttgaatgagcaattaaaagtttttttgaaagaagcttctttttttgtgctgataattgtgattatggtaaccaaaaattatgcgttgcatttgattaaaaccataaaggtttttttataaatgaggcgaagtaaattatttgaatggttataagttgatgatcaaggtgaatggttcttcaaaggaaaagtaccttaatacttttgaacaatgactaaacgttcattcagcaataaaataatattaaattgtaatgggtggaggggctttaatggatttgtattatgaaattaatggttatggtcatcctgtggttctcctaactggtggtgctgatataagaaactggacatttgtcgcacctcttttagcgaaacactacaaggtcgtttcttttgacggacgtgggactggaaaatcaccgtcccctttagaagatgtcaaccctattgaagatttgttgtcactacttgatcatctagaaatcaatcaggcgacactcatcggtcactcaatgggtggccaaattgccactgagttcgctctgaattatcctgaaagggtttcaaaacttgttttgattgcgcctggattatctgggtttagctattcaaaggaatttgaagagaatataaaaaagattcatgaagctgctcctgatatcgataagatggttgagcttttgctcagtgattcatcttatcgtgttataacggcgagtcctcaccgggatttgatggttcaaatgctccggcaccatatgaaccgaatgtttgaatggccggctgttaaattaatttggacgcaacgaccagccatcgaaagattagaagaattgacgcccacaacattattgataatcggtaaggaggattcacccgataaccttcgtgttgccaattacattcgcaagcactcagacactcgaatcatagaaattccagatgctgatcatatggtcaatttgactcatcctgaaaagctgtatcgtcaaattactggctttatgaaggagtaaaaagtgtacttgttttattcgggcttctaattatttatttggcattaagtaagatattacgtagctacaaaaaagcacaaaccactatatgtgatttgtgcttttctggctaaggaataacactaaaagaaagattgtctaataacatggtaacaatttaacgctttaa

SEQ ID NO: 148 - DNA, 4119 bp, Priestia aryabhattai
  source 1..4119: mol_type = genomic DNA
tgaaaattacaggaaccaaaaaactcctttaccctatataggataaaggagttttgatcacctataattactttctaccagtgcccccaaattatctaaatcctgactgatatttaagataattaagtaatgccattctcctttacgtttccctaaatccactacttgatggactttaacattatcattttcatattctttagctgcttcacacatttccctcaatgtattgccaaactctgtgttatcccaatttaccactgtcaattcaatataagactggctcttttttaatttcatatctcagtcctcctattagacaaaaatgttacttaatgcgtaggacaagcatacaatcaccctctctatggatgaataaattatatagataaataaaaaaagaaggtgattacaataaaaaaatatgattgtgactataaaaaagaatcaaagtgtcaacaaaaaaacaaaaagcagaaaagagaaaaaacttgtattcacatcaacatttataaccatgctgaaactggcggacaaattagtggtaatggtgggcaaaatgctaatcagggtggacagattgcccaaacaggtggacaaaatgctaatcaagacggcatggttattaaagaatgtggaaaaaaaacaaaaatactaaagtgaaaaaatttaattttgaagatgaaatgaaagaaaaataataccaatactttaaataccatatttaacataacgtataaaaattttctaaaattattgatgtgtaaaatagaaaactactggatttgatatagaagaagctgttgaaatcattgatttcaacagcttcttctatatcaagacatgtccaaactcttttaattggaatacatattatataaaataacggtatctaaaagggggtaagtaagatagaacaatggcttaaccttattgggaattttggctttcctattgttgttactttttatcttctattacgctttgaaaagaaaatagaccatttaacagaagctattaataaaatagcttccactattgaaaaagagcaggacaagcaataaataattgatttatggactcattttccaattaatttcttgatatgaaatatgaatactgcctaataatttgagcaaactactcaagatgcgctgcatccattcgaaacccttgctgcaaacaaaaaaaactcccgctacaaccaggagtttttttcttttttacgctgtacacgatatacaaagttagttaacataatgaattttatagatagtcataacacaaagtgagaaacataaaatacaataaggaactattagcctgatctatccctaagaaaaaacaatccaactcccacggattgttttttctctttttatataatgattaaattttttacatattgagcaaactacccaagacaccgtgaggcatcaacattaagttccctattcttttaacagaaaaaacccccgactgcctgtggagttttttctgctttttagactgtatacgctatacacccgtagttaacatacttgaggagttttactttgctgaataaaggatatgtttctcatatttacatacttttgtttttgaattatctttcttcaaatttaccataaagttcttgaagaggctttgtaataattttatttaattccataatcaatatattcatccgttgttcagcttctatcaatcgtacaatcatttcatttttctgaacaacttcccatattttttggacttcctcaatttcatcccccataattttctgacctgtcatttgcttattttgtaattcgatttgtaaattgtggaacctattaaaaagtttttttgtctctgggtcagtattaacttgcctatatatactttttaagcttttaaattcattgctcctacgtaataccctttcaaagtcatgagtcatattatataggtttacatccaaaggaaatatcctcctaatatcaaatttatagtagatgaagctaattaaattattaatcccatcggctttatctataaacatgaaaaatcattatgatggtgtatttagataaggttttcattaaaaaaagaacgtttaaagaaattacaatattaagatacaattcattctaatttcattatattcactaacccatttttacgtaaattgtctatacgaataacatttaacaattcgagcaaactactcaagacgccgaaaggcttcaatcctttggttaaataaatgtagcagaaaaactcctgaacaggcaccaggagtttttctttcttttaagctgcatatgatatacatgtttagttaacaatttcttcttaagtatgcttcccgattcctctatattaaaataaatctatatggaacaacccgataataagatccatataataatattatatttctttgtcttttgtcatttacttaccatatcttcataaagatatggttttttgggatcaatccatataaaacaaaaaaggacagataaacttaattctgccctttttattctcaacaaataaattaatatccactaaatcctgtacaagaacaacctacaatgacaagtaaaataaatagaataacaattaatgaaaatgccattaactataacacctcctacttttacatcagaggattaattaataagaagacttgaaacatgagcaacctacaataattaataaaataaataaaacgagaattaaagccaaactaaaaccggatccaccataactagatccaccgtagccacagccaccataattgtttccaccccaacacatcaataactcacctccactaaatactaagaaaaattaatctctactctaaggtatgtccttaaagctaaattcgattggacaaacacattaataggcataaaaataaattttatgcctatcgtcattattattgtgtatataaaaattatgatgaaaaagcctgttattataaagaagatgctatcttagaaagtataatataaagaacataatgattataaaatacatatagtattcatgtaatagctcacacaaacttatctataagccatattctttaaaactcgaggatatggccttcgttaaaaaatatacgtatttaacaatatttattttaaatatctgtttccaatagatttatttaatttaggctatgttgacgatcattaaacaaagacctgttacttaggcggtgttagtaacagatcctgtaaaggaaatatgaaataggatttccttatacgccgccaagatatcctacgtaaaattagtgaaacaacttatactaatgtctataaaatcattaaaaatataaattatttatccataaaaaataacgccagcacttatccaaaccctttttattactttacataccataatgttgagcaacctccttgctcttccaatagatcctgagttcctatattgctactatcttaaagaaaaaactgctgcctagtgataaacattagttttttctgttttaacgatttctaattttcatagaaggagcaaaaatcgtccaagcttttttcattaaattacatatcataattatatatcttgtcttacgaagggaagtgatgatatgtctttggaacatcattttcgtggaaattgctatcgccattgcaatgtaatatttgtgacattcaatcaaacaactggcagagtgatccttattagtccttccataggcacaattcctccagcttgtgaaaatgacacatccatccaagatcttaccgtgtgcttattgaaagacggctatacaattcaagcattctatcaggaaacctttgtcttctcaaaatgtaaaagctactatgatacaaaataggaaatgaataaaactctatagcccgggcaaactactcgagaagtcttctaagacttcacccacaacttattttcatctatcagtagaaaaaacgcccttccgcctgggagtttttttatttttaagtatatactctcactatatcaatgaaagtaaataaaatttttataatatcagcacttgtccaaacacttgtaattactttatatatcataaattatgtattgacaccttctatctctccctat

SEQ ID NO: 149 - DNA, 4102 bp, Priestia aryabhattai
  source 1..4102: mol_type = genomic DNA
aaatggaacggtcattgtgaatccagacggcacctacacgtatacgccaaatgaaaattacaatgggatagatagcttcagtgtagtagtaagtgacggccaggaagaaacggcagtttctacaatcacgattacgattctgccagtaaatgatccgccagtagggccagatgttattacggttactacatttgaaaaaactccagttacaggccaaatcgtagcaactgatccagatggagaccctctaatatacaccttacaagatctaccgactaatggaacagcgataatcaatcaagaaggattgttcacttatataccaaatgagaattttgctggaaacgatacgttcactgtacgtatagctgatccaactggacaatttattattactaatgtatttgttgttgttataccagttgaacagccacctactgtaccgaattattcaattactactcctgaaaatcaatccgtaatcagccaggtagtaggaaccgatccgaatggggacccactcacttatcgtttaggaacctctccagtaaatgggaacgttatagtaaatgaagatggaagttttgtatatttaccaaattctaattatgtaggtccagatttatttactgttattgtagaagattcaacaggtcttacagcagtgtctattgtaaatgttacagttattgatatgaatgatgcgccagttacgagtgatgttattcttcagactatagaaaacgtagcaatcaatgggcaagtgttcgctacagatccagatgataatttactcactttcagtttatctggtactccctttaacggcacagctgtggtaaatgcagatggaacatttttatatacaccaaaccttaattttgttggcttggattcttttacagtagaggtaagggatagtcgtggagctagtgcacaatctcttgtgactataagtgtaattcgagtaaatcaaccacctctcgttatagatttatcaatttcgactgtacagggacagtttgtaacagggcaaattcctgcctttgatcctgaaggtgatctactagtatatgggctgagtttagcgccacttaatggtaccgccattattaatgcagatggcacctttacctatacgccgaacccaagttttgtaggaatagattcattctctgtttttgccagagatactcttggaaaccaagggtttggaactattaccgtggaagtgcagtcacaagatttaccgattagtgctgaagggcttactttaactactttagcaaatcaacctgtaagtggatctattgccactgtgaatccagcgggctttccgttaagttatgctgtagccatttccccatcaaatggaaccgttgtgttaaatcaagagggtgctttagtttacacaccaaatcctggattcaccggagaagatgtctttagtatcgttgttagagattcatctggaaaccaaagtattgctaacgctgttgtgacagtagtagtaggagacagaatttcagttgttaatagtgaaataactactttattcaatgcaccagtttctgggcaaataagtgctacaaatttgagtggaaatcagttgttttatacacttacgtctaatcctattaatggatctgtcttagttaacccagatggcacatttagttatacaccaaatgctggattctttggaacagatcaattccaagtgcttgtaagtgatgttctaggtaatacagctgttgcaactgtttccattgttacggaaggaccggtagaaagggcacccattgtgtctgatcaaaccttgactacaattgaagaacagccagtgtcaggggcagtgcaggcagttgatcctcaaggtgaagcattaacctatacgttacttggcacaccaccaaatggaatagtcgtattaaatccggatggcacctttacgtatacaccaaattcaggatttgtgggaactgagtcatttacagtggctgttcagaaccaaactggtttaaacgccacagctaccatacaagtgactgttaccccactagtaaatcaaattatagtgacaaatacgacggttcgaacagagggaaatcagtcagtaaacgatcaagtatcagctcgcgatcagttaaacaggccgttaacctacatgcttaacactcctccattatacggaacagcaattgtgaaccaagatggaacttttatctatacaccaactccaggtgtaagcggtattgatcagtttgatgtgcttattcagaatgatcagggagaccaagcaattgcaccggttattgtaataataaatccagcccagagaactattacactagaggatgtcacagtgcaaacccaacaaaatgtgagtgtctcagggacagtaatagctaccgattctcttggaagacctcttcgcttttcattgaacctgccacctttaaatggaacagttagaataaatccagatggcacattcacatacaccccgaaccctcagttttttggaatagactcttttaccgtacttgtccaaaacgatcgaggaaattcagccattggaattgttcgagtagtggttcaagaaaatcaagatattattacagttactcctcttacagtgagagggcaagcaaaccaaccggttacagggcaagttacagcaaccgacacactaggaaggccgttaacatatcaagtaaataatttaccttcaaatggaacaattgttttcaatgcgaatggtacatttatttatacacccaatatgggctttaccggtattgactcctttaccgtacttgttcaaaatgatttgggtcagtttgcaacgagcagtgtgaacgttgtagttgaaggaataaataatacgattagtacacaggatcaggaattgacaattccaacaggtcaaattattggaagtcaaattattgcggttgatgcattaggaagacccctcacctacacagtggtaacgccgcctgcaaacggtgtagtgattttaaatacagacggcacattcacctatacttcaaacttagggtttgtcggtcaagatcagtttgttgttgttgtaaggaatgacactgggcaagaggcattctcagttgtgacggttaatttaactccaagtaataatgtcattacaccgggcagtaatacgtttactactcttcaggggatacaggtgattgacagcgtgcaagcaacggatctattacaaagaccattaaattacacattgactactaaaccggctaatggcaatataacccttgatgcttctgggaggtttgtatatcaaccaaactccagatttataggaacagattcctttacagtagtagtaagagacgatttaggtacagaaactattgtgccagttacagttatagtaagcaggttacctcagcctcctatcatagcagcccaaacatttagattgttagttaatactattgcaacaggacgaattatcgccacagatccaaattctctacaattgttttatcaagtggttcaaaatccacacaacgggcagttgttggttgaccgaataacgggtgaatttatttatgttcctaaccctaattttgtaggaacggacactgctgtcgtgcgtgtaacaaatacggatgggttatcaagtgaagctacggttacatttactgtagaaaggacgcctgcacctacacccccaattagccgtccggtcaatgatttaaagaaaagaaagcgtcttaaaaagaaaaaacgcaaacgaaagaatgactgctctaaaatgaaaaaagagaaatcacaggatgattgttctgaaacgagaaaagagaaatcacgggatcattgttctaaaaagagaaaaaataagatttagaaactgatcctttgattgccaataacgtaattcacggttctctaatttcataaaataaaaacaccttacaattaataactaactttgaatgtaaaggtgttttttagtgaaaaagaagaaatcaagacttaaaagtattatcaaaaataaatacaaaaatacatttagaaaaagaaattagtatgtaaacaataatgtagaactcta

SEQ ID NO: 150 - DNA, 4038 bp, Priestia aryabhattai
  source 1..4038: mol_type = genomic DNA
gagaaagcagcacagatactgaaattacttggagataagacaagattgtctatgatgaagttattacagaacaacgagtgctgtgtttgtgaattagttgaaatttataaggccagccaaccatctattagccaacacttacgtaaactaaaagatattgaacttgtaagggaaaaacgaaaaggacaatggattttctattcattaaataaagaaaacaattattatcagtttgtccttgatatacttgaatctttaccaagccaagatgaacatttaaaagaactcgaaaagcaaggattacgtattagttgttgctaatagtaggaggtttataaagtggtatcagttatagtagcctccctcatcttcttagtgacattgatttttgtcatttggcaaccaaagaacttatctattggttggtcagcatgtggaggcgcagttttagctcttttagcaggtgttgttgatttccatgatgttctcgctgtaacaggtatcgtatggaatgcaacattaacgtttattgcggttattattatttccttaattttagacgaaattggattttttgagtgggcagctttacatatggcgcgagctgcgggaggaaatggaattcgaatgtttgtctatgtctcccttctaggtgcagttgtagcagcattatttgccaacgatggagcagcattgattttaacacctatcgtacttgcaatggtacgtgcactgaaatttgaagataaaatggtctttccatttattatcgcaagtggatttattgcggatacaacgtctcttccacttgtggtaagtaacttagtgaatattgtatcggctgatttctttggtattcgtttttcagagtttgctttacgtatgatcattccagatttattttcactattagcgagtattatcgtcttatatttatactttcgtaaaagtatccctaagaaatacaatctggaagatttacagaaacccatcaatgccattaaagatgagaaaatgttccgtttatcaggaatcgtcctaatcattttagttcttggttactttattggtgaattttttgatattccagtgtctattattgcagggattattgctattttcttcttaggaatagcgagacaaagctctgtagtacaaacgaaaaaagtcttgcaaggggctccctgggctattgtgttcttttccattggtatgtatgtcgttgtctatggattacgtaatgtcgggttaaccgaagtattagcaagcctaattcaagcaactgctgaccatggattgtttgctgcaacaattggtatgggattcattgcagccattctttcatcgattatgaacaacatgccaaccgttatgattgatgcgctagctattgacgcaactcacgcaacaggcacaataaaagaagctttgatttatgccaatgtcgttggttcagatttagggccgaaaattacgccgattggttctcttgcaacgcttttatggcttcatgttctttctacaaagggagtcaaaatttcttggggaacttactttaaaacaggaatcatcctaaccattccaacacttttcattacacttgttggtttatgtatttggttacttattatttcataacacatcaaaaggagattttacacatgtcgaaaaaaacactttattttttatgcacaggtaactcttgccgtagccaaatggctgaaggatgggcaaagaaatatctaagtaatgatgaatgggatgtacgtagcgcaggattagaagctcatggattaaatccgaatgctgtaaaggcgatgaaagaagcaggcgttgatatttcaaaccaaacatctgatgtcattgatcctgaaattttaaataatgcagatttggtggttacattatgcggtcatgcagcagatcactgtccagtgactcctcctcatgttaaacgtgaacattggggatttgatgatccagcaaaggctgaaggaacggatgaagagaaatgggcatttttccaacgtgtacgtgacgaaatcagtgaacgtattcaacgtttcgcagaaacaggtaaatagttaattaagaagcagcctattaatgtttaggctgctttatttcttcctagaatttgttttatggtaactaaatgtttataagatatacagttgtaaagtagcaaaacaacaaggattttaaagtattggatagatgccttatggcgtcttgtttagtttgttgttggtaggaaaacttattcgttgttggctaatgtacattatgttaattaagtttgtaaatcccataaaagaagaagaccttattaaaggtcttcttttatagaatttaagattatatataaagcttttgaagcactatcgatatcatcatacggtgaaacatttccatcaacaagggtagttaattgaaagctttgagatcctttagaataaactaattcaattaatccaggtataacatgggtaatcgtgctatcttcatattgaattagcgtactaagcatttttttaatttccgttatactcataaatagatgtgccccttcctattatgaggaaacttcaggtacaaagagaccaaataatttatttgttctctcccccacactaacatatcgatatggataaaaatacctttgtaatgaaattgttatctttattcctacattggaactacattatggtaaacagatataagaacaaaaggatttttactttttaaaatagaatagttcgttaaaagattataaaggggttgattttatttctagacaaatgaaagatataaacgaaataaagcttttagattctcaaattcacttgtgtgatgagattagaaagttgttaagaaaaaaagaaagaagacatctcccttttccacaagagtatacagagcatgatatcgtacacattgctttaaacagattaatgagtgagttaatctccagacattaaatatatctatttgagagtatatttaaaaaaacagaaaaacctatctcttcccagtcaaaagaggcaggtttttctgttacgtaattgggtttcatgagtgatgcttcattgcatcttgagtagtttgcgcaatttactgtttatgattcggtctataattatcaaaaaaaagaaacattctttaaaaaagagtgcttcttgaaaattcaatccagctcaatactatacccttatcatagaaaccaaaacacattttataaaaaatatgttttggtacttataatgaacttttctggttttaaagattcatttcaaatagagctttaaagccagaaaagttcatgtgaggaaaaaaataattagtgtttttttagaattattattttagcaactttgtttagatgcttttctgattcctctaaccgtttttgagtgttgactatagagttttgaatagataaaggtgcaaggactttactacttttcacttctgtacatactaggtgacctataccatctttccattgggtcgtacatttaaaattcccaaataacttgtttcttgtctgtaaaatgagctgttttgttataggatgagaattaggactctttgaaaacattactatggctttatttcggtcttctttataaatgatcgtccatatattcgatgtaggaggaaaatatgaatgggttatgtgtgaaacatttagaattgtacctgcctgattgatttgaaaataaggaacaggaagccatttagttctactagtatccatgttctaacgcctttacattaattaatggatctttatacttacgatatcatatctaagtgatttttgtatgtatttagaatcgtgattatgttaactaaaaacagaaattttatggtattggatagacggatccagtatagtacccgtagtcactaacgtatatcccttctttgtatgctatcaatatacttaattcccctttatctaaattgataaccaactaaaggaaatattcccaaaaaataatcccttaccatatcagcaaaggattttcaaat

SEQ ID NO: 151 - DNA, 3999 bp, Priestia aryabhattai
  source 1..3999: mol_type = genomic DNA
acgttctttttaactgcctccactcttatttctaagatattaggttttatctacatcattccctttactgcattagtaggtaactcgggctatgcattatataagtacgcctatggcccctacacattaatgttgagtatctctaccatgggcctcccacttgctgtttccaaatttgtatcaaagtacaatggaatgggaaattatcgtgcaggacaagatttattaaagtttggactttatttcatgatttttacagggatgttatccagcattattctatattcacttgcaccctttttggcagaaatggtcataagtaaacatgattcaacaggaaataaactagaagacgttatatatgtgatcaggttagtaagttttgctcttctaattgtccctccaatgagtctcttgagaggatactttcaaggaaatcaatcgatgggaccctctgctctaagtacgattttagaacaagtggtaagagtaatttttatcgttctgggtgcttatattgttattaaatttggtcatagtgtgacagaagctgtaggcattggtacatttggagcatttgttggggccatagctggcttaggttttctaacatttatttatcataagcgccgcagcctaataaaaaagcaagtaacagacagcgattctaatcaaagaatcaagcctttaccaatgtttaaagagttaattagctatgctatcccctttgtccttgttggactagcaatacctatttatcaaaacattgatacatttacaattaacgtattatttcaatctatagggtacaaacaagatcaagctgagagtattaattcagtaattggccttgctcagatattagttatggtccctgtatctctagccactgcatttgggatgtctttgcttccaggcattacttcttcttacgtaaaaggcaatttaaaagaagttaaagaaaagatgaataaaacatttcaaatcttaatgttctttacgttacctgcagccattggtctatgtttactagggaagcctatctatatcatgatttttggtatgaaaaatagtccggttttaggtggcgttatccttcaatggtatgctccaatggccatcttatttgctttatttacagtaactgcttctattcttcaaggtatcaaccaacagaagaaagtgattatcggcatgtttttaggaattgttattaaacttattttaaactttcttttactcactaactttaaagaaattggtcccgttcttgctacatacggaggatacatggtttcggttttatataatttctacctcataaaaaaagcaattaattacaagctattccctttagtaagagcacttgctttacctgtctcattggtaatcgtgatgtcaatagtcgtattaatagcaaattatcttgtaacgacttatttagcaacaaaacttagtatgtatcatctagctattactacgtctctattctgtgtctttgtggggggaattgtatatataggaatgagtttgaaaacaaaaatgttaagagaggtcttggtaagaaggaaaaatgcataaacaagcgtctctgaaaggaaagaataatgaataaaataaaaaaggttttggtgttatttttagctattcttatatcaaccattatagtactctctgtgatctttattaactgggagcatatctttggtgacactagacctatagcaaatgctaaagcaatgtaccaattagaatttaaagataaagatatagctgaaacgacagatgttgataataacattatgtatgtagtacctaaaggacatttagatacgtacatcgaaatgatgaaaaagaaagggtacaccttaacagaaaaagacgataaacatcacacacttttaataaaaaaaggaaatactttcacagagatctcttataagagtcttacttctagatataccttaataagtagtccatttttaaaggaagtttaactatttgctagcacaaaagtaaaaaaatgtaattccatagaataataggagtgttatatgaagtacgtagatgttgttacagaaagtaaaataagaggtatctctttagctcttcttcttatttttatgagcttagggtggtatttaaatagttctgtgtggtacgaagcagccatacttgttgtctccattgcttttatactacatgctgtaaactattatttaactacacgaaataaagcaacaggaattactgcaatagcagcaagttcaggatttggtttatataatttattaagtatctttttttaaaagtattgtgattttctatatttgcaagaaatgaggaagttttatgttaaagaaaattataaggtgttatgattacaagttcatcgcagctttagtcgttctatgccttattggtttggtaatggtctacagtgcaagcatggtaacggctattagtcgatatggagtagcaggagattacttttatcaaaagcaaaaacttgctcttatagcaggatttttctttttttgtgtgacagcttttatcccttataaaatatatcaagaaaaaaaaatattaaaaatcttattagtaactgtcattgcccttttggctttggtccttgtttttggacatacagcaggaaatgcaacaagttggcttgtacttgggccaattagggtacaaccattggagttgaccaaactcacgattatcgtatatttagcagctgtctttacaaacaagcaagagtatatcaatgatttaaagcgttctattattccacctattgtcattgtgctttttatttgtttcttaattgcgatgcagcctgactatggtggtattctccttatattgggtattgttgcagcgatcgtcttgtgttcaggcatctcaagaaaatcgatgataaagattgccttactaggagtaataggcgttattgttatgttatttgttttattagtaacagggcatatcgataccgtattctctcctgttcgtttggcccgttttacagggtttttacatccttttagagatcaacaaggcgatgggtatcaacttgttaattcttacttatctataggtactggtggactgcaaggtcaaggactgggacaaggtattcaaaaagctggttatcttcccgaatcacatacagattttattatggctgtaattgcggaggaattaggtttttggggagtgcttcttgtcttagccttactattcttcattattttgcaagggttaaaaatagcaagaaggtgtaacgatccatttggagcattattagctataggtatttcagttatgattggtattcaagcgtttgttaaccttggagcagtaacaggtattcttcctatcacaggtgtaacattaccttttgtaagctttggtggttcttctctcacattattgatgttagcaatgggagtactaacaaatatctcaatgtttactaattacgaaagaaaatacaaaaataaaacaactaaacaaaatcagttaaaaagtgtttaaagttatatggaatgacacacaaagaaacaacaagaagcaagcacagcgtgcttgcttcttgttgttttctataaaatctattaggaggaaattatatgaagaagttctttgaaagttctttgaaagtgctttaaaggtttcaatagcctctttagttacttcaataatcttgtatgtagttataattgggttctttcttttatcagttgttacagcaaatgtttttggtactgtgattaagattattgtgcctattttaactttagttacaatactcgggtttattattctttctttatcaaaggtaaacagaaaatcccttttttaacattacattttatttccttatgtgctctttcgtttggtatctatcttgctgtcagttttcaagggtttgcgccttgataaatattcacataaaaaaagaaccctttgctcatataggcaaagggtttt

SEQ ID NO: 152 - DNA, 3839 bp, Priestia aryabhattai
  source 1..3839: mol_type = genomic DNA
gagaagagagattaggatatggttagaaatgaaatactttaagatttacttaacgaaaaacgtaatttcggtacaaaaaaatctctaaggtatatatcctagagattttttattatttagactttagaaattccgtttaaaaaagctaagagaaaggtaataaaaaaattttttgcttgtatatcagacacacatttagattaaaaattaaaaacccctattaaccatatgctaaaggggtccttacttattgtttaaacttcaaatatgaagttcttatagaagaatacaataaatatgaatatatttcaagccaacccaattgtttatctacttgttgctactattaataggttgatctatagattgttggggctcaaatagagaggttttaataccgattaaagacgccacaatcgtaaggatgcctgctaaaataaaaattaaagagacgctaatatattcagctgcaacacctgctaacattccactaattggtaaagccgaaaaagctaacatacgcgttgagctaattactcttcctaataaggctgatggtacaatctcttgcctaagggtaaaccaattaattgccagtaatgttacagaaccgacaattaaaattctacataatatcaacaaaataaccgcagtgtttgaaaaggtaaggatagtttgtcctaaacctattatcactccacaatagataattatatttcctcgcggtaatttgtttagtttatttgcagcatagattgctacaaatgaacctaaggtttgtagggaaaatatcaagccaatatactgtgccgataaatgtagattatcctttagatgaaacataaataatgcttccatagcaccataacccacattaatcaagaatatgagaatagttcctatcaaaatttttttagtatttataacgtatttaactccttctgctatcgaattcattatagaactattaactggattcttgcttttatatttcttagttattaagctaatgaatattccagaaagaaaatacgtaaaaaaattaaaatatagtaagttatgagttccaaccaaagcaattaaaatacctgctattgaagggccagcaagggttgtaattgtctctgataatttaaataaagagttaccctgtattaaattttcaccttctaaaatttctggtatgactgattcaaaacttggatggtaaaatgcactgacagctgatattaaaaaagctaccacatatacaatccatatatctaaaacgtttactgaagctgcaagaggtatgataataattaaaatggctgataaaatatcacctagtaataaaatgtatttcttacttatgcgatcagctaaggctccgcctaacaaactaaataatacttgaggcgtaatttctaaaacaaatgttaatgccattaaacttggtgatttagtcaaatcatatactaataaaggcaatgcgatttgaaaaaaagacgtgcccaacttacttgttgtggcactcaaaaataagcataaaaaatctctattctttaatacttcataagatttcaatatttatccccccataattattatttacctactgttacaggggcggaatggcaaactggacaatcctctttcttattccactctgaaatagggtaagtttgatatgtaaggaaatttaattccatcatttttcctaatgatattggagtctgaatgcctgttactaaccctaaaaattcatttacaatagcaccagccaacatagctacattgggactaatcgcagcattatttctttgaaaattcacctgatgcatactgtcaagttgcttattaactataacatcactttctattatggttcgtttatgacactctacacacccagtttttccaggtaacatagaataaaatctgccccttgtatttaggactccaccagaaaccaatggctttcctaacttcactacagcttcatttacccaatcctgtatatgaagggttggtttatcggccacacaaattacataatcactaccttcaatatgtttcattacatcttcagcacattctatacgtttgttagtaacatttaaattaacattgggattaaagctcgatattctttcctctgctaattccgtttttaacttattaatatctttttcagaatataacaactgtctattaaaattacttaattccaaagtatcaaaatctagtgcattaatgttatgaaaacctaatgcagatagatgatatagtatttgactacctaaacctccgattccgagcaaagcaaccttagtgtttataatagtttcttgcacattgtacttgttgtcctctaaagacgtaaaaagcgaaaagtaattaaggtttgctttatatctttcgagttcgtaatctcctatagattgaggatttaaagaattatcttctaaatatttctctgtatctaatgcctttatcccatctaaaacctcattttcttttatgtttggatacttttcttgaactaaatgtactatttcttctatagaattttttccgttgataagagaaattaaatacttaatacttccattggaatcttcaataactcctgctactccatcttcttcaccaatatggatttcatcatttataaaaaatacaggaattgtctctttgaacttaggtttcattttctccatttcactccatttctcttaattattgaaatagggaactatcatatgatagttccctatatttacagactagaagtttaaacaataagtaagtagttcaaataattatagcgttttagcctggaataccgtttaatacagcagctttattagttgtttttttaacttttactttcataactaacacctccatttcttaaaagatacatttataatattgcattaaaaaggaattttcaacaaataaacccaatttttataatattcaaacaaaaacaggtaaataatccttttcttcgtttgttttaaactttcaaatattccatttataatattttttcttgcatataaaaccagcatagatgagtaatccaggtttccgaagttttccattgagtagatattcttctaacttgtgattccgttaataactcatcatactcatacatctctcctaccactttacgtataattaaatctcctgcaggtagaatgtcttgacgccctatacctctcattagtattgactctgccgtccattttcctattcctctatgttgcattaaatagctacaaccctcgtcacggtccaataaatataagcaacttaagtctaactcccgatttataatggctttagttatttcatgaatatattcagattttctttgacttagctttagggcacgaagttggtttatatttaactccatcaccttatgggggcataaatctgtataatattcacagttattaattattattttagcacctgttttttctaataaactctttttaatcccgtgagcaacttttgcactaatttgttgaccgatgattgcccatatagtggattcgtagacacttcctaataaaacaggtctaaacccttcgtacatttttattaattttcctatcttagattcattagctataaacttttgagatttgtctatatcttgttccagacaaaatattgtgataattttctcctttactagttgaacatgattatttttaacttcttcaccaataacgttaacttccaagtacttactatcgattccttcgtccctaactaatactaggtacattcttccctctattacaaaagctctacaatatgtgttttcaataacc

SEQ ID NO: 153 - DNA, 3579 bp, Priestia aryabhattai
  source 1..3579: mol_type = genomic DNA
tggatttttgttctttgaggtattaagcagaagaagtaaggacttaatggaaaatagggcgcagtctacttctctaatggtccagtttattaggaatatgacaacagtttatgcattgaacaaaactcagtattttttaaatttttttcaaggtacatataaaagacagctggattctcaactgagagaatctaaagctataaattacaacaatagttgtagagctttaatatataattcttttacaataattatcttatgggtcggaacgagacaagttttaaatgaatcgatgactttaggtacattgttgcttattaattcattagccctgttcttactttcttctattgatagagttataggcatgcaatctgaatttcaaaaagcaatggttgcttcagaacgttttttaggtattataaactaccctgtgataaaaagtaacaataatgaaaaaatagaagaaatctcaaagatagaatttcgaaactttcaatttagctatgataattttgagaatataattgaaaatcttaatcttactataaataaatatgatcgtatattattgactggagatagtggagtcggaaaaagtactttagtcaaatgtttaacaaaactctacaaaacgaaaaatcaacaaatttttgtgaataaccttgatataaatgtactggactctaattcaataagaaaaaagattttgtatctgaatgaaaatccatttttatttaaaggcacaattgaggaaaacctttgtatgggtgaaaagttcagtagtgaagatttgatgaatgtctgttcaattacagattctttaaagtttatttcaaagttaccaggaacaatgaaattcaaactgaatgagaatgcgtcaaatttatctacagggcaaaagcaaaggttagcgttagccagagcccttcttcacaaaccacaattattaattttggatgagtctcttagtaacgtagatgaaagtagtctgataaatatacagaaaaaattaaatgatttagatatgacctttatttttatagctcataataaagatgctatcctaaattgcaatcgagagcttgtatttgaagaaaaaaaaattagagaaaattatctgatccacaatgaagttttgagaaagcagggagtttaactatgaaaaaatggatattttcatttgttatattaattgcatgtgcgagtgttttagtatttgtgttttcatcaaccggacaagataaaccattgtacactaacatagaccttaaggaatatgaaaagaatgttcagtctaaagatgaatttttagtttatgtatatcaaacaagttgtccagcatgtcaaaagacccgtccagtattgaataagcttattgaagaaaaaaacacaaaagtattagctataaatgtagaagatgaaaaaaattttgatacggctttcttgaaagagtataagcttaataaaacacctgcctttgtttactacgaacatggtgaagaaaaagaaagattagtagggtttcactcagcttcagaattagaaaaattcattatacgttaagaggtatgtttaattatgaaattaaaagatttgtataaaggattaaatttaaatcatgagaaatccactttattagaggatttagatttaatttatgatttcaattattacgaagaactaaatattgatataactacagatctggatttattagtttatgaatatcacaaatctccctttcctacagtaacatgcgggattattacttataatgaagtacgatgtatcgagaagtgtttgacaagcgtgtataaccactttgatgagttaattgttgttgattctttatctgaagatggtactgtacaaattattcaagataactttccaaaagttaaagtttttgaagagccatggagaaatgatttctcttatcagagaaataaagtcataagtctttctaatagtgattggatatattttatagatgcagataattactatagagaatcaaatgcatataaggctaagagaattgctaaattagtaactttcttaaatttaaactgcgttgtaagcccaataattcatgagcatagtgggcattgctattatgatactcgcaggttctttcccctggacaaagaaatcctctttactggtaatgttcatgaggaacccactctgggaaatggatcaatacctttaaatttaaaagtagaaattcatgtagatcatgacggatataatccggagttagtagaccaaactgataaaagtaaacgaaatattaaattaactctagagatgttaaaaaaagacagaaataaccctaaatggctgtatttctatgccagagaagttattcaaactactaatgattctgagttagcaaaaaatttattagataaagctttacagttacaaaaatcttttcatgacaatagatatcaccttgatatacttttattattatgtgaaatatccctgaagaataataagttgcaggaattattctactatgtatctgttttagaaaagaacttccccttatgtacggacattgaatattttaaaacagctattttatttgtggatatacaaagtaaagttaaaattttagcagattctctaacgaaggcaataaagagtgatgaaggtaagtcattcagtggaatcaattcaactaacgatcatctgagatatatgttagtaaagatgcatatgtgtttagaagaatatgaatcagcatacgacgtttttgatgatattaggtctgctgaattgaaggaaataatttcatcgaagatacatcaactaaatcaaaaaataactatttaaaagtcttgagaggaagaagagatgaaaaaattaacgttgggacaagttctagtttcatcctttattatttctattatgtcggtaattattagcttgtactatagtgaagtagtaaagttagctccatgtgagctatgctggtaccagagaatttttatgtatccactacctttattatgtataatggcaatgattagtaaagataataaatctataaactatattagagttttttctatagtaggggcactcatagctttgtatcagtatatattgcaagtttcagatacaaaaagtagcttttgtggaataggagctaattgtgcagacattcaaattcaatacttaggttttatcactattcctttgttatcattttttgcctttatagctatattcgttataaccatgctttcaacagctaagacattgaacgaaaaaaaataactataattcctctagcaaattcaattttacaaatattataatttaattctaaaatccatcttcctacttaaccaaagaagaatggaagtgaaaaacaacctcaatacatttatacgaaaagattccttcctaaaaaagaagaaatcttttttgtttttacactatatttttaaacagcatttttataaagatatcttacttataattaatgttccattaaacatatcataattgcttataaaatcaatttttaaattgtttagtatatgtataaaaggtgtgttt

SEQ ID NO: 154 - DNA, 3463 bp, Priestia aryabhattai
  source 1..3463: mol_type = genomic DNA
caggttcgagtcctacctgtggagccatatcatattggcccgttggtcaagcggttaagacaccgccctttcacggcggtaacacgggttcgaatcccgtacgggtcatcttaaaagcagtttgcatatgcaaactgcttttttatttgtagtagataaattattgattttaatatagaatttatatcgtttcatagcaaaaatgttaattagaaaattttttgctattagagtaacaaataggaagtgtattcttatattcagattcgtctataccaaatgtttatctacttacttctaatttaaacaacaactctttctggaacactctacaaaaaagaacccttgtggcagtaagggtttcaagtgattcataaaggtgatctctccatatctgcgtaaacaaagagtctataacaagtgcatcttatatatatgcttgtcttcatagatatactaaaaatgctcaacgattctgatacttatctaaaattgaactgattgccttctttttatttctaggtagtggtttcttatgagaagccttaggcaatttcaacttggattcataacctgtttctatggtagataactcctcttttaccttctgttgtgcttcaattttttcttcaatagtatttaatcgggtagaataataaggcattcctgataaaatcgttgttacctttgcatgatcactttcataggttccttcaaatagatgggtgggttccccccccttaaaggaactaaatagttgggctgaatctatcgtaaataagtctagtggaccttcatatataattcctgcttttggtatagtttgcatttcaagtggtgcaaagattgagttttcccatgattttttaattacttctgtaataccctcattactaatatctgcttgcccttcatctaattttgttatttctgcagatgaaatagcagaaattccttttgttgaaaaaattgtacgtaagtctttcttatctaaaacaccatgcttagagtgtctatccgtatatttaggaagagtactaattaagttcacaaatgtttcgtttgtttctttaaagattctagcttttcctgcattcggatttttctttttcacctgctcgttatcaataggtaatacacaaaggtcctgacgtgaaagctcttcagtaacatacagtgcattgacttgatgaaccaatgcttctgtagtatcgggtaagataggaacagctacaattgctttgtcatccatttcctgagcaagaagatccacaagcatcggtccaataccaccaccagagccaccacctgcagaaaaacaaaccataataatttcagtactaggtgttgaaaagttctctttaataaacttcagtgccatttcccagtttttatcgaccataagattaatagcttcatctcgattttttcctactccttcgctacctataagcgttagacgctcttctacaaaatctaatgactccaaatcacgttctgaaaagttcaatgcaacagcattaataccattttcaaatgctaaatcagctatattcccacctgcagcaccaattcctacaatacctatcatatttccttaaccccctcattttcttctccttgaagtatggcctgttgtacagcctgttgaccgtattctgttagatacaatttatgttcttttcctccagtaacagttcctatgaaatggatagcttcaagcttgttgagtgtcttacgaaagttggctgttgaatattcaaactcatctgcaatactacttttctttatcgctttaaacacagcgtttgcttcattctgaaataaccatcccagaatgctaacatcttcaatagtcagtttcctcattacctcctcaaagtagtcactcatatagatactcctttctctaaaatgtacgtcatagatatttaagtagtttattagcttttgttgtcattcagatactttcgatggttttttctatgcaataaaagttcatgtgaatctatataaactcactgattctcattgcgcatcaagtatcactgagtaacaatatcgctacatcactatccatatgtatattagaaaatccttatgacacatttcccagttttgcatcggaatcgtatattttgaattatttgtgacagaactaaaagaataaataactgttaaaagtcatactaaaaaagagcatatacttgttggaaaccaacgggtttatgctcttttgttacttataacacttattatagtagctaactttacatagcaataaaataaaagtttctagagtactgaaacttgcattgaacggccaataacttccattataatccagaaggcatgaggaaatatttaaaatacagctgaaatcaaatagaaagtaaattaatctatcaaaaggattaatttactttctaaagtcccaataatgagaagataatttattaaacttttttatttcatcgtatagacaaagacaagcccgtttttattggcttgtcttgttaaagttgaacgcttcttagttcattctataattgttgtacagcatatagtaacaattcttcaatgtttcgtttgcctaattctttcgctttttgctgcaattcttctttcaaatcgcttgttactttgactcgtactacctccaaatcgctatcaatgtaaatgccacggctacgcttattaattttacctgagacaagaacagactctaataactccataagttcttgtgaggattcggtcagtaatataggtttgatttcaatcaaaaattgctctttctcttcttgtggcgtaatcctcatattggtcggacttaggtattgataaaataaatccatgagcttataaagatgtgattttgcataagctgtttgcttaaaggcaaacgtagcatagccttctttggtaatcatttttttcgactcaagggtataggctgcttcaaagcctcggctaattaattcctctaatgttaactcctcatgttgttctgtaacagccataatcggatcttctacggagatgatacgggcaagttgctctttttcctcgtctttctttacaaaaagctgaaataaagcaatattttgttcggcatgataaaaatgacgcttactcggtttgcgcccgatttcatgcgtgcgcttaaatgcttctaactcttcttcatggacaaaatagcaattgattccccggtattcttcttggaacgctggtaatagttcttgcttaatatacttattgaccgttgtaacggatatatcgagttgctgcgctacttcttttgtcgtaagtcctggcttttttaattcttcttttaaccgaactacatcctctagatcaaattcgtaacgaccttcgatatgccagtcatctttattaatcggatgtagttttccttgctggatatatgtataaattgttttcttagatgaaatagcta

SEQ ID NO: 155 - DNA, 3459 bp, Priestia aryabhattai
  source 1..3459: mol_type = genomic DNA
cggggatagtttttgcgtctaaaccagtggcgtaagccacactatataaaagcgacttcttgtcgcaccataattcatgttctaggtagttaaaaactccaatttatattaataaattggagtttttacatggaatgtatttataaagtccttataccctctacagctaacatttacatcgttaaagattgggcctctttagtcacccattcgcgatattccttttccgccgtcatatattcgatttcggtaatataaccatcccttttcatttgaattcctctacttgaagcagtatctgcccatataccaatttttgtttcgaaattaaaatctgtacggttggatacctcgtgttgagaggtaacaatgatatcttgaataccaatttctcgaaacatatgagcaagatcatcagcaattgcattgctcatacctgcatcagaatgccattttaaatatgcagagtagaaagaagtcatacttagaggaggatttggttcccatgatatcttctcatgattataatctgctatcaaaatacatccaccaattttggctgcagatttcatcatttccaatgctttcaaaggttcagatagccatattaaaactcgagcacaggtaacaatatcgaattcctctttatagataagattgtaaatatcatctgtctcaaaagttaatcctgggatttcattatgatcttggcgagctttcttaattagatttggattgctatcaattcctataacacgcccacttggtcctactgcttctgctattccacgtgtaattgcccctgttccacagccaatatcaggaaccgtcatacctttcttaagtatacttgcaagccttttatgggagtatgttagtgaccgggaatttaatacgtttgttaacttccctgctaattcagcccgattacgggcaatattcccttccatatggtagacctcctaattaataaatccctactttttcttaatggcgacaattcgaattcgtttataatcagctacccatggaccatctttatataaattggtatttatttcatttttctctcttggaaaaatcggggaaaaatcgcctacaaaactatctaaccaatgatttaatcccttttcttcatctgttaaagatgtaagtcaatcgaaggaattaccttaacaaactaagtccattccgttaaatattaccttttatttattcaatcggaagtaaagtatcaaccacaacactgtttacagcattgatatacgcaaatgcacttgctttcataatatccgtatctgttgccttggcaatatatttttctcctttatattccactttaatctttacttttcctaatgcttccttacctctggatacactactaatattatattcgatcaatttaacatctaaatcactaatttctgtaatagcagaatacaaagcatcaatcgggccagaaccgactgcactgcttttcaatatttgatcaccctttttaatcttcacacttgcagacgggaaatttgtattactaatcacttgcaagtccattagttcataaaaatgatcactataatgcgtcatatcctgattatgaatatcatttttttcaaaatagttctcaacgatgacatataaatcatgattatatacttcttttttcgcatctgccaattcaaggaaagcttcaaatatcccttcaaattgtatattagtcatctcattaaagcctaatgattcaagggcatttttcaccgcatgacgtccagaacgggcggttaaaacaagttccatatcatctaaaccaacttcaatggggctaatgatttcgtaagcatttcttgcttttaataaaccgtcttggtgtatacctgaagaatgagcaaaagcattatcacctgtaatggctttatttacttgtacttcaagccccattaaactacttaccaacctagatgtattcatgatttctttcgtattaatatttgtgtgcgcgttatagattgatgagcgcgtattaattgccatcacaacttcttctagtgcagcattacctgcacgctcaccaatgccatttatcgtacactcaactttatccgccccattttttattgcagctaacgtattcgcagttgccataccaagatcattatgacaatggacacttaaaagcactttatcattcaaatttttcaagcgatcatttattttaaagattagttcaccaaactcttccggctcggcatagccaactgtatcgggcacattaataatggtagcccctgcctttacaacggcttcaatcgttgtccataaatattcaaaatcggagcgagatgcatcctccgttgaatattgtaaatctggtaaaaatgttttagcatattttactgcatcaacaccgagatctaaaatttgacttttcgatttcccaaacttcttttccacgtgaatatctgaagcacctaaaactatatgaattaaaggttttttagcatatttaacactattataaacagcatcaatatcagcctttactgctcttgctaacgctgtgatgattgtgtcgtctgtatttcctattttcatagcaatttctttcacagcattaaaatcaccagctgaagacgaaggaaaaccagcttcgataatatcgacttttagcttctttagttgctttgctacttctagtttttcatacagattcagcttagcccccggaacttgctcgccatctcttaaagtcgtatcaaacatccaaatttttctcgtcatttcagaaacactcctttgtcatattaatgtataaaaaaagccccgtctctataaaaacatagagacgaggctttgctcgcggtaccactctaattgattaatcattacataattaacccactcattttcggcagctatcaccacctatcttcataacggtagaaaaccgacatcccctacttataatgttcagagagtagctcttggatgagttcaaaggcaataactaccgattctcaccaaccatcggctctctgacaagtttatacatccttctactatttccaatctttgcttattattatttaattacatgcaatactatatctatccacccgatttgtcaatatattttttgaatacaaaaactatttagaatataaaaaatacatctcttagaagtgattaatttataaataaacatctactatttttgagtaacgtttaaggtactttattaaaaataacgttaagtattacataccttgtagaaaaatttattttcgattacgacgataaaaggtggggctgactaaaaggatattctaaacctgtaagaatagggattatcagttgttacttagtcatttcatttactatttactttgctttaagccttaaatatatctcttaaggcttaaagtcttttttatttatattccgtacgcttctagttaa

SEQ ID NO: 156 - DNA, 3391 bp, Priestia aryabhattai
  source 1..3391: mol_type = genomic DNA
cttaagggaattggaaaagctactgtttagggcagtagctttttttattaactagataaattatcttggaagagatagataatttattttatggtttcttagatcttgataacaaaatttcccttgaattaaggtaatgattcataaagactaagttatttctcatagtagtatgcatgacaatttttattaaattaagagttgtattaaccaattatttattctcccctctatatatgtttatagttttttcaaaatacaacggacctccatgcacctgtggggtaaaataatatccttgagcaagattaagtgaattgctttttcttttttatataatttagtacgacttcacgctcatcttcaaataataggtttaaatgattaattttagatataggttgccagaaatatgagtctacaatcgggactttcttttctccagctaatattttaacttcaaaataggtcatgtgaacatcaacattataggtagtagacctattctcgtgtattttttttactatctctacttgataaccggtttgatgccatacttctcgaatacaacaatcttcgagcctttcatatccttcgatagcaccagaaggaacagaccaacgcttgggcatgttgggtttttcttgggagaccattaataattcatctttatcatttaaacaaattattgcaaaaccactacacgtattcactaagatctccccttttaaaaacattataggcgtacaggtgcttcttataaatagaactcaatcaaactcgatgatattcttaagcaagtcctctaaaaaagttacagcgtgagcttaaacacaggatattcctttatttggtaagcgtaactttaaataccacttctgtgtcatctgctacttcagctccttgataaaatgtactatgcgaaacactatgagctataaatctttcccttgtttcaggaattatgacagtataatgagtattctcaaaaaaggaatcgtataattgataatcttgtttacctaaaacagaaaatgaaaacttaatttgatctctcctcttagtcatttttccattattaataattcttttttcaagtcccacttcttctttgctgactgtagacgtagtaagatattttacatcaaatacaacatcattaatgactaattctttcactattaagtcctccttctctatttgtttcctttccttaattcgccaaagattaacaggtcacctcttttctaatatttatcattctataactcatcttaaaaaagaacttttttctctgaaccccaaatatttttgtaatgattttattaaacatctaactaattgactaactaagttgttttacctgagtatgcacaaaaggtgaaaaaagaaggaattctaggaacaaaaatacagtataaaggacgtatagacgaattagagaatattttggaaaatagaaagggaaagagaataaaataacatttgaaaggtgaattctgttgaaagaacgagaacttcaagaagtaactcaacatctagataaattgtttgaagatttaataaatgagaatatcacagaagaggaatttaactatttgtccgatgagctttacaaaagacaaaccagacttagatatgggattgagattgaaaatgggatatattacaggaattatttaagattttaaaactagctaaccaaaaaggccaggttagctttgttagaaacgagataatcatatattaaaatatatgtacattttttatacatggggttggtttagtgggctacctttcgcatgaagtgtacgagaaatctaaagttgccccaacatataaagtagaatgtactaaggatcagtgggagtctagtaaatcgtaccgatttaccccaataaaataaacttaaaaaaagagaagggctgaaccttctctttctgctaccacatctatacttggggatatctttttattcttcattgcaccactgatgtattttgattcgatttcactagcaataatattgatccaaggatacttttctttgaagtcatataaggaacctatatggtcatcatcataatgagtaataattatattctttaactcctttatttcatatcctttttttgagatttctttactaattaaagttaaaaaacctgtataccctgtatcgactaaggttagttcattattcaatataattaggctaggataaatgtggtttttttgtccattaaattcaaattcaattggtaagtctactattttcacttttctccctccatactacccatttgtgaaccgttggataatcgaatatactctacatttattcttcgtctttttctttcttttctaatttttataaattatatcaccgttttttatgttaatttcacatatcaattagatattgaaatcccttttactttttccaaccatgatagtcactctaaaattcatcttaaaatcacattaaaaatagatgaaaatagtagaaatttataaatttagtggtatagtaacagctacataagctctctaagaaagaaactttattataaattagctatattagattaataaagacaggagtaattgtaatgaaaaaattgaccttaatatttgtattaatatttgcaatagctttaccgaatgttgctcaggcaaaaggatttagtggtcatagttctttcagtcacagttcttcgttcagttctcattcaggtaggggcacttattcaagtggcacttatcattctggatataagtctccgtcaagcaacgttacaagaacaccatcatatgctaggtctcacacgacatataaccagaccccgccttcacgagcaaaaagtatactgactcatgctgcagcttttggaacaggtgcgtttttagggcatatgcttcatccatttggtgggaattataacggtgcatatggaaataatccttcaaatggattttcttttttaggaattcttgtagatatacttgtgattttagtcatcatttgggtaattaaaaacatctttacaagaagaagatattaaggagaaatttagaatggaagtactatttaacgaacaagatattgtggatagcatttgtatttatattgctctagaagaaagaattgaacctgaacaggtagaagtagatttggagcttcatccttccctcgggattactgcttctaccttagcattagaacgtacagcgcgattgcatgaacaagacatcattgatgctgttgcagtatatttacaggactatcaccagttcgtcgcaaatcatctacaagttaatttatctttttcagaaaagaatggatttactgcatctattcaagtattaagtaattagtaattaatttttg

SEQ ID NO: 157 - DNA, 3341 bp, Priestia aryabhattai
  source 1..3341: mol_type = genomic DNA
tttctaattaacggacaagaatccaagcatcttattaatccaagaataagatataaaatatgagaaaataacaaaattcacttctccctcggggaatatatcctgaagttcaatagaaaaagagtcataagatactcgtctaaatgctaacttaagtaaattaatgaatcttttatacatttataagtagaaggttcaagtaattaacatttaagttacctaatagtaataacaatgaagaaatcaccagctcagattttgaaaatatgattcttcatttttaggaggaatagatttgaaagatttttcaccaacaatcattcataaacccaataaggttattcgaaaggaagacttaaaagaatatgaaataatcggggacggagcagatggtatagtttatcaactaacatctgatcggtgtattaaatttttttttaaagaagaaacacaacaaagagaattggaagcactgcgtagaggccaatcatctccagtaatgccacgtctttatcaatatggtgcaaactttatagttatggagtatataaaaggattctcactcgcacgatacctaaaaaagcatggacagttaacgaagcctctagttgagaagattttaaacatgttggatgaactaaaaaaattagggttcactagatatgatgcagaaatacgccatgtgttaatcaacgagttaggggatttaaaagttatcgatcataaaagggcttttacttctgaccaacctgtacctgttaaattattgaaaggatttaaaaaactaggattaacagatgagtttttgaaatttgtaagagaaattcgtccatccgtctatgatgaatggaaaaaatataagtaaagatattattatttcattatgcaggtagtagtgaaaggataattcataaaaacaaaagctaatattaatcttttaattttataggatatccttttcactttaatgtaaagtccccataatcaataaagacaattttccctttctttgttaaggctaaattaggtcttactaaatctttaggtcttactccatattgtctaaacctcttttttaaatactttaattggttatcgtaatcttcagttctaggtacggggattgtcatttttttcattatgatccaaccatatcccacttccttaattggacacagatgttcttttaacttagcatgacagtacttatatattatgaattcatttttattacttttaagtcctaactctgacgtggcaacctttaatacatatccattttgaagatcataagtgacccgttcgtatccatatccaattactttataatctaattttagggttctcacagctgctttagtcatccaccctgtattttttgttttatactgcttcatcttcgttatccacaaattaatggactttatatctttatcacgcaaaatagcacttaccacttttcctcctcttttctctaaaggttcgattataataatatatttaaaagaaattttcctattaattcaataaaaatattaatacatctgtgttgagttctaaataggttttgaaattgaactttctcgtttattatgagttattaagaaagggtttaataacttacaaggcaatcgtataagggggtaaagataaaattaacaagctgaagaagttcaaaggaatgtgtaagtaatatagaaactgttctattcatcaatttaaagacatttttatataggggaaagaaggcttacttagaggtaataatagtttagatgaaattaagcttaaactaacattcatattgcttagggaaatacttttactgctgaaaagctggtactcccgtccgcttgtatcatgccagcaatgctacttctcatccctactacaacctgatctcccgcatttaaccaaaaggtttcacttgctgttataattcctggtctttttgctgcaaaagcttcattatctctcccttcagtttctcccttgttggttatgagaaaaactatatctaagttatatggactactattaaaaggtttaaatttaactgaggatgaaagggaatatactccactttctctcgggacaaaagtagaggtatttagatcatattcatttgccaaatcatattgttcagtttgaaaacgaaccttgttagcactgttagcttggagaggaatatctacattattaatagctctaaaagcagaagctcctgctcttacatcgttaacatacggtctatataccccctcataattatgaggaatataataatttttcatttcatcaaccccgtttcctgtatttttatatagtttattcctttatagaaaaagggttagtattcttagcctactataggcaaaaatactaatttgatactcttttcttagcattctctgcaatagcaaacccatcaagctatgataaaagttgttaccgatatcaattgttaaatgtaaaagataaatctcaattggattccttctaatttattatatatacaaaattcctttctttttgtgcttgttcagttataccaaatttctgtaaattcaataaataaattattttttaattcactaagtaagaaaaaaagtatgctctgctttcgaaattcttctatatcttcataaacacttatcttataaggaataaatctgttcttccactttactctcgagcaagagggtctgcatatgcaaaaaccctcttacattattgttatacattatgtttacgttcttttatcatttgaaaaataaactctttgttattttctaagagctcttttgtagttgtattatgactcttggcatgacgagcaaagttagttttactgtaccattggtggcataaaggacaaggtagttcattttcaacctcatagtgagctgacgtccagcgactagaaaaagaagaagagctatttgtagttttttttatatacggtgtattctcatcttgtatagatttttgtattcgtcctgtagttgcagcaaattcgtttgtagtcgttgtgtatagattctcttctaactcttccctgatgagtaaatatccagcttccgacattgatagacctaactcatcacaacgttctcgaaattgctcatatatactttctggcaatcgaatcggtaacactttacttgcttcttttgatcttgattgacgagcatacttatctagctttcccaccttatcacctcgtgtatacaatttgtatacatattcagcacttcgtcctcatgttcctgccatctattcacatacattttgtatacgtcctgtattcgtagatgattttccaataactatggatatga

SEQ ID NO: 158 - DNA, 3281 bp, Priestia aryabhattai
  source 1..3281: mol_type = genomic DNA
ccggaaagagacattatgtcaactagatgtgtatagcatatacagcttaaaaaaccgaaaaaccaacctctgagtcctaaaggttggtttttctgctcttggagaagagattcatgttggatattggatgcttcacggcgtcttgagtagtttgttccaattaatgtactttattcataagagaaaaactatttattacatatatacaaactagtcatcatatattttcaaaggattttcccctagaagatgatgggaggtatttagatgtatgaacatgattttatatttaaaacggtgtacgatttaaacatcaataaaatttaacttcccaaacaaaaaaagctattagaaccataattctaatagctttttttgttcctgtaatgttgattatgttaactacgattgtatatgatatgcagcttaaaaaagagaaaaaaccactggcatatgtcagtggctttttatgttccgttcttataaagaacagatcacgttgactttagtagtttgctcagagtatcaaaatttatccttgtgtttcgaatttcctgtttgaaatttcgcttattcgagttaactgtaaaaaaaattaaaaaatgtttaacatattatctactttgtaatactatatagtagtaataagtaatactgaatactggtgatacagagtactaaaaatataagtgaaataaaaatgggggaaaaacatttggaaaatatcacggaaatgctgaaaggggtgcttgagggttgtgtccttgaaatcatcagccgtggcgaaacttacggctatgaaatcacgcaacaactgcgagaactcggtttcactgatgtggttgaaggcacagtttataccattaccatgcggcttgagaaaaacaatctggtggacatagagaaaaaaacatccactaagggaccgccgagaaaattttacacactcaacttagcagggcaagagcaacttgaaattttttggagaaaatggggtttcatctcaagcaaaattaatgaactcaagactaataaaatcaaaaggagagaagtaaaatgaatttttttgaaaaaattataggaagtctagatgacaagcgggaatggagggcgatggaggcacgggcgaagttacttccaagtgagtactgcaacgcttacaaagctatccaaaaatatatgtggactgccggtggtggcccaaccgattggaaggatagcagtcgtatctttgtcggcattctcgaacttttcgaggaaggagcagcggaaggcaagaaagtcactgatcttacgggcgacgacgtggctgctttctgtgacgacctagtgaaggatgagaaaacttggaaagataagtatcggaaaaagttgaacgataccattggtcgtggctaacgataaaatcctaatgcttggttcaatgaattttataaaatcgagaatacaactccaaacttacaaaagtttgtaaaacaatgtaatttagttaactgatgctttacttcaataaaaagcataaaaggatcttcaatcgaagatcctttttttaataccgataacatgttttatgttaactaaaagtgaacatatatgtgcaactgtagaaaacatcgtgttcatttttttgaacacgatgttttaatgattttttcaatttgtatcttttaatcgcatgactttaccatctatttgagttaaaaacaactttttaaaaagtcttataaacctttatatatcaaggtttatagcaatatataaaaatcttttctcttcttttatttttattatgtactttgttttacaaaaagaagatctctattcaaaaggccttaaaactaatcgttttaaggctttttgcttcttataagagtgattatgttaactaactttgtatatcttatacagcgtaaaaacagaaaaactcccccaatgcgttaaggaagttttctgtgtaaaattcgaataagaaattccgtagatgcctcacggcgtcttgtgtagtttgctctgctaataatgttttattcataaaacttaactagcctagaggatgaatatgacatacatcttaaagaaaaaaaggctaatttcattgtatatatacctatgcttgtccccttttatatacatatcttatttataagggaggtgaattttttggctaaagaaaaatgtctttgtgaagaattggcgaagattcttaaaggtgaagctgagcaaaaaaagaacttatgtaaggtaacaagggagagaaaaaatttaaagcctacaattcttggttatcctacaagttcagatatggtaattgatttagagtttagtttcgaacctgttgctaaaaagggtaaaactttgaatttagcagaacttgtttttttacaagaggaggtaaacccttttcttcaggaaatcaaaaagagtgaacaaatactagttacagctatacacaatcactggttatttgaagaaccgagacttatctatgtacatcttgaatcagttcaaaatccaatagaatttgcaaaagaagttgctcatgctttgaaaaaagcgggagttaaataaacatattcataaaacccatatcttcaaatattcccccccctttgacaaccctctatttcttatattttaaagatataccttattttttatttgaatgttctattaaataagttttggcttgtaccaaattcaatgtttttcatattatatattatcttttatcttttttagggggtgatttcatgtctagacgccgtacctctgatagtcgtcgtacatcttcgaataaaacatcatcaagtaattttatcttagattctttgagacaaggggaccgaattcaagttttttctgctggaacccaaattaatggaactggtacttttatccgtgtacaagatggatttttaacgtggatagatagctcaggtaatattaacacaactagcttggatgctattagtattagcagagcaacttagacaggctttaaaatgtactagataactatgttaacttggcttgtattgatagtatctatttttcaagatagatgttattagtacaagctaattttattgttatatatggcttaattttgggcgtcagcacacgttttaattaccgttataacgtgtaaggtgttttgattatttttataatccatttaagattataacttataataaatgccattatagtttattcaccaaaatgttgttatatcaaggtttatagaattttatcccttcttttatttccgataacactca

SEQ ID NO: 159 - DNA, 3183 bp, Priestia aryabhattai
  source 1..3183: mol_type = genomic DNA
ataaatctttgttattagtttaaattcatatattacttttattaaaagaaaaagataataaggtaatataatacattttcaagatgggaattactccagtaaaaaattctcttatggagataatttgtcaccaaaatacaattaattaataaccattattaaattgaaagataatttaaattaggagtgagaaaatgaaaaaaatagggctgattaagggtttaggcaaatttggacgtgtcacattccctagtgaactacgacgaaccttagggataaaaggcagtgagagttatgtggaaatgtctatagaaaatgaagcaataattatcgaaaaatgtggtgaaagtaaaccctgtgctatcactggtaaggtaagtgataaaaataaagtgtatataggtaatatcgtgctaagctcagaaggagaaaagattttattacaacaattaattgatatgaaaaaacagattgaatgaccattctttcattttcaccttctaggagctacattcctttcaaaatatattggatcggctcttacgttgcaatgccacttgctgctgtattatcttcacacattgatacgctaaggcttcagatgtagacttacatatccctttatacaatttcagggtttatttttaaggtaccataatgtcgcttatccgtattcaataaaaaaagctacctcggagtagaaaacaccataataatatgctaggtaacagatttattacgttaaaagaagccagaaaaattattttttaaaccaattaaaaactttcataaaaataaaaaacggccgttagaaggctgttttttattcccagaaccctgattaagctgattacgataactaaaaatgcatagagtatacaagctgaataaaggcatcatttctgttaaaatacaattataaagtatacatctttatattacatactgacttatcagaaggagagtggaacctatgagtgaaacctgtgttccaactggtgtagaactaaaaaacactggttttggatatacgttgtctttaataggtggtaaatataaaatgattattatgtattgtctagctgaaaataaggttatgcgacataatgagttgaaacgatgtatcggtaccatttcctataaaacgttaagcgttatgttaaaagatcttaagagagatggtcttattatacgtaaggaatttccacaaatacctccaaaagttgagtattcattatctgaacgtggtctttcccttattcccttgttagatatgatgtgtgagtggggggagaaaaacagtttgtcagctttggaggctgtacaacaatagataaaactacttcttataggttttcaataaaattgaaataatcttgggcactttttttcacttcacttgcagaaggttcatattctgctccataaaaagcaaagaacgaacgataatctgcgttgcaatacagagctgtggttttaaacggaaccaatactttttcaagtgtatattgatatcttccattatcactatagtcttcttttttaatccctgcagacacagcaaaagcaactttacgattctttaatttctctcctgttgaaccataggcccatccataagttaaaacatcatccatccatttttttaaaagaggtggacaattaaaccaatatacaggaaactgaaaaactagatttccatgagtttcaatcaatgtttgttctttttccacgtctatgttgccattagggtaagctttatataattcgtgaattgtatatttttctgaatattttttgagttcttctacccagttcttattaataactgacgtttctaagcttggatgtgttacgataacaagagttttcaaaattattcctccttaatattaattacatttcgattataaaactcctacttcagatatgtaagtacgcacttttcgtacaggtacttacctttaggtaagtgtttcctaataagtaatcattacaataacaaccctagagttactaactctagggttgttatgccatagtccagtcctagtaatgcactgtatgagaagtagaaataaaactgaattgtatataaactaaaaataaagtgtcttaataggaggattatgatgaagaatcataatatggcaattgtactagttcatgaaatatacggagttaacgaacatatgaaatatatgaaggagatattatcaaaattagggatagatataatatgtcccaatttattacataaaaaaatttcttatttgtatagagaagaagaatttgcttatgaaaatttcactcaaaatgttggatttgaaaagggagtgcaacaaattaatcaagtcatagccgaactaaaacaacaatataggagagtcggagtcattggatttagtgttggagcaacaatagcatggttatgtggtgaaaataggatatgtgactttgtaataggttgttacggatcacgcatacggaattatgtagatgttgagcctacatgtcctacattacttgtatttgcaaataaagaaaaagcattcgatattcataaactagtagacgtgttaaagaaaaaaagatattcgtttttgcaagtgaaaagttttgaaggatctcatggatttatggatccattttcagataattacaagaaactgtcagctcatctggctttgcaacatataaatgaatttgtacagaagcaattaagtgaaagcttcctataaaattatattatggtgcgacaagatgtcgcttatcggaaacagtataaaaaagagccaaggtctaagggatggctctttttgattaattatatttattcatagctcaatgatgaaatacacgtatgcctgaatgcgccatgaccattcgatattcatttgctgcgtgtgtaacttgatcgtctcgtaaagaattccctgtttgaataacatatttaactccactttgagctgcacgatcaatattatcacggaacggtaaaaaagcatcggatgcataggaaacgttttttaatctttttaaccattcctgtttttcactcttacttagcctagcagggacctcttcaaaacatcttttccattgttcattttctacctcagtaatatcatcattcaaccatccatcaattgcattatttacttccacacgagaaatgccttc

SEQ ID NO: 160 - DNA, 3084 bp, Priestia aryabhattai
  source 1..3084: mol_type = genomic DNA
tcttgtataatggaggttagtttatatcatgaaagatattcaagtcattttactgagttattctaactcaaatgcattacagcaggccttaacgtctttaaatcttattatcaatcgagtaaaagaggtcgtagttatagatatacctgaccttttgttaaaggtagctgattcttttactacgcaagtgaaaatcgaatatgtgaaactaaataacaatgatttgggaagggtattaaataactatattaaagagctatcttgtgaatatgttttatttctttacgaccaagattatttaaattcaaacataacagagatacaattagagttaaacaatgaaaaacaagtgatgacttatcaaagtacaattaaaaatataacaattcaacggcctttttttgtaaagacgtatttcttaaaacaaaatatattttttcaggataacgaagttccttttaaagaagccatattaccttcatggctatctctagttgatcattatcaccttatactagagaataggggtattattagtcagtactctaaagatgcttctacaagtaatgttgagaaaataaaatttatagaaaggtatcagttgaaaatacctaaccatatagctcaaccctccgtagcagtaatggtatcaaattataatatggccaactatgtaggaactgctattaattcatgtttcctacaaaatagtccaccagaacaggtattagtagttgatgatggctcgactgatgagtcttataagattttagaaaaatggatttaccatcctcgatttaaacttttaactaaaaagaatggtggaaaggccagggccttgaatgaattactcccatacattgagacagattttatagttgaactagacgctgatgattggttagaccctgatgcgatttttgttatcagagattatttaaggagcttagcagacgatgttgctgttctctacggtaatttaagagcttggaaacaggtgagtccagggaaagtaaaatacaaaggtattagaaaaggaagccaagtcctcaataaaatagaattgctatcatataagtttcctttaggtcctcgcatctatcgaacattgtctttaaaggagaataaaggatttccaattatagactttgaggatggtcgtatgtatgaagacgttagtatattaaaccatttactaagagaaaatcgtttactatataaagattttacggtttataatgtgagggagcataagtttagcatcacaaaaaaaaacccctccaattggagcgattttttaaagttgcttaattaagcaactggggaaaaagtaacaaagttaattgcagggatagatatagttagtggagtagttgtagtaccataaccatatccaaccgtctgaaggatagtaagaaggttacctgtaacagaagtaataattccttccacaaaaccatcagacatggcaatttccactggtgtcccaatacgttttgttaattctgccgctaaaaagctttcaaacatataataaacctcctccttaaagtgatgctactgtttcaattttgcttagatttacaaagtgcatcgttccatcactttcgactaaaacaacataatctgatagaacagcaagtaaaactcctgtaagtgtctcatactctgttgacaattgtactgtttggttaaggcgatttgttaaatcattacgtagagcgtttaaactaggtagaagtcttagtcttagaaggtcaattaaaaggttagtagtcgctgtagttgtagtgtttagaagaccagtagcagtagcagtcgtagtgtttaacaggtcagtagcactggcggtagtagtgtttaacagatcagttacattagtggtagtagagttcaaaagattagtgattaaagaagtatccacaaggccattagtatttaaagtgttaaggagctcagttacattagttgatgaattagcagtgtttaaaagattgttagttgtagaagtcgctgtagtgggtaaggtttgtaatgtcccaagtaggttgagtaaccttgctttggcttcacttgatagtgccaatataatcatcctttcttaattgcattttttacattattgtctatgttttataatatgcttatccgattttttcggtgctcagcattttaattattttagtcaggggttgaataatcttttatgtgtagtcgaggggtatatgcaagagagaagcgtattacaaatgttctgtgtttatatttaaattttttagtatgaagaataaacttaacaatttgttttggtaaagtaacttttagactgtgaatatatcaggtattgactgctctaaggtattgttgtttatcaactttcttttgctatatattctgtgattagttgagtcagagtattcttatggcggttaatgacaattttattttcttccttaataaaggaagcatattttttagtacccatattttcatgaattctagataataaaagcggttcggaaagataatgaagatcaaatttttgaatgattcgcgcccacaaatcatagtcatgagtataaaggagtgtttcatcaaaaaagcctacagaagtaaacacatttttgcttatcattgtagaacagccattaataatgttccccttactcatttgttttagtacttcaagcttacttgagggatgaaatcctataggaggagttataatattaccttttgcattaatagcgtagtaatttgtatggctaaaaaaagcattgtttataatcatgaattctacctggagagcaatcttttgtggataataaatatcatctgaactaagccagcatatataatctccggtggccaacttgatacccacatttaaggcacttgctgttcccccattttctttttctgtatatataattttatctaaataaggaacgattttttctttatattgagtggatccgtcatttatcacgataatttcaatatcattgtaggtttgatttagtaaactatccagtgcatgactaataaatggacagttgaagaaaggtacaataaccgatactt

SEQ ID NO: 161 - DNA, 3030 bp, Priestia aryabhattai
  source 1..3030: mol_type = genomic DNA
ttggaaaagagggatgtattggagaaatataatctatacaggtggtttaaaggccaaagtttaagtgctaaatctctacttctattgtttttaatttctcttatagcagcattcgttacatttcaaatagcagataaaacacatcataatttctatgtagaacaagatgacatgattaataaaactaaggaaattatagaaagcaaaaaagttcttacaaggaaagagatccagagggttagacgaatgattcaagctcatcaaaataattatcacagttatcaataccttgctctttatgcaaaaaacaagaaccagactgacaggtaccagtatgattcaatattggcagaaagtgatttaaataaagcacaatatgtctatcctataaatggagaaataaaaagaggcattctggccgattctttctatgtatcagaagttctagatgttggagagtggtatatcgttcaacaataccatggtacaggtggttattattatgaaatcactactttgttgtttggtatatccggaatgagccttatcctttatttaattatagagggtcgacgttacttgaaattgagatttagaactcctagacatgcctaactaacttctttacttcaagtaaggtgtaaagctattttttatataatatatagtgaaaacaaaaaaaggaagctagctactctgctggcttccttttttgttcagctaacgttgcaagttactttagaagagaatttattgaagcttcatatcacaaggctaaatgaaaattttaaagtcgaatatccagatttattatagttttagtgcagtgaaaatccattatgttaaatgaactaaaacaacaaactactttgtttgataaagtggtttgttgtttttatagcatttttataagggaaataacaattcgataatatagtcatagaatagtcccacgaatacgatacagcctaacatcaaaaaggcactccagaggaatataaagtactttttctttactatgtagcaatacaggcttaaaaacgtaaaggtaatcaataaaaatcctgatccaacaattaaccagccacctatgctatgttgagatataaaaaactgagcctttattaacatactagtgacgaaggccatgactaaaatgaaagcaaatacaaaaaaattaaatatttttagacgtacattgtttatagataacttcttttgcaattgtttatctgattttattagataatctaagctgctatcatataattcacttaattgaacaaggttaataatatctgggaccgacttattgttttcccattttgaaaccgcctgtgcagttacatgtagtttttctgctaactgttgttgagagtaattgtgctcttttcgaagattttttaatttgtctcctaaatccatttgcctctcctccttcattctcaatatagacgaagttaggaaaacaagcacgataatcttggttgtttttggtaaacgtctatataaaccagtggttgaggtgggttttgagctattgagggtactcattatattaactaaaattgaatgtgacatatcgtctataaaggtgaattactttttagacgtacggaaagttttattctattaattaaatagacattatatcatatgattctaaacagtctaaaaaggtgtgcctttttgtactatttatattagatggccttaacttctgcatgtttttataaatgtcagaaaatttatagtgacatgtctgacaaaagaccttataatagcactaagatataatcttttaagaacacctaaaccatcagaagaaaccgaaaaaggctatctcatctttgagatagccttttttggtttctttatgaaatctgtatctacatgcttaatattagtataaaataaggttgtgatttgtcggacaaatattaaataaaaacctagttaatcagcgattttaatatgcagagaaacgatatctgaggaaattaactattattttgcgtataacttgcaaatttcagcactttagagaaatgctcatttccctacttgtattggttctcattgaaaaagccaacttatttaataagagtattgttctcaactatctctttgataaaaacagggatgttattataaataataaagttggtttccttctattacaaaattattagtaacctgaattcaactataaaagaaaacatccatttcttctggatataagttttcaactcgtatttcgttctaagtagctttctttataactaacttatctccttctattttaacttccaaaacgtcaccgttattgacgtttaaataattccttagctttttagggatgtttaagtatttatctttgtttactacgcgcgattgcccagtaaagaaaagatttccttctgtaaaaaactcatatcggtgtttttttgcaacaatggtgccttggtctttagtaaaaaactgtaattgcatacttacttctagattaaatgattccaataaaaaattaggaagccttatcttcccttcttttatttcaagtaaagataacctatttaattcaggttctataggctcttttattagacctagggatttattctgttttctttttttgtagaaaataatactcttgttaattaatttcactcctattttttcacataaattcatatcatgtatttcacggagtatctttggaattacaatatagcctaaatgatcgatagttctaattaaattgttcaacttcatttttttctctaaaaataccggtgaagcttcaatctgcttcataataaaataatttttgtaggtaaagaattgtattgtagcagatggctggatattaacatgctttaaaaacagggatggtatctttaccctccccatattatcgattattaagtcttctttaagtgattcgtcctctttcattaataaaaatcctttcaaatgtacttcataaataaagattaactttgaatgtacccaccattcattttttat

SEQ ID NO: 162 - DNA, 3026 bp, Priestia aryabhattai
  source 1..3026: mol_type = genomic DNA
atttgttggcctgttttgcagctgataactaagaggatttccgtctacatctgtccctactatagcccctactacaggactgtcttcctgcgtactgaatgtgtagtttggcaccgatggtgcatcattcaccggtgtaacagtgaccgtcaccgtggaaacggccgttcctccctggccatctgataccagcaccgtaaattgatcggttccgttgaaatttaaattaggggtatatatataggaaccactattagttacagtaactgttccatttgttggtggagactgtaattgaaaggtaagtgagtcaccatccacatctgtagcttgtatctgaccaactagaggggtatcttcattagtgataactgcatagttttgagtaacaggattatcgtttacaggcgtatttataattgtaactatggaggtagctgttcctccttgcccatctgataccagtatcgtaaattgatcggttccgttaaagtttaaattaggggtatagacaaattgtccattaggattaactgttactattccatttgttggcctcgtaccaatacgatatgttaatggattcccatcaatatcattgccaataactgttccaattgctacagtatcctcgggatttgtaatagtatagtttggaactgtaggaggggtattaatagctgttacactattaacaggagacgcacctgatccagttaatacatttcctggtgtactttcaaattggtaattaataaaaacttgattaccaagagaaaagattgatgtaagagggccaaccactctaacctgatatgtcaaaactcgagtttgattgatattcagtgttccaagggtcagaccatttcgaatatccacgtttgtctgagtaacaccatctaattgtaaactattgggaatgaatattgttgctgaagacaatggatctgtagctattaggacattggctgcagcagttccagtattacttacttgaactgtataagtaatgatatcccctgttcgagcagatgtaacattagcagattttgatacatttaaaacaggtgcattaatatctacttgaagagctaaagcactaataacataagtatctccatttgtcgtcccacgtacgacggcgctagtttgattatttgataaacgggctgagacgtcaatattggtaatatcccacccctgtctcgcaccggataagctacctcctggtgtactatttaaactgccaaactgtccacttgtatctaatgtgccactgtcgttattaatctgagaagcgaaaaagttatttattggattattaggaccagagacgggctgcaaagacgcagttgtaggaccaaattgaagctggtcacctactatagccgaatctccttcaatagcacttactaataatcttccgtttaccgttcctgtaataggcgtgccaaatccagacacagctgctgtagaacttcctgtagctgaacttgttaattctgctccaacaaaaatagataagtttcgagacttttgtaaaggatcagcatacactacagccagtgtccatcctgctgcattagcgttgttctctgttgtactttgtgttccaggaactcctagaactgaatacgtacctgcttgagaaatcaaattcgttacatttgcactacgcacataataaaaacttgaacttgttaaggtaaagcgtgtagccgtatctgattgcacactaaccgttctgctaggagtaataaaagtaacagcattatttaaagcagaactaacatcctctccaccataaaggtagctacctccccatattaattctgcatataaaatttgagtagtagtagatggaagtcttaaaatagcactggaggaattttgtaagtaattcgcagtagttcctgtaggaaaggagccgtctacagaacttgggttgacactaaagaacgttccaatagaccctgctgttccaggagcattagcattagcttgtttatttaacccaaatgtgttacctgtaaatgtaatagctccattggcattggttaaaaaccgatttacatatggcaattagttcacctcttagaataaaataaatcgtttcagtatataagaaaagtaagaaaatgtgtatatctcccctcctttataaatgaatatgtttatatgtatgagccaaaaagcctaatcattagatgggaattaagtgaggttaatatccgcaacctttatcttaatacaataaataaaaaaactactgagtttagccagtagcttgtcataaagcaattagaagtttcttatgtaaattccagatgatcacattacataatttctccctctttatttgatacttgaataaaagaaacggtaaggggataaaggtgacaggtagattttgcttatttataagaagatgtactgttggaaaaagagatgtaaacctaactattataagcaattatatgatcgtgttatgattgagactccatctcttttagtattttgtttgtgatataatttctatccttgctattgtctaatcactgctttatttaaaaataagaaatacatattactaaaaaatgtctgatttgcttacagaagaactagtccagaaatagaatatgactagtttacaacaaattctattacaattggagttgctggagagagtgtgtcaccatctggaatagtaatggcagcagtggtaatagccgatgtatcagctgtttgaatttgaccattaatataaaggttatagtatgcaggtgatgatggaaaagctgtagcagctatacctgtatcagtcgtaaaagctgtagcaagaatagtgtatccaggccctgtgcctgttccatttcctgctatagaactgaatttcagggaactcataaaaggttttacaataggcattcatatacacccctttctaaaaatattaagtttagcattctcacgtgaatttattaataaaaaagaggcacgaaacaactttataatatacattaccc

SEQ ID NO: 163 - DNA, 2980 bp, Priestia aryabhattai
  source 1..2980: mol_type = genomic DNA
attaaataaagaacaagttcagaacatttttgatgaactatctgaatggatatcagccagtgaaaataatctccattgaccctttatcatggtgaaagaagtagcactaccatgggtatgttcaagatttacaaattgattataaaagaattagcattttttatctaaagccatatctattggggatcgtacaaggaagacttttctttatagacaatgaaaaaatgacattttactttgaggtattgattatttaaagctaactataatcaaaaaaataagggggagaatttaaaatggagattatttataatccaagagagaaaatgactgattttatcagagataacaaacataattttcaggataaactcttatcagaggctgttaatgtagccactaagattaatgacattttagaaactggaaatattgatcttttaaaaaatgctcaaaagttagctctatatgtcgtagagcaaaaggaagaacaactcattgctttcgctcagcaagaaggggtagcttgggcggagcactccttaactcttgccttcaaactagaatgggtacaggccattaggcgaacgttgtggcactttctctatcaatatgatcgaataaataaccattttaatagacgtgaagaattttatgccttagagaaacgtattaatgataagattgatcaatttcttaacacttttctaattagttattccaaatataaagatgaattaattgcctcccaaagggacttagttgaacatctatcggtgcctattataccacttagccaatctgtagctgtattaccattgatcggaatggttgacacataccgtatccaaacgattgaggagaaggtattgataggcatatcagatttaaggattgaaacattaattatagacctttctggaattgccaacatggagatgcatgtcattgaccattttcaaaaaatactaactggaatttcaatgatgggatgtaaagctattcttacaggtttacgtgctgacctggtgcggacaatgattcactcagaaatttcctttgaagaaaaggcagaaacaaaagggacgttacagcaaacattaaaagaatatctagaattccaccaaatgtaggagtttactctacacacagaaatgaaaatgagtttgtgaaattagaaacgtttttggagaaataaaccagtatccagaggagccttatagtaagatataaggctttttgtgcatgaaaaacccattatattaactggttttgtgtagggtatacaatcaaaaaaaagagaaaaagctactggcctcacaggagatttttctcttttaacattgagttttatgagctgaggcctcacgacgtcttgggtagtttgctcaaaataaaaaaaatattcacgttagagatgtgttgtaaatgaatacgcgtattgaacagcgtggtgtaaattagcaaagcttttaatttcttctactttaatttctaaactaaccatggtttgagcaatctctgggcgtatcccacttatgagcacgtcgattcctaaaaggcttagtgcagatatcactttaaaaagttgatctgctaccatggtatcaataataggaacagctgacagatcaatgataagccattttaatttatactggctccctttgtccaatgccttttccataaacaattgggctctttttgtatctagatctcctactaaaggaaggattcctatttcctcagtcatacgtaccccaggaacagacaattcagcaattgcatattgggtataatttattctttcagtgtaatctttcacatatgacttacttaccgattgaatggcgtcatccacaatggtattaaaatgagaaatgacctcgtaaaaagcatcaagagagaacaatccattctttgcctcttttttaataatctctccaattacatctcgataataaataatttcttctaaagccaggttcaaggaaagtccatgatctactaatagactagccatattttctgctcattgttttatggtatcaatagctagatctttttccattagaatagaatcagcataaatcgtaaggaggtcaatacgaaaagtagttaagtctatatagatgctgtgagcctctgcaagttcttttcttttatttcgacgttcatttttctaaaaaggtatacttttttgaacacccctcattcgtgctacaaaagtgtaaattacaaaaaaagcctatctgatttcgagcaaatggaaaaagaaatcagataggagaatgatagagacacatgtaaagtatgtgcaaactacgaaaaagatttaacctatattaaatctttttcgtagtttgcatgtgaattggtatagatattagttactttaggaactgaaatggtaaatttatagaggtaaaaagatatctctatcctcctgacaaggaaagagaaatccttctacccacgagctataaatggaaatatgccataccgacataatttatcataacatgtctttatgacagtaaaggggcaatactatttctttttataacggtactatttcaaagaggttacgtcatatgtatagaacatgtgctttttatacatttttttctcggtcgtctcctactaaagcgttggtatgtcaaagatgtataaaaagttgcatatccgatgaaagtcatcctactccgaacccttgtcttgcatgggttcattttttttgcttggttccttgaagagacattatggtaactaaagatctatacgatgtacagttaaaaaaagaaaaaactagccaggtgtgtgattgggtagttttttctttctcatgaatggtaatcaatagttagctgacgtggcgaacgtcttgtgtaatttactcaaaggagtaaaaaatatgtgtatatatataaaaatgaagtatattttaaactttatttaaatttatgttttgaaacatata

SEQ ID NO: 164 - DNA, 2955 bp, Priestia aryabhattai
  source 1..2955: mol_type = genomic DNA
ttgtcgcaattatactaattgcttctgactgctcgtataaaaatggaaggttttacattcaaaacaaaagtccttaaaagtatacttttaaagacttttgttggttcttataatcatgcttatgtaaactagaagtgaatactctatacatcaagtaaaaagcatataggattaaaaatcccatatgctttattttccgcatttccaaggtactaccttaccttttacttctttcttgtcaacaatatcccaacccgtttttccaggtctcatttttaccattccatttatattatcggaggtttgatataaaaaatatcctacaaatgcactttcatacttctcgtttccaattactccttctggttgagctacaaaaaaacgaggaaatcctttaaatgctccttgaaatagtgtagttaccgtatcaatataaccgcctgctgtccctccagtagccgtcatagctttgattaaatcagcatgtgtatactcttgaacaggatcattaggattgtctaacacttttaactctggaaaactagattttaccccttgtattacctcgtcgttaaatcgtttgaagcactcttctttagagagttttttagcttgtacaaaagaagagctaaataccaacattaaaataaaagaaaatattatcccagcgtataaaacttctttcttcatacacatcacctctggactagtatacgtgtttttgattgtgaatatgaggaaattatttaagctgccgataatcttgacagttatccttttcttattcgatagtctaagtatatgacttaacatataaaaaggttaattactttacggacgtataagaaggtgtatttcagagtataaatagacgttttgtcattagcttttttaccgtctaaataggtgtacctttttggtctatctaaattgaacatcctaaccttggattacgtatggtatcctcaatgaatcaatgtaacaccataataaatatagtattatatatttttgctataacaatattagaggttccagagattcattataaagacaacttgacttatgggaataaaagtattattattttttaaaattgctttagtactaaaaaaatattgaaaattgaaatacaaattactagtcgattggactaccaaaggctctaaaagttctcttatttatgaacttttagagcttttttaatggtagtacgtaaagtttcagttcaaataggttaataaaagtgatctggtgcaaactttcaattttttcgaaatacgaacggaaacatacaactaattctaaatagtacatttgtataataatgtgagtttattatggaatttcgagaagattgaaaaagagaaagtgaggtttaaatactatgtcaaagtatcagttaactcttgaaaaccgaagcattgaatggggaactcagtttgatatcggtcctcttataggccagtttactgaaaaaaccataaaatcacatgagaaaaaaggaagtttcgattggaatcttccgagtggggtgtaccgtgctaaagatattgtccgtgaattgaaccctcttttagaagccataattgttcaacttggagaagctgcagattcgaaagcgttgttagagaatcttgaggctaatttagcaatctccgggagagaatcagttttgcctcttggtcaactttctcttaatgatatgtgtggaatagaacttactgagcaagcaaaaagtataggtgaaactttaacacgttgggcaagtgaattcaattcacagcagcgagcattaaaagagtatggtgaggtagttctcaacagtttaaactttagaagccactgtgataatcacccatggacgcctaaggtagccaatttacttttgggatcggcgggtggtccggctgtcatgcaattgtttaatgagtacctacatcagctagtgcttttaagagacgcactaattccgttcaagaattgggaagagatacccattaaaattgatgaaataaataatgccaagggattaaggtttatggagcaagcgcacactgaatttttatctaaactgttaggaaagagaatgtctcataaggcactggttcaattcgctcaaagcgtattaagttctggtctgacaacagttggatatggatttcagtatcacctaggaaccatacttccggcaagtttgggagcttttccaacaacggcttctagatatctcctctattggcacccagtgtggacaattgtagatgataattttgatgtctctattcctgtctccttcaactatgaatttcaagactacctttctgcacctcgcagcaatgcgggtgacggacgagttgtctttcaactagatgtgccaaatcaggaacttgagaacgtccataaagcgcaacttttaacagctggtgatcagaaaaatgttgttatccaataccgtatccaactaggttccaatgactttgtggttgatcttggtcaggtatttagaggccagagatttatgtatcgtccaactatgaattctaagtcagtttcaggagcacattctgagaaaaaagcgcaattcaaagagcatcatgcaagggatattttagaaacaccaggtttaataacgaacgagttcggtacacattttatttctgctaggggaaatcatcttatactatgggcgttattgggtaagctttatcctgagaatgtaatcatccttaatagccttagtgaagaagagtttgaggcagctaatagtacaggtaagggatttggtgcgaaattcttaatccattaacctatataatgaagaagatattcggttctggtgcaagaaatgttagttagaaacatagagtagcagtttcttctacatttcttgcaccagaaccactttttctatgcttatcatggatttcttcctccttcttattgtgtattggt

SEQ ID NO: 165 - DNA, 2930 bp, Priestia aryabhattai
  source 1..2930: mol_type = genomic DNA
ttaacgttatataaattaacatttcaaataaaaaacactagtcttgaactagtgtttttagattttagaaagtgtaaacaaatatataagaacgcatacatatatgttaatttctatttatattagttgtaggagagacagttttagatatctttttacgacttgcttgaagacgaatacctatacctagaattcttgtgacaaacatggcaatagtaaagaatataaacgaaggggctataatatcaacgtttaattgatgttcaatcataaattgcataaatccctgtggattccaatgttcagcataattagataagagaattcgccagccaagaccaacaacccataatagtaaatacggaacgcctgcaatagtaaaagcttgcccctctgcccattctactttgatcgcaaaaagggttactattccaaataagatgcccgcggctatcataatccctaatgcatcaatattatttcctgacgttgggatatctttaacatataatttaataacaatagccgatataataaaaggcaaaatcgcatttcgaatggtaaatttttttcgtccaaattgtgtaagtaaaacaattaaaaagaacacacttatgataatccaggtttgagcattcaaagtaattcctccatagcatctatatttaggctttatgtgacttctacccagttttataaaattaagttcagcacattcagtaaccttactcctaaaactataacaactatttaaatcgttatcttctatctacaggttgatttttaaaaagtgaactatatctacagatataggcaagataggtctgttatttgtgaaagtaaggagatagaatggagaaatgtgcaatgaatatgaaggaagaagtgattatatttgtttttttatgcaaaagaagcaatgattaagggacttgtaactctggctctgctatacgtgtatgttaaggaatacatcaatcaagaggttgaagtttcaattgggttttccattatcgtattattgtacattgtcctaatttggacaccaaagacgtggtggaacggaatgaagtatgtagtcatttccagctttatcatagtgcttgaactaatattaggttacccctatggagcaactaacgccactttattgtggccattggtctggattttggcgactgtctatgataaatacaaatatttatctttcatactcgccttaacgacaatagcagttatcctctgtatatcatggcctttttcttttaagatgcctcttatcttaatcggcttttttatatgggttttaattcgcaagatccgtaaggattcttaccgaatgcaacaactacacttggaagaattaaataagacacatcaggatttaaaagaagcgcacgctgaattacaagaagctacgatgaattcgatgaagtatgcagctttagaagaacgtaccagacttgctcgtgaaattcatgatggactcggacaccaacttacgtcattgattgttcaactacaagctttggaaattatgctgccaggagaaccccaaaaagcatctgaaacaatcacacaattgctccagatatcaagacaagctatgggagaggtacgtatggctgtaagggagtggtcaagtgacgaaatgggtcttggacttattgcattaaagggactagtgtcccaagttcaaggtcgctcttctataaagttcgactttattcaagaaacagacatttccgagtggcccaatgaaatgagtattgtactataccgcacagtacaagaatctttaactaacattttacgccactcagatgcgacattggttaccattcttcttaaggaagttaataacgaagttatattaaaagtggctgataatggaagttatacagaacagacccccttgaaagctggattcggattaaaaggaatgatggaacgttgtaaagcttatggaggtacatgtacatttgattctgtgaaaccacatggtctttctattgaaattagcctcccacttgacacattagtaagtaccaacaaataaaatacataaatagaaagaaccttagcatttttaggaggatatcgtaaatgagtgttacaagaaaacttcgaatcgtactagctgatgatcagcctattgtccgtcaaggattgaagtatattatcgattcacaagcagatatggaagttgtcggtgaagcgagtgatggtggaacagcagtaaccgttacaaaagatactacccctgatgtagttctcatggatatacaaatgccaaatggaacgggcattgaagccacacaacgtattattgaagcgataccctctacaaaagtggtgctccttactacatttgatgtccaagaatatgtattcgatggcattcgagctggcgctttgggctatttgctaaaagatactgacacaaaagagctgcttgatggtattcggtgggtgaaccaaggtcaagccatttaccggacagctatggctagtaaagcactatcacaagctattagcaatgaaagaactgctaagcaggatgatacaaaatctttagaacttgttgaacctttaactggacgagaaatcgacgtgctacaacaaatggcttatggaagaagaaatgtagaaattgcagatattctattcatctcacaaggtacagttaagacacatatccaccgtatcctgcagaagctgagtgttgaagatcgtacacaagcagttgtgtttgcaatacgtaaaggactggttaaataacaaatctacaattacaataaattacctctgtttttaagagaaatatgcaataaatatcctatgagctttctctaacgtactttatacattattaaggtttcactgtttacactatatgacggcaaattgtgggtttttctacaaaatat

SEQ ID NO: 166 - DNA, 2890 bp, Priestia aryabhattai
  source 1..2890: mol_type = genomic DNA
gtaactaggaatatgggggatatacaatttgagaatagaaaaaaactattggcagtaaccaatagtttttttgtaacgtatttagaaattagtcatggtgcttccatacatcttgaatagtttttctcgagctgtcagcaacttatgtgttaaaaagaaaagcctactgataaggaatacatcagtaggcttttcgctatggattcttacgctttacgtacgtttgtcgcctgtgggccacgttgtccttgttcaatatcaaaagtcacttcttcaccctcatccaaggacttaaaaccttccccttgaatagctgagaagtgaacaaacacatcttctccattttcacgttcgatgaatccaaagcctttttcagcattaaaccatttcactttaccctgttccatttttacttcctcccacaatatagaaaataaatcagatgatgattaaatctagcttacttattatattatctgaatgaaggtattttaaacttgaattattatattgattaatcctactaaattattctttccgttatacagctgaatgatagtgatactgatatcgttccttaatcctattaattgatgacagaacatatgtttgataaaatataaacaatcacttgtatcagactatctttcgctttcaacatttatatgctgaaagctatttttttgcttcggctaattaaaataaaaaaactaaagatttgatacttgcggctaggattttttaaattttttatttcaatttcagctgtagaattttacacgattctcaacaggctgaaattctttctcgcctggttgtgcagttgggttaccaaaaggcatttgagcaattaacttccagttagaagggatattccactctttttttactttttcatcaataagtgggttatagtgctgcagtgaggctcctaaaccttctgattctaacgcagcccatattactaattgatgcataccagatgcttggtttgaccagattgggaagttgtcggcataagagggaaactgtttttgaagactttttactcctgcctcatcttcaaagaataatacagtcccgtaaccactcttaaatgcatccattttttgttgagttccagtaaaatctctatccccgactacttttctcaaagtatccgtagtaatattccataattcatcatgtgatttgcctgtcaatacgacaagacgtgccgtctgtgagttaaatgcagatggagtgtgttttacagcaaactctacaatttctttaattctttcatcagatacttgtacatctttattgattccataataagaacgtctttcttttaaaacagaataaaaatcttttgacattatgataattccccctgtaatgtagtatgccggaattaaactttttgaggaagcctatacgtcacttccttgtatagttccttccttttcctgctttttatactcttttattattttcaagtaattcgcccatataatatgtaaaaataacgatttttcaatctgaatataacctaaattgaagttcttagaaatatccgttaattgtacttttttctaattatttataaaagacgaattcttggctattaattctacgtattgatgagagattcctttaaaaatatagtctttattctttagaattacgtttgaaagccaatcatctgctagactgtcttatctctttctataaagtgttttatgttaactaaaaaagacagagagggtttatttccttctgtctttttgattaattaaaggtcagcaacatgtattacttgaaggtgatttttcatttgggccaacgttaccctcaaccttatgaacttcgctatctgattttgtatagaagaattcccattcgtttccgtcgggatcttttatccagaatttatcttgcacagcgtagcagcagatcgtatccatttcttcacgcgcaaggaatccttctttttttaatcgtgctttatgagaagctatttcttcccgtgtatctacttggaatccaaaatggttaacttggtttccctttacctcgtcacgtacatttaatgtaaagtttaagcctggttcgtctaataaaaattttgcataatcctctttaacctttacagggctagcaccaaatactttttgataaaattcaatggattgctctaaattcgttacattaattcctacgtgaacatatttcatttaaagttcctccttggtcttatagacaatattattttgaattcattaaattaagagcatgagcagcttttattcgtatcctttctaaacaagcaacaaagctcttcagacagaatatgattaacttctttatcatttagatcgtagtagctccatgtaccttttgtttctttaacaatgagatttgcatctaataaaattttcaagtggtatgagagcttagattgagacatgccaaagaactcagttaaatcacatacgcaggtctgccctcgctgacaaagctcatacataatttctaatcttttttgatcggcaagagctttaaacttttgctcatattgcttgaatgtttgctttacttcgttgactttttccaccgtcatcctccttaatcaattttttttgatttaaagttcaaggcttttcgaagctttttcaaaattgatgtacgtagttcttccctcttaacataggatcttgatgaaaaaaacgctgaaaaataaggtttcttgcttccttatgattcataccttgagtattcataactaaatgaaaatacgattgaaagtacttaacagataagtttcccgagttgttgattctcactgttataaccctcatttcttattaatcaattttttttgatgtattcatcacatctggaaaat

SEQ ID NO: 167 - DNA, 2755 bp, Priestia aryabhattai
  source 1..2755: mol_type = genomic DNA
aggtgacgacaaatagcacattttctataaaacatataaaatatacaacaaatatagcctagtgacaggttaagaatattttgtttgaaaggaatttttaactttttaatagaatgattatgaaaatgaacagataataaaatttcacacataaggagataaaactatggaaaaaaacaatttactaagaatggacaatgtaagtattgttgtagagttccttgatgacgcaatttctttctttgaggagattggcttgagtctcgaagggcgagccactgtcgaaggtgaatggggtggccgcgtaacgggattggattctcagcgcgtagagattgcaatgttggttaccccagatggccacagccggattgaactttcgcaatttctcaccccacctactatatcagatcaccgaaatgctcctgtaaacgctctcggctatctacgcgtcatgttcactgttgaagacattgacgaaatggtgtccagactcactaggtatggtgctcagctcgttggcgaagtggttcagtacgaggactcgtaccggctctgctacatccgtggagtagaaggacttttaatcggtttagcagagcaaatcggtaacaaataagtaagtgacgttttataaaaatctttactgaaatgtacatttaagctgcctgaattttcaatagataggtgatgatagtatctgatactaagacatgacaaactacctctaaatttgttactgtttcttcatctggcttccaatcaagattattttcaggtttttccaaacctttatttcactttttctcacctctcctatatctacttaattatggtatttttgttttaatattcataagaagggtatttgttctaaggattaactaaaataggaggagatcaaatgagaagagcgaaacaagctgttgtagcttctgccgtaggtttagctatgttagcgacgccattagctctaccgaatttaggaggttctgctggctctgcagaagctgcagaagttggaggagacgtagcgattgatccagtagcaattgggcaagcgattgcagatgcagctaaaacggctgacaatcgaagtgggtttgtcaaaggagcgatggaaaaagccttctttgaatcggggcaacagtacaatgtagtggtgatgaatttaagtcaaggttataattccgatcaattacaaggtgtccaatattttgataccgtggattacgatggtatcacgtttggagtttggatatttgaagaaggaacgtttattaatgaaggtgacggaggatacgataactgggcctttagaggttggtttgaacgcacgggagatgatgaaaaaacggtcaacttccatagaccttaatctaattaaacagaaccctttttgagaagatttaattaaaaagggttcggtttgtttgctataagaaattttttctatttaacgagtttgcaataaaaagtctagtatagtgctttagagaatagtatttcaattagaaatcttgttccttccacagtagcccaatttcttgctctcgctgcaaaaccttctccagataacgttcagtggtcttacgatcactgtgacctagttctttttgaattaaaaagatgtctgctccctgctgccgactataaattgcataaaaatgacgaaaataatgaggcgtaatcctgtcattccgttctcttataaaaggtaattccgtttgttcaatgatacgtacaatataattacttaagtttttatattgataatagtctccatctttagttggaaataatggactttgatcacttgaatttaatgctgtactgacatgacgtcgttcccgaaaagcaagaatgtgtgcatatagcgatggatgaagtaacttatcgaacttctttccacccttacctactcctcttagtcgataatgaccacttaaactgtctagatatacatctcctcacgaagctttagctatttcctgtacacgcaatcctgtcatggccaacatcgttaacaatccataattaataggatggtctttgtagtagtctaggagctgtttgacttcatggtaatacaaatcccgatttggaatttcttgttcagccaatgatgtactcaaaatttctttatgcaaggggtaccgaatatacttgatttcatgtaaccatttcataaaactttttagaatcgtcattttcgcatctaaagttgcaggtgaataagttttcccccccttacctaataatactgtgcttaaatacgtctgatagtttcgaatatgccaaggacgtaggtttttaaaaatagtttcttctatataattatctacatcttggcgtaggaacgattcactttctaccgcatactgataaaactgcagcattatccgtacgtattcggtttttgtattttcttttcgttctcggtcctttcgaatatgctttcgttggtggacatagtagtacatcatttcttcatccgtaaaattgctgaacatatcttcgttttttcgctggtgatgctcatttctttcttctaatgcatcataatacgtactatctagcatcaatgaaacaattttattgaaatccccttttctttcccttacttttgttcctatatgtactaatgagaaatctcgcattaaacttctcctttcgtaaaacatgtattcttatttataaatcttccttgtgttgaggtgttttcttctctatgtgagggttaagtttgtactta

SEQ ID NO: 168 - DNA, 2749 bp, Priestia aryabhattai
  source 1..2749: mol_type = genomic DNA
atacaatattgaaagaatagaataaaacaattaataaacttgattaagcagagcataatttattcattaaataaaaaatccactatttttgtggagaaaaacatcaaatatatatatctaatatgcagagaaatgctccctaaggaaattaactttaattttatgagaaggtcatatcaaagaaaatttttataaagtataataaaaataaattccacatggtattttatgctaattatagattgaggggagaatcatattggagaaagcaatagttattggaggaagcattgctgggaaactagctgctaaagccctatcgaatacttttcgacaagtaattattctagaagatgggaaaaggtgggaggagaaagcccctagaaagagggtgcctcaaagttatcatccccatgttttattaaaaggaggagaagaagcaattgagaaattgttccctcacttctttaatcaattaatcgaagacgggagtgttataaataacttcacaagagatttaaagtggcaccattttggttcctggaaaaaacgattttcaggagaattagagatgattcaacaaagccgccctatgttagagtggcatttacaacaccgtattgatcaaatttctaacattacaaccgagtatgaaacaaaggtcgagcaactattattagatcatcaatgtaataaaatatccggagtacgagtgcgctcacttaagacaggaagagaaaaagaaattcttgcaaatgttgttattgatgctagtgggtttggttcaaagagtgtagaatggctaaaatcatatgatatagaggttaaggaagagaaggtctggattaagcttttttacgcgaccagattctttcgtctgaagaatcagaaccgacctgactggtgtaatcttctgatttcccctagtttccctgaaaacccttatggtgcatatattcaaatgattgaagggaatcgtttttctattacctttagtggttatgccaatgaaagtgcaccaagaacaactgaggagtttttctcttatgcacaaaagttacccgtgcctgatgtgcttcattttctagaacaagtagaaccaatttcagaaataaaaatacatacaattccttatcaagtacgtagacgcttcgatcttgccactctcccagaaggtttcctagttgttggagacgctcactgccgttttgatcctgtttttggacagggaatatctgttgctgctatggaggccttagagttgcaacgctattttggaaatttcgcatatcctaataaaaggtttaccaaaatacttcacaagagattttctacttttattgcaactccatgggatatggcaattacagaagcatttcgacaccctgatattactggagagaaaccttttatacagccaattaaacaatggtatagtaagaaagtttaccagctttcggcttctgatccggagatttatcttaagttagttagagtgatgaatttaatacgcccacctttgcaccttttccaccctaaagttgggtttggtatattgaccaattggaagaaacgaacaaatagtaagaagtcggaacgctctgaaaactaagatacgaatgtagaggtctatttaggaaggaaacgaaaattttcataggatagacattgttgaatatattacaattaattccgaaattataaacaactatataaaaaaggagggaattcattatgaacaagctattaattttgacgatagcttcggaaatgtttcttctagtaccctttctgattatttacttaacaaccagaaaaacgaaaaaaagccttcctttgataatcttgcttattattggaggcgcgccacttctctatctagccatagatgatatgaatagtcattatatggatgccaatatcgggttgggcttggcttttatgtttacctggatatatagtgcaattgcctttatcgttgccattattctaatagtaaaaaggaaaagaaataataatatttcaaaggaacagtaatcctagttctggtgtaagaaatccaatataaatggaggaatataaatgaaacaccttgttgtatatgcccatccacatccggaaagttttaatcattctataatggaaaccattgttcaatctttagagaacaaaggtcatgaggttgtagtgagggacttatatgcattggattttcagcctgtactaaaacctgaagatacggctgctatgaagtctggccataccccagatgatattaaagcagaacaagaattcattactcaatcagatgtaattacatttatatacccaatttggtgggctggtcttcctgccattatcaaaggctatgtagatcgtgtattttcttatggctatgcgtatgcttacggtgaggaaggaattattcagttactcaaaggtaagaaaggtttgataattaatactcacggtgctccaaaagagatgtatgacaaaaccggaatgacagccgggttaaaaattacgtcagatgttgggatatttgagtttacaggaatcgaacctataggtcatttattgtttggaaatgtctctgaacatcttgaggagtcagtgctgaaggaaatgttaaatcaaattaaagagagaataaattctattttttagaaggatacaaaaatgactacaaataaaaagagagccttgtttattttaaggctctctttttatttgctactgataattcaca

SEQ ID NO: 169 - DNA, 2686 bp, Priestia aryabhattai
  source 1..2686: mol_type = genomic DNA
aaaattttttaaacaaatctatgagatagaggcagatattgatgctttattacataaggtagagttatttgaaaaaaggaaaacaaaaattaaaaatctaaacttttccgagaaaaaacgtttgcaggtagcgagggttattttacctcaacctgatcttattatatttgaagaattgaaccataatcttgatatagaaagccaactaattattcaacaagtaattacagattgggtgaaacaaaataagagtgtgttaattacaacaaattactttgaaaatgctattttgttaacagatgttgtttactccttagataaagaaggcttaaaaagaattgaagtaacagattcccttcaagaaaagattgatgaacaagaaatttccccagtaagcacgcaaattcattttgaaaaaattcctgcgaaagtaaacgataaaattattttatttgacccaactgagatttcatttatagaaagtaacgagggagtgtctaacctacatgttaatggagaagtatttccttgttcatacactctaaatgaattgttcaataggcttcaagcatttggattttttagatctcatcgttcgtacattgttaatttacaaagagtaagggaagttattacgtggacaagaaatagttatagcttagttcttgatgatgctaagaaaacttcaatacctttatccaaaggcaagttaggtgaattaaaagaaattattggcctttaaggtgttaaaatcgaattttttatgtgtttctagctcttaataaggtgaaatttgctccaaacaacggtcaaatgagtgattttatctgtatatttactcctttcatgctgaatttaatgcgattagctccatttcttacgtaaacttaagttagaaattataactaattgaaattcgcaagaaggggatgtagaaatgaacaatgtaatagaagttaagaatttaacaaaagtatttggcaataaggttgtattaaaagatgtcacattcgaagtgaaaaaaggtgaaacatttggttttttagggcccagtggttcaggaaaaaccactactataaagatattaacctctcaacttatacatacaaaaggtgaagtcactatttttgacgagtccttacaaaagaaaacaacaaaagattacttaaaaaaggtgggcatactgactgacaatagtacgctttatgaaaggctctctgtttaccaaaaccttctcttatattgtaaattgtatgaagtaagcgcgtctcgtattaatgaagtattagaagatgtaaatcttcttagtgataaaaaaacaattgttcaaaagctgtctaagggtatgagacaacgtgttgtcctagctagggctttcctgcacaagcctaaaatattatttttagacgaaccaacttctgcacttgatccggtaaatacaaaacatatttacaaagggctaaggaaattaaatgaacaaggaaccaccatctttttaactacccatgatatggtcgaagctgaagagctatgtgatagagtcgcatttctacatcaaggtgaaattaaattattagatactccaaagaacttacgtttaaagtttagccgaaaatctatttcgcttattgttggagaaggaaattcgattacagttaaaaatgatgaacagggtgcaaagcagatcagtgattatatgaagaatggccaattgctttctatacattcaaatgaacctactttaggagatatattcgttcaattaacggggagtgaattataatgactttttcattaaggagagtaagcgcaatactgttaaaagattggtacgatttattaaaaaactcttatattctatttaccttagcttttcctttgttgtttgctgtctggttaggaaacatggacgttaagagtagctattcttttgtatttccaattaatttagctttagttatttgcggctgttttgttcaagctgctatggtggctgaagaaaaggagaaaagtactttaaggggccttcttttatcaccagccactacccttgagatcctactaggaaaaagtgctttatcagcaattgtaaccttaattgtcatcgttgcatctatattcctaactggatttaaagtaccttctttacctctattttctctaagtatcctactgtgtttaattatttacatcgccattggaactttgttaggtcttctttctagaactgttatggaaaccgccattataggcatgccagttctaactttattagggatgggatctgttttaaaggaaactattgataacaaaatctttgcaaaggttgttgattttctacctagtgaacaatttaatcaaattgctatgaatataagtcaaagtaataattctggtaatacaggtaaaagcttattaatcctacttgtttgggtaattgtatcacttgccattacagttatcacatataacaggcgcagatttgataagtaaatatgtatctagaggagctttgtagaagattttaaagcttctttagtacctatagtatttcttgtgttaaatgtagatttcaatagtgcgcaaaatcaaaattttgaagttatatgtatatgaatctacaaatctggccagactaataacgtattccccctattccaataaatttgaaaatcctttgcctaat

SEQ ID NO: 170 - DNA, 2658 bp, Priestia aryabhattai
  source 1..2658: mol_type = genomic DNA
tgttgaggaaataacaactcaaatagatccgaaatataaatgccctaagtgtgggctactgactgaagatagatggattgatgaagaaaaggagtatgaatcgtgagttttaagagggagaattaaatactttatacatataaaatatacgtaactaagcgtcctgaaaggagttattcaatgaaccttcctaatggggtaactggtttttatagttcaatagataataaaccgaatgaaatagatgagaaacaatttaaatatatatgcttcaatttggttagaaaaaatcagggaagaatattagacattgatgaatcaaatttagcaactaattttttaaaggtaaaaatgaatatttgtaaccgagagatgtatgtgttacttaatgcatattatccttttctagcttttgcttctactgttgaatttccacatctcaattttattgatgatcctgtcttatcaaaggattttatgccattctatacagttttaagtaaagaagaacttaatgaacctttagatataagaaaaagcaaagggaaggtaagcttagaaaataaaaacaagctgagcagcagcgagttagagcaaatccttttttggaaaccaaagaaagttggggaagttatatttaatttttgggattgatcttataaaataaagttcccttattaaaaataatttccgataattttgattatgtaaatttaattcgaggttgatgtaacatatatattgaataatgtaatatatatgttacacttaaattaggaaggaattggtttatattgaaaaacaatgtaaaaatatttcgtgtacaggctgatttaactcagcatcaattagctgaaaaagttggtgttactcgtcaaaccattagtttaattgaaaaaggaaaatataatcctacattaaaactttgcttagaaatatgttatgcagtcaataaaaccttagatgagattttttgggttgatcaggaggagatttaaatgaaagtaataacagacgaaagacttgttatcaaaaacttaaaaaatattcgttttgcgtttgcttttcaaactttagcacttgtggggattgtaatatacgacggtattacgaaaggattcaataatattaccaataatcctatatggctagttttgatacttaccagtgttatattagggtatttgaacttaagtatttctgttgactcctatgaaaatgagaaacgaattagaaaaatgccctattacttattagtattatgttgtttggctgctggagttatttttggcttactaacaaagctaacatctaatagtagcttggctgatagtataataatcggttcagttatattcttatgttttttaggaactttttcatttggttattttttaataaaaaaacgttctaaagacgatgaagaataaagtataaatacttcctataatttacattatagtaactaagattatatatatgtaataaaaattgtgttcaaaacctaggtgcatacagaacatatctgatacatttaaggttgttgtaaataataatagccatgttattacagtaatactaagataggagattttaaacagtaatgaagtacgataaatacgaactacttgagttatttgaagctgaaccttcagtaatggttgatgatcagactggtatgtttatgtatagcaaagatgacgatcatggcttccatttgttattggtgatgtcggtacatgaaagtcaatgtagtgtaagcttaagttataaacattttaagggattaatctttgattttgaattagaagatattagcgaaattaaaggtgagaataatcgcttaacaattctcggaaatgatggtaacagagaagtagaaattagtttcaagccacatttttcattaaaaactgtaaaattgtagttttaactagacctttgctgcctataagccgttttatattaactaaaattgatcctagaaagacaactttattagaaatgaggatagtttggttgttcttagatgctagaagctaaaatgtccaatctataatattaactatatagatttttcttcattaacaaatatagttaccatgcattagtaaaaccacctatagctatggcaatcactattagacctatggccatgtaaagaaagggtccccttcctttccactctaaatgggtagtgtaactattaaaaacgagcgatgaccctaacaaaacaaggccaaatgacttcaaataaagtgaatgctgaaagtaagaaacgatagctagaatggctcccactacagccaaaagcacataaaatactttcaatactttaagatatgtcatgtatttcccccttttgcatcaaccgtatactatcctctgttacccagcatatgtttgtcccatatgaatttaggtctaatttctaaaaataatcaaataaacatttgaatatttttagaaattggcgccatctctagttctaggtgtggctattaatatttaatttcactatctataaggtacattaggcaaaaataaattgtgcttaataaaaaaagaaacctttgcttatataagcaaaggtttttcaaatttattggaatagggggaatacgttattagtctggccagatttgtagattcatatac

SEQ ID NO: 171 - DNA, 2648 bp, Priestia aryabhattai
  source 1..2648: mol_type = genomic DNA
taaaaatagagccctaaaagtgtttaacacttttagggctctatttcttatacctgttatgtatgtaactaatgtttctgttgactttgactagacagatgttcagatatatcatttggaactttaaactttaaattaagatttttaatttcaacgtcaatataaggaatacctttgtaagtagtaattgtagcaacttgtttaagttcttttttacccttatttgatgcctctcccaatttaacagttccttcttgatacattttatagacattctctttcttagcattggcagggagatctgcaacattccatttatcaacttttagtttattgataaatgtatttatatcttgcttcttatcaatagtatttaatactatttctggatgatttacagatgatacttctacttttttagcttggtcaaatcctaagtctacatcttccttcatctctttttcctttgagctacaaccaaacaagagtatagatatactcaaagctactatgaccccaatataaacttttttcataaatatcctccatgtaatatccattaatttacatagaaaactttaacattaattcccccttattactatacatctagagatgtagatttctataaatctcatatacaaatttagttaacataaaacacgttatcagaaccaaaaagatcctgaatcatttagaaacaggcttttttgggtttaaatatataaattcttttacttctacgattgagagacctaattgataagcttccttcataagacttatccattccttatcgaacttcttatcttctttttttaacaatcatgatccctccaactctcctaattaggattaaggagatattatcaaaatttaaaaaatgttctaaattaacaatttttattcaataaattccttaaaaatcctgcaataattgagatttaatgtagaaaaaagtaaattcgaagaattattattgttactttgagcaaactactcacgatggataaatgatcaaaaataatggtgcacgacagaaaaactccctacggaaatagggagtttttctgtttttacgctgtatatggtatacaaaggtagttaacataatacctcttttcggcacatacgaaaaaagagaaccctcataggagtgagggttctaacagggtcatttttatagaatatgcaaatctttatacaccctttatgtatcaatgtttctctctaggctaaatgataatggaatgcataaaagtcctatcttatatacatttataaaaaattcgaataaaaataatccagtaaatattgaagatacaaattgagtaaacatgagcaaagactaaaagaacaaataaatttcacttattttggaataaatccttacgcatttctcttgttcgaacgccatcttcaattttttctgcaatgtccatcaacctttcaatgtcggaaaaagaatacattcgggtacctgaagagtttcgttttgggaaaataagctctcgctcttcataataacgaacttgtcttactgataaacctgtcatttcagtaacgatttttatagtcataactttctcatctaaatatgaatgatttttagtcaagaatatcctctcctatttccattctttatcagtatatatgttattaacttttggattgtatatagaaatgaagttcattaaatatagcgcgttataaatacttcttgatgaaaagcgtttttagttcttgagagtgacattagggtaactaattttaaacagatcgattttcaaaatcaataataagaagataaaaacttctaaattgctgaaatttgtggcgaatcatttattatatgtaaaaccaaagttaatttcctcagagagcgtttctctgtatatttgaaacatattttagtctgattactaatgaaatatgttgataccgtgcaacctatatcattttagtcattttcattccgataaataaaaagacttgctttaggtagaaagcaagttgaaagaaggataatcactttggtaattccattataattcaacgactatagtgaatcattaaaatatggttaaaaataaattaaaagtaaattaattcataaaaagtattaattaaccttttgtttaaatttcgttaaagtaattttattaatttaatgttttaaaacggcatagaattagatgtccgtaaaagtataggtttacgaaattttctcttaatagaaaacctgtcattttcatcgttcgattaagtttgaaaataaattacgaacgtttctgataggaaaatagattaagctagtggtttgccgtcgttaaacatgactgtcagaacctatattcttaaaagttagtttgtagatctatttcaacaaataaataaaccagtttttgtgctcgctttagggtttataagtatgaaataacaatcagaataacaagaggattatcaatagtaaatatattcattatttcactttatctatcaatctcgtataaacaacgtcaaaaaggataataatgtttaaaaagaagaaaagataaaggggttgatttttaatggaaaataatgtgcttaacgaaattgatccaagtttacgtgatgaaatgctggctgaattattgttgaatcac

SEQ ID NO: 172 - DNA, 2646 bp, Priestia aryabhattai
  source 1..2646: mol_type = genomic DNA
tattccttgatgcagatgatcctgaaaaagatattagtatttatataaattctccagggggatctatcaccgcaggaatggctatttacgatacaatgcaacacataagagcagatgtcagcacactgtgtataggactagcagcttctatgggagcttttttattagctggtggtgttaaaggaaaacgttttgcactcggtaatagtgaaattatgattcatcaaccattaggtggtgccagaggacaggcttctgatatcgaaattagtgcaaaaagaattttacgtatgagagaacaccttaatggaatattagccgaacgaacaggaaaaagtgtagaagaaatttctaatgatacagaacgagataattttatgcaagcgcaggaagcagtaggttacggtcttattgatcgtatcttaattaagcagccttaattaaggaggtagaaacgatgagtgtagaaagtaaatgttattctgttgaaattttagattcaaagcgtaatgttacgtactatagacagtatgacgctttaacaattgaagaagctaaacaaaaagcaaaagcagagtttatagacggtacaattacatctgttttccttttgaaaaatgatgaagaaacacaataactgtttagttccttccaacttattaatataggtaaatgaaaaagaaccctgaatataattcagggttcttttgttattttatcgatgtatgctatatacaaatccagttaacataatacctctttccggaaccaagcaagcaaaagaacccttggggcattaaggtttcgccaaggattctttttccggagtatgcatctttttatacactgttcatttatcaacgttttttcagtaggcggttgagaaactaatgtataagaagtgcaccttttatacatatgcttaaggttgtactatgttgccttatttataaatctgttgtaaaattattcagacttttataaattaagtttatgaattcccttaaaagctatccgtcctgcaacgatggggtagctttcttttttgttaatgataatatttaatttaacatcttgtaataggtacgaatatctcgccagtaaaagtatatttttattaaacaaaagttaaggatgaaaaaagaggtgaattcataagaaaaagcttagtacataaagttgttgattttctacgaagagcattttgtcttacttaccggtctttgaaaaccttaagagtagtacataaccagtttagtttaataaaggtaaaaactcgctttatctctaagacagtttttactagggagaagggagctatattagatgaaaatgacaaaactgattgcaaacgctttattattagtagtagccgtgctgtggggatctggatttgtagcaacaaaatttgctttagatgccaatgtacctgcagggtttattaacttttttcgaggactaatctttgccttttttatatttctctttttttataagaagatatgcaaaatgaatttaaaagaattcaaagtaggattagtcgtaggattgcttaattttgggggttatattacacagactgtaggtattaaatacaccactccttcaaatagcgcctttattacagctgcatatgtagctatcgttccaattatagcctgggggatttatcgaaagaaaatagagataaaaagttggatttccattgctttttgtttacttggcatggctatacttacgggtataataaataagggattaacaataaatgtaggtgacatatactcccttgtttgtgcattattttgtgcaggttgtattgtgtatttaagttatggagctaaggttgtggatgtaagtatcgtatcctttatgatggcaatggtacaagcaattggtggattaatattttgtctattcagtgagagggcgcaatttgtttatattgattggtcttcagcaattgttcctttgttatatatgggaataatgtgttcgtttgttgctcaaactatccaagttttagctcaaaagcatacttctgcgacctctgctgcactaatcttaatgcttgaggcgctatttggaagcgccttctcaatcgcttttggctttgaggtatttacagtcaaattaattctgggtggaattcttgttatgttttctttagtcctaatggaaatcaaattacaaccattatcggcaaaggcccatagtaattttaaaggataattgaataggcaaatttatcttcaaatttaaattgagtcataatatactgagacaattactacataaggtgcgagagttcgttgtggtaatctaaatttctaaaatttgcatcgagtgatcagtggataaacctagagataaatcccttagagatcgttcctctgcatattagatatatatttgatgtttttctttataaaaatagtggcttttgcatttaatgagtaaattatacccctaagaggtctacttaattaagcttgttccttgttttattccattcgtttattattctgtaggaatcagagtgattattgatgaaataagttgatagagtatcaagctatatactcttcttgagttttgggagggtaaacaaaaaagacttgctccataatgaaagcaagttaaaag

SEQ ID NO: 173 - DNA, 2628 bp, Priestia aryabhattai
  source 1..2628: mol_type = genomic DNA
atttatgcatattatttattagagtggtctttattatcttaaggtttaatatacaatctataatttttgtttttaaattaatttactaaatgggggtaagaaatgaatatattgtttgtattctatgtcccaagtggtggtgtagagactttaaatcgtcaaaggtgtaaggctcttaagaaacataatattaatgcccactgtctctattatgaaaatagaaaaaagacaataaatgatcatggtactcaaacgtttgtaacaaatgaagacagggagataaaaaaaatattggatgatggaaattatagtctcattgtgatcgtttcagattttcaagctttacctagatttaaatcactaggttatcagggaaagatgattatagaaatacaaggatatggtccaaaaagcaccgcaagagctgcccttacaaatgctgtgcctcttgtaactaaatacgcttctggtttccttaaccctaaaacccctcacattatgcagctgttagatgaactttatccctcattccctgtttttagttttaacaactgttttgatactaatgagttttcataccgatccgtacctgaaagtcatactccacatattgcatggattggacgaattgaagataataagaattggagagaatttttaaaaataggcagtgaattagttcataattataattcaggcatacaattacatatgtttgaagatcctactataagtgaaccaaaagaaagagctgaatttaaaaatttaattaaagaattaaatttagaggcaaaccttctgcttcacgcaaatgtccctaacaatgaaatggcaaattatttttcaatgatcggtgaatctggtggctttttatgctctacctctaaagtagagggagcaccttattcgcttcttgaagcaatgagctgtaagtgtcccgtattgacaacagactctgatggtgtaaaaagttcaattattcataatcaaacaggaaaatattatacgttaggtaatgttgatgaagctgttaaagaagcaaaagagttgataatggattctcaattaagagagtacatacgtaaaaatgctctccagcatgtaaagataaactttagtccggaattatactgtacaaattttattgctatgattaggtcccttggaatatgataataaataaaataccagagcctttacatgctctggtattttatttaagttggattttcattttctgtttccaaacctttagcctgtttgtacaatgacagaacattattaatcatggtatcaagagaccatcgctctttcgcccactccttagtacagacagccagttgtttgcgaagaatatcattttcaagtaaatatcttaactgatcatatagttcatggatgtttccaacagaggaaactaatccgcttctgccgatctcaaccatttcaggtaaacctgccgtattgcttacaagaaccggtaaacctgcgagttgagcttccatgacagaataaggctgggtatcatgtatactaggatgaacaaaaatatctgcctctctgagaaaatgagcaatatcattagaaattcctaaaaatctaacgtggttactaagttctaaactttggcattgttcttgcaactccgcttttaattctccttctccgagtatccagcattcccaatcatctctatcctcttttaaaagcgcaagtgcatcaagtagatgatgaataccctttaaataaacgagcctccccataaacaggataattctctttcccttttttggtccaataatagggcatttcatagaatctccttgaaaatttttaatatctaatccgtatgaaaaagtcattattttatccggggaaatagaaaagttatctataatattattacgcatccaaagcgtaggactatgaatcaaagtactagattgatatcctagacgttcaagggttttatggtattgatattcaaatgtatcttgcagttgttgatctgtttttttacgatgcatggtcttaagggtaaagaaaatatcccttgataggttacctagtgcacttgtaacaagggggatatgtgaaggttttactctacttatagcccttgctgctgttacatctagtgcatgaataatgtcatactgttggagattataatatgctgctgatagttccaagctataacgaaatatttcaacattatatatccagctgtttataggtaatgaaggcatctctgttacgatcttttctttaatataaggagaaatatcatcaatttctatttctgattcttgccctataattcgatatttggttgtatcaggagtatggctgagtatatcgacagaatgtcccaagtcttcaagagattttttgagtagtgatacaaacgtccaaactccccctgtataggggagtggataataggaaaccaataaaatcttcatttataatcatcccttaattgttttgcatatattttggtgttgggtgtgcaaacctataacaacattgtagaaagctagactagcttactgagtatatttaaaaattatatttataacctgaggatcaggaattttatagtctggatgcaatttggtttttatc

SEQ ID NO: 174 - DNA, 2606 bp, Priestia aryabhattai
  source 1..2606: mol_type = genomic DNA
aaggggtataaaaatgttataagacaaaccttaataatcgagatagaaataacaagagagatcatgattgtgacagcattgaaagaaggtttcactagtaagaatacaattagactaagtaaaagaattgatcacttattaaatgaattagataagattaataaacgcgattattaaaaaagcccccaattaagcaaacagattttttatttactctgtctacttaattgggagcatatcactcttattagctggttgctccttttacaaatcctttataagcaaaagcagcaagtgaaagacaaattagtgtaaagactcctaaataaagaagtgctggtacaatatgagcaatgtctctcccacgtgccataatatccatgaatgctttgtgcgcccaatattgtggcaggaaatgtgctgtcgtctgtattgcttttggcattaattcaagtggcacccacagtcctccgagtgctgctccacctaatgtaacaagctgagtaatccctattgccatttgctcactctttgccacaaaagctactaataaacccaacgacgttcctgctaatgataacagaacagaaagaagtgcaattgctccaaaatttccaatatggagattataaacgaagtgcccaaatgtgagaagaaccgtaatttgaacaaggacaagaataacattaggaatccacatgccaatcatataatgaaaacgattcatcggcgtactgaataagcgtgacaacattccactttcacgatctttcatgaatgtacgggccatcgtaataatgataaaaaagacaaacatgactgtataacctggaacaatttgtgtaacagcgtttactttctttgcaataatttttttatcttgaatttgcaagggggaagcgagcatatccttcgttttttgcgaatccttattctgcatggaaataatctgctctatcttatgttcacggtacccattgctcaaattatcaagcagcgattttaccggagctactgcctgtgcttccccttgtgtgccatcataataaaaatgaacacttgtttgattacctctacttaaggaatcaccaaatcctttaggaataacgatgagggtttggattttcccatcacttaattgtttaactgcattctttacggagacctcttttttagtatcaaaactatcaatcttatcaatagattttaaaaatgtatttgatgcctctgagtgatcctgatccacaaaatgaatatcgaaggaatagttagtatttccgaagatagatgaaaagacaacaataaataatataggcaaaccaaacgtccaaaaataaatggctttctgtttacccattctttttatttctttctttagaattgttcctaccataccatttccccctcaggcatcacgaagtgatttcccagtcaattgaaggaaaacatcttctaaattcggtttagaaatttccaaccggtgtacatcgttgccattctgttgaagctttttagataaggaatggagggtggataatggctcttttgtttcaattaaatatcccccatcttttctaagaacatttccataagactcaagaacggattcttctactgaagttgcttcaacatacagggagggtgttgcatattttgaaagaatgtccgaaacggttccctgttctataaccatcccattatcaattagagcgatataatcgcaaaggttttcgatttcttccatgtaatggctagaatataatactgtaacgccttccttttttaaggaatggataatttcaaaaatatagtttctagaatgtggatctactccgacagtaggttcatccataataaggaacttagggagatgcaagagagcacatccaatattaattctgcgtttcattccaccagagaacttctgaatggcatcattaccacgatcattgaggcccactaattttagaacttcttcaactcgttcttttaacgcggctcctttcaatccatacaatgatccgaaaaaagataggttatcttttgccgataatgtttcattaagaacgatatcctgagggacataacccattttggactttatttctttggaatctgattttgcattttgattgaatagatgaacatccccttcatagtcttgtagaataccggataagattttcatcattgtcgattttccagctccatttggaccaattaagccaaaacaggtaccttcagaaattgaaaatgaaacgccttttaatgcttcaatttttccataatgcttttttacgtttaatatctcaatcatttaaatcccccctaatctagtaataatacaataggaactatttaattcctttattacaaagatgaccacttgtgaaaatataattattgtacccctttcaagatttaatcatattttccaaatgctctttttatgtattcttaagaactataacccttcttcatgaattattaggagtaaggaaattaaaggaaaataaaataaattctacaaaataataagtaagtagatacataacccattttttagcatagaggggatctaggtagttatttttaccatagcactt

SEQ ID NO: 175 - DNA, 2573 bp, Priestia aryabhattai
  source 1..2573: mol_type = genomic DNA
tgggaccgatcaatttaccgtgttggtatcagacggtcaaggaggaacggctgtttccacggtgacggtgattgtcacgccggtgaatgatgcaccaacggtgccaaactacacgttcagcacgcaggaagatagcccggtagtaggagccatagtagggacagatgtagatggaaatcctcttagttatcagctgcaagctgcgccaaccaacggagtggcggcagtaaatgtcaatggaacctttagctatcaaccaaatccgaattttaatggaaccgatcaatttaccgtgttggtatcagatggtcagggaggaacggccgtttccatagtaagcatcaatgtcataccagtaaatgatcctccaattacgtctaatgtcagctttaccattgcggaagacagcacgttaatcaatcaaatcgtggcggtagacccagatggagattcattaacgtttagtttgcaagctgcgcctggcaacggggtagccgtggtaaatgcagatggaatctttagctatcagccaaatccgaattttaatgggaccgatcaatttaccgtattggtatcagacggtcaaggaggaacggccgtttccacggtgacggtgattgtcacgccggtgaatgatgcaccaacggttccaaactacacgttcagcacacaagaagatagcccagtaataggagccatagtagggacagatgtagatagaaatcctcttagttatcagctgcaagttgcgccaaccaacggagtggcggcagtaaatgccaatggaacctttagctatcaaccaaatccgaattttaatgggaccgatcaatttaccgtgttggtatcagatgaccagggaggaacggccgtttccacagtaaccatcaatgtcataccagtaaatgatcctccaattacgtccaatgtcagctttgccattgcggaagacagcacgttaatcaatcaaatcgtggcggtagacccagatggagattcattaacgtttagtttacaagctgcgcctggcaacggagtagccgtagtaaatgcagatggaatctttagctatcagccaaatctgaattttaatgggactgatctatttacggtgttggtatcggatggtcaaggaggaacggccgtttccacggtgacggtgattgtcacgccggtgaatgatgcaccaacggttctaaactacacgttcagtacacaagaagacagcccagtagtaggagctatagtagggacagatgtagatggaaatcctcttagttatcagctgcaagttgcgccaatcaacggagtggcggcagtgaatacggatggaacctttagctaccagccaaatctaaattttaatgggagcgatcagtttacgatattggtatcggatggtcaaggaggaacggccgtttcgaccgtcacgatcaatgtaattccagtgaacgatcccccaatcactgctgatttagcatttacaattaatgaagatacacctctcacaaatcaaattccagcgttcgatccagatggagacttgttaacatttactttactgaatccacctccatcaaatggaagtgttgtattaggggcaaatggagtatttacctatacaccaaatctaaattataacgggacggatactttcagtgtgttggtatcagatggtcaaggaggatcttccctttccactgtaaccttaacaattgttccagtaaacgatcctccaataggaggagatagggctgttacaacgactattaaccttcctgttacaagtagtatacctgcttcagaccctgacgatattacactaacctatactcttcagcaaattccagccaatgggagtgctattgtaaatcaagacggcatcttcacatatatacctaacaacaattttgtaggtaatgatcaattcaccatattaataactgatctagaaggggcgaccgcactgtcaaatatatttgtgacggtactccaaacaaatggatccacaaccacacaagatttacagatctctactaatgaagatacgccagtaacaaatcaagttattgctactaatgtaaatgggaacccacttatttatactattgaaaatttacctattaatggagtagtaacaattgattctaatacaggaatatttacgtatacaccgaatacagacttttatggttcagatgcgttcgtagtatatataactgataacttgggaggaaacgctacttcatcagttatagttacggttgctcctataaacgactctccaatcgttccaaattatcagttaaccaccaatgaagacacatcagtagcttctatggtaattgcaactgatagtgatagtaatcagcttacttattctctacaaaatgctcccgtgaatgggacagtagacgtaggaatagatgggatgtatacctatactcctaatgcggattttaacggaattgaccaatttacagtgctagtaagtgatgagcaaggaggaacggcagtttctacaatcacgattacgattctgccagtaaatgatccgccagtggggccagtag

SEQ ID NO: 176 - DNA, 2512 bp, Priestia aryabhattai
  source 1..2512: mol_type = genomic DNA
ggagaatttcccctgttaatccaatgttaaacaaaaaataaggaaatgataagtaacatactgtacctggttcatatcaaaataaatattcatacaaattttgtttacataaaatccattatgttaactaaacatgtataagatatacagcttgaaaaaacgaacagatactattctgctcgttttttatacagtgctaaagattaagcaccaagttgtttgagaatatcgtgtacatcaacatgagatcttttttcaatgattttactgtcctgaattcgtaaaagcatcattaaagaaaatttcacgtgttttcctgttgcaggaataccagcaaacggtattcctgtatgtgttccttcaaatataaaataaacagctacttgatcaccttcagccagcatggctttaatcggcattttgaatcctggaaaagcatcaaagtttttcttttcagattcgatcagcccctctacaccaggaaatggtgtatcaatctgcggataaaatacaaaatcttcatggcaaaactcattcagcgcctcatagttctcctcttgaatagcttcataaaaatgacgcactaattctttattcatttcaacagacatcattacctctcctctctctctcaaaagaaacacaaccatgtttgtccattttcacttaaaaagtgtaggattcaccatcatctggcactaaaacagtagaagacatttctttttcattgataaacctgtttaattcttctcttgataagttccagtggttaacagcctccatgtggactacaataatttttgcatcaggggcagctttatatacttcataaatgtcctctttccccatgatgagagaaccaccttcaaagaattgattatctccaccatttaccacaatgatttctggtttatgtgtatcaattgttttttggatctcgtcataccatacagtatctccagctacatataatgttttttcactgtggtgtttgaagatcacaccacatactaaaccagcaagttttaaaatttctcctcttccgtgttcaccttttgttttaattaattggataccttcaaacactgtatcttcttgcaatacctctacattctgaaaacccgcattttttacttctgtcgcatcttcttcattttgaacaaacattttaatatcttttggcaatattctttgcgcagcctcgtcaaagtgatctaaatgtaagtgggtgacaatgactgcatcaataccttcgatgatattttcaacaggtgtgggcaaactaactaaaggattattttgatcttgtcttggtgaatttgggaaaggtggatacgtacctttctcagctaacattggatctattaaaaattttttatttgcatactcaacaaggattgttgcatttcgaatttggttaattttcatcttactctctccttttctttaatctacgtatagcttatactatgcccagtgcctgaatacatagataaaatcaagtcttttatccgtttgacttgatttttgaaaggatttgaaaacatgttagatcatacagatatgagtatcttacatgagctatccaaaaatagtcgtattaagatgaaagaattgggtgagaaggtccatttaactggtcaagcagctgcgtctagagtagcgaaattagaggataatggtttaattgaggcatatacaattaaggttaaccaatctgaattaggatgttttatgcatgcttttattaatatctatttaaatgacattcatcatcggccgtttctttcatttgtaaaaacacaaaatcaattcatcttaaataactataagattagtggagatggatgctacctgcttgaatgtagatttccctctaatgaatatttaaatgaatttctagagaacttaaatgagtttgcgaattataaaatatccactgttattaataaactgtaataaatagcattagaaaaagccttatatagaaatataaggcttttttagtacctataatttacattatggtgactacttctgaatatggagtacataattctttagtttaagaaatcctttttatatcgagcagcaagatatatacctgaagcaatgaatgcaagagaatatttaaataagaagaagatttgccacatatactctttcgggaaaattaggtcgcacaaaatgattccacacaacataacaagggcactttttaaatttatttggcttgttctttcgtcagccacgcccatacccattttcttctgtaatacgtataccataatcattgcgattataagcgataacagtccaataccaataagcatattccagttactatttgattgttctgtccaggttttcaaaggataaaagacggcattttctattttgtccgttatcatttcaatcacttcctctcacataactaaaaatatcgttaacatccacatcaaaaaagtcagctattcgaaaagctaaaacaagagaaggagaataattattc

SEQ ID NO: 177 - DNA, 2509 bp, Priestia aryabhattai
  source 1..2509: mol_type = genomic DNA
cacatgtgaagtggtgggaggtacttggaaatttaactactcataacgcatatcacattggtcaaatcatttatattcggaaactacaaaaaagttggaaagaaaatagtggtgaagaggattaatcgaagtcgataattgatgtctctgaatgaaatggagcataaagttctcctttcttatgtagaacgtattatttagcaaaagctcgaaatgttaataaatcaacgatgtataaatgataaatttagaatttaggcgagcccttatgcatcaagggctcgtttgcttgcttagttccgtaaagagacattatgttatgtttacataatgtctctttacggaacccaagtcctagggtaattaacctagttctttttcttgctgttttagtaccttactttcgagttctaattgcctcattcttctttgaagttctaaattattaaattctttctctaactctgaagataacttgattctttgcttagcattctccattaattctctagtaattgttagtcttttttcatttttatcaaattgatcttttagattcatattaacagccccttccccatgacttgctatgttcgacactaaaggacaaaaaacctttaaaacagatggatattagccgcctactaagcataggagttctgatgtgaaaaattctcctttgtctacacttaaagtaaatagtaaaattaatgattttactatttactttatcatttacttaacataacttttattacaggaatcaaaaagccctttccattcactcaaatacattttatctctaatttctaattcgacaggcaacctagaaatgaattccaaactatttttatccggatcatttatatctgttgctttgaaataaagtttgatcaaattaatacttataaccttgataaacgaacaaaaagaaaaagcgtgttttttaaaaaaattgatcaaaatacgctctacagatattcaactgaactattcttttataaaaatgtttgatcagttctgtgattcttatgccattaaagcgcactttagctaaataataatatattcaactttattttctattaaaatatctcttctctcgtcaacaataactatattagtcaattaatcctaaaaagttttttccaagaatatattccttttggttatcaggaatatgaagtgattcaatccagcttttctttgccgaatagtcataatcattaaattctttcattccataaggtccgtcgcaaccataaagaactttacgaaatcctaaagattcaactgccttctttacaatcgattggttaagataatcacttgatgtgtcaacatatacatttggttgatccttaacgtatttccatagttttttccaaaatggaagacctgcgtgagcataaattaattttagtttagggtaattttcaggtaaatatttataggagtcagcttctgaagatagatgaataatcataggtatgccttttgattcacacaaagccgcaattggatcaagtgctttaatactatattcatgcatgaacggatgagctttcactccaataaaactagggttattaagatagaattctacttcttccattgattcatgagtcagtgggttcactgctacccagcctagaaatcgttccggaaatctagcaattgcactagcaactatatcattacttggcttagtgaaaatcttgtatgaattgccataaagtttcaaaaagccatcctttactagaccatcataaattttaagtccaatttgaggtgcatttaatattaaaaaccggaaaaagtgttgtaaattatgttgaaaggcgctatccacttcaaacattgtttcattcatagaggccattagcactgttttagttatatcatttttatccataccctctatcattttttctagagtcaacattttttcatctacatgaaaatggcaatcaacaatcattttaatcttccctttccaattactattataatattaaactacttaactgaatttcttctaccagagtacgctttctttatttatgtggtaggaccccatattaagcttcctttctacatctaacgtattccgtattttaccatataaaattcaaaataatttcgaattcttattaataactctccaatattctcaataatccttactccagagaatggccctttaattgaacaatacagctgaagtttaatagtcaaaagaaaaactctatattactaaagggttgctataaatttttagtcaacataatcacgctttccagaacacatgaaaaaggaaaccctttggcgtagaaggattttacctttttaagtccaagtaagatactaatagtgacttataaagcaattgaaggatgcagaaatggagggaagtaagttgcctaacagagagtatccatactatttcataaagttaggtaaattatattacgcatatcattcgtataagaacgtaaaaaagaaagag

SEQ ID NO: 178 - DNA, 2490 bp, Priestia aryabhattai
  source 1..2490: mol_type = genomic DNA
tacatgaaggaaatttttatagggaaaaattcatgtgaaaattgcttaattgtatttttttgcttcagtaatgatagcaataagttttagtctgcctttcgcagaaatatatgacaaatgtaagtatgttaattaggtttgtctatcgtatgcaaagaagaaggtcatattaaagaccttcttcttttatggggtttaggattatatacaaagcttatgaagcactttctataatacatttcctatttcataaaagaaaaatgtactaactaagtacacaagcgtccctaaaattttcatcttcaaatcgaaataaccttaattttacctcaaagtaaaatatgatgtcaatgataaattgcgtttttttggaaaaatgttataatagtcttacaatcgcttcttgatcgtattttaaattctactgtattttttacaggtagcattatggacacgcttttcaatatccttttttagaacgaagaaaaatccgaacaattgtgtgaactttaaaggtaagttagttgaataaaattatcaatttgctatctaatagtaaccgagtttttattctacaaggaggcctaaaattatgaatttaatcaataagaaagttacacacaagcattttggaaccggtagtatagttaaatataatgattctagtattgaaatacattttgcatcggaaaataaaaagtttgtttttcccgatgtatttggaaagcacctaaaactgcatgataagagtgttgccaattcacttgagaaaattatacaagaaaaagaaatggaacgaaaggaggaagaacggaagaaggaagaggaaaaaatactacaacgaaaaaatcaggaacttcgctggggacatgaaaaacttatgaaaaatcataaacttcatcccgaatcacaaatggttttttggtgtgatgcagaagaaaagaatagctctttttcggaatggaaggttttttcagggattgtaaaaagtggtaataataaagggaatccaaccaagcccaatcgcttgcaccaaaatagcgctgtcttgttaacagcaatagattccagtatgcctgaaaaagacagacgtatcttaggtgtctatatggtgaatgaagattttatcggtaagctttgtgaagatggatatattcctgctcattcaaaacatagaatcaaacttacagaacaggaatcggaccagatgcttttctgggaatattatgtaaatgaaaggtcctcccaaaaaattacatggaatacagggaaatatcgttattttgataattcatggatggctcaaattttgcttgatatagtttcgttgaaaagtgactcaaaggaacaagaacaggcacaacaattttttgaacatttttgtaaaatgaatctgataacggctcaagagttaccaaagcctaatggcgcattgatgcgtatttagacgttagttcaaagatgataataatgacaggggactcattaatagcgaacagtgtgtgaatctgtttgctattaagcgtgtaaataaaatgtgttattttaattaagagtatctccagttttaaaaggaaaaataggacaagtcaatctttattggccgatttttccttttaaattgagaatttcctaatttattttatatgttctgcacagcatatagtaacaattcttctacattccttttgcctaattccttggctttttgctgcaattctttcttcaaatcatttgttacttttactcgtatcacttccaaatcgctatcaatataaatgccacggctacgcttgttaattttccctgaaacaagaaccgactctaataattcaacgatttcttgtgctgattccgtcagtaatactggtttaatttcaatcaaaaattgctctttctcttcttgtggtgtaatcctcatattggtcgggcttaggtattgatagaataaatccatgagcttataaagctgtgatttcgcataggctgtttgcttaaaggcaaacgttgcatagccttctttggtaattgtttttttcgattcaatctcatagcctgcttcaaaacctcggtgaagcaactcctctaatgttacctcttcatgttgttctgtaaccgccataatcggatcttctaccgagatgatacgagcagactgcgctttttcttcgcctttcttcacaaaaagctgaaatagtgcaatattttgttcggcatggtaaaaatgacgcttgctcggtttgcgccccgcttcatgcgttcgcttaaactcttcttaatcttccttatttacaaaataacaattgattcctcggtattcttcttggaacgctggtaacagttcttgcttaatatacttattcaccgttgtgaccgagatatcaaattcataacgtccttcaatatgccagtcatctttattaataggatttaatttctcttgttgaatatatgtatatattgttttctttgatgatatagataacattt

SEQ ID NO: 179 - DNA, 2473 bp, Priestia aryabhattai
  source 1..2473: mol_type = genomic DNA
taggttcgagtcctacctgtggagccataaggagaagtactcaagtggctgaagaggcgcccctgctaagggtgtaggtcgtgtaagcggcgcgagggttcaaatccctccttctccgccagtcgttctaattaaatatggcccgttggtcaagcggttaagacaccgccctttcacggcggtaacacgggttcgaatcccgtacgggtcatcaaaagagcagtttgcatatgcaaactgctcttttatctacgtatattcatgtgtaatactccctggatgttattctaaaggaatccctctttttatgtcgaaagttagtaagtgttaaggagggttttagatgcctgaaaatttagtgaaagaactgttagataaaggctttaaagtagtggacttaacatgtgtgggcactataaatatcatttcagcaaaggaactgtatttagacgaaatgagtactgacgccatagttgatatgttatcactagatgaaaacagtattaggttttcccttgatgaaaaacttccttattttgaggcaagtaccaaaccattagccggatatatcaatttagaaagcgaactgcccatagtagaggatgcaattattgactacaaagtgtatgttaaagaagcaattcttcagtctaagtagttagtaaaaaagcagtttacatttgtaaactgcttttaattaaatacgaaatgaaattctaatgcaaaaactacaaaatactcgtggctaatctcctaagcttgaatatactaatactagcaatctaaaaatgaaactaacatcccatgctataataaataaaaactgaatactaggggcaatgaatgatggaagaattaaaacaagaagagcaaaaagcaggtaaactgtatgaaaaagggtttaagtggatgcgttttgtaagcttttttatggttgtaaacctcattttcaccgtagctttagtagcagttgccttagtagcccctcaaattcaagaaacttttcgatgggtagcatttggtgtatatgggcttacagtactttatcttatctttatgcgtgaggtagccttcagaaagacatttgaatctttggtagtttggatgcgaactgtatggaattttagctttattgctagcgcgtttggggcagtcacgatgttcgtagttaatactcactggactctattttaaagggatacctgtttatgttgaaagtaaaaataaaggaggaatacatatgaacccatacgaacaatttcaattaaataaagaggtagaagagatggctaaacaacgaattgaaatccataaaaagcgaatacaactatctgaagagctggaaaacagcttgggtaacgaagaactccaagatagaatcatcgaattggaagaagaaagccaaaaacttaagaagaaaattgaagctttacaggctaacttttgagcattggtatgctcccagtatagtggaccagtaaaagaaagaaacctattcccacacaaaggaataggttcaatgaagtaagatgatataggtgtatataactatttaacatcaaatgcatttctattataatctatattggaaaataaagcacttacattttataaaaagcataaaaaaaatccgtaaccacgaagggtaacggactcgttggaagttgattttaagaaccaatatgcatctattagtttaccatattattcatctaaatgaaagcgatttcaaaaaactgatacacaatacaaaaaggcatataaaagacacagacttatctgcataagattttcaaaggtacattaatacccaaaattgcatcacattaaaaaatatcattgtcttttagtagatagtttaagtgtgataaagctgaatattcaaaataaaaggctacatcattttaaaatgatgtagccttttattttgaatattagatgaaatttgtaaaaaaataatcagttcctctacaagtatatcacactcatatgaatgataaatgaattttttgggggatgtgtgtatgtacaaacgtaccgttttttatgcattacgtatcttttagaaaaagccctttttttagttatgcttcgaaaagagtctgcatcctttttggtgtaaactctttttatactcatgatataaagtgaggtacataaggaaatagatttgaatatcgaagggaatacaagttccacttaatttgcataattgttgatatatgtaatgttttgtagataattatgttgctcccacatattgaatatttatcctatatcaagtacaataggttgaatataagttcaacttaaaaaatgaggtgtttataaatgaaaatttcacgctttaataaagactgcggtaactctgtcgatatgaacattatggatggatatctatttgatttcccaacgaatgtagtcgaactgcaaaaagatgctgctgattcgttctttacagatgcagtgacat

SEQ ID NO: 180 - DNA, 2417 bp, Priestia aryabhattai
  source 1..2417: mol_type = genomic DNA
aagtggaaaatctagaaacatttaaggtagaatattctgtaacaaaaaataataccacagttaataaatccgtcattataaaatctattaacgatccaaatgaagttataagattggctagattagatatatctacaaaggaaagaatcttcattcaagatgtaaaagttttgagcttcaaaactatataacaaattcattccaccatgagtaaattttcataccttgagtgttgttagaatagagaaaatgttaatataagaaaaaaggcagctaaacttttttttctaattttataataggtgatgaatttgaaaatagtgaaattattaatagcaatgactgctgttttactttttatatctggttgcagtacgcaagtagcaaaagataaaaataaggtagaagatatttcaaggcatagcgtatttaatttagatgctgaaactattaaagacttagaaaaaggaatcataaaaggaacacctttaaggcttgataatgatactaaaatgagtgatgtagaaagaatttggggcaaaccaaacgaacattttgacaatgaagacattcaaacatatagatatacaattgaaaatcaaaatttcattattgacgaagatgaaatgaacgaaatttatataattcaagttgaacttgattattcaaaagatgaaattttagagataatgggtaaaccaacagaacctgggaatatttttatttatgaaaaagaaaattatattattcaatttgagaaattccataataaatggcgactaattttaagagaaagataggctgtttttacatttgttttcctatttgcactcatatccggcttcgttgcagagcattaacaactaatacccttaaagagacaaaccttttaatgacggtttgtttttttatgctattgctctcaacaaagagagccttcttctgaactgataggcgtaaatgtctttacccatttataaattgttacttctgatacgccatattcgctgcttaaatctttaatcgagtttcccacatgatataaatccaccatggttttcttaaacccatcattgtattttttgcctgcacatttaccctctatttcggacacatcctcttaaaggtcattgtaaggacttaattaaatggtgtccactaactccacttaccattgtcagccgcattctgggccatactgagcagtctaaaacctctaaagcaaactattactccagttccccataatattaaagccgagccaaaacctacagatacccaccataccataatgtgatgatcgcttattgttgtttttacaggaaaagttagcatgacaagcgttgctagcaaacacagaagtgcccctgtaatataataagttggaacttgaaatagggatgctaaaggaaaaaaatgagcaccgacaataagggccataacaggaacaaacaaatctaagtgattagtagatgcacaaataaaagaagccatagcaatcaaaagaccttctaaactgaaaataataccaaaccatatattcttttttctccaatgctttctatcctttttgattacttcattagataatggactagacttctttattaatgccattgcaccgataaataataggactccaatcaatagagacaggataataagtacaagaaattcccatccctgcattcccctaattccaattcctgcccaaagtgttccgaaaaatgccatgaagataacgccagctgctgtaccacgcacggcagctctgggaatagtagtttgagacatctactataacctccttttttatttcaattgaaaggtctttctatgtttataatttataaatccattgtacaacttattctatttaattatttaacagctacattttcagtgaaacaattgtagtaatttggataacaaagaatagttagtcattttctcctaagggtatatataaaatatattgtattcttataaactgcttatgagaaaagaggactgtgtatgctagatgaatatgaagtgttcttatttacgagggaactttcaaatttaactaaaggctatcctacctgtatagatcctttaacgaaagaaagagtgtatcagcagatgaaactactacatgaggttcttctctcacactatcatagtgaattcaaatcacctttacagtgattttttatttaataacaggcgtctgccaactatcactctttacaagtttagtctaaaagaccctctaattcattagagggtctttttaataatcactagttgtatccatacgatatattactgttctttaagatggataaaataatcttctaaagcttgcaatgaaagggcttctttgtaatcgaacttgctatcttcatctggtatttcataatgagaccaaggaa

SEQ ID NO: 181 - DNA, 2388 bp, Priestia aryabhattai
  source 1..2388: mol_type = genomic DNA
aaaaaagaaaaaagcaatcaaataattatagtctaatttgattgcttttttgcattaatttacttgttgttaagtagcgtctcaccgccactgaaatgattgatgcttatctcttcaatcattacttgtacaacttttataggtcttcttttgaatcctttttactttttttaacggcgaagtttgtcccaattacaccaatgataatcataattccaccaattaagtgataaaaatgaaacgcctcgtttaagaataaaacaccggcaataatggtaattagcgtagcaacgttactgaaaacactcatttgagctgctgctattttagacaaagcatagtttgaaaggtatgaggtcccaagtgatgacaatatccctagatataaaatagctaataaaaatttttcatgatatacgttatggttaataaggaatagcgttgtgtaagctttcttgttagaacattatacaaagcatttgtgatggcagatatgataataaatgcactaccgactaaattcgctgtttcagcccctgatccactcatcatcatcaagtaaataactccaattactgataaagaatctagaacatttatatctcatgtattaaacagtgtcccctctattgctttgatataccgatctgctgatttctgaacagcttgttctgcattttccattactactcgattaaatgcattatagatacggttaaacgataaatctttaactttatctgctatctctcttactttgcttgctggaagtggaatgaaatttgggtaactgtacataaagcttacccactgacggtcggcagctacttgcataatatcaccagtaaataaaattcttttattattgtctccatttttccaatgtaagacagctcctcctttaaaatgaccgcccagtcggtatagggttataccatttgttaattcaagggattcgcctgaccaaaatttaattttatcactttgtcgcactatccactccttatcatcctcatggatgtagataggggcattaaatgtctctgcccattcaacttgtgtagagtaataatgtggatgagaaagagcaattgcttggattccacccacattattaattttctcgatagttttctcatctaaatatgtaatacagtcccataacatattaaagccttgattttggatgagaaaagctgtttgaccaattgcaaattcaggacttgttgtaatactatataaatttttctcttcctgaagaatttcatttttaaaagagttaccttgttgcatagcttctaatgttgtccatgattgtcctaaaggatttacgtattgtctctcctcattacaaatcagacaatctactggagcttcttgcctttgaggatattggacaccgcatgtagtacaaatataatttggcatatgtttacactccctttctttatttttaattcaaatgacaccataaataatcgctaatttttataaagtagacttttttataactgccttaacaaaaatgtgcgtttttgttagagtgattaatgatatgcttttaacttagtaaacttgcatagtagctataacaacaataatatttgtaacaatattcggtagaggagaggattaatatgaagtttggctacatgtgtgtgtatacatctttagttaacataatggagtttatcggtatctcttgaaaaaagtaaagttaactttacatataatccattttctgctagcatatatgtaaagtaagctttacatatatgctgaaggaggttatagattgaaaaaccggtgtaaagaatttcgagagaaattcagccttactcaacaggatttagcagaaaaagtaggcgtctcgcgtcaaaccattatttcattagaaaacggaaaatataaaccctctatctttcttgcatataagatttcaaaagtatttaattcgatgattgaggatatttttatttttgaggaggaaaaaacagatgaataaaaaaggttggaatttgattgtaatattaacaggatgttttttattggtgattaatagtctgttcttcacaagcgttatttcaataatttcagcattgattgtaattataggaggaatttttagttacatatttgctgctcaaggaaatccgaaaaaaaatgatgaacttgatgaaagatcagattttataattgagaaatcagcctctttgggattttgggttacccttttagttgtagcttttctttctcttgttgcagtcctagcaaaacttactgtttcgcaatttgctataagtttaatggttattatgactttggtttatttgtccggtatgtcctactatagtaagcgatattaaaatgaatattatatacaaagtc

SEQ ID NO: 182 - DNA, 2378 bp, Priestia aryabhattai
  source 1..2378: mol_type = genomic DNA
gttgtacttaaactaattggtttgtccaagcgtaaaaacttacttgtcatataataataaataatatagaaaggaggtcattacatgactagattattagatgctagaacatcccaaaatgctagcatcgctaactctatttctattcctattactattctctcgcagccgggattatttggacaaattgggcttaatgtttcaggagctacaggccctatccgtactcaattaagcgggacagttgcttgccaattacctctactacctgcagcaacaacgattactattacaatagtcagaggaactgccctcactgatcctgtcatttattcctcttcagaatccttaaatataaatctattaggcccccaactttttaccttcacagcttctgattttaacatccctgcaccggcttctggccttttagtctatacggcatttattggctcaaatctcctaggaaccgtgagagtgggaccagagagttttaatggtattgcttactcagactaataccaaataaaaatcttgtcacttttcccctcagatggtgaatctaaacactagaattgtttaattcccttgtccatttaataatttcatctataaaatataaaaagcactttccacaagaaaagtgcttttttcctattctcaggaaagtaaataacgaataaatttagctaaatatatccatgagtttaaatatgacgtaataatctttagaactctatataattctggtgtactctaaaactattaactgagggaaccgttttttagactatccctctctttttctgctagtaacctcttaatagataaaaaaacccaagattattacgattatctctttattttaatttgtagcgttaaaaaaataactcataattatgagctaagtagagaaacaaatattgcgattaacacttgaattgccacttgaatatttaaagcaacatctgcatcagttgtattaacttttacatttattgatccttcaataactgttttttgactattccgttgtttagtccccaatagtgctgtcatttcttcagctacaatttcaccctgattgacattacttgtgagaatggctacaacggctgcaatagctacctgaatagcaacttgtagttgtaccgctacttgtgcatctgttgtgtttacttcaacaccctcagaatctttaacaataatccattcaaaggattgttgttcaattgaacttgctgcttctgcatcctgatcgataactgctccattatgagttccagttttacaatggtctagtgctctccatttttgttcacccatactatttcacctctttaaatttttaattaaataagaattaagaactaaggacagaaacaaatactgcaattagtgcttgaactgctacctgaatgtttacagcggcatctacatcagttgttgtaattttgacatcttttgaatttacaatgacaattttttgtttgttagtttgctcaaggttagcatgtgctagtaagtcttgagctataacttcagaatttgcaacattagcggaaagaatggaaattactactccaagagctacttggatagcaacttgaagctgcacagctacctgagtatctgttgtagtaacttcaatgtcgcatgaatctttaatccaaattaattcagtagattcttgatccacaaatgaaaatgcatctggttcttgctcaataactgcatcctctttactctcgtcctcaaaatgattatcgctttcaaataaatgggaaaaatgatcatcctcttctaattcgaaacgacttttgtgatcatgatcagaatgcttctttttacttcttttctttacttcacgagactcataacgtttatgagttggcatgattaacactcctttccttatatgaaataatatatgatttttgaaatgaataggattgggctaaaccctaagagtttatgtccaattttaaaatagaaaaaacgcctaaaaaggcgctcttaagaaaaaacagaattattttggtttcgtttttggagaattggacttggccctatcaacaagtgaaccggattgctgttttaattcttctaataaatcgaagattagttgcttttgttcatcagttactttccctttaacattctcttttgtaataccgtgtttttgaagaatgtttagcatcattaattccataagtttgttaggggtttccccgggcttttggtttgaattattcaagttacctgctcctttcatgatatttgccataatactatatgtatttactgcacaaaaggaaactcctgagttcgacctttatttccaaatattataagttttaaaatgatgccaggggtat

SEQ ID NO: 183 - DNA, 2359 bp, Priestia aryabhattai
  source 1..2359: mol_type = genomic DNA
gttttatggtgcgacaagaagtcgctttcttacagtgtagctaacgctactcatttagacgcaaagatgatctccatccgaaacggcactcttggtaacgagtctgtcggttgcatgaggaaatgtggaaacagaggacaaatgcatggtccagaatactgctaggagaaaataggtacggcaaacgaaagtgaaggtttgtaagcttcgtcaaggttagctcaagataatgcacagctttgcttgggtcttggcaagaggaacagtagaatcataaagctactctgatgcgtcccgcatcttgcccggagtaaagaacctgccttcccctattgcatctgtagaaagtggaacttggtaaaccctatgtcatctgcataagcagtaggatgactgcaaagtcaaacaatgtgacagagggtatgggatatgagaaaaagcgaaagccgttaccctgaaaaggaacaggaaagcagaatgattgtataactggacggatactgtcggctttgcggacaatgacaggctcgaaagagcgcccacttctcattggtcttcaacacgaaaataaatttgtggctatcttctaacgaaaaggagcgtgctgttatgaatacctctttacgagcgtcggcgcacgtctcgcataaagattggtactctattgattggagtattatacaaaaatatgtagcgaagttacgacaaagaatttatcgtgccgaacaacaaaatcaacaaagaaaagtaaggaaacttcaacgtttactccttcggagtaaagcaaatctactgctttctattcgcagagtaacacaacaaaataacggtaagcgaacacctggtatagatggctatacggcctcaaaaccaagcgaacgtatcaaactgtataaacaactagttaaatgcaatgtctttcgacatcgtccaaagtcagcaaaacgaacgtttatcccgaagaaaaaaggaaagctaagacctttgggcattcctacgatgcgagatcgagtctatcaaaacgtagtaaaaaacgcactcgaaccccaatgggaggttaagtttgagcctacttcctacggttttcgtcctaaacgaggcacacacgatgctataagcaatctttttaataagcttaacaccaatagtaagaaaaagtgggtgtttgagggagatttcttaggatgtttcgatcatcttaatcataattggataatgcaacaaacatctatgtttccgggaagcactctcattaaaaggtggcttaatatgggatacatagagcaggatatgcttcgtacgacaacagaaggaacccctcaagggggaattgtgtctccccttctagctaatatcgccttgtgtggtatggaaaaagagattggtattgtttataaaaagacatacaaaccaaacggaggatacgcaattgatccaaaatgtaagatagggcgtgttctctacgcagatgacttcgtcatcgtaacggaaacgaaggaacaagctgaaagtatgtatgggaaactcaccccttacctacgaaaacgaggaattacacttagcatggataaaactagggttacacatattgaggacgggtttgattttcttggcttctcgctgcgtcaatacaatacgggacaaggaaagaagttatttatcaaacctagcagagacagcattaaaaaggctaaaaataagataaaagatacgttctctgtgatgagaggacgaccagtaaaagaaataatacgtgttctaaacccgattattcgtggctacggacactattggaaacatgtcgtatccaaaaagacttacgactacatggacaattatattttcctaaaagtgagaaaacaccttaaacaattgcatccaaagaaatcgagaaaatggattagcaagcgttattttaagaagccccaccacggtggaaataatagatggattctcacatgtccacttactaacattcaattgttaaaaatgtcctggattaagatagaacgacatgtcatggtagcttataaaaacagcccggataatcctagtctaagagagtattgggaaaagcgagaccgtaaggtctttaatagtgaaaatacattagataggatgaaactcgcaagaaaacaaggatatcgttgtgcattgtgcaagcagactctacaaaatggagaaaaagttgcagtgcgcaacctacaggtttctacaagtacatctgctaagttagtacatgtaccgtgtattagataagttgttcggataaaaagaaggcttgagccgtatgacgggaaatctgtcacgtacggttcttaggggggcgggcgctcgtgagagtgcctgcctacccgac

SEQ ID NO: 184 - DNA, 2349 bp, Priestia aryabhattai
  source 1..2349: mol_type = genomic DNA
agtatatgcgaactgaagcagaagcagtattaaatagttatattccaatagctaaaacaattgctaaaatgtttggaccacaatgtgaggtagtcattcatgatttgacacaaccccagtcgtccgtcatgtttactatgaacaaccatgtgacgggaagagaagttggtcaatcttttgatcatttagtaaaacaggtattgttatctgaagattttaaagaagatcatttagcaggttatgagattgaaacggacgatcatcgacttgttaagtcatccactactcttatcagagactttcaaggacaggtaattggggctctttgtattaactatgatatgaatttaatgcttcaaatgagaaaaatgttagatgggttaatgcctgttaatcacacagaccaacaatcatctgatgaagtaaaagaggaagaagattcaattcaaaatgtagaagatattactgaccaattaattcaacaaattattgctaacagctcacatccttttatgaaacgtcgtgaaaaaattgaattgattcgattcatggatgagaaaggaatttttcttatgaaaggagcagtagataaagtcgcagatcaactgggcatttcaagagtaacagtatatagctacttagatgaagttaaaaaaaatactaaatgaaagagtgaaataaatggagagtatttttaaagtaggaaatttaaaatctaatggccactatgcattagcaactattcataaggatacagtttatgtatctggccaattttccattgatccagtaacacaagaaaagaaatttggcacgattgaagaggagactctacaggcattggagaacgttgagtatatattaaaagaagtagggagtaagaaagatcagattttaagaatgactctttatgtctcagatattcaattgtgggatcgtgtagatagtgtttataagcgcttttttggtaaccataaaccggcgcgatctgttgtcccaacgaacaagttacactatggattccaaatagaagttgaagctattgcttatatttaatttataatgtgaaagtaaagcccatattttttacctttagcatataaaaaagtatataaaatataaaaaagtatataaaaggaggcacaacatatgaaagagcagtaccgatgccactcatgtggtacaacatacaatgttacagactttgtatggaagtgtacatgtggtggagtgttagatttagtaaaagaaaaagtaacaatcgatgtaactaagttacaagaaaaaatgcctacaatgtggcgatatgttgacgtcatgccatttgaaaaggattctaatgtatggaaggatgttacaatgggtgagggcaacacacctttaattggattagataattctgaacctcatacccttgttaaagtagattatatgatgcctactttatcttttaaagatcgaggggcggcagttctaattgctaaagcaaaagaattaggcgttaaaagtgttatagctgatagtagtggaaacgcaggaacagccattgcagcttatgcaaaacgagcaaatatagcttgtgatattttccttggaaagggcacttcccctaaaaaaattgctcaagtaaaagctcatggtgcaaatgttcgagaaatagatggtacacgtgaagatgtagctgcagcagcccaaaaagctgtgaaagaagagaagaaattctatgcaagtcatgtatataacccttatttctatgaaggtactaaaacgtatgcttatgaaatttgggagcaaatgaaaggtgcgccagatagtcttatcatccctgttgggaatggtacattattgttaggagcctattatggatttaaggaattaatggagaatcaacttattaacaagatgccaaagctagttgctattcaagcagagaattgtgctccattagcacaagccttcgtaaataatgaaatagaagctaatcaaattgaaggtaaccctactttagccgaaggaattgccattgcatcaccagctcgctctgctcaaattttagaagctattcgtgctactgagggagaaattcttactgtaaatgaagaggaactcttagaagcacgagctctattagctggaaaaggtttttatgtagagccaacgactgctgcaaattacgctggacacttgaaatataagcgactaccttctgaaaaaattattattcctttatgtggagcaggaattaaagcaaattaattaaacgttattcaaataaagaacaaggagaggtattgcagtaaaaaaggatttttaaatgactcttttttactgccgagaaaattcattagg

SEQ ID NO: 185 - DNA, 2331 bp, Priestia aryabhattai
  source 1..2331: mol_type = genomic DNA
aaagcatacctattgaaagtattctccttaatagtcatgccttcgtttaaggaacatggctttttatttctgataaaactcattatataaaccaaaagtgaataatttatacagcctaaaaacagaaaaaagctagtgctcctgtacagtaatctttctctacttagaacagaaaatttagtatgatgcatcatgttctcttatatatgttgaacttacgccaagtatcaaaatttatttgttattttaaaatatagtataaacattctcacgggtttgagctgttggttgataaaagcaatgagatttatacctaccgattttagggtagttataccatattgtagaacacactccagttgctttgaaataccctaaactataattttcagttcatatgctttccacattaataatcctatgtaccaaacacttttctttttttctggttcgttgataaagatatccgtgtgtaacagcttcgaatgcatatggttggtggagcatttgaggaaatcgtacgaagtctcttacaatcagaacaattagcccttataagattaagtgctacgttgctaacaagcagcatacctgttgatcttctccttttgttctaagtaattttgctaagaggacaacatcagaacaattagcattaacaacttccgtaatcttacatcttgtatttttatatcttatagtatgatctcttaaggaggacattacataggtgctttttagccttgattggtactgataacaacaaatatttaaatgccaagcaaataaaatatacactgtctagaaaatccagtattatcctgctgacgttataatggattattatctaaacatttaattttatttctgatatcaaattatatagagtcttataaactgaactatttctaatatcttaacaggactaaattttcttgatttttatcattctatgggtaacaattttaaaaaggcttctatttttatgaagcctttttgttgcataagataatatgcataagagtattgtgaattctatagacgtttgtaaagtaaccttatatttgtataaatgatatggacttataaaatagcagttattaatcccctataaacaatattacagtaaggttatcttcactgattaacaagacacagaacagggcattatagtgggaaaattatttcaaagtgtaatagcgtcaatacgctcacaatcaactaaaagaataccatcattctttccccaaaatgtagcgagaccagtcttagggttaaatcctacaaaattctgaacttttatttgtgtaccatttactaaaaggttttttacctttttcccttggtaaaaagtttccaaaaggctgcatacacttttagaactgtattttgaattcagatcaatatgatataccttctgattatgattctcgactatagaattagaattaaatattttggggttggtaaagtggttaacgaaaattgacattttaggtttccctttcttagtttagataatatttgaatagagcgtccttttaaattaacagaagagctcttttacaagctcttctgcagttacactgttacactattatcttataatgctactcaattcgaagtgcttgtatatctctacaatctaaaacaataatagttcctgtctccgtttctacatcaacaaaagttgcacagaaagtatctaagttaaagttagtaaaaataaggtcctccagtacatttccgtttagaaatatatcaacttgtgtccctggttgtaatctttctaactgatcacatacacacttatgatctctgcccatacaaaacccctccttaaagaagaaaaataaattcacattgctgtatattatatgaaaaatattaaacattgaatggacaaagtgtggagggaaaatacctatttttagcggtatattaacatcaacactaaacttgtacataataagcttgtttaaataaaaagggccatcgggattagaaactaaatttcaaaagttagatacattatctaagcaactaatgggggaaaattctttattgtacaaggctcaacccttttaatttgattcgtttataattacagtaaagcttgtatgtcttctaactcctgtttaaattgttacctaatttttaattatcaaatattccgcatcgtattaaaatctatgtgtaagcccatattatctgtattatttaccttactattattcatatagccgtttctacagataaagaataggttactaaaagggcaggtttaagtctttcttctaagttaaataaagtggatcctagttatatgta

SEQ ID NO: 186 - DNA, 2234 bp, Priestia aryabhattai
  source 1..2234: mol_type = genomic DNA
ctctgtttttaggatgtatatgatttacataaaagtaattgtccaagcatgtaaaagcccttctaatgaagggcttttattgaattagcagaagcctccgtagccaccactaaaacaactacatccaataatgacaagaagaataaataagacaattagaagagcaaaacctccaccaagtccacatccaccataactagacatactatcactccttctataaagtttgagtaaaactaaaggagtaggaacataattcacatgggctaacgtattatatgtatccgtaaatatttatgagcatgtttacttctttaaagcttaaaatgaataaagtccagtattctagacaggctaatagggatactttctggtatcaatattatcttctaattacgttacaaaaagaaaaactacctttaaactccaggtttttaagggtggtttttctttttgtaattgggttcaatcaaacaaaattgtgtatagcaattaacactaatataactccacttaaaattgtactgaattggcccagtgtccatgatccaattcttatattggcaacctttttccctaatcttactcctaaccagatggatataaaactaaatatagctgcggacacggatacagcaaaaggagatatattcattaatcctacgcctaatccattggtaagagcattcatagacaccgcagtaccaagtactatagcttcgaaagaactaatatgaccggatttatcaaaatcagccctttcaggcgagcttaaatatacactaacgcccttagaactagcttgatcctccttatattcttttttatttatttccttctttcttggcatagctagcagcacaattcttaaaccgatgataaataaaaacaatgccccaataatattagataatgtacctggaaaaagttttgaaatgtagtcaccaaatataataccagcttcactaaaaacaaaagcaattattgaaataatgaagtttgctaaaagacttacgcgaatactccgcatcccatatgatattcctactccaaagttatcaatacttgatgataacgctagtaagagaaccgggatccatattgttatatccatatttattactctccttgttactacacaaatcaataagtattaccaagagtagacaacctcttgttttctaagaactttcgtataagctgaatttaaatttgtataatagtatgttgttttacgtaaatatcaacttgtattagttaatttataaatctatttccagtaaaaaaagttcttagaataagcaacctaagaactttccaattttataaattaagaaatgttaaataaaaaacacactaactaccttccaaatagttagtgtgtttcccttgtctgtggaaatacagttctaaagacaagtagcctttcttttccgtccatatattatatgtatatggttcaaaccaaatactgaaaatatacttttggaatgaattaaaatatcataaatcgaacaaactacaaaagacgctgtgaagcttccgtttggtaatcctcaatgtttcaagttaacaatacaaagtaagaaaaactaccctaaagaactaatcgaacaattagatcgggtagttttcccctttttttaggggatctttatcttcaacattattgttgagttccatttattccatcaacatttgcaatatctgtttgatcattaatatctgaatccatgtaatcgtttttcatcctagctgaagagaaagaaatgtcaccatacgttctgtttattccagttgacttggtgtttgctgtgtgaccattatgaattacttcaccaaaatttgtagacccattactagaagtgctattaattctcgtcgttccaatattgatgaaccctggcattgtcatcccatcctcttcttcagtttagtagatatacattatgataatacacgcctaagtgtgaagaattagcacttaaaacaaataaaactttctaggaactcctccgtttttcacttggaacaagataagtaataaatgattgattatgaactcatttttcaattaaattcttagtatgaatactacctgaaaatttgagcaaactactcaagataccgtgaggtatctatctaatgcttattttttttacattactctgccacttaacagaaaaactcctgaccaacctgcaggagttttttctgttttcagcctgtatatc

SEQ ID NO: 187 - DNA, 2229 bp, Priestia aryabhattai
  source 1..2229: mol_type = genomic DNA
ccatatccgtttttacccattttttctaattcgcatttttctaagcttgataatatgtttaacaattgttcatcagacccatcatatatgtatcctgttttattatctagtacaatgttaggcaagttgcctttgttggtcgctataaccgccttcgtgtttctcatagcttcaatagcaactagtccaaaagcctcccaccttgatggtacaataacagcatcacacaattgataataattatcaataagatcattattaacccaacctaaaggttttacctgggaagcggctctagagtttttaatgttatccgttaaagtataatctcctataatatacagaacaacatgatttaattcgtaattatctagcaaattaattaaactgtccaaaccttttgcataatcattcctacctacaaataataaattgattttgtttttatctacttcaacggctttaaaatacttactataatttgcttctcttattccattttctatggtaatcattttattggacttaattttatattgaatagctgtattattttcatatccagaaatattgattattttatccgtaacttttaacaataacctttctaccaatccataaaccttttttttgactaatgatgtattcatattgaaactccagccatgagaacaataaataattttcaaattttttttagaaaaaaataaatatggtacccttacaaaaagacctgcaaaactactatgaacatgtataatatccgggttaatgtgtttaataattctatttatagttctaatagctttaaaaaaatgtctaactgacctttcatattcgtaattatatacattcattacatcaattggaaattcattttctgagttgatattactctttattaggtacagatctgatatttcctcgcattctttttgataacagagcacttctctaacgtatgtcgctacaccgccttgtacgtattcgcctacatgcacaactttcatcttagacatctccattaaaatttcctagaagttttttagcagtaattgaccatttataattttgcgaatgttcaattccatgtttagacaatctatttctcaaggtttcatctgccattaccaatttaattttctctgcaatctctgtaggttcaagtggatcaaaatatactgcagcttctgaacaaatttccggtatagatgctgcagtagagcatactacaggacaaccacataccatagcttctaaaggggggatcccgaaaccttcatatatagatggaaaaacaaagcatcccgcattcatatataaactttttagctctgcatcagtcacgtaccctaaaaatttaacattttcttttaactcttcagatatattttgttgtgaaaataccttattattcccgcctccaacaattactaactcgaaatccctttcattgaggtagcgagaagcgagaagtaaatttttgaaatttttgttagggttaaaactcattacacctaaaacatattttttagaagtaatattgaattttctcaaaattccattgtcttcattaatctcagagatatgttcggcaccctcatatattacatcaatatttttcttattcactttacaatatttttgtatctcagatttagaaaattccgaaacagtaacaatcttttcactaagttttgtcgtaaagaagagcaatattttgtaccatagaataaatttctttgaaaaaccttcagggtgagaatgtacagctgtatcatgaataactactagttgctttctcttaaatatagggcctgtattgcagaagttaattaaaaaaccccctctgacatgtataggcaatgataattgttcccaaagatgtcctgataagagccctatttttttgactttaatattctttagctttaaattgattttactttttttaggtactagaacagtaatcttgcaagctttgctttcttctttatctaattgttttagtatttctatagcatatctctgaacacccgttatattttgtgttaagaaacgaccatttatataaatattcattaactaataatcactcactttttggtttcatattttatgtttggattttcttattacaaacagaataaaagttagaataaaaaaaactataatattcaagaaaaatatggtttgactaaaataattgattcttgtcatactaaatat

SEQ ID NO: 188 - DNA, 2138 bp, Priestia aryabhattai
  source 1..2138: mol_type = genomic DNA
cagatttcccgtcatacggctcaagccttctttttgtccgaacaacttatttaatacacggtacatgtactaatttagcaaatttacctgtagaaacctctaggtttcgcactgtaactttttcttcattttgtagagtctgcttacacaatgcacaacgatatccttgttttcttgctagtttcatcctatctaatgtattttcactattaaagaccttaaggtctcgcttttcccaatactctcttagactaggatcatccgggctgtttttgtaggctaccatgacatgtcgttctatcttaatccaggacatctttaacaactgaatattagtaagtggacatgtgagagtccatttatcattccctccgtggtggggtttcttaaaataccgtttggtaatccatttccacggcttctttggatgtagtcgtttaaggtgttttgttatttttaagaaaacgtaattatccatatatccaaacgccttttttgaaacgacatgtttccaatactgtccgtaaccacgaataattgggtttaaaacacgtatcagttctttcactggtcgtcctctcatcactgcgaacgtatcttttatcttatcctttgcttttttgatgctgtctctgctaggtttgattaataacttattaccttgttccgtcttgtattgacgcagagagaagccgagaaaatcgaacccattctcaatatgtgtaactctagttttctctacactgagtgtaatccctcgcttttgtaagtagggagtaagtttcccatacatgctttcagctttttccttcgtttccgttacgatgacgaagtcatctgcatagagaacacgccctatcttacattttgggtcggttccgtatccccctccatttggtttgtatgtctttctatacacaataccaatctcttcttccataccgcataaggcaatattagctagaaggggagacaagatacttccctgaggggttccttctgttgtcgtacaaagcataccttgctccatgtgtcccattttaagccatcttttgatgagagtgtttcctggaaatatagatgtttgttctactatccacttatgattaagatggtcaaagcaccccaaaaaatctccctcaaatacccattttttcttactattcgtgttaagcttattaaaaagattacttatagcgtcgtgtgtgcttcgtttaggacgaaaaccgtaagaagttggttcgaacttgacctcccattgtggttcgagtgcgttttttactacgctttgataaactcgatctcgtatcgtcgggataccgagaggtctcagttttccatttttctttcggataaacgttcgttttgttggcttcggacgatgtcgaaagacgttgcatttaactagttgtttataaagtttgatacgttcgcttggttttgaggccgtaaagccatctacgccagatgttcgcttaccggtattttgttgcgtcactctgcgaatggagagtaataaattggctttactccggaggagtaaacgttgaagtttccttactcttcttcgttgattttgttgttcggcacgataaattctttgtcgtaacttcgttacatattgttgtatagtattccaatcaatagagtaccaacctttatgcgagacgtgcgccgacgctcgtagagaggtattcataacagcacgctccttttcgttggaagatagccacaaatttattttcgtgttgaagaccaatgagaagtaggcgctctttcgagcctgtcagtgtctataaagacgacagtatccgtccagttatacaatatttctgctttcctgtcccttttcagggtaacggctttcgctttttctcatatcccataccctctgccacatcgtttgactttgcagtcatcctactgcttacgcagatgacatagggcttaccaagttccactttctacagatgcaataggggaaggcaggttctttactccgggcaagatgcgggacgcatcagagcagcattatgattctacttttcctcttgccaagactcaagcaaagctgtgcattatcttgagctaacccttacgaagcttacaaaccttcactttcgtttaccatacctatt

SEQ ID NO: 189 - DNA, 1979 bp, Priestia aryabhattai
  source 1..1979: mol_type = genomic DNA
acattctttaattctattaattgatttacttctttttcaatgctttgcgatagaattttagctgatggatcagaactattcacagaagtttttatattaaatgttagtggttcttcagtatagcttacctccgtaaccttgtattttttctttgaaagaagaccttctccaattacggaagtaattttgctgcctatatcgtctactttctttattactataggtgtggaatgggttgcttgaatgctatatccatcatagttagttttgtttaaagcttcttcagcagcttttttcacttcatctttattgccgttgtaatacgtaatagatccttttagattaataaagatttccttactcattgaatcaacatctactgtattaaatttataatctgattgctttaatttatgtgagatttcttctgtaattacagacttttctttttgttgtttcgctgttaattttggttctactgactctttaaatttagtgatgcttattgagtagctgtcataacctttagcttttagtatttgttgcacatcttctttaatatcgtttttaactgaattataataatcatttgatcccattatatttacttcaatttcttttttaggtatataactgtcagagacgctattaagtgaatatcctttttcctcaagttcatccataataagtgccgagataccctttgtttcgaatatagaacctagatatggaatttttgatgctactgttcctataggagaaaaaataaaggcagacccaaataatagagaaaagaataataaagcagctaccgttaaatataaaacttttttatttttcgaaggtcttttcttctgctttttcctcttttccattcccttttccattccatttttaattgctgaatttaatttatgttcaggaacttctattttatctatttcatttttaaaaacgttaggcaaatcctgcttcattttatatactccttccctaagtctaatttcaatttataaattcccctatgtatgtaagtttttactgtaccttctggacaatctaaaatgttagcaatttgttttattgtgaagtctttgtagaatcggagtataattgccgttttgtagggctcttttaatcgttttactgcatttactaaatcaattttatcttctgctttttcattattaaggttgtttattttatctatttcatcagacaataatattttcttttgtttctttagaaaatctagggcattatttattaatatccttgttatccacgtcgagaaatatttcatctaaatattagacagtcgagtagatgaaaatgtttcaaaaatttcagggtttatataaactaattggatatttaaccatattattgaatttgagatactatgaatttggatattagtcgaaaaatagatagaaaaggaccaaaaaatggtccttttctatctatgaaatgtcagcatttatgtttaacaaaaatcgtgtgaaaacgttctaaaatcagggttatttacgaggttcaatataataataaataccaaactttttattaatttgaggtgtaacttcgccagtttctgtttcaactgggatattatcagcctctgctgttcctgtataagcagtgaatttttttcctgatcttgtttctgtgtcccagcttaccggagtagaagggttattaccactcttaatcccaatatttgcgctattcctataccaagcatatttaccatcctgtttagctaagttagccatgccgactgctatatcctttttctcttcttctaacttgtaaaaaacaaatgtttctccattttttttgatttttccaataatattttcttttttatttaaatctccttctctaatgccttgattaatagcttcgtcctgcgttttaaaccattttaatttactatcatttacattagaacaaccggtaataataagtactaatag

SEQ ID NO: 190 - DNA, 1866 bp, Priestia aryabhattai
  source 1..1866: mol_type = genomic DNA
tacacaatcaaaaagagaatccttatgggagtaagggctctaacggagtcactcttatagaatatgcagttttttatacatccttgatagaccaacactttatcagaagttaagggttaataaaatgaataaaaagcgcaccttttattcatatggtttaacctctaaataattgattttttatgtggatatgctatagtaacggttcggctgttttccagttaaccttttatctaaaaccgtaagcaaaataaaaagctgtctcaacaaaataagacagctttttattttgcttaccttttgattggacagattataatctgatactatattttagataagatcttgccaaaatataatcttatttcaactctatttttttaaaccaaaactctaacgcatccattggttcctctcttgtatgagcgtaataaattcttacatcgtctcccttcacgtcatcgggaaggataaatgaaaaactgaacttttttgacgtctctatatcaaagatttgtgcggaggatttaggaggcttctctttttttatccattccttaattgattcttctaggaacttctgattcatgttcttatagtctttgactctattacgtttaacataagttatttctgcattattaggaaaatagaagatgataaaatcagtaggaaatctataggcatccaagggcttttcccaaactcccttcactgtatatacctggttttctttttgaactgaaaactttaataaatttggatctgtgtgataccaagaattaaaaactacataccctatagagagtaacattaaaaatccaggagttagtaagatgagtgatattcctcgtcttgtattccaccatctaattcctagtactaaaaagccaatagatataatgaatacaagaataatcgacatttaattgctccttctaaatctttagctatttacatagcttttgttatctcaacaaatagcagaaagcctttagtggtattcttgtttatcttcatcacatttgtattctaaaatatctccaggctgacattccaaagccttacaaattgcttctaaagtcgagaaccgaatggcttttgcctttccatttttcaatatagaaaggttagccattgtgattcctactctctccgaaagttctgttacgctcatttttcttttagctaacatcacatcgatattaattattatcgccacattactcacctcagaccgttaagtcattttctgattttatatcaatcgcctcttttaacagtttttgaagaacagcagcaaaaacggcgataaccaatgaagcaaaaatgatgatgagtcccactaatccaataggagggtccatttttttcgctataaaatgaaatagtggcgaagctagtacatacaggccactaattgtaatcgcacagtattttatgttctttaacgcctttacagataattctgagaacgctttgcttccgtcaatgtaccgtaaaagattgaaagcctggtagagggcaaagtaaaaaggcagagctgctccatacatcacaataaaaatgagagatttcatataagtcatatctggatacaattctccagcaaaattcccaatcttaggcaccaagaagatacacaaagcaagaactggaattccaataagaataacagctatctttaaaaagagggttgttccttgtttcataaaaagcacctcacctatttattatctgtttgaatttaacataatatttattgttttacaataaaaatttattctttttattcatgtttttatcgttgattaatattttttaaaagagcattcctcattatagagaaatgctcttttaaactta

SEQ ID NO: 191 - DNA, 1820 bp, Priestia aryabhattai
  source 1..1820: mol_type = genomic DNA
gtaattgagacataacactgttagctacttgatcggtgatttcacctgttaacataataattctgtccttgagtaaacgagaataaatgtcatacgaacgctcgccacggcttgtttgttctactacataaggaattaaattcattttttgacctcctatatttaacatcgaattatcttttcttactaattcattcacaaggcttgctacttcttcattgagaggaatttcatatacttcatgctcatcaactaagggaatatttattgattgatgtatacatttttctattccatcacttccctcaaaatgaacagaaacagataaagtttctatcaattccggattgaatgtttccgtatataattcaaaaagaatacactccttttgaattaaacgatttacaataagagctcctttctcatcctcctttagttgattaaaattcaaacctttagcgcaatagggagaatgatgtacttcaattttatgaacatattttctttcgttccattggagatcaatgagtatatagttcagcccttcctcattctccattttttgttttgctaatttaatttccattatgagtgtctccgttgtgaaagagttgtgaaaccgattgaataaccttttgtttcatgattggagaaagatttgtatccaaagttatagctacactgtcatttattagatgggtttcttgatgaaggacattctctgaattaataaattctaattgattagccacacgttcaatatcttgataggaaagatctttcaatacattatggatatttcctaacgtttctccagttcttgtgagtgtaagaatggctttaccatatatcaaatgtttatccgtatagacacgtttattcccaacaagctctaaggggggaagtaaacttaattgtgtatagtaacggatagtgcgtagcttgagagtagagtcatactgttgaagaagttcagttaactcgtttgctgtgtatatattcatataaacctcctttacattaaagtgtaatagttacacttaactgttatatatatcaattttactatttgttccatataatttcaattaatatccatttatctcgattgtttttaagaaatactaccatcaatattaaaaataaaaagcccctcttttcaggaaaggcttttatttgtatagattccgataacctgaattacattaactaaaattaaatatgacacattgtctataaaggttaattactttttatacgtacataaaggtttattttattcactaaatagacgttttgtcatttgattctacataatctaaaaaggtgtacctttttagattttgagacctagcataacggtagctcaaaaagagcctttataagggggttatttttcttcaactcttataaagactccatcatattttcaagttaattaatttctattttgcgtatttatttctaactgccttatcccacataagcaaaatcttttttaactcagctgtttcaattatacaatacgccttttgattttcttcagcatattcattcacaatttttgttacatcatatttaatttctatggtacaggcatttccagttaattcttcataagaagattgctttgaaagtactttatcaattaaatctagccataatttcgatccatcttcttgtacatcacctaataataaatctataaccaaaaaaatttcatcaggcacatttatcataagcatcccttgattaccttcgtagatttgaacattatatttcattactagttccctcctctttcttttattaagttgttt

SEQ ID NO: 192 - DNA, 1749 bp, Priestia aryabhattai
  source 1..1749: mol_type = genomic DNA
tttttaggtgaaatgggtattactacaaaacagaggtcggataaagtagacatcaacatttggaatattgattcaattacaggtaaaatccgttaaaaaatttgatgaattagtaaagggaaaaaagatttctcattaggaatttttaaaaggttggcttaaaaagggggaagatactgagaaagaaaaaggatgatgacaaagggaaaaaggagagaaattataaaatggattctcggaactttttgcagggaatagtggagcacatttttaaaaaacgaagtacaacacaagaaatggaactctaaaaaaagcaaaagtttgaaggcgaaagaaggaatgaaaagtcctcttttttcatactgcgatgatagaaggggggaagaaatagcaagtaaaaccaggtgaagctcttttagttatagaggatctatattcataaatttataattaatcgaatggtataaaggctttttctctttccatcttgtgagcaatatatataatcattacagaatccacaatgggttaaattattctttataattggtggattaacaatactctcacaataaggacaaattgatgtaatcactataaacccctcttatgttttaaaaagagagagcattaatgctctctcttaaaactcacgatccataatccttttcttcatcaatccatctatcttcggtcaatagcccgcacgtaggacatgtatattttggatctaattgggttgttatttcctcaaaattacaaggttcacataaatgaattaaaaacaagtattatcacactccaaatcaatagaaaccacatcacttttatgggtttcataagtgataataacatcttttccatacttttatatttattgttctctttccgttatttgctatcaatgtttggatgcaaattgcaagggatttttgcttcattgtcagtgcgtttggcacgatcaccatgtttatggataatactcactggacattattttaaaggaatttgtcttcttatgttgaaagtgaaaattatagaccaaaaggagggaatataataaatccatacgaacaattaaataaagaattagaagagattgctaaacaacgaattgaaattcataaaaagcgaataaaattatctgaggagttagaacgagactttgataataaagatcttcaaaatagaatcattgagttagaggaagaaagccaaaaacttaagaaaaaaagtgaagctttatagaataacttttaagcatcctttcaggatgcttttttgattaaactaagtcttaaaaaacagataattttattgaagctacatgtgtgaagttgagcgaattactgctttcctacgtcgcctctaggctttttttcgcaaatttctaacatcacttattttgctaggatgtcaaacaaaataaaagccaaaaggacgatacttccttgccacataagattttaccttattataaaatgtcgcctttttcatcccaacttccttcataattactacagcagtgattttttagctgttcattccttatagaatctatcccactctttagttagggaagtgacagggcgaccaaggtatttctctttagaatcagaaatgtctatgagtacacggatgaaagattctcttgtgatagacgcttttttacaaggatataacaaagaacatcctccaacaggattaattatccatacagaccagggatcccaatatacgggtagtaat

SEQ ID NO: 193 - DNA, 1678 bp, Priestia aryabhattai
  source 1..1678: mol_type = genomic DNA
ataaactaactattttgctatccattttatttaaccacttatttctataagcaataatccctaataaaaaaagaatgatatattgagggaaatagcctaaggaaaaatcatgtatatagagtcgatttgtcggaaagaaaagtctagttataaagttaaagaaccccataaagattataaataagagaatatttttagagcttggaaacttatattcccttacatttaatgtgaacaattttcttgtaatagcgtaagccaaagtaaaataaagtaaagcaactataaaccacatgttataaaagcctaatgaatcaaagtaattttcttttcctaccaaattaatacataagggatttagtaggaagaagtaaaatagagcaggaataagtaattttggaaccctatctttaaggaattgataaaaccctttattatcataggatccaggtgaaaaataggccgcaataaagaagaataagcccataaagaaactttgaaatatggcatttaaaagagttagtattgatgttgatataaaattatttgagctttctatgtaataccaacctccttctccaccataggcactatttgtatgaaaaataataactaaaacagcaagaaaagattttatattattaatgtaatgcattgtgtcttttcccacagtgatcacattcctttcgtttacagtgcttttgaagcaatgcctgccacatatgtatgacttaagtttaactctccattttctttgattataatgtcaacttgattctttatatttgttagtatttctttttctctttttctatctaatacatccaaaaatccagcagcagctcctgaacgtaaaatccactcaattgcctcatctgaatttttacaaggtagtggttgctcaccttgccacgaactaattattttcaatttagatttctcaaaccatttttctaatattttattgttagacggcaattcaatcctaatgtacctctgcaaatatgaaggatccttacttaacactgtttcaaatgccttcattaaaacttcttccgagtctacacgtgtttcaataattcctacttgtccattgtcttttaagacgcgattaacctctttcataaagttaactggatttgtataacatatagcccaaccacatactacaatatcaaaacttgaatcaggcattttttttaagaaattcatcatatcatcttgagatgtttttatttctaaattactaaattttttcaatttattacgtgcaatgtttaacataccaatagattggtctacagttgtaatggaaccctttccgtccaacatttgagcaattttattagtaataaatcctgttccacaagcaagttctaatacatcttgccctggtttgatatccattttttcaattagatttaatgagtgttcgcccatagtgctggaaaaaaaagagtcataatctccactagcattatcatagtccccagagctgttagcatttttctttgataacataaaccatcccatgcgtagagctaatttgattttattaaccattaaaacctctcctaatcaatctaatttttcagaaattaatactttttcattcttgaagttagtaacgaactagaacatttgaccctccatatctcctttataaatacttttttgg

SEQ ID NO: 194 - DNA, 1672 bp, Priestia aryabhattai
  source 1..1672: mol_type = genomic DNA
tgatatgctccccgttaggtagacagataaaaaataaaaatctgtttatctaaggggagtttttactatggctcgaataaaatattctaaaaacgaaaaactggctattttagctctttatgaagatgggcatcattcaatagccgacattatggccaagttttctgttgatcctggtacgattagagactggaagaaaaggtatgaaatgaacggtgaagatggcttaacagacgcaacttcttggaaatcttattctaaagacctaaaattagcagccgtcaacgattatctatcaggtcattattcgttaagccaagttattcaaaaatacaatatatcccgtactgcggttttgagaaaatggattaaaaagtataatagtcatagagaattaaaagataccggtaaaggaatgacaaactctatggcaaatagaagaaaaacaacgttagaagaacgcattcaaattgtgaattactgtctacaacataggaaaaactatcagctcgcagccgaaagctatgaggtttcttatcaacaagtatatcaatgggtgaagaagtttgaagcgtacggtgcagaagccctacaagataaacgcggtcgaaataaacaggaagacgaattgacagaggaagaaaagctcaagatggaaatgaaacgtttagagcgagaaaataaacgtttacacgcagaaaatgcctttttaaaaaagttggaagaactcgaaaggaggcgtcgttaacaagcgttcgtctacataataaatacagggcaattcaagatttacatacgaatgaaaatctccccatcatccttttatgtgaaatatctggtgtatctcgtgctgcttattataaatggctacagcgtacgcccacagcaagagaattagaaaatgaagcgatccttcaagatattcgaacgatttatgcacgagtgggaggtatctatgggtatcgaagaatgaaattaaatattaatagactatatggtaaaacgtttaatcacaaacgtatttatcgtttaatgcatatcgctggattacaatctgtgattcgtaggaaaagaaagcgttatgtcccttcccctgcccaatatgtcgcagaaaaccgactcaatcgagagttcactgcaagcaagccaaatgaaaaatgggtaacagatgtcacggagtttaaattaggaaatggaagaaaagcctacttaagcgccattttagacctttacgataaatccattattagttatgtattgggaggttcaaacaataacggattggtatttcaaacattggaccaagctatcgctatcttaaaagagaatgaacaaccattaattcatagtgatcgagggtatcaatacacgtcccgtgtgtttaagagaaaagtagaaaaagcaaaaatggttcatagcatgtcacgtgcaggaagatgtatagataatggaccaatggaatctttttggggagcgttgaagtgtgaagaatattacctacataagtacgaaacgattgaaacgttacaacaatcaataaatgagtatatcgatttttacaataacaaacgttatcaagaaagattaaacggcttaagtccattagaatataggattcaagccgcctaatttttttattatttccactgtctacttgacagggggctgttca

SEQ ID NO: 195 - DNA, 1669 bp, Priestia aryabhattai
  source 1..1669: mol_type = genomic DNA
aatacaagtttttgaacaagttttaatactctaaaaaatattatgtaattagaatgatttaataagactcaataagtagagtagaactagattatttaactatttttagtaaaacaaataataattgagctttttgcttatacagatttcaatttttttcatatcatgtagtatctcttttagggggtgattgcatgccaaaacatcgtacttctgatgagcgccgtagctcacgacgtacttctgacgagcgccgtacttcttcaagtaaccgtgggacatcttcgagtggttttcgtttggatggtttaagacaaggtgatagaattgaagttttttctgctggaaatcaacttaacggagttggtacatttatccgtatacgcgatggatttttagtctgggtgaatgaagatggtaatattacttcaactagcttagatactattagtatcagtagagtatctggaacaatgtaatttggacgggctatttgcaaagttttaataaattagaaaactaaaaaaactactgtgttaagccagtagtttttttcttttactaagaaaaggatcttgggatatagcagtctactgcctggttggtgtaattagaattttgtatgtctgcattattttatgcacaactaattaaggggtctgtgcaaaattttagcttttaattcaagaaaattttgcttagtacgaagagcattaacctctgagaacaaagaatttcttacagctctcctttgtaaggaggcttagggatattatagaatacataaccaaattgtatttgaaaagatcacttctccatagaaaaactagttatttgctttttttagtttccgcaagtttacataaactaaaggtatacagagtaaacataaaaaagatccttacctctcaggggctaagggtcttttcagttaccttcacttacatactattatttaacatcctagaacatttttgtatttcattacacagtattacgttctttcgtgcaacttggccgcctagaggaacatggttagatactatacccatagagttttcaaccacggaaaatcctatgccaaaagcttttaggttttgattctaggttttcctgagcagctgcaattagtttctttgtatcactaatttctcgaatagcattagttaacttctcgtcccttttttctagattattttcaatatatttatcttgagaggataacttttctgtaagctgtcttataagcttgctttgttcatctaaacgttgaataagcgcaaattgaaactgctcatctttttcagaacgattaagtaattcttgaactttatcttcgagagattccacctttttttcgagctttgattgaacctcgatagattctggtatgatttctccctgaagccattggttaatcattttataactccaattttgctcttgtattcttttcttgatttcaattagcaaatcaatattctgtttagtatatcttcggtgccctccctctgttctttgaatctggagattaaattctttttcatacaatctaactaaatcaatacttaatccagttaatttcaccgtatctttcagagtgtaaacaacttcttcatctaagttattggacatttttctagacttctcctttctaaataaaaaaact

SEQ ID NO: 196 - DNA, 1642 bp, Priestia aryabhattai
  source 1..1642: mol_type = genomic DNA
aaggataaaaaatgaaaataatgtaggcgaccttatgattctaatcggatgaataagtcgtttattgctgttataaatctttttatagggagctaatttgatgtcaaaagaaaacgtaatgttaaatttgaggattaatttatgtaaacagattaaagatttactagaagaaatagagcaggggaatttagtttaaaaaagaatatatataaaataaaacctcctaattttctttaaagctggtaaggagaaagtctaattattagtttattaatgatttctttttagtcatcttaatatggtattagtgcaaaaatcatcaaataaagctaattaaattgcccatgggattaacaatcctttgctacagggataaattttctcttcccccactatcttctatgcgtatccatataagtttccattttctaatataatacacttatgtaactgcttccacctgcaatattacgtagcattttcattatagaaagtagagtgtttttttctacacgcagttaaaaagttttctcgttcagtttatagtaactatgtggtatccggtttttaactgtctgaattttagaaggaggaataccttgtgaatacagctgttaatgaattgtatgattttggaacagtcgtaaagaggaagctattaaataataatctttatgctcattatttgagtgatgcaatgaaaagaggaaatcattttgaatttttatattattttttgacagcaactatagatagtcaaacacctatacctgaacatgtctctaatgtttttttgaaggttcttagcgataaaacaaagttgagtgatcttactccatttatcacgggaatggtcgggaaataaacaaaagttaagaggtgtatgtcttaaatcctttaattgaggcacccatttaggaatcggtttaatagttcagtttaatcgggatatgaatatgatttaaagctacgtcaattacattcgttccaatgatcaaataaatcgattaaataacaggaggagcactttatatggatactatattaagagtatcatcaatatcaaatccaaattcagttgcaggtgcaattacagctgtatttagagaaagaggtaatgtagaaattcaagtaatgggagccggcgctttaaatcaagcgattaaagccgttgcgattgcaaggggattcgtagctcccagtggtgttgatttggtttgtgttcctgggtttagaaatatttcaatcgataatgaagaacgaacaggaatcacattaattttaagccctagaaaaagacgatagatttacattaagtaaaaaggactttttagcatgttattgccgataattgctgttatgtaaactttaaaatgaattatcactcagtgacttctttttccacaatacttattattctatacaaagctaaagatgtagtctccacatccggaaaatgttcaatatggcccgtttcaatattcctcacttgaaaattctttagttctttagaataactgagagagaaggtatgatttccactacaaaaggtatgagtgatttcactatcttcatatcgtaataaagtttctaacatttctttaatttttattattgtcatgtatcagcaaacccctttctc

SEQ ID NO: 197 - DNA, 1633 bp, Priestia aryabhattai
  source 1..1633: mol_type = genomic DNA
agggagaattcaattgataacaccatcttcgattatttatagtgttcttgcttatgttgcaaatcctggaaataacacagtttcaataatcgatacagaaactaatttaatgatctataacattttagttagaagtatcccatacagactggctattacaccggatggaaggcgaatttttgttgcaaattatggagatcttacgatctcagtaattgatacgattgctcatgcagtgactgctactattttcactgaaggcgatccatctggactggctattacaccagatggaacgcgaatttatgttacaaatgaggataataatacaatttcggtaattgatattgctacaaatacagtaatcgccacagtttatgttggcactacccctaatgaggtggctattacaccagatgggaaatgcacttacgttacaaatgcggatagcgataatgtatcggtcattaatacaaatacaaatacagtaatttctactatttccgttggctataaaccatctggagtagctattacaccagacgggaaccatgcttatgttacaaataagttcagtgacaatgtatcggttattaatacagccataaatacagtgatttctactattttcgttggttataaaccatctggaatagctattacaccagatgggaaccatgcttatgttacaaacttgggtagtaataatatatcagttattaataccgctacaaatacggtaacagctactgtttccgtgggggatgctccatccggaatagctattacaccggatggaacccatgtttatgttacaaatgagttcagtgacaatgtatcggttattaatacagctacaaacacagtgacctccactattgatatcggaagtaattcttttccagttagaatattaattaaaaatggcatgtaatcaatttattatccacgaaaattaattaacataatgaactttattagaaataatcagaaaaaaatattaagcatactatattgaaaaagaaacttttattttaaaaatgcattggctgatacagtatcggtgtctttcttgtatccatataaaaggattaaacaaatatggatcctctatttagaataataataactgtgcaaggcttcaatcattgaggtgaaagtaagtgaagaaagaaaaagctaatttaaaactggtcattttccttgtacaataatgtatcctctagtcttttctaatttacgtaatcgttattaataagaagggtaaaaggttaactaagaactattccccagcgaggattcctgtattcgacactggcttggttaagctgtacataatcccttcctccctaaaagaaggatttaaaacccactgaattggaaaccccttcaggattcccgttcagaaataaaaatgagccactgaatgggttcagtagctttcttagttattatatataaatttagttaacaagaaatattttggattattttctacaaccggaaccatgctcattatctctatagtgtctacaaccacagctatgatcattaatccccttgtgtcttcaaaacacagacttattccacttgtaaaatatatccctctttaaccagtaaggacattgtataa

SEQ ID NO: 198 - DNA, 1630 bp, Priestia aryabhattai
  source 1..1630: mol_type = genomic DNA
acatttgctttattatttaagaggatttttaagtaattcatcttcttcgattaaattttctttaatctgatccaaatactaaggcatccatacagctataatcttgtgacgttttctccatagttatactcccttatttagaagttaattgaagcttcattttatactaagtgccaaatagcaataaaattaggcttcaaagtcctcacctaaatactttaatttaaccagaggagtgaagtaaaattatcatttatttaaccttgttgatttagaagtaaattgctctttgtttttaaataagttaattccataacctgcaagccccccaataattgcagggaatatccaacctaatccaatatggtaaagaggaagatagtaagtaaataattggtcaataccagggatgtgtaagccaaaatcatttaatccatctaccaggcttacaacaaatgttaagaatagactaccctggtatacctcagcgcatcctttaaataaagaatgaaggaaagtcaaaaagattagaactattgctaatggatagagaactgttaaaacaggtactgaaaaagaaattaaatgatttaatccaacatttgcgatgattgcgctaaacacagataagctaatcgcaattttcttataagaaatagaaggtaataatttatgaaaataagaagagcatgaagtaataagccctacgctagttgtcagacaagctactgtgatcattaagcctaatagtaaccctccatattctccaaaataataatcagagactttcgctaacaccgtaccaccattatctaaatgcccaagtttttctacacttgaggcgcccatatatgaaagggcagaatagatagttgcaagaataatagcagcaattcctgtagcttttaggcaaacagttataatttgcttctttgttttagcgcctttctctttaattgcattgataataataattccgaaaacgaaagatgcaagagtatccattgttaggtatccttcttggaacccattaaaaaaagagtttgttacatatttttctgtaggtgcttgaaattttccaataggatgaataaaagcaactagcactaaaattccaatgaatgttaatttaatcggtgttaagaattttccaacaatatcgacaattttcgcaggattgagagaaaaaaagcatgtaatactgaaaaatataatagtaaatacgagtaaagctatagaattagagccttcagaaatgaaaggtttaagtccgatttcaaaagagacgttacctgttcgtgggatagcaaataaaggtccaatagctagataaagaaccgttgtaaatactaaaccaaagataggatgtacgcgacttgctaatgattgtaaatcttcctttccggagaatccaaaagctagtacaccaagtaaaggcaagcctactccagtaactaaaaaacccgcatttgctgaccagatatttgctcccgctgactgaccaagcatggcagggaatattaaatttccagctccaaaaaataatgcaaataacattaaaccaatgattactataaaagaaaacggtactttgtttgacacggtgaaacccccattaataatattcttc

SEQ ID NO: 199 - DNA, 1577 bp, Priestia aryabhattai
  source 1..1577: mol_type = genomic DNA
gaagtcagaccgtaaggactggtggagcgcttagaagtgagaatgccggtatgagtagcgaaagacaagtgagaatcttgtccaccgaatgcctaaggtttcctgaggaaggctcgtccgctcagggttagtcgggacctaagccgaggctgaaaagcgtaggcgatggccaacaggttgatattcctgtaccacctccccgccgtttgagtaatggggggacgcagtaggatagggtaagcgcgctgctggatatgcgcgttcaagcagttaggctgatgagtaggcaaatccgctcatcataaaggctgagctgtgatgacgagggaattatagtaccgaagttcctgattccacactgccaagaaaagcctctagcgaggcgggaggtgcccgtaccgcaaaccgacacaggtaggcgaggagagaatcctaaggtgatcgagagaactctcgttaaggaactcggcaaaatgaccccgtaacttcgggagaaggggtgctctggtagggtgtatagcccgagagagccgcagtgaataggcccaggcgactgtttagcaaaaacacaggtctctgcgaagccgcaaggcgaagtataggggctgacgcctgcccggtgctggaaggttaagaggaggggttatcctttgggagaagctctgaatcgaagccccagtaaacggcggccgtaactataacggtcctaaggtagcgaaattccttgtcgggtaagttccgacccgcacgaaaggcgtaacgatctgggcactgtctcaacgagagactcggtgaaattatagtacctgtgaagatgcaggttacccgcgacaggacggaaagaccccgtggagctttactgtagcctgatattgaattttggtacagcttgtacaggataggtaggagcctgagaagccggagcgctagcttcggtggaggcgtcggtgggatactaccctggctgtattgaaattctaacccgcggccctgatcgggccgggagacagtgtcaggtgggcagtttgactggggcggtcgcctcctaaaatgtaacggaggcgcccaaaggttccctcagaatggttggaaatcattcgtagagtgtaaaggcacaagggagcttgactgcgagacctacaagtcgagcagggacgaaagtcgggcttagtgatccggtggttccgcatggaagggccatcgctcaacggataaaagctaccccggggataacaggcttatctcccccaagagtccacatcgacggggaggtttggcacctcgatgtcggctcatcgcatcctggggctgtagtcggtcccaagggttgggctgttcgcccattaaagcggtacgcgagctgggttcagaacgtcgtgagacagttcggtccctatccgtcgtgggcgtaggaaatttgagaggagctgtccttagtacgagaggaccgggatggacacaccgctggtgtaccagttgtcttgccaaaggcatcgctgggtagctatgtgtggacgggataagtgctgaaagcatctaagcatgaagcccccctcaagatgagatttcccatagcg

SEQ ID NO: 200 - DNA, 1577 bp, Priestia aryabhattai
  source 1..1577: mol_type = genomic DNA
ttcggagagtttgatcctggctcaggatgaacgctggcggcgtgcctaatacatgcaagtcgagcgaactgattagaagcttgcttctatgacgttagcggcggacgggtgagtaacacgtgggcaacctgcctgtaagactgggataacttcgggaaaccgaagctaataccggataggatcttctccttcatgggagatgattgaaagatggtttcggctatcacttacagatgggcccgcggtgcattagctagttggtgaggtaacggctcaccaaggcaacgatgcatagccgacctgagagggtgatcggccacactgggactgagacacggcccagactcctacgggaggcagcagtagggaatcttccgcaatggacgaaagtctgacggagcaacgccgcgtgagtgatgaaggctttcgggtcgtaaaactctgttgttagggaagaacaagtacgagagtaactgctcgtaccttgacggtacctaaccagaaagccacggctaactacgtgccagcagccgcggtaatacgtaggtggcaagcgttatccggaattattgggcgtaaagcgcgcgcaggcggtttcttaagtctgatgtgaaagcccacggctcaaccgtggagggtcattggaaactggggaacttgagtgcagaagagaaaagcggaattccacgtgtagcggtgaaatgcgtagagatgtggaggaacaccagtggcgaaggcggctttttggtctgtaactgacgctgaggcgcgaaagcgtggggagcaaacaggattagataccctggtagtccacgccgtaaacgatgagtgctaagtgttagagggtttccgccctttagtgctgcagctaacgcattaagcactccgcctggggagtacggtcgcaagactgaaactcaaaggaattgacgggggcccgcacaagcggtggagcatgtggtttaattcgaagcaacgcgaagaaccttaccaggtcttgacatcctctgacaactctagagatagagcgttccccttcgggggacagagtgacaggtggtgcatggttgtcgtcagctcgtgtcgtgagatgttgggttaagtcccgcaacgagcgcaacccttgatcttagttgccagcatttagttgggcactctaaggtgactgccggtgacaaaccggaggaaggtggggatgacgtcaaatcatcatgccccttatgacctgggctacacacgtgctacaatggatggtacaaagggctgcaagaccgcgaggtcaagccaatcccataaaaccattctcagttcggattgtaggctgcaactcgcctacatgaagctggaatcgctagtaatcgcggatcagcatgccgcggtgaatacgttcccgggccttgtacacaccgcccgtcacaccacgagagtttgtaacacccgaagtcggtggagtaaccgtaaggagctagccgcctaaggtgggacagatgattggggtgaagtcgtaacaaggtagccgtatcggaaggtgcggctggatcacctcctttctaaggatttttacatgacgtacgttt

SEQ ID NO: 201 - DNA, 1543 bp, Priestia aryabhattai
  source 1..1543: mol_type = genomic DNA
tttctgtttctaaatttgcaaacttaggtgattgaagaaggtggtttaaaaagatttcaagtgcaggactaaagttacttgaatatatcttatgccttcatttccctttaggtaacttgcctattagaaataaaattttattttttgagcaaactactcacgacgttataaggcatcaagaatccccgttcttttaataaaaaaaactactggttccctccgttccagtagtttttttatttttaagctgtacttatttagtagctactaccactaaaacaagaacaaccaatgataactaataaaataaagagtacaacaattaaagcaaaactactaccaaaaccagagcctccacttgaaacacatccagagcctccaccgtaaccgtatccgccattaaaacctccgaaacaacacatattcttcacccccatacgtttctacttttagaatatgtacaagaaggaaaagtgttcgtcccaaactggtaaaagtagaatgatccacgcctgaccaatttctatgtctttattaatatcttaagaaacctatataaagagacctgttacttgggcggtgttagtaacaggtcctgagaaagaaatatgaaatgggatgtctttatgtgagacaaagatatactatgtaaaattagtaaaacggcttatactaatgtctataaaatgatcgaaaatataaattatttatccataaagaatatcatcgacttaattaggtttgaattttagatatataatagacctctttttcccttatatcttaaatgagtctagttaggcataatggatcccatatattaaaatacccttcattttgacaatgaagggattttgaaatattagcaccagggtctagggggacaactgggcacacaaaaatgttgatgtgtctcttgacatacaagggattccgtgtgtggaaatgaatgcatatatttataatttttttgataaacgtttgtagtatgactagggtgtacaactggcacaaatacgtcttgaccagtaaaggatgtattgtgattaactgggtcgtactgagcaggcattgattgaggaggtagttgactacaattaggtacaggataaccgcaatgactttgttgggaatacagggatccctgatgactaccataatgagaatgatgatatggataattatttctcataataaaaatcttctcctttcgattaaatagactcttattactgtatgtcaaataactataaaaagtttggacaaatacctaaaaaagaccctaatttcctaatgccttttcgatcaggagaaaaagggcttaccaaccttcactaatgttcaccatactcatcttcccctagcagtgttctgagtcgtgcactaaccctccgtttccgcattcccgcatgcaatccacgagcccgttaccaggcccgcatttttggacggggatagtttttgcgtctaaaccagtggcgtaagccacactatataaaagcgacttcttatcgcaccataatggattttataggaaataggc

SEQ ID NO: 202 - DNA, 1500 bp, Priestia aryabhattai
  source 1..1500: mol_type = genomic DNA
gagaacaaagtacagggagccatagaggtcccaataacacaccctttatggtaaatgttgaagaatacatgactccgactgtaacaaagtaggcggaaaatacgaatagaagaaaagtcaaaggagaatttgcttcattagtatctttataagcgtcccacatagaaaaaaagtaaagacatgggtaaaacattagccattgataattcgtttgttcaatagcctcatcaaccattccttgaaaacttagcaataaaatcgtatttaaatgtgattgaatattgatggttattgctaatccgataaatagaataccctttagtagtcttccgtttaaaagttgaggaagacctggcatggctatactccaaaaaatactttctaccttacttttggtcatttgtcattcacttctacttttaattttttagagggttaatttatgtaccatatgattttactatgtctattccttaatcaatctagatcgattttccgtttgtggtggttcctctagccagccattcttaatcataattttaactccctcatcagcatagaagtaaatgtccttggcaattaacgcatttttcatagatagatcttttcgcaaactaaagatcgttccgaagctgcttccaacgatcccaaaaccatttagaaggtaaatgcaaaacatcatcagtttttgtgaaaagggagcgattgtagaagctgttacggtacttccagaagtagcagaaaactgaatatcactttcaagaagaatatctccaaatatctttatttgcttcttagcaagctcttttcccttagaaaaatattgttttacctctttattttctgcacattgcgcaaaaccagtaatcagttgcatgccaatattatttgtctcaattccatgatgaagataacctagttcaatatcatttaaggccctcttctcattgaaagggttgaatccacttaaatagctttgcccttcaataaactcagtagatttaggcattgtaactttaggtggcagagtaagaactcctttttcaagtagataaagggtagctgatttatatattttttgagtggtagaagtgagcccttcataaatttccataatttcatcttgataggccatattcatattaagcgtatacatccccatgctaatctcctttagaatacgtacaaacataatgtcaaatccattgtcatataacttaggagcttctagattcacgtcggaagtagtgaatccaacgggaatagcagcaccttgttcattaaaaatgttctttattttcgtgacgtaatagcttagttcttgccatagtccccccagtatatttttagcttgttggtcgtcagctttttctataaaatactctaatattcttaaaatcatggttttttcttggtatgtaagccacagcatacctagttcggaagcgctgatcgtttttttattttccatacgtatttactacctccatttcattattt

SEQ ID NO: 203 - DNA, 1414 bp, Priestia aryabhattai
  source 1..1414: mol_type = genomic DNA
ataattgagatataacactattggccacttcatccgtaatttcgcctgttaacataataattctgtccttgagtaagcgagagtaaatgtcataagaacgttcgccacggcttgtttgctccactacatatgggattaagttcattctttgtcctcctgtacttagctttaaatcatctttccttactaattcatttacaaggtttgttacctctttattaagaggtatttcatatacttcgttctcatcaactaggggaatatctattgattgctgtatagattttttaattcgatcacttccctcaaagtgaacagaaacagataaagtttctactaattctggattaaatgtttccgtgtttaattcaaaaagaatagattccttttgaattaaacgatttactattaaatctccctcctcattctcctttagttgattaaaattgaagcctttagaacaataagaagaatgatgtatttcgattttgtgaacatatttcctttcattccattggagatgaagcagtacatagttaagcccttcttcattctccattttttcttttgctaacttaatttccattatgattgtctccattaggaaagagttgtgaaactgattgaataaccttttgtttcatagatggagaaaggtttgtatccaacgttatagctacactgttatttattagatgagtttcttgatgaaggacattctcagagttaataaactctaattgatgagctacacgttcaatatcttcaaaggaaagattttttaatacattatgaatattgcctaacgtctctccagttcttgtaagtgtaagaatggctttaccatatattaaatgtttatctgtatagacacgcttgtttccaacaagctctaagggagggagtaaacttaactgtgtatagtaacgaattgtgcgtaatttaagagtaggatcgtactcttgaagcatttcagttaactcgtttgctgtgtatatattcatataaacctcctttacattacgatgtaatagttacactttactgtcacacatttatcttactatttattccatataatttcaattaatatccaaaattaaaacccattcttttaaagaatgggtttgatttatatcgtttcctagaatcgtgattatgtaaattaaaacactttatttatccataaatgttattatttagattatacatttataagtactaagaaggagatattgatattaaatgagcagttttaagaagatactgattggcattattatggtcttaatattactctatattggagctcaagttgttatgactagtatagattgaattctagtaaaattcttgtataacaggagaaaagcatctaattattagatgctttttttggtgcctagaatacgtt

SEQ ID NO: 204 - DNA, 1408 bp, Priestia aryabhattai
  source 1..1408: mol_type = genomic DNA
tatgtaaagatgccttgttgaaaatgtcataaatctattttctttccactgacatacattctcttatatatagttattttcctttttcattcaaccactacccttcatttgttaaacaaataaaaactatatatttttacattagaagaaaatatttttgtttatttaaagggatttttggttcctgtaactgtgattatgttaactacttttgtatatggtatacaatgagtattaaagattaataatacggcttttagggggaataaagggtgctgaatttatatttagttaggcatggccaaacagaatggaacgttcaaaaaaggatgcagggatgggagaactctaatttaaccgaactgggcaaaagaaatgcaatagctttgggagaaaaattgaaagctgtaacatttgatgctgtgtatactagtacaagtgaaagaaccattgaaacagcaaaacttattatgggtaaacagaatttacatattgaatcagataaaaatctaagagaaatatttcttggcgaatgggaaggaaaaacgcatgaagagctaagggctttatatcctgagcagtataataatttttgggaacaaccagcagattataagccatttaacggtgaaacctttgaggaattcaataagagggttattgttgtgttacaaaatattatttctaatcataaggagggaaatgtcttaattgtaagtcattcggtgtttttaaagtctttaatgatgtatgtcaaaggcaaagaggttaaagatttatgggcgccaccttatgtaaatgatactagtcttacgatattagagatagaagacaatacatataaggtagtagttgaaggagatgtgacacatctagattctataaagccaatttagttttgctatcagaaatgtgttttatgctactattaacaatattgggttggggaaatatggagttttatattggatcaagttttaaaaacatagataacgttagatatcttagggataagttaaaagaaattggtttaacacatacatatgattggacccaaaatcaacgagcatcaactgttaatcaattaagagaaataggtcaaagtgaaaaagctgctgtaatagaatctgattttgtcataattttattaccagcaggaaaaggaagtcatattgagttaggtatggcgcttggtcagaataagaaagtttatcttcatttatcaactggagaaatagagaactttgaaacaactagtacgttttatcacctgcctgaagctgagagttgtaaaggaactttagatgatttaacagagatgatcaaatctcaattattgatgtaagtgtttatgtagaaaaagcatagtaaccttgctatgctttttctattgttcctagaattcaca

SEQ ID NO: 205 - DNA, 1263 bp, Priestia aryabhattai
  source 1..1263: mol_type = genomic DNA
aagatgtcaatccacagcttcggtgatacgtttagccccggtacattttcggcgcagagtcactcgaccagtgagctattacgcactctttaaatggtggctgcttctaagccaacatcctggttgtctaagcaactccacatccttttccacttaacgtatacttggggaccttagctggtggtctgggctgtttcccttttgactacggatcttatcactcgcagtctgactcccatggataagtctttggcattcggagtttgactgaattcggtaacccgttgggggcccctagtccaatcagtgctctacctccaagactcttacaacatgaggctagccctaaagctatttcggagagaaccagctatctccaggttcgattggaatttctccgctacccacacctcatccccgcacttttcaacgtgcgtgggttcgggcctccattcagtgttacctgaacttcaccctggacatgggtagatcacctggtttcgggtctacaaccacatactaaacgccctattcagactcgctttcgctacggctccgccttatcagcttaaccttgcatgggatcgtaactcgccggttcattctacaaaaggcacgccatcacccgttaacgggctctgactacttgtaggcacacggtttcaggatctctttcactccccttccggggtgcttttcacctttccctcacggtactggttcactatcggtcactaggtagtatttagccttgggagatggtcctcccagcttccgacggaatttcacgtgttccgccgtactcaggatccactcaagagggaacgaagtttcaactacagggttgttaccttcttcgacggacctttccaggtcgcttcatttacttcgttcctttgtaactccgtatagagtgtcctacaaccccaagaggcaagcctcttggtttgggctaattccgtttcgctcgccgctactcaggaaatcgcatttgctttctcttcctccgggtacttagatgtttcagttccccgggtctgccttcaatatcctatgtattcagataaagatactgctccattacgaacagtgggtttccccattcggaaatctccggatcaaagctcacttacagctccccgaagcatatcggtgttagtcccgtccttcatcggctcctagtgccaaggcattcaccgtgcgccctttctaacttaaccattagcgaataaatggtacaacataatgttgtgttatttattg

SEQ ID NO: 206 - DNA, 1221 bp, Priestia aryabhattai
  source 1..1221: mol_type = genomic DNA
taattggtttattagttggattagtaataaaaaagggaattatctctacaaaaaaaaactagatattacatacaattttatgaacgaagtcgtgattcgttagatactatgtagctattgtagtaagcttgcctgtctactcgaaaaatataaaaaacccttgctgcactaggtgaggagtaggtattgatgtaagataatctcgatttttatatgttgggggttgttctagtggtttatttttttatgaaatagacaagaaatcgcaagatgtcctccatctaagagtgaagctaaacagcatagctttacttgaagtacatatttcgtaatcttattttcttggataaatgattattaggtttcatataaaaaagggaacacctgctaaccaggaagttccctttttatctcgccagataaaaatacatcaaaacaaagattaaagaaataggctacggtggggggcaaagtttttttcaaccgaccactgctacatgatctataggagttgcattgaataaatagggctagctatcagcaccttcgactaaaatgttgtattcgcagctccaccatactactccagaattaatcataactcctcaataacctaacctctataaacactagcacatgtatcaggttttggttcataataacaatgatttttaaattgaccagatgcaggttgaccgtaccatgttggagggcacggagcatgtggattaaaataccaaagagcaaatttcgctgggtgttgtctccaataatccaaattctgctttgctaatcttttttcaacacctctcgctctttgataaaatacattgcctttttgaacagcttcaaacgaataattccccccctgtacttgataaatgacttgtgaaacggttcttaaatttttaaagtctatacaatttgctgcaagacgattaacaattacatttccaacatataacatccctagtcttccttcaccttcagcttctgctcgcatcatccttgccattaagttaatgtctgcacttcggtaacttactcttcccatttactcacccccaaaatatagtatgaaaaaaagcctatattgatgtcattgtttataagatagcactgcttagtttttacatatcatcgcgcatatttaatcattacccttaaataaatagacactgattaccaaacgaaatagttattcttttgatactaattaga

SEQ ID NO: 207 - DNA, 1210 bp, Priestia aryabhattai
  source 1..1210: mol_type = genomic DNA
aaggacagacaaagtaaaaaaacttaagttctgttctatggtttttgctatttcttttttgaagaacgataaaccaaaaaggcaaacattgatagcaataacacaatcactatcagaacaaaccacaaagtggcataagataaatatttatataacatatcatattcattcgcaagagcagtgtgaaataaatatgtatatagctcttcatatttagtcatagcaatcatctcactatttagatcttttattagtattagctgaaaacaaatagaaatatgtaattatttagttctcatttactttagtgattttaaattaggattaaattaaatactattcctttccttctttgtaaaacctgagacatatggttccccatgccgctatccatcctcctttcctttttctttagacgttgagacatctttcgatctgtcgtccatttcatgaaaaataaaggccaatagtccaacccctagcatataaaaaaagagaacatgttccgttatcatttacttatcacctactgcagtagaatacccagcacgtgaaaccttggcgatgcatacgagccaagtaattattggtatgcaaccattttgtatatatgagcatactaacaaggtaaaagggaggtttaaaacaatgacaaagcaaacaaaaaaaggtggaagtagtacgaagcaaaataaaaaaagccatccaaaacacaaaacgagcaacagccaaaatggacaaaatggttatcattaagcatatatgataaacaaaaacagcctaacatattaaggactctttcgcttgcttggtttcgaaagaagtgattatgtgaactagatctgtataccgtatacagatctagttcacatataagtttgtttacacttatataaattgttcattcaatatttttgaaatatggggtcttacatctcctctaaaattcccctgtggtagcaaattactgcttcaatgtcgtaattcaagaatttttttaaggttctgtagctgtgtttatatcgaaagtagtctgtttaacaggcccgagaagctgctgccactgattctccttacattgtactttagtcgttggtacaactttcgatttctcgtccatttcataaaaaatataggccactagaccaaccctcagcatataaaaaagagcacatattccatgaccatctaaagatcacctactgcggta

SEQ ID NO: 208 - DNA, 1205 bp, Priestia aryabhattai
  source 1..1205: mol_type = genomic DNA
cttttgtagtggggaatcacaatttacaggaaagaacgaatgttatagatgtgtttttacaaaatatcgatccgattgccgttgaaaaaaatagataaaatcgagaaagaaaagaacatttctcgccaggaatatttaaaagtcggcttaaaaaggaaggaggtactgagagagataaaagataatgataaagggagaagagagaaatcataaaatggatttacgaagtttttcacacggaatagtagagcacaattttaaaaaaacggagtacagcactagaagtggaacgttaaaaaaagcaaaagtttaaaggcgaagtgaagaatgaaaagtctacttttttatatttggaaggtagaaggaggaagaagcagcaagcgatcgaaagctgttcctatgattcctctttttaatgattggttgagatagcttatgtaacacaaacgggatgcaaacgattatacatcccgtcatgtgaagaaggaaaaagtagctttcaatgcagcaaatgatctttaaggaacacttcatttacgtaattccattgcctaatgaaacagtaacttgaaaaagtatattctctttaacaaacacctcatttaagcattgaactaaaaaatatacaatgtgaacgaaatcgttcttggtctggaacaaacacctcatttgtatagttataaatgaacattattgtctacccattatatatattcttactacgtccatgactaccatccccttatgaatcaaacatacatcgatttacaataaggttttctgaaatatgcctgctgtagacacctcatcccaaatgtaagaagctttgtaatgattagtttaatcaataacttgctttccttcttccttatatagaatgtctcaatagtctatttataatccagtaaagctaatagggattttttgggttgcacgcactttttatttacaaggtagtttaactaatgaagtcttatatatagaaattagttttattgattaatgactaataaaatttttgctaaaaggataatgaaataaataaaatatttttagaaaatatgttgactttttagtaagtatattttattattataaagcgtcgttgagatacaccagtaacaacgaagagaaaaaagattttttaaaaagttgttgacattaagttgataacttgatatgatagcaaagttgcttaagagcga

SEQ ID NO: 209 - DNA, 1035 bp, Priestia aryabhattai
  source 1..1035: mol_type = genomic DNA
tggcttgatatacttcatttattaaatctttagatcctgctaatacaatcttagctgtacgaggtttggtaacaacgaggtaagctaggccacttttatgactccaagtcttgaaaactgtgtagcgctgttcggctgcttagtcagctaacttagcaggatagtagacaacatcattacacggcgtaggtaaagcaactaattctttggtgaacgtagattgagttacaccttttgttatcaccttcatcacctcttctatattagatttaacttatggttctttatactaccatctttttagcagttgtaaaaatagtaaaggtaccatctatataatttactatttgttaattgctcgtgtagtgatgacttctacagacccaggcacccgtcacaaaaataatcatgtttgcgatattacatggtaaaaacttatataatgaaaagagcctttaccatcaaggtcaaggctcctcctattatttgctcttatcggttctttttactatcttcatctttatgttaaattaaggtctatgaaaattgaccgttttctcgtcatctcctgtgcgttcaaaccagcctctcatcgcccaattatcatagcctccatcaccttcattaataaatgttccttcttcaaatacccagactccatacgtaatgccatcgtaatctacggtatcaaagtattgtacaccttgtaattgatctgaattataaccttgactcaaattcatcaccattacattatattgttgacccgattcaaagaatgctttttccatcgctcccttgacgaacccacttcggttatcagctgatttttttgcgtcatcaatggcctgtccaatcgctacaggatcaacggtgacttctcctccaatctctgctgcttgtgccgaaccagtatcatctcctaaagatggtagagttaggggtgtcgctaacacagctaaccctaatgcagaagccacagcagcttgtttcgcttttctcattctatctcctcctcatttttagatgatcctt

SEQ ID NO: 210 - DNA, 997 bp, Priestia aryabhattai
  source 1..997: mol_type = genomic DNA
actaaggatactcctgttattatgctcacggctaaggatagcgtcatggatagggtaatggggcttgataatggagctgacgattatttgtcgaaaccatttgcaattgaagaattatttgcaagaatgagagtcatttttagacgtcaagaaaacaacaagatcttagatcaaaagctattattaacatttaaagatattgaacttgatttggaatcaagaacggtgataaaagagaaaatgctgattgaactcacgaacaaagaatttgagcttctagctattttcatgcgtaacgttaataaagtattaacgagagatatgcttttagaacaagtgtgggggtacgattcagttgttgaaacgaacgttgtagatgtatatgttagatatttaagaaataaattaagtgcagaggacaaagagttatatattcaaaccgttagaggggtcggatacgtgatgcgtgaatgagaaaagggataaaatatataaaagatttacctataagatggaagataactttatggtcttccatgtttttattttttctttttctttcttataatgtctttcaatatattgtgattaataatggcattttaaattatgaaaagcaaaatggtattcatcaattaaaagaggttctcgcttttattcaatctgatgatgaacctttatctttaaaacaaatcaaaaacagtaaagggtacttaacgaaaattaatgaaaagaatcagttgattcgtgttcttgatatgaaagggaacgtcataaccagcacatcaaataatgtttcaccaaactggcagcaaccgaaaacggtgaagcaccaagagtataaagtgattcgaaaccacgatgaacgtctactcgttctccgttctccaatcgtcaccgacaacttcactggaactgttgaaattattagaaatatggagatgtccgatgcttttatggataaggtgtttttattaatgcttgctgcaggagtagg
